United States Patent Application Publication US 2025/0311734 A1 - sequence listing, part 7

SEQ ID NO: 27880 - protein, 485 aa, Bacillus sp.
HHNGTNGTMMQYFEWYLPNDGNHWNRLNSDASNLKSKGITAVWIPPAWKGASQNDVGYGAYDLYDLGEFNQKGTVRTKYGTRSQLQAAVTSLKNNGIQVYGDVVMNHKGGADATEMVRAVEVNPNNRNQEVTGEYTIEAWTRFDFPGRGNTHSSFKWRWYHFDGVDWDQSRKLNNRIYKFRGHGKAWDWEVDTEFGNYDYLMYVDYDMDHPEVVNELRNWGVWYTNTLGLDGFRIDAVKHIKYSFTRDWINHVRSATGKNMFAVAEFWKNDLGAIENYLQKTNWNHSVFDVPLHYNLYNASKSGGNYDMRNIFNGTVVQAHPNHAVTFVDNHDSQPEEALESFVEEWFKPLAYALTLTREQGYPSVFYGDYYGIPTHGVPAMRSKIDPILEARQKYAYGPQHDYLDHPDVIGWTREGDSSHPKSGLATLITDGPGGSKRMYAGLKNAGETWYDITGNRSDTVKIGSDGWGEFHVNDGSVSIYVQK

SEQ ID NO: 27881 - protein, 485 aa, Bacillus sp.
HHNGTNGTMMQYFEWYLPNDGNHWNRLNSDASNLKSKGITAVWIPPAWKGASQNDVGYGAYDLYDLGEFNQKGTVRTKYGTRSQLQAAVTSLKNNGIQVYGDVVMNHKGGADATEMVRAVEVNPNNRNQEVTGEYTIEAWTRFDFPGRGNTHSSFKWRWYHFDGVDWDQSRRLNNRIYKFRGHGKAWDWEVDTEFGNYDYLMYADYDMDHPEVVNELRNWGVWYTNTLGLDGFRIDAVKHIKYSFTRDWINHVRSATGKNMFAVAEFWKNDLGAIENYLQKTNWNHSVFDVPLHYNLYNASKSGGNYDMRNIFNGTVVQRHPSHAVTFVDNHDSQPEEALESFVEEWFKPCAYALTLTREQGYPSVFYGDYYGIPTHGVPAMRSKIDPILEARQKYAYGPQHDYLDHPDVIGWTREGDSSHPKSGLATLITDGPGGSKRMYAGLKNAGETWYDITGNRSDTVKIGSDGWGEFHVNDGSVSIYVQK

SEQ ID NO: 27882 - protein, 485 aa, Bacillus sp.
HHNGTNQTMMQYFEWYLPNDGNHWNRLNSDASNLKSKGITAVWIPPAWKGASQNDVGYGAYDLYDLGEFNQKGTVRTKYGTRSQLQAAVTSLKNNGIQVYGDVVMNHKGGADATEMVRAVEVNPNNRNQEVTGEYTIEAWTRFDFPGRGNTHSSFKWRWYHFDGVDWDQSRRLNNRIYKFRGHGKAWDWEVDTEFGNYDYLMYADYDMDHPEVVNELRNWGVWYTNTLGLDGFRIDAVKHIKYSFTRDWINHVRSATGKNMFAVAEFWKNDLGAIENYLQKTNWNHSVFDVPLHYNLYNASKSGGNYDMRNIFNGTVVQAHPRHAVTFVDNHDSQPEEALESFVEEWFKPLAYALTLTREQGYPSVFYGDYYGIPTHGVPAMRSKIDPILEARQKYAYGPQHDYLDHPDVIGWTREGDSSHPKSGLATLITDGPGGSKRMYAGLKNAGETWYDITGNRSDTVKIGSDGWGEFHVNDGSVSIYVQK

SEQ ID NO: 27883 - protein, 483 aa, Bacillus sp.
HHNGTNGTMMQYFEWYLPNDGNHWNRLNSDASNLKSKGITAVWIPPAWKGASQNDVGYGAYDLYDLGEFNQKGTVRTKYGTRSQLQAAVTSLKNNGIQVYGDVVMNHKGGADATEMVRAVEVNPNNRNQEVTGEYTIEAWTRFDFPGRGNTHSSFKWRWYHFDGVDWDQSRELDNRIYKFRGKAWDWEVDTEFGNYDYLMYTDYDMDHPEVVNELRNWGVWYTNTLGLDGFRIDAVKHIKYSFTRDWINHVRSATGKNMFAVAEFWKNDLGAIENYLQKTNWNHSVFDVPLHYNLYNASKSGGNYDMRNIFNGTVVQRHPSHAVTFVDNHDSQPEEALESFVEEWFKPLAYALTLTREQGYPSVFYGDYYGIPTHGVPAMRSKIDPILEARQKYAYGPQHDYLDHPDVIGWTREGDSSHPKSGLATLITDGPGGSKRMYAGLKNAGETWYDITGNRSDTVKIGSDGWGEFHVNDGSVSIYVQK

SEQ ID NO: 27884 - protein, 485 aa, Bacillus sp.
HHNVTNGTMMQYFEWYLPNDGNHWNRLNSDASNLKSKGITAVWIPPAWKGASQNDVGYGAYDLYDLGEFNQKGTVRTKYGTRSQLQAAVTSLKNNGIQVYGDVVMNHKGGADATEMVRAVEVNPNNRNQEVTGDYTIEAWTRFDFPGRGNTHSSFKWRWYHFDGVDWDQSRRLNNRIYLFRGHGKAWDWEVDTEFGNYDYLMYADYDMDHPEVVNELRNWGVWYTNTLGLDGFRIDAVKHIKYSFTRDWINHVRSATGKNMFAVAEFWKNDLGAIENYLQKTNWNHSVFDVPLHYNLYNASKSGGNYDMRNIFNGTVVQRHPSHAVTFVDNHDSQPEEALESFVEEWFKPLAYALTLTREQGYPSVFYGDYYGIPTHGVPAMRSKIDPILEARQKYAYGPQHDYLDHPDVIGWTREGDSSHPKSGLATLITDGPGGSKRMYAGLKNAGETWYDITGNRSDTVKIGSDGWGEFHVNDGSVSIYVQK

SEQ ID NO: 27885 - protein, 485 aa, Bacillus sp.
HHNGTNGTMMQYFEWYLPNDGNHWNRLNSDASNLKSKGITAVWIPPAWKGASQNDVGYGAYDLYDLGEFNQKGTVRTKYGTRSQLQAAVTSLKNNGIQVYGDVVMNHKGGADATEMVRAVEVNPNNRNQEVTGEYTIEAWTRFDFPGRGNTHSSFKWRWYHFDGVDWDQSRRLNNRIYKFRGHGKAWDWEVDTEFGNYDYLMYADYDMDHPEVVNELRNWGVWYTNTLGLDGFRIDAVKHIKYSFTRDWINHVRSATGKNMFAVAEFWKNDLGAIENYLQKTNWNHSVFDVPLHYNLYNASKSGGNYDMRNIFNGTVVQRHPSHAVTFVDNHDSQPEEALESFVETWFKPLAYALTLTREQGYPSVFYGDYYGIPTHGVPAMRSKIDPILEARQKYAYGPQHDYLDHPDVIGWTREGDSSHPKSGLATLITDGPGGSKRMYAGLKNAGETWYDITGNRSDTVKIGSDGWGEFHVNKGSVSIYVQK

SEQ ID NO: 27886 - protein, 483 aa, Bacillus sp.
HHNGTNGTMMQYFEWYLPNDGNHWNRLNSDASNLKSKGITAVWIPPAWKGASQNDVGYGAYDLYDLGEFNQKGTVRTKYGTRSQLQAAVTSLKNNGIQVYGDVVMNHKGGADATEMVRAVEVNPNNRNQEVTGEYTIEAWTRFDFPGRGNTHSSFKWRWYHFDGVDWDQSRRLNNRIYKFRGKAWDWEVDTEFGNYDYLMYADYDMDHPEVVNELRNWGVWYTNTLGLDGFRIDAVKHIKYSFTRDWINHVRSATGKNMFAVAEFWKNDLGAIENYLQKTNWNHSVFDVPLHYNLYNASKSGGNYDMRNIFNGTVVQRHPSHAVTFVDNHDSQPEEALESFVEEWFMPLAYALTLTREQGYPSVFYGDYYGIPTHGVPAMRSKIDPILEARQKYAYGPQHDYLDHPDVIGWTREGDSSHPKSGLATLITDGPGGSKRMYAGLKNAGETWYDITGNRSDTVKIGSDGWGEFHVNDGSVSIYVQK

SEQ ID NO: 27887 - protein, 483 aa, Bacillus sp.
HHNGTNGTMMQYFEWYLPNDGNHWNRLNSDASNLKSKGITAVWIPPAWKGASQNDVGYGAYDLYDLGEFNQKGTVRTKYGTRSQLQAAVTSLKNNGIQVYGDVVMNHKGGADATEMVRAVEVNPNNRNQEVTGEYTIEAWTRFDFPGRGNTHSSFKWRWYHFDGVDWDQSRRLTNRIYKFRGKAWDWEVDTEFGNYDYLMYTDYDMDHPEVVNELRNWGVWYTNTLGLDGFRIDAVKHIKYSFTRDWINHVRSATGKNMFAVAEFWKNDLGAIENYLQKTNWNHSVFDVPLHYNLYNASKSGGNYDMRNIFNGTVVQRHPSHAVTFVDNHDSQPEEALESFVEEWFKPLAYALTLTREQGYPSVFYGDYYGIPTHGVPAMRSKIDPILEARQKYAYGPQHDYLDHPDVIGWTREGDSSHPKSGLATLITDGPGGSKRMYAGLKNAGETWYDITGNRSDTVKIGSDGWGEFHVNDGSVSIYVQK

SEQ ID NO: 27888 - protein, 485 aa, Synthetic construct
HHNGTNGTMMQYFEWYLPNDGNHWNRLNSDASNLKSKGITAVWIPPAWKGASQNDVGYGAYDLYDLGEFNQKGTVRTKYGTRSQLQAAVTSLKNNGIQVYGDVVMNHKGGADATEMVRAVEVNPNNRNQEVTGEYTIEAWTRFDFPGRGNTHSSFKWRWYHFDGVDWDQSRRLNNRIYKFRGHGKAWDWEVDTENGNYDYLMYADYDFDHPEVVNEHRNWGVWYTNTLGLDGFRIDAVKHIKYSFTRDWINHVRSATGKNMFAVAEFWKNDLGAIENYLQKTNWNHSVFDVPLHYNLYNASKSGGNYDMRNIFNGTVVQRHPSHAVTFVDNHDSQPEEALESFVEEWFKPLAYALTLTREQGYPSVFYGDYYGIPTHGVPAMRSKIDPILEARQKYAYGPQHDYLDHPDVIGWTREGDSSHPKSGLATLITDGPGGSKRMYAGLKNAGETWYDITGNRSDTVKIGSDGWGEFHVNDGSVSIYVQK

SEQ ID NO: 27889 - protein, 483 aa, Bacillus sp.
HHNGTNGTMMQYFEWYLPNDGNHWNRLNSDASNLKSKGITAVWIPPAWKAASQNDVGYGAYDLYDLGEFNQKGTVRTKYGTRSQLQAAVTSLKNNGIQVYGDVVMNHKGGADATEMVRAVEVNPNNRNQEVTGEYTIEAWTRFDFPGRGNTHSSFKWRWYHFDGVDWDQSRRFNNRIYKFRGKAWDWEVDTEFGNYDYLMYVDYDMDHPEVVNELRNWGVWYTNTLGLDGFRIDAVKHIKYSFTRDWINHVRSATGKNMFAVAEFWKNDLGAIENYLQKTNWNHSVFDVPLHYNLYNASKSGGNYDMRNIFNGTVVQRHPSHAVTFVDNHDSQPEEALESFVEEWFKPLAYALTLTREQGYPSVFYGDYYGIPTHGVPAMRSKIDPILEARQKYAYGPQHDYLDHPDVIGWTREGDSSHPKSGLATLITDGPGGSKRMYAGLKNAGETWYDITGNRSDTVKIGSDGWGEFHVNDGSVSIYVQK

SEQ ID NO: 27890 - protein, 483 aa, Bacillus sp.
HHNGTNGTMMQYFEWYLPNDGNHWNRLNSDASNLKSKGITAVWIPPAWKGASQNDVGYGAYDLYDLGEFNQKGTVRTKYGTRSQLQAAVTSLKNNGIQVYGDVVMNHKGGADATEMVRAVEVNPNNRNQEVTGEYTIEAWTRFDFPGRGNTHSSFKWRWYHFDGVDWDQSRRLNNRIYKFRGKAWDWEVDTEFGNYDYLMMADYDMDHPEVVNELRNWGVWYTNTLGLDGFRIDAVKHIKYSFTRDWINHVRSATGKNMFAVAEFWKNDLGAIENYLQKTNWNHSVFDVPLHYNLYNASKSGGNYDMRNIFNGTVVQRHPSHAVTFVDNHDSQPEEALESFVEEWFKPLAYALTLTREQGYPSVFYGDYYGIPTHGVPAMRSKIDPILEARQKYAYGPQHDYLDHPDVIGWTREGDSSHPKSGLATLITDGPGGSKRMYAGLKNAGETWYDITGNRSDTVKIGSDGWGEFHVNDGSVSIYVQK

SEQ ID NO: 27891 - protein, 485 aa, Bacillus sp.
HHNGTNGTMMQYFEWYLPNDGNHWNRLNSDASNLKSKGITAVWIPPAWKGASQNDVGYGAYDLYDLGEFNQKGTVRTKYGTRSQLQAAVTSLKNNGIQVYGDVVMNHKGGADATEMVRAVEVNPNNRNQEVTGEYTIEAWTRFDFPGRGNTHSSFKWRWYHFDGVDWDQSRNLTNRIYKFRGHGKAWDWEVDTEFGNYDYLMYVDYDMDHPEVVNELRNWGVWYTNTLGLDGFRIDAVKHIKYSFTRDWINHVRSATGKNMFAVAEFWKNDLGAIENYLQKTNWNHSVFDVPLHYNLYNASKSGGNYDMRNIFNGTVVQRHPSHAVTFVDNHDSQPEEALESFVEEWFKPLAYALTLTREQGYPSVFYGDYYGIPTHGVPAMRSKIDPILEARQKYAYGPQHDYLDHPDVIGWTREGDSSHPKSGLATLITDGPGGSKRMYAGLKNAGETWYDITGNRSDTVKIGSDGWGEFHVNDGSVSIYVQK

SEQ ID NO: 27892 - protein, 485 aa, Bacillus sp.
HHNGTNGTMMQYFEWYLPNDGNHWNRLNSDASNLKSKGITAVWIPPAWKGASQNDVGYGAYDLYDLGEFNQKGTVRTKYGTRSQLQAAVTSLKNNGIQVYGDVVMNHKGGADATEMVRAVEVNPNNRNQEVTGEYTIEAWTRFDFPGRGNTHSSFKWRWYHFDGVDWDQSERLNNRIYKFRGHGKAWDWEVDTEFGNYDYLMYADYDMDHPEVVNELRNWGVWYTNTLGLDGFRIDAVKHIKYSFTRDWINHVRSATGKNMFAVAEFWKNDLGAIENYLQKTNWNHSVFDVPLHYNLYNASKSGGNYDMRNIFNGTVVQRHPSHAVTFVDNHDSQPEEALESFVEEWFKPLAYALTLTREQGYPSVFYGDYYGIPTHGVPAMRSKIDPILEARQKYAYGPQHDYLDHPDVIGWTREGDSSHPPSGLATLITDGPGGSKRMYAGLKNAGETWYDITGNRSDTVKIGSDGWGEFHVNDGSVSIYVQK

SEQ ID NO: 27893 - protein, 485 aa, Bacillus sp.
HHNGTNGTMMQYFEWYLPNDGNHWNRLNSDASNLKSKGITAVWIPPAWKGASQNDVGYGAYDLYDLGEFNQKGTVRTKYGTRSQLQAAVTSLKNNGIQVYGDVVMNHKGGADATEMVRAVEVNPNNRNQEVTGEYTIEAWTRFDFPGRGNTHSSFKWRWYHFDGVDWDQSHRLNNRIYKFRGHGKAWDWEVDTEFGNYDYLMYADYDMDHPEVVNELRNWGVWYTNTLGLDGFRIDAVKHIKYSFTRDWINHVRSATGKNMFAVAEFWKNDLGAIENYLQKTNWNHSVFDVPLHYNLYNASKSGGNYDMRNIFNGTVVQRHPSHAVTFVDNHDSQPEEALESFVEEWFKPLAYALTLTREQGYPSVFYGDYYGIPTHGVPAMRSKIDPILEARQKYAYGPQHDYLDHPDVIGWTREGDSSHPKSGLATLITDGPGGSKRMYAGLKNAGETWYDITGNRSDTVKIGSDGWGEFHVNDGSVSIYVQK

SEQ ID NO: 27894 - protein, 483 aa, Bacillus sp.
HHNGTNGTMMQYFEWYLPNDGNHWNRLNSDASNLKSKGITAVWIPPAWKAASQNDVGYGAYDLYDLGEFNQKGTVRTKYGTRSQLQAAVTSLKNNGIQVYGDVVMNHKGGADLTEMVDAVEVNPNNRNQEVTGEYTIEAWTRFDFPGRGNTHSSFKWRWYHFDGVDWDQSRQLNNRIYKFRGKAWDWEVDTEFGNYDYLMYADYDMDHPEVVNELRNWGVWYTNTLGLDGFRIDAVKHIKYSFTRDWINHVRSATGKNMFAVAEFWKNDLGAIENYLQKTNWNHSVFDVPLHYNLYNASKSGGNYDMRNIFNGTVVQRHPSHAVTFVDNHDSQPEEALESFVEEWFKPLAYALTLTREQGYPSVFYGDYYGIPTHGVPAMRSKIDPILEARQKYAYGPQHDYLDHPDVIGWTREGDSSHPKSGLATLITDGPGGSKRMYAGLKNAGETWYDITGNRSDTVKIGSDGWGEFHVNDGSVSIYVQK

SEQ ID NO: 27895 - protein, 483 aa, Bacillus sp.
HHNGTNGTMMQYFEWYLPNDGNHWNRLNSDASNLKSKGITAVWIPPAWKGASQNDVGYGAYDLYDLGEFNQKGTVRTKYGTRSQLQAAVTSLKNNGIQVYGDVVMNHKGGADATEMVRAVEVNPNNRNQEVTGEYTIEAWTRFDFPGRGNTHSSFKWRWYHFDGVDWDQSRRLNNRIYKFRGKAWDWEVDTEFGNYDYLMYADYDMDHPEVVNELRNWGVWYTNTLGLDGFRIDAVKHIKYSFTRDWINHVRSATGKNMFAVAEFWKNDLGAIENYLQKTNWNHSVFDVPLHYNLYNASKSGGNYDMRNIFNGTVVQRAPSHAVTFVDNHDSQPEEALESFVEEWFKPLAYALTLTREQGYPSVFYGDYYGIPTHGVPAMRSKIDPILEARQKYAYGPQHDYLDHPDVIGWTREGDSSHPKSGLATLITDGPGGSKRMYAGLKNAGETWYDITGNRSDTVKIGSDGWGEFHVNDGSVSIYVQK

SEQ ID NO: 27896 - protein, 483 aa, Bacillus sp.
HHNGTNGTMMQYFEWYLPNDGNHWNRLNSDASNLKSKGITAVWIPPAWKGASQNDVGYGAYDLYDLGEFNQRGTVRTKYGTRSQLQAAVTSLKNNGIQVYGDVVMNHKGGADATEMVRAVEVNPNNRNQEVTGEYTIEAWTRFDFPGRGNTHSSFKWRWYHFDGVDWDQSRRLNNRIYKFRGKAWDWEVDTEFGNYDYLMYADYDMDHPEVVNELRNWGVWYTNTLGLDGFRIDAVKHIKYSFTRDWINHVRSATGKNMFAVAEFWKNDLGAIENYLQKTNWNHSVFDVPLHYNLYNASKSGGNYDMRNIFNGTVVQRHPSHAVTFVDNHDSQPEEALESFVEEWFKPLAYALTLTREQGYPSVFYGDYYGIPTHGVPAMRSKIDPILEARQKYAYGPQHDYLDHPDVIGWTREGDSSHPKSGLATLITDGPGGSKRMYAGLKNAGETWYDITGNRSDTVKIGSDGWGEFHVNDGSVSIYVQK

SEQ ID NO: 27897 - protein, 483 aa, Bacillus sp.
HHNGTNGTMMQYFEWYLPNDGNHWNRLNSDASNLKSKGITAVWIPPAWKGASQNDVGYGAYDLYDLGEFNQKGTVRTKYGTRSQLQAAVTSLKNNGIQVYGDVVMNHKGGADATEMVRAVEVNPNNRNQEVTGEYTIEAWTRFDFPGRGNTHSSFKWRWYHFDGVDWDQSRRLNNRIYKFRGKAWDWEVDTEFGNYDYLMYADYDMDHPEVVNELRNWGVWYTNTLGLDGFRIDAVKHIKYSFTRDWINHVRSATGKNMFAVAEFWKNDLGAIENYLQKTNWNHSVFDVPLHYNLYNASKSGGNYDMRNIFNGTVVQRHPSHAVTFVDNHDSQPEEALESFVETWFKPLAYALTLTREQGYPSVFYGDYYGIPTHGVPAMRSKIDPILEARQKYAYGPQHDYLDHPDVIGWTREGDSSHPKSGLATLITDGPGGSKRMYAGLKNAGETWYDITGNRSDTVKIGSDGWGEFHVNGQSVSIYVQK

SEQ ID NO: 27898 - protein, 485 aa, Bacillus sp.
HHNGTNGTMMQYFEWYLPNDGNHWNRLNSDASNLKSKGITAVWIPPAWKGASQNDVGYGAYDLYDLGEFNQKGTVRTKYGTRSQLQAAVTSLKNNGIQVYGDVVMNHKGGADATEMVRAVEVNPNNRNQEVTGEYTIEAWTRFDFPGRGNTHSSFKWRWYHFDGVDWDQSRDTDNRIYKFRGHGKAWDWEVDTEFGNYDYLMYTDYDMDHPEVVNELRNWGVWYTNTLGLDGFRIDAVKHIKYSFTRDWINHVRSATGKNMFAVAEFWKNDLGAIENYLQKTNWNHSVFDVPLHYNLYNASKSGGNYDMRNIFNGTVVQRHPSHAVTFVDNHDSQPEEALESFVEEWFKPLAYALTLTREQGYPSVFYGDYYGIPTHGVPAMRSKIDPILEARQKYAYGPQHDYLDHPDVIGWTREGDSSHPKSGLATLITDGPGGSKRMYAGLKNAGETWYDITGNRSDTVKIGSDGWGEFHVNDGSVSIYVQK

SEQ ID NO: 27899 - protein, 485 aa, Synthetic construct
HHNGTNGTMMQYFEWYLPNDGNHWNRLNSDASNLKSKGITAVWIPPAWKGASQNDVGYGAYDLYDLGEFNQKGTVRTKYGTRSQLQAAVTSLKNNGIQVYGDVVMNHKGGADATEMVRAVEVNPNNRNQEVTGEYTIEAWTRFDFPGRGNTHSSFKWRWYHFDGVDWDQSRRLNNRIYKFRGHGKAWDWEVDTEFGNYDYLMYADIDMDHPESVNELRNWGVWYTNTLGLDGFRIDAVKHIKYSFTRDWINHVRSATGKNMFAVAEFWKNDLGAIENYLQKTNWNHSVFDVPLHYNLYNASKSGGNYDMRNIFNGTVVQRHPSHAVTFVDNHDSQPEEALESFVEEWFKPLAYALTLTREQGYPSVFYGDYYGIPTHGVPAMRSKIDPILEARQKYAYGPQHDYLDHPDVIGWTREGDSSHPKSGLATLITDGPGGSKRMYAGLKNAGETWYDITGNRSDTVKIGSDGWGEFHVNDGSVSIYVQK

SEQ ID NO: 27900 - protein, 485 aa, Bacillus sp.
HHNGTNGTMMQYFEWYLPNDGNHWNRLNSDASNLKSKGITAVWIPPAWKGASQNDVGYGAYDLYDLGEFNQKGTIRTKYGTRSQLQAAVTSLKNNGIQVYGDVVMNHKGGADATEMVRAVEVNPNNRNQEVTGEYTIEAWTRFDFPGRGNTHSSFKWRWYHFDGVDWDQSRRLNNRIYKFRGHGKAWDWEVDTEFGNYDYLMYADYDMDHPEVVNELRNWGVWYTNTLGLDGFRIDAVKHIKYSFTRDWINHVRSATGKNMFAVAEFWKNDLGAIENYLQKTNWNHSVFDVPLHYNLYNASKSGGNYDMRNIFNGTVVQAHPNHAVTFVDNHDSQPEEALESFVEEWFKPLAYALTLTREQGYPSVFYGDYYGIPTHGVPAMRSKIDPILEARQKYAYGPQHDYLDHPDVIGWTREGDSSHPKSGLATLITDGPGGSKRMYAGLKNAGETWYDITGNRSDTVKIGSDGWGEFHVNDGSVSIYVQK

SEQ ID NO: 27901 - protein, 485 aa, Bacillus sp.
HHNGTNGTMMQYFEWYLPNDGNHWNRLNSDASNLKSKGITAVWIPPAWKGASQNDVGYGAYDLYDLGEFNQKGTVRTKYGTRSQLQAAVTSLKNNGIQVYGDVVMNHKGGADATEMVRAVEVNPNNRNQEVTGEYTIEAWTRFDFPGRGNTHSSFKWRWYHFDGVDWDQSRRLNNRIYKFRGHGKAWDWEVDTEFGNYDYLMYADYDMDHPEVVNELKNWGVWYTNTLGLDGFRIDAVKHIKYSFTRDWINHVRSATGKNMFAVAEFWKNDLGAIENYLQKTNWNHSVFDVPLHYNLYNASKSGGNYDMRNIFNGTVVQRHPSHAVTFVDNHDSQPEEALESFVEEWFKPLAYALTLTREQGYPSVFYGDYYGIPTHGVPAMRSKIDPILEARQKYAYGPQHDYLDHPDVIGWTREGDSSHPKSGLATLITDGPGGSKRMYAGLKNAGETWYDITGNRSDTVKIGSDGWGEFHVNDGSVSIYVQK

SEQ ID NO: 27902 - protein, 485 aa, Bacillus sp.
HHNGTNGTMMQYFEWYLPNDGNHWNRLNSDASNLKSKGITAVWIPPAWKGASQNDVGYGAYDLYDLGEFNQKGTVRTKYGTRSQLQAAVTSLKNNGIQVYGDVVMNHKGGADATEMVRAVEVNPNNRNQEVTGEYTIEAWTRFDFPGRGNTHSSFKWRWYHFDGVDWDQSRRLNNRIYKFRGHGKAWDWEVDTEFGNYDYLMYADYDMDHPEVVNELRNWGVWYTNTLGLDGFRIDAVKHIKYSFTRDWINHVRSATGKNMFAVAEFWKNDLGAIENYLQKTNWNHSVFDVPLHYNLYNASKSGGNYDMRNIFNGTVVQRVPSHAVTFVDNHDSQPEEALESFVEEWFKPLAYALTLTREQGYPSVFYGDYYGIPTHGVPAMRSKIDPILEARQKYAYGPQHDYLDHPDVIGWTREGDSSHPKSGLATLITDGPGGSKRMYAGLKNAGETWYDITGNRSDTVKIGSDGWGEFHVNDGSVSIYVQK

SEQ ID NO: 27903 - protein, 483 aa, Bacillus sp.
HHNGTNGTMMQYFEWYLPNDGNHWNRLNSDASNLKSKGITAVWIPPAWKAVSQNDVGYGAYDLYDLGEFNQKGTVRTKYGTRSQLQAAVTSLKNNGIQVYGDVVMNHKGGADATEMVRAVEVNPNNRNQEVTGEYTIEAWTRFDFPGRGNTHSSFKWRWYHFDGVDWDQSRRLSNRIYKFRGKAWDWEVDTEFGNYDYLMYADYDMDHPEVVNELRNWGVWYTNTLGLDGFRIDAVKHIKYSFTRDWINHVRSATGKNMFAVAEFWKNDLGAIENYLQKTNWNHSVFDVPLHYNLYNASKSGGNYDMRNIFNGTVVQVHPSHAVTFVDNHDSQPEEALESFVEEWFKPLAYALTLTREQGYPSVFYGDYYGIPTHGVPAMRSKIDPILEARQKYAYGPQHDYLDHPDVIGWTREGDSSHPKSGLATLITDGPGGSKRMYAGLKNAGETWYDITGNRSDTVKIGSDGWGEFHVNYGSVSIYVQK

SEQ ID NO: 27904 - protein, 485 aa, Bacillus sp.
HHNGTNGTMMQYFEWYLPNDGNHWNRLNSDASNLKSKGITAVWIPPAWKGASQNDVGYGAYDLYDLGEFNQKGTVRTKYGTRSQLQAAVTSLKNNGIQVYGDVVMNHKGGADATEMVRAVEVNPNNRNQEVTGEYTIEAWTRFDFPGRGNTHSSFKWRWYHFDGVDWDQSRRLNNRIYKFRGHGKAWDWEVDTEFGNYDYLMYADYDMDHPEVVNELRNWGVWYTNTLGLDGFRIDAVKHIKYSFTRDWINHVRSATGKNMFAVAEFWKNDLGAIENYLQKTNWNHSVFDVPLHYNLYNASQSSGNYDMRNIFNGTVVQRHPSHAVTFVDNHDSQPEEALESFVDEWFKPLAYALTLTREQGYPSVFYGDYYGIPTHGVPAMRSKIDPILEARQKYAYGPQHDYLDHPDVIGWTREGDSSHPKSGLATLITDGPGGSKRMYAGLKNAGETWYDITGNRSDTVKIGSDGWGEFHVNGQSVSIYVQK

SEQ ID NO: 27905 - protein, 485 aa, Bacillus sp.
HHNGTNGTMMQYFEWYLPNDGNHWNRLNSDASNLKSKGITAVWIPPAWKGASQNDVGYGAYDLYDLGEFNQKGTVRTKYGTRSQLQAAVTSLKNNGIQVYGDVVMNHKGGADATEMVRAVEVNPNNRNQEVTGEYTIEAWTRFDFPGRGNTHSSFKWRWYHFDGVDWDQSRRLNNRIYKFRGHGKAWDWEVDTEFGNYDYLMYADYDMDHPEVVNELRNWGVWYTNTLGLDGFRIDAVKHIKYSFTRDWINHVRSATGKNMFAVAEFWKNDLGAIENYLQKTVWNHSVFDVPLHYNLYNASKSGGNYDMRNIFNGTVVQRHPSHAVTFVDNHDSQPEEALESFVEEWFKPLAYALTLTREQGYPSVFYGDYYGIPTHGVPAMRSKIDPILEARQKYAYGPQHDYLDHPDVIGWTREGDSSHPKSGLATLITDGPGGSKRMYAGLKNAGETWYDITGNRSDTVKIGSDGWGEFHVNDGSVSIYVQK

SEQ ID NO: 27906 - protein, 485 aa, Bacillus sp.
HHNGTNGTMMQYFEWYLPNDGNHWNRLNSDASNLKSKGITAVWIPPAWKGASQNDVGYGAYDLYDLGEFNQKGTVRTKYGTRSQLQAAVTSLKNNGIQVYGDVVMNHKGGADATEMVRAVEVNPNNRNQEVTGEYTIEAWTRFDFPGRGNTHSSFKWRWYHFDGVDWDQSRRLNNRIYKFRGHGKAWDWEVDTEFGNYDYLMYADYDMDHPEVVNELRNWGVWYTNTLGLDGFRIDAVKHIKYSFTRDWINHVRSATGKNMFAVAEFWKNDLGAIENYLQKTNWNHSVFDVPLHYNLYNASKSGGNYDMRNIFNGTVVQRHPSHAVTFVDNHDSQPEEALESFVEEWFKPLAYALTLTREQGYPSVFYGDYYGIPTHGVPAMRSKIDPILEARQKYAYGPQHDYLDHPDVIGWTREGDSSHPKSGLATLITDGPGGSKRMYAGLKNAGETWYDITGNRSDTVKIGSDGLGEFHVNDGSVSIYVQK

SEQ ID NO: 27907 - protein, 483 aa, Bacillus sp.
HHNGTNGTMMQYFEWYLPNDGNHWNRLNSDASNLKSKGITAVWIPPAWKAASQNDVGYGAYDLYDLGEFNQKGTVRTKYGTRSQLQAAVTSLKNNGIQVYGDVVMNHKGGADATEMVRAVEVNPNNRNQEVTGEYTIEAWTRFDFPGRGNTHSSFKWRWYHFDGVDWDQSRDLQNRIYKFRGKAWDWEVDTEFGNYDYLMYADYDMDHPEVVNELRNWGVWYTNTLGLDGFRIDAVKHIKYSFTRDWINHVRIATGKNMFAVAEFWKNDLGAIENYLQKTNWNHSVFDVPLHYNLYNASKSGGNYDMRNIFNGTVVQRHPSHAVTFVDNHDSQPEEALESFVDEWFKPLAYALTLTREQGYPSVFYGDYYGIPTHGVPAMRSKIDPILEARQKYAYGPQHDYLDHPDVIGWTREGDSSHPKSGLATLITDGPGGSKRMYAGLKNAGETWYDITGNRSDTVKIGSDGWGEFHVNDQSVSIYVQK

SEQ ID NO: 27908 - protein, 483 aa, Bacillus sp.
HHNGTNETMMQYFEWYLPNDGNHWNRLNSDASNLKSKGITAVWIPPAWKGASQNDVGYGAYDLYDLGEFNQKGTVRTKYGTRSQLQAAVTSLKNNGIQVYGDVVMNHKGGADATEMVRAVEVNPNNRNQEVTGEYTIEAWTRFDFPGRGNTHSSFKWRWYHFDGVDWDQSRRLNNRIYKFRGKAWDWEVDTEFGNYDYLMYADYDMDHPEVVNELRNWGVWYTNTLGLDGFRIDAVKHIKYSFTRDWINHVRSATGKNMFAVAEFWKNDLGAIENYLQKTNWNHSVFDVPLHYNLYNASKSGGNYDMRNIFNGTVVQMHPSHAVTFVDNHDSQPEEALESFVEEWFKPLAYALTLTREQGYPSVFYGDYYGIPTHGVPAMRSKIDPILEARQKYAYGPQHDYLDHPDVIGWTREGDSSHPKSGLATLITDGPGGSKRMYAGLKNAGETWYDITGNRSDTVKIGSDGWGEFHVNDGSVSIYVQK

SEQ ID NO: 27909 - protein, 485 aa, Bacillus sp.
HHNGTNGTMMQYFEWYLPNDGNHWNRLNSDASNLKSKGITAVWIPPAWKGASQNDVGYGAYDLYDLGEFNQKGTVRTKYGTRSQLQAAVTSLKNNGIQVYGDVVMNHKGGADATEMVRAVEVNPNNRNQEVTGEYTIEAWTRFDFPGRGNTHSSFKWRWYHFDGVDWDQSRRLNNRIYKFRGHGKAWDWEVDTEFGNYDYLMYADYDMDHPEVVNELRNWGVWYTNTLGLDGFRIDAVKHIKYSFTRDWINHVRSATGKNMFAVAEFWKNDLGIIENYLQKTNWNHSVFDVPLHYNLYNASKSGGNYDMRNIFNGTVVQRHPSHAVTFVDNHDSQPEEALESFVEEWFKPLAYALTLTREQGYPSVFYGDYYGIPTHGVPAMRSKIDPILEARQKYAYGPQHDYLDHPDVIGWTREGDSSHPKSGLATLITDGPGGSKRMYAGLKNAGETWYDITGNRSDTVKIGSDGWGEFHVNDGSVSIYVQK

SEQ ID NO: 27910 - protein, 483 aa, Bacillus sp.
HHNGTNGTMMQYFEWYLPNDGNHWNRLNSDASNLKSKGITAVWIPPAWKGASQNDVGYGAYDLYDLGEFNQKGTVRTKYGTRSQLQAAVTSLKNNGIQVYGDVVMNHKGGADATEMVRAVEVNPNNRNQEVTGEYTIEAWTRFDFPGRGNTHSSFKWRWYHFDGVDWDQSRRLNNRIYKFRGKAWDWEVDTEFGNYDYLMYADYDMDHTEVVNELRNWGVWYTNTLGLDGFRIDAVKHIKYSFTRDWINHVRSATGKNMFAVAEFWKNDLGAIENYLQKTNWNHSVFDVPLHYNLYNASKSGGNYDMRNIFNGTVVQRHPSHAVTFVDNHDSQPEEALESFVEEWFKPLAYALTLTREQGYPSVFYGDYYGIPTHGVPAMRSKIDPILEARQKYAYGPQHDYLDHPDVIGWTREGDSSHPKSGLATLITDGPGGSKRMYAGLKNAGETWYDITGNRSDTVKIGSDGWGEFHVNDGSVSIYVQK

SEQ ID NO: 27911 - protein, 483 aa, Bacillus sp.
HHNGTNGTMMQYFEWYLPNDGNHWNRLNSDASNLKSKGITAVWIPPAWKGASQNDVGYGAYDLYDLGEFNQKGTVRTKYGTRSQLQAAVTSLKNNGIQVYGDVVMNHKGGADATEMVRAVEVNPNNRNQEVTGEYTIEAWTRFDFPGRGNTHSSFKWRWYHFDGVDWDQSRRLNNRIYKFRGKAWDWEVDTEFGNYDYLMYADYDMDHPEVVNELRNWGVWYTNTLGLDGFRIDAVKHIKYSFTRDWINHVRSATGKNMFAVAEFWKNDLGAIENYLQKTQWNHSVFDVPLHYNLYNASKSGGNYDMRNIFNGTVVQRHPSHAVTFVDNHDSQPEEALESFVEEWFKPLAYALTLTREQGYPSVFYGDYYGIPTHGVPAMRSKIDPILEARQKYAYGPQHDYLDHPDVIGWTREGDSSHPKSGLATLITDGPGGSKRMYAGLKNAGETWYDITGNRSDTVKIGSDGWGEFHVNDGSVSIYVQK

SEQ ID NO: 27912 - protein, 485 aa, Bacillus sp.
HHNGTNGTMMQYFEWYLPNDGNHWNRLNSDASNLKSKGITAVWIPPAWKAVSQNDVGYGAYDLYDLGEFNQKGTVRTKYGTRSQLQAAVTSLKNNGIQVYGDVVMNHKGGADATEMVRAVEVNPNNRNQEVTGEYTIEAWTRFDFPGRGNTHSSFKWRWYHFDGVDWDQSRDLENRIYKFRGHGKAWDWEVDTEFGNYDYLMYADYDMDHPEVVNELRNWGVWYTNTLGLDGFRIDAVKHIKYSFTRDWINHVRSATGKNMFAVAEFWKNDLGAIENYLQKTNWNHSVFDVPLHYNLYNASKSGGNYDMRNIFNGTVVQRHPSHAVTFVDNHDSQPEEALESFVDPWFKPLAYALTLTREQGYPSVFYGDYYGIPTHGVPAMRSKIDPILEARQKYAYGPQHDYLDHPDVIGWTREGDSSHPKSGLATLITDGPGGSKRMYAGLKNAGETWYDITGNRSDTVKIGSDGWGEFHVNGGSVSIYVQK

SEQ ID NO: 27913 - protein, 485 aa, Bacillus sp.
HHNGTNGTMMQYFEWYLPNDGNHWNRLNSDASNLKSKGITAVWIPPAWKGASQNDVGYGAYDLYDLGEFNQKGTVRTKYGTRSQLQAAVTSLKNNGIQVYGDVVMNHKGGADATEMVRAVEVNPNNRNQEVTGEYTIEAWTRFDFPGRGNTHSSFKWRWYHFDGVDWDQSRRLNNRIYKFRGHGKAWDWEVDTEFGNYDYLMYADYDMDHPEVVNELRNWGVWYTTTLGLDGFRIDAVKHIKYSFTRDWINHVRSATGKNMFAVAEFWKNDLGAIENYLQKTNWNHSVFDVPLHYNLYNASKSGGNYDMRNIFNGTVVQRHPSHAVTFVDNHDSQPEEALESFVEEWFKPLAYALTLTREQGYPSVFYGDYYGIPTHGVPAMRSKIDPILEARQKYAYGPQHDYLDHPDVIGWTREGDSSHPKSGLATLITDGPGGSKRMYAGLKNAGETWYDITGNRSDTVKIGSDGWGEFHVNDGSVSIYVQK

SEQ ID NO: 27914 - protein, 485 aa, Bacillus sp.
HHNGTNGTMMQYFEWYLPNDGNHWNRLNSDASNLKSKGITAVWIPPAWKGASQNDVGYGAYDLYDLGEFNQKGTVRTKYGTRSQLQAAVTSLKNNGIQVYGDVVMNHKGGADATEMVPAVEVNPNNRNQEVTGEYTIEAWTRFDFPGRGNTHSSFKWRWYHFDGVDWDQSRRTNNRIYKFRGHSKAWDWEVDTEFGNYDYLMYTDYDMDHPEVVNELRNWGVWYTNTLGLDGFRIDAVKHIKYSFTRDWINHVRSATGKNMFAVAEFWKNDLGAIENYLQKTNWNHSVFDVPLHYNLYNASKSGGNYDMRNIFNGTVVQRHPSHAVTFVDNHDSQPEEALESFVEEWFKPLAYALTLTREQGYPSVFYGDYYGIPTHGVPAMRSKIDPILEARQKYAYGPQHDYLDHPDVIGWTREGDSSHPKSGLATLITDGPGGSKRMYAGLKNAGETWYDITGNRSDTVKIGSDGWGEFHVNDGSVSIYVQK

SEQ ID NO: 27915 - protein, 485 aa, Bacillus sp.
HHNGTNGTMMQYFEWYLPNDGNHWNRLNSDASNLKSKGITAVWIPPAWKGASQNDVGYGAYDLYDLGEFNQKGTVRTKYGTRSQLQAAVTSLKNNGINVYGDVVMNHKGGADATEMVRAVEVNPNNRNQEVTGEYTIEAWTRFDFPGRGNTHSSFKWRWYHFDGVDWDQSRRLNNRIYKFRGHGKAWDWEVDTEFGNYDYLMYADYDMDHPEVVNELRNWGVWYTNTLGLDGFRIDAVKHIKYSFTRDWINHVRSATGKNMFAVAEFWKNDLGAIENYLQKTNWNHSVFDVPLHYNLYNASKSGGNYDMRNIFNGTVVQSHPSHAVTFVDNHDSQPEEALESFVEEWFKPLAYALTLTREQGYPSVFYGDYYGIPTHGVPAMRSKIDPILEARQKYAYGPQHDYLDHPDVIGWTREGDSSHPKSGLATLITDGPGGSKRMYAGLKNAGETWYDITGNRSDTVKIGSDGWGEFHVNDGSVSIYVQK

SEQ ID NO: 27916 - protein, 485 aa, Bacillus sp.
HHNGTNGTMMQYFEWYLPNDGNHWNRLNSDASNLKSKGITAVWIPPAWKGASQNDVGYGAYDLYDLGEFNQKGTVRTKYGTRSQLQAAVTSLKNNGIQVYGDVVMNHKGGADATEMVRAVEVNPNNRNQEVTGEYTIEAWTRFDFPGRGNTHSSFKWRWYHFDGVDWDQSRRLNNRIYKFRGHGKAWDWEVDTEFGNYDYLMYADYDMDHPEVVNELRNWGVWYTNTLGLDGFRIDAVKHIKYSFTRDWINHVRSATGKNMFAVAEFWQNDLGAIENYLQKTNWNHSVFDVPLHYNLYNASKSGGNYDMRNIFNGTVVQRHPSHAVTFVDNHDSQPEEALESFVEEWFKPLAYALTLTREQGYPSVFYGDYYGIPTHGVPAMRSKIDPILEARQKYAYGPQHDYLDHPDVIGWTREGDSSHPKSGLATLITDGPGGSKRMYAGLKNAGETWYDITGNRSDTVKIGSDGWGEFHVNDGSVSIYVQK

SEQ ID NO: 27917 - protein, 485 aa, Bacillus sp.
HHNGTNGTMMQYFEWYLPNDGNHWNRLNSDASNLKSKGITAVWIPPAWKGASQNDVGYGAYDLYDLGEFNQKGTVRTKYGTRSQLQAAVTSLKNNGIQVYGDVVMNHKGGADATEMVRAVEVNPNNRNQEVTGEYTIEAWTRFDFPGRGNTHSSFKWRWYHFDGVDWDQSRRLNNRIYKFRGHGKAWDWEVDTEFGNYDYLMYADYDMDHPEVVNELRNWGVWYTNTLGLDGFRIDAVKHIKYSFTRDWINHVRSATGKNMFAVAEFWKNDLGAIENYLQKTNWNHSVFDVPLHYNLYNASKSQGNYDMRNIFNGTVVQRHPSHAVTFVDNHDSQPEEALESFVDPWFKPLAYALTLTREQGYPSVFYGDYYGIPTHGVPAMRSKIDPILEARQKYAYGPQHDYLDHPDVIGWTREGDSSHPKSGLATLITDGPGGSKRMYAGLKNAGETWYDITGNRSDTVKIGSDGWGEFHVNGGSVSIYVQK

SEQ ID NO: 27918 - protein, 485 aa, Bacillus sp.
HHNGTNGTMMQYFEWYLPNDGNHWNRLNSDASNLKSKGITAVWIPPAWKGASQNDVGYGAYDLYDLGEFNQKGTVRTKYGTRSQLQAAVTSLKNNGIQVYGDVVMNHKGGADATEMVRAVEVNPNNRNQEVTGEYTIEAWTRFDFPGRGNTHSSFKWRWYHFDGVDWDQSRNLTNRIYKFRGHSKAWDWEVDTEFGNYDYLMYTDYDMDHPEVVNELRNWGVWYTNTLGLDGFRIDAVKHIKYSFTRDWINHVRSATGKNMFAVAEFWKNDLGAIENYLQKTNWNHSVFDVPLHYNLYNASKSGGNYDMRNIFNGTVVQRHPSHAVTFVDNHDSQPEEALESFVEEWFKPLAYALTLTREQGYPSVFYGDYYGIPTHGVPAMRSKIDPILEARQKYAYGPQHDYLDHPDVIGWTREGDSSHPKSGLATLITDGPGGSKRMYAGLKNAGETWYDITGNRSDTVKIGSDGWGEFHVNDGSVSIYVQK

SEQ ID NO: 27919 - protein, 485 aa, Bacillus sp.
HHNGTNGTMMQYFEWYLPNDGNHWNRLNSDASNLKSKGITAVWIPPAWKGASQNDVGYGAYDLYDLGEFNQKGTVRTKYGTRSQLQAAVTSLKNNGIQVYGDVVMNHKGGADATEMVRAVEVNPNNRNQEVTGEYTIEAWTRFDFPGRGNTHSSFKWRWYHFDGVDWDQSRRLNNRIYKFRGHGKAWDWEVDTEFGNYDYLMYADYDMDHPEVVNELRNWGVWYTNTLGLDGFRIDAVKHIKYSFTRDWINHVRSATGKNMFAVAEFWKNDLGAIENYLQKTNWNHSVFDVPLHYNLYNASKSGGNYDMRNIFNGTVVQRHPSHAVTFVDNHDSQPEEALESFVEEWFKPQAYALTLTREQGYPSVFYGDYYGIPTHGVPAMRSKIDPILEARQKYAYGPQHDYLDHPDVIGWTREGDSSHPKSGLATLITDGPGGSKRMYAGLKNAGETWYDITGNRSDTVKIGSDGWGEFHVNDGSVSIYVQK

SEQ ID NO: 27920 - protein, 485 aa, Bacillus sp.
HHNGTNGTMMQYFEWYLPNDGNHWNRLNSDASNLKSKGITAVWIPPAWKGASQNDVGYGAYDLYDLGEFNQKGTVRTKYGTRSQLQAAVTSLKNNGIQVYGDVVMNHKGGADATEMVRAVEVNPNNRNQEVTGEYTIEAWTRFDFPGRGNTHSSFKWRWYHFDGVDWDQSRRLNNRIYKFRGHGKAWDWEVDTEFGNYDYLMYADYDMDYPEVVNELRNWGVWYTNTLGLDGFRIDAVKHIKYSFTRDWINHVRSATGKNMFAVAEFWKNDLGAIENYLQKTNWNHSVFDVPLHYNLYNASKSGGNYDMRNIFNGTVVQRHPSHAVTFVDNHDSQPEEALESFVEEWFKPLAYALTLTREQGYPSVFYGDYYGIPTHGVPAMRSKIDPILEARQKYAYGPQHDYLDHPDVIGWTREGDSSHPKSGLATLITDGPGGSKRMYAGLKNAGETWYDITGNRSDTVKIGSDGWGEFHVNDGSVSIYVQK

SEQ ID NO: 27921 - protein, 483 aa, Synthetic construct
HHNGTNGTMMQYFEWYLPNDGNHWNRLNSDASNLKSKGITAVWIPPAWKGASQNDVGYGAYDLYDLGEFNQKGTVRTKYGTRSQLQAAVTSLKNNGIQVYGDVVMNHKGGADATEMVRAVEVNPNNRNQEVTGEYTIEAWTRFDFPGRGNTHSSFKWRWYHFDGVDWDQSRRLNNRIYKFRGKAWDWEVDTEFGNYDYLMYADYDMDHPEVVNELRNWGVWYTNTLGLDGFRIDAVKHIKYSFTRDWINHVRSATGKNMFAVAEFWKNDLGAIENYLQKTNWNHSVFDVPLHYNLYNASKSGGNSDMRNIFNGTVVQRHPSHAVTFVDNHDSQPEEALESFVEEWFKPLAYALTLTREQGYPSVFYGDYYGIPTHGVPAMRSKIDPILEARQKYAYGPQHDYLDHPDVIGWTREGDSSHPKSGLATLITDGPGGSKRMYAGLKNAGETWYDITGNRSDTVKIGSDGWGEFHVNDGSVSIYVQK

SEQ ID NO: 27922 - protein, 483 aa, Bacillus sp.
HHNGTNGTMMQYFEWYLPNDGNHWNRLNSDASNLKSKGITAVWIPPAWKAISQNDVGYGAYDLYDLGEFNQKGTVRTKYGTRSQLQAAVTSLKNNGIQVYGDVVMNHKGGADATEMVRAVEVNPNNRNQEVTGEYTIEAWTRFDFPGRGNTHSSFKWRWYHFDGVDWDQSRDVNNRIYKFRGKAWDWEVDTEFGNYDYLMYADYDMDHPEVVNELRNWGVWYTNTLGLDGFRIDAVKHIKYSFTRDWINHVRSATGKNMFAVAEFWKNDLGAIENYLQKTNWNHSVFDVPLHYNLYNASKSGGNYDMRNIFNGTVVQRHPSHAVTFVDNHDSQPEEALESFVEEWFKPLAYALTLTREQGYPSVFYGDYYGIPTHGVPAMRSKIDPILEARQKYAYGPQHDYLDHPDVIGWTREGDSSHPKSGLATLITDGPGGSKRMYAGLKNAGETWYDITGNRSDTVKIGSDGWGEFHVNDGSVSIYVQK

SEQ ID NO: 27923 - protein, 485 aa, Bacillus sp.
HHNGTNGTMMQYFEWYLPNDGNHWNRLNSDASNLKSKGITAVWIPPAWKGASQNDVGYGAYDLYDLGEFNQKGTVRTKYGTRSQLQAAVTSLKNNGIQVYGDVVMNHKGGADATEMVRAVEVNPNNRNQEVTGEYTIEAWTRFDFPGRGNTHSSFKWRWYHFDGVDWDQSRRLNNRIYKFRGHGKAWDWEVDTEFGNYDYLMYADYDMDHPEVVNELRNWGVWYTNTLGLDGFRIDAVKHIKYSFTRDWINHVRSATGKNMFAVAEFWKNDLGAIENYLQKTNWNHSVFDVPLHYNLYNASKSGGNYDMRNIFNGTVVQAHPSLAVTFVDNHDSQPEEALESFVEEWFKPLAYALTLTREQGYPSVFYGDYYGIPTHGVPAMRSKIDPILEARQKYAYGPQHDYLDHPDVIGWTREGDSSHPKSGLATLITDGPGGSKRMYAGLKNAGETWYDITGNRSDTVKIGSDGWGEFHVNDGSVSIYVQK

SEQ ID NO: 27924 - protein, 485 aa, Bacillus sp.
HHNGTNGTMMQYFEWYLPNDGNHWNRLNSDASNLKSKGITAVWIPPAWKGASQNDVGYGAYDLYDLGEFNQKGTVRTKYGTRSQLQAAVTSLKNNGIQVYGDVVMNHKGGADATEMVRAVEVNPNNRNQEVTGEYTIEAWTRFDFPGRGNTHSSFKWRWYHFDGVDWDQSERLNNRIYKFRGHGKAWDWEVDTEFGNYDYLMYADYDMDHPEVVNELRNWGVWYTNTLGLDGFRIDAVKHIKYSFTRDWINHVRSATGKNMFAVAEFWKNDLGAIENYLQKTNWNHSVFDVPLHYNLYNASKSGGNYDMRNIFNGTVVQRHPSHAVTFVDNHDSQPEEALESFVEEWFKPLAYALTLTREQGYPSVFYGDYYGIPTHGVPAMRSKIDPILEARQKYAYGPQHDYLDHPDVIGWTREGDSSHPKSGLATLITDGPGGSKRMYAGLKNAGETWYDITGNRSDTVKIGSDGWGEFHVNDGSVSIYVQK

SEQ ID NO: 27925 - protein, 485 aa, Bacillus sp.
HHNGTNGTMMQYFEWYLPNDGNHWNRLNSDASNLKSKGITAVWIPPAWKGASQNDVGYGAYDLYDLGEFNQKGTVRTKYGTRSQLQAAVTSLKNNGIQVYGDVVMNHKGGADATEMVRAVEVNPNNRNQEVTGEYTIEAWTRFDFPGRGNTHSSFKWRWYHFDGVDWDQSRRLSNRIYKFRGHGKAWDWEVDTEFGNYDYLMYTDYDMDHPEVVNELRNWGVWYTNTLGLDGFRIDAVKHIKYSFTRDWINHVRSATGKNMFAVAEFWKNDLGAIENYLQKTNWNHSVFDVPLHYNLYNASKSGGNYDMRNIFNGTVVQRHPSHAVTFVDNHDSQPEEALESFVEEWFKPLAYALTLTREQGYPSVFYGDYYGIPTHGVPAMRSKIDPILEARQKYAYGPQHDYLDHPDVIGWTREGDSSHPKSGLATLITDGPGGSKRMYAGLKNAGETWYDITGNRSDTVKIGSDGWGEFHVNDGSVSIYVQK

SEQ ID NO: 27926 - protein, 485 aa, Bacillus sp.
HHNGTNGTMMQYFEWYLPNDGNHWNRLNSDASNLKSKGITAVWIPPAWKGASQNDVGYGAYDLYDLGEFNQKGTVRTKYGTRSQLQAAVTSLKNNGIQVYGDVVMNHKGGADATEMVRAVEVNPNNRNQEVTGEYTIEAWTRFDFPGRGNTHSSFKWRWYHFDGQDWDQSRRLNNRIYKFRGHGKAWDWEVDTEFGNYDYLMYADYDMDHPEVVNELRNWGVWYTNTLGLDGFRIDAVKHIKYSFTRDWINHVRSATGKNMFAVAEFWKNDLGAIENYLQKTNWNHSVFDVPLHYNLYNASKSGGNYDMRNIFNGTVVQRHPSHAVTFVDNHDSQPEEALESFVEEWFKPLAYALTLTREQGYPSVFYGDYYGIPTHGVPAMRSKIDPILEARQKYAYGPQHDYLDHPDVIGWTREGDSSHPKSGLATLITDGPGGSKRMYAGLKNAGETWYDITGNRSDTVKIGSDGWGEFHVNDGSVSIYVQK

SEQ ID NO: 27927 - protein, 485 aa, Bacillus sp.
HHNGTNGTMMQYFEWYLPNDGNHWNRLNSDASNLKSKGITAVWIPPAWKGASQNDVGYGAYDLYDLGEFNQKGTVRTKYGTRSQLQAAVTSLKNNGIQVYGDVVMNHKGGADATEMVRAVEVNPNNRNQEVTGEYTIEAWTRFDFPGRGNTHSSFKWRWYHFDGVDWDQSRRLNNRIYKFRGHGKAWDWEVDTEFGNYDYLMYADYDMDHPEVVNELRNWGVWYTNTLGLDGFRIDAVKHIKYSFTRDWINHVRSATGKNMFAVAEFWKNDLGAIENYLQKTNWNHSVFDVPLHYNLYNASKSGGNYDMRNIFNGTVVQRHPSHAVTFVDNHDSQPEEALESFVEPWFKPLAYALTLTREQGYPSVFYGDYYGIPTHGVPAMRSKIDPILEARQKYAYGPQHDYLDHPDVIGWTREGDSSHPKSGLATLITDGPGGSKRMYAGLKNAGETWYDITGNRSDTVKIGSDGWGEFHVNGKSVSIYVQK

SEQ ID NO: 27928 - protein, 485 aa, Bacillus sp.
HHNGTNGTMMQYFEWYLPNDGNHWNRLNSDASNLKSKGITAVWIPPAWKGASQNDVGYGAYDLYDLGEFNQKGTVRTKYGTRSQLQAAVTSLKNNGIQVYGDVVMNHKGGADATEMVRAVEVNPNNRNQEVTGEYTIEAWTRFDFPGRGNTHSSFKWRWYHFDGVDWDQSRRLNNRIYKFRGHGKAWDWEVDTEFGNYDYLMYADYDMDHPEVVNELRNWGVWYTNTLGLDGFRIDAVKHIKYSFTRDWINHVRSATGKNMFAVAEFWKNDLGAIENYLQKTNWNHSVFDVPLHYNLYNASNSGGNYDMRNIFNGTVVQRHPSHAVTFVDNHDSQPEEALESFVDPWFKPLAYALTLTREQGYPSVFYGDYYGIPTHGVPAMRSKIDPILEARQKYAYGPQHDYLDHPDVIGWTREGDSSHPKSGLATLITDGPGGSKRMYAGLKNAGETWYDITGNRSDTVKIGSDGWGEFHVNQSSVSIYVQK

SEQ ID NO: 27929 - protein, 485 aa, Bacillus sp.
HHNGTNGTMMQYFEWYLPNDGNHWNRLNSDASNLKSKGITAVWIPPAWKGASQNDVGYGAYDLYDLGEFNQKGTVRTKYGTRSQLQAAVTSLKNNGIQVYGDVVMNHKGGADATEMVRAVEVNPNNRNQEVTGEYTIEAWTRFDFPGRGNTHSSFKWRWYHFDGVDWDQSRRLNNRIYKFRGHGKAWDWEVDTEFGNYDYLMYADYDMDHPEVVNELRNWGVWYTNTLGLDGFRIDAVKHIKYSFTRDWINHVRSATGKNMFAVAEFWKNDLGAIENYLQKTNWNHSVFDVPLHYNLYNASKSGGNYDMRNIFNGTVVQRHPSHAVTFVDNHDSQPEEALESFVDTWFKPLAYALTLTREQGYPSVFYGDYYGIPTHGVPAMRSKIDPILEARQKYAYGPQHDYLDHPDVIGWTREGDSSHPKSGLATLITDGPGGSKRMYAGLKNAGETWYDITGNRSDTVKIGSDGWGEFHVNGKSVSIYVQK

SEQ ID NO: 27930 - protein, 483 aa, Bacillus sp.
HHNGTNGTMMQYFEWYLPNDGNHWNRLNSDASNLKSKGITAVWIPPAWKGASQNDVGYGAYDLYDLGEFNQKGTVRTKYGTRSQLQAAVTSLKNNGIQVYGDVVMNHKGGADATEMVRAVEVNPNNRNQEVTGEYTIEAWTRFDFPGRGNTHSSFKWRWYHFDGVDWDQSRRLNNRIYKFRGKAWDWEVDTEFGNYDYLMYADYDMDHPEVVNELRNWGVWYTNTLGLDGFRIDAVKHIKYSFTRDWINHVRSATGKNMFAVAEFWKNDLGAIENYLQKTNWNHSVFDVPLHYNLYNASKSGGNYDMRNIFNGTVVQRHPSHAVTFVDNHDSQPEEALESFVEEWFKPLAYALTLTREQGYPSVFYGDYYGIPTHGVPAMRSKIDPILMARQKYAYGPQHDYLDHPDVIGWTREGDSSHPKSGLATLITDGPGGSKRMYAGLKNAGETWYDITGNRSDTVKIGSDGWGEFHVNDGSVSIYVQK

SEQ ID NO: 27931 - protein, 485 aa, Bacillus sp.
HHNGTNGTMMQYFEWYLPNDGNHWNRLNSDASNLKSKGITAVWIPPAWKGASQNDVGYGAYDLYDLGEFNQKGTVRTKYGTRSQLQAAVTSLKNNGIQVYGDVVMNHKGGADATEMVRAVEVNPNNRNQEVTGEYTIEAWTRFDFPGRGNTHSSFKWRWYHFDGVDWDQSRRLNNRIYKFRGHGKAWDWEVDTEFGNYDYLMYADYDMDHPEVVNELRNWGVWYTNTLGLDGFRIDAVKHIKYSFTRDWINHVRSATGKNMFAVAEFWKNDLGAIENYLQKTNWNHSVFDVPLHYNLYNASNSQGNYDMRNIFNGTVVQRHPSHAVTFVDNHDSQPEEALESFVEPWFKPLAYALTLTREQGYPSVFYGDYYGIPTHGVPAMRSKIDPILEARQKYAYGPQHDYLDHPDVIGWTREGDSSHPKSGLATLITDGPGGSKRMYAGLKNAGETWYDITGNRSDTVKIGSDGWGEFHVNKGSVSIYVQK

SEQ ID NO: 27932 - protein, 485 aa, Bacillus sp.
HHNGTNGTMMQYFEWYLPNDGNHWNRLNSDASNLKSKGITAVWIPPAWKGASQNDVGYGAYDLYDLGEFNQKGTVRTKYGTRSQLQAAVTSLKNNGIQVYGDVVMNHKGGADATEMVRAVEVNPNNRNQEVTGEYTIEAWTRFDFPGRGNTHSSFKWRWYHFDGVDWDQSRRLNNRIYKFRGHGKAWDWEVDTEFGNYDYLMYADYDMDHDEVVNELRNWGVWYTNTLGLDGFRIDAVKHIKYSFTRDWINHVRSATGKNMFAVAEFWKNDLGAIENYLQKTNWNHSVFDVPLHYNLYNASKSGGNYDMRNIFNGTVVQRHPSHAVTFVDNHDSQPEEALESFVEEWFKPLAYALTLTREQGYPSVFYGDYYGIPTHGVPAMRSKIDPILEARQKYAYGPQHDYLDHPDVIGWTREGDSSHPKSGLATLITDGPGGSKRMYAGLKNAGETWYDITGNRSDTVKIGSDGWGEFHVNDGSVSIYVQK

SEQ ID NO: 27933 - protein, 485 aa, Bacillus sp.
HHNGTNGTMMQYFEWYLPNDGNHWNRLNSDASNLKSKGITAVWIPPAWKAASQNDVGYGAYDLYDLGEFNQKGTVRTKYGTRSQLQAAVTSLKNNGIQVYGDVVMNHKGGADATEMVRAVEVNPNNRNQEVTGEYTIEAWTRFDFPGRGNTHSSFKWRWYHFDGVDWDQSRNLENRIYKFRGHGKAWDWEVDTEFGNYDYLMYADYDMDHPEVVNELRNWGVWYTNTLGLDGFRIDAVKHIKYSFTRDWINHVRSATGKNMFAVAEFWKNDLGAIENYLQKTNWNHSVFDVPLHYNLYNASKSGGNYDMRNIFNGTVVQRHPSHAVTFVDNHDSQPEEALESFVEEWFKPLAYALTLTREQGYPSVFYGDYYGIPTHGVPAMRSKIDPILEARQKYAYGPQHDYLDHPDVIGWTREGDSSHPKSGLATLITDGPGGSKRMYAGLKNAGETWYDITGNRSDTVKIGSDGWGEFHVNDGSVSIYVQK

SEQ ID NO: 27934 - protein, 485 aa, Bacillus sp.
HHNGTNGTMMQYFEWYLPNDGNHWNRLNSDASNLKSKGITAVWIPPAWKGASQNDVGYGAYDLYDLGEFNQKGTVRTKYGTRSQLQAAVTSLKNNGIQVYGDVVMNHKGGADATEMVRAVEVNPNNRNQEVTGEYTIEAWTRFDFPGRGNTHSSFKWRWYHFDGVDWDQSRKLNNRIYKFRGHGKAWDWEVDTEFGNYDYLMYVDYDMDHPEVVNELRNWGVWYTNTLGLDGFRIDAVKHIKYSFTRDWINHVRSATGKNMFAVAEFWKNDLGAIENYLQKTNWNHSVFDVPLHYNLYNASKSGGNYDMRNIFNGTVVQRHPSHAVTFVDNHDSQPEEALESFVDEWFKPLAYALTLTREQGYPSVFYGDYYGIPTHGVPAMRSKIDPILEARQKYAYGPQHDYLDHPDVIGWTREGDSSHPKSGLATLITDGPGGSKRMYAGLKNAGETWYDITGNRSDTVKIGSDGWGEFHVNKGSVSIYVQK

SEQ ID NO: 27935 - protein, 485 aa, Bacillus sp.
HHNGTNGTMMQYFEWYLPNDGNHWNRLNSDASNLKSKGITAVWIPPAWKGASQNDVGYGAYDLYDLGEFNQKGTVRTKYGTRSQLQAAVTSLKNNGIQVYGDVVMNHKGGADATEMVRAVEVNPNNRNQEVTGEYTIEAWTRFDFPGRGNTHSSFKWRWYHFDGVDWDQSRRLNNRIYLFRAHGKAWDWEVDTEFGNYDYLMYADYDMDHPEVVNELRNWGVWYTNTLGLDGFRIDAVKHIKYSFTRDWINHVRSATGKNMFAVAEFWKNDLGAIENYLQKTNWNHSVFDVPLHYNLYNASKSGGNYDMRNIFNGTVVQRHPSHAVTFVDNHDSQPEEALESFVEEWFKPLAYALTLTREQGYPSVFYGDYYGIPTHGVPAMRSKIDPILEARQKYAYGPQHDYLDHPDVIGWTREGDSSHPKSGLATLITDGPGGSKRMYAGLKNAGETWYDITGNRSDTVKIGSDGWGEFHVNDGSVSIYVQK

SEQ ID NO: 27936 - protein, 483 aa, Bacillus sp.
HHNGTNGTMMQYFEWYLPNDGNHWNRLNSDASNLKSKGITAVWIPPAWKGASQNDVGYGAYDLYDLGEFNQKGTVRTKYGTRSQLQAAVTSLKNNGIQVYGDVVMNHKGGADATEMVRAVEVNPNNRNQEVTGEYTIEAWTRFDFPGRGNTHSSFKWRWYHFDGVDWDQSRRLNNRIYKFRGKAWDWEVDTENGNYDYLMYADIDMDHPEVVNELRNWGVWYTNTLGLDGFRIDAVKHIKYSFTRDWINHVRSATGKNMFAVAEFWKNDLGAIENYLQKTNWNHSVFDVPLHYNLYNASKSGGNYDMRNIFNGTVVQRHPSHAVTFVDNHDSQPEEALESFVEEWFKPLAYALTLTREQGYPSVFYGDYYGIPTHGVPAMRSKIDPILEARQKYAYGTQRDYIDNPDVIGWTREGDSTKAKSGLATVITDGPGGSKRMYVGTSNAGEIWYDLTGNRTDKITIGSDGYATFPVNGGSVSVWVQQ

SEQ ID NO: 27937 - protein, 483 aa, Bacillus sp.
HHNGTNGTMMQYFEWYLPNDGNHWNRLNSDASNLKSKGITAVWIPPAWKGASQNDVGYGAYDLYDLGEFNQKGTVRTKYGTRSQLQAAVTSLKNNGIQVYGDVVMNHKGGADATEMVRAVEVNPNNRNQEVTGEYTIEAWTRFDFPGRGNTHSSFKWRWYHFDGVDWDQSRRLNNRIYKFRGKAWDWEVDTEFGNYDYLMYADYDMDHPEVVNELRNWGVWYTNTLGLDGFRIDAVKHIKYSFTRDWINHVRSATGKNMFAVAEFWKNDLGAIENYLQKTNWNHSVFDVPLHYNLYNASKSGGNYDMRNIFNGTVVQAWPMQAVTFVDNHDSQPEEALESFVEEWFKPLAYALTLTREQGYPSVFYGDYYGIPTHGVPAMRSKIDPILEARQKYAYGPQHDYLDHPDVIGWTREGDSSHPKSGLATLITDGPGGSKRMYAGLKNAGETWYDITGNRSDTVKIGSDGWGEFHVNDGSVSIYVQK

SEQ ID NO: 27938 - protein, 485 aa, Bacillus sp.
HHNGTNGTMMQYFEWYLPNDGNHWNRLNSDASNLKSKGITAVWIPPAWKGASQNDVGYGAYDLYDLGEFNQKGTVRTKYGTRSQLQAAVTSLKNNGIQVYGDVVMNHKGGADATEMVRAVEVNPNNRNQEVTGEYTIEAWTRFDFPGRGNTHSSFKWRWYHFDGVDWDQSRRLNNRIYKFRGHGKAWDWEVDTEFGNYDYLMYADYDMDHTEVVNELRNWGVWYTNTLGLDGFRIDAVKHIKYSFTRDWINHVRSATGKNMFAVAEFWKNDLGAIENYLQKTNWNHSVFDVPLHYNLYNASKSGGNYDMRNIFNGTVVQRHPSHAVTFVDNHDSQPEEALESFVEEWFKPLAYALTLTREQGYPSVFYGDYYGIPTHGVPAMRSKIDPILEARQKYAYGPQHDYLDHPDVIGWTREGDSSHPKSGLATLITDGPGGSKRMYAGLKNAGETWYDITGNRSDTVKIGSDGWGEFHVNDGSVSIYVQK

SEQ ID NO: 27939 - protein, 485 aa, Bacillus sp.
HHNGTNGTMMQYFEWYLPNDGNHWNRLNSDASNLKSKGITAVWIPPAWKGASQNDVGYGAYDLYDLGEFNQKGTVRTKYGTRSQLQAAVTSLKNNGIQVYGDVVMNHKGGADATEMVRAVEVNPNNRNQEVTGEYTIEAWTRFDFPGRGNTHSSFKWRWYHFDGVDWDQSRRLNNRIYKFRGHGKAWDWEVDTEFGNYDYLMYADYDMDHPEVVNELRNWGVWYTNTLGLDGFRIDAVKHIKYSFTRDWINHVRSATGKNMFAVAEFWKNDLGAIENYLQKTNWNHSVFDVPLHYNLYNASQSGGNYDMRNIFNGTVVQRHPSHAVTFVDNHDSQPEEALESFVDEWFKPLAYALTLTREQGYPSVFYGDYYGIPTHGVPAMRSKIDPILEARQKYAYGPQHDYLDHPDVIGWTREGDSSHPKSGLATLITDGPGGSKRMYAGLKNAGETWYDITGNRSDTVKIGSDGWGEFHVNKQSVSIYVQK

SEQ ID NO: 27940 - protein, 485 aa, Bacillus sp.
HHNGTNGTMMQYFEWYLPNDGNHWNRLNSDASNLKSKGITAVWIPPAWKGASQNDVGYGAYDLYDLGEFNQKGTVRTKYGTRSQLQAAVTSLKNNGINVYGDVVMNHKGGADATEMVRAVEVNPNNRNQEVTGEYTIEAWTRFDFPGRGNTHSSFKWRWYHFDGVDWDQSRRLNNRIYKFRGHGKAWDWEVDTEFGNYDYLMYADYDMDHPEVVNELRNWGVWYTNTLGLDGFRIDAVKHIKYSFTRDWINHVRSATGKNMFAVAEFWKNDLGAIENYLQKTNWNHSVFDVPLHYNLYNASKSGGNYDMRNIFNGTVVQAHPMHAVTFVDNHDSQPEEALESFVEEWFKPLAYVLTLTREQGYPSVFYGDYYGIPTHGVPAMRSKIDPILEARQKYAYGPQHDYLDHPDVIGWTREGDSSHPKSGLATLITDGPGGSKRMYAGLKNAGETWYDITGNRSDTVKIGSDGWGEFHVNDGSVSIYVQK

SEQ ID NO: 27941 - protein, 483 aa, Bacillus sp.
HHNGTNGTMMQYFEWYLPNDGNHWNRLNSDASNLKSKGITAVWIPPAWKGASQNDVGYGAYDLYDLGEFNQSGTVRTKYGTRSQLQAAVTSLKNNGIQVYGDVVMNHKGGADATEMVRAVEVNPNNRNQEVTGEYTIEAWTRFDFPGRGNTHSSFKWRWYHFDGVDWDQSRRLNNRIYKFRGKAWDWEVDTEFGNYDYLMYADYDMDHPEVVNELRNWGVWYTNTLGLDGFRIDAVKHIKYSFTRDWINHVRSATGKNMFAVAEFWKNDLGAIENYLQKTNWNHSVFDVPLHYNLYNASKSGGNYDMRNIFNGTVVQRHPSHAVTFVDNHDSQPEEALESFVEEWFKPLAYALTLTREQGYPSVFYGDYYGIPTHGVPAMRSKIDPILEARQKYAYGPQHDYLDHPDVIGWTREGDSSHPKSGLATLITDGPGGSKRMYAGLKNAGETWYDITGNRSDTVKIGSDGWGEFHVNDGSVSIYVQK

SEQ ID NO: 27942 - protein, 483 aa, Bacillus sp.
HHNGTNGTMMQYFEWYLPNDGNHWNRLNSDASNLKSKGITAVWIPPAWKGASQNDVGYGAYDLYDLGEFNQKGTVRTKYGTRSQLQAAVTSLKNNGIQVYGDVVMNHKGGADATEMVPAVEVNPNNRNQEVTGEYTIEAWTRFDFPGRGNTHSSFKWRWYHFDGVDWDQSRRLNNRIYKFRAKAWDWEVDTEFGNYDYLMYADYDMDHPEVVNELRNWGVWYTNTLGLDGFRIDAVKHIKYSFTRDWINHVRSATGKNMFAVAEFWKNDLGAIENYLQKTNWNHSVFDVPLHYNLYNASKSGGNYDMRNIFNGTVVQRHPSHAVTFVDNHDSQPEEALESFVEEWFKPLAYALTLTREQGYPSVFYGDYYGIPTHGVPAMRSKIDPILEARQKYAYGPQHDYLDHPDVIGWTREGDSSHPKSGLATLITDGPGGSKRMYAGLKNAGETWYDITGNRSDTVKIGSDGWGEFHVNDGSVSIYVQK

SEQ ID NO: 27943 - protein, 485 aa, Bacillus sp.
HHNGTNGTMMQYFEWYLPNDGNHWNRLNSDASNLKSKGITAVWIPPAWKGASQNDVGYGAYDLYDLGEFNQKGTVRTKYGTRSQLQAAVTSLKNNGIQVYGDVVMNHKGGADATEMVRAVEVNPNNRNQEVTGEYTIEAWTRFDFPGRGNTHSSFKWRWYHFDGVDWDQSRRLNNRIYKFRGHGKAWDWEVDTEFGNYDYLMYADYDMDHPEVVNELRNWGVWYTNTLGLDGFRIDAVKHIKYSFTRDWINHVRSATGKNMFAVAEFWNNDLGAIENYLQKTNWNHSVFDVPLHYNLYNASKSGGNYDMRNIFNGTVVQRHPSHAVTFVDNHDSQPEEALESFVEEWFKPLAYALTLTREQGYPSVFYGDYYGIPTHGVPAMRSKIDPILEARQKYAYGPQHDYLDHPDVIGWTREGDSSHPKSGLATLITDGPGGSKRMYAGLKNAGETWYDITGNRSDTVKIGSDGWGEFHVNDGSVSIYVQK

SEQ ID NO: 27944 - protein, 483 aa, Bacillus sp.
HHNGTNGTMMQYFEWYLPNDGNHWNRLNSDASNLKSKGITAVWIPPAWKGASQNDVGYGAYDLYDLGEFNQKGTVRTKYGTRSQLQAAVTSLKNNGIQVYGDVVMNHKGGADATEMVRAVEVNPNNRNQEVTGEYTIEAWTRFDFPGRGNTHSSFKWRWYHFDGGDWDQSRRLNNRIYKFRGKAWDWEVDTEFGNYDYLMYADYDMDHPEVVNELRNWGVWYTNTLGLDGFRIDAVKHIKYSFTRDWINHVRSATGKNMFAVAEFWKNDLGAIENYLQKTNWNHSVFDVPLHYNLYNASKSGGNYDMRNIFNGTVVQRHPSHAVTFVDNHDSQPEEALESFVEEWFKPLAYALTLTREQGYPSVFYGDYYGIPTHGVPAMRSKIDPILEARQKYAYGPQHDYLDHPDVIGWTREGDSSHPKSGLATLITDGPGGSKRMYAGLKNAGETWYDITGNRSDTVKIGSDGWGEFHVNDGSVSIYVQK

SEQ ID NO: 27945 - protein, 485 aa, Bacillus sp.
HHNGTNGTMMQYFEWYLPNDGNHWNRLNSDASNLKSKGITAVWIPPAWKGASQNDVGYGAYDLYDLGEFNQKGTVRTKYGTRSQLQAAVTSLKNNGIQVYGDVVMNHKGGADATEMVRAVEVNPNNRNQEVTGEYTIEAWTRFDFPGRGNTHSSFKWRWYHFDGVDWDQSRRLNNRIYKFRGHGKAWDWEVDTEFGNYDYLMYADYDMDHPEVVNELRNWGVWYTNTLGLDGFRIDAVKHIKYSFTRDWINHVRSATGKNMFAVAEFWKNDLGAIENYLQKTNWNHSVFDVPLHYNLYNASKSGGNYDMRNIFNGTVVKRHPSHAVTFVDNHDSQPEEALESFVEEWFKPLAYALTLTREQGYPSVFYGDYYGIPTHGVPAMRSKIDPILEARQKYAYGPQHDYLDHPDVIGWTREGDSSHPKSGLATLITDGPGGSKRMYAGLKNAGETWYDITGNRSDTVKIGSDGWGEFHVNDGSVSIYVQK

SEQ ID NO: 27946 - protein, 485 aa, Bacillus sp.
HHNGTNGTMMQYFEWYLPNDGNHWNRLNSDASNLKSKGITAVWIPPAWKGASQNDVGYGAYDLYDLGEFNQKGTVRTKYGTRSQLQAAVTSLKNNGINVYGDVVMNHKGGADATEMVRAVEVNPNNRNQEVTGEYTIEAWTRFDFPGRGNTHSSFKWRWYHFDGVDWDQSRRLNNRIYKFRGHGKAWDWEVDTEFGNYDYLMYADYDMDHPEVVNELRNWGVWYTNTLGLDGFRIDAVKHIKYSFTRDWINHVRSATGKNMFAVAEFWKNDLGAIENYLQKTNWNHSVFDVPLHYNLYNASKSGGNYDMRNIFNGTVVQAHPMHAVTFVDNHDSQPEEALESFVEEWFKPLAYALTLTREQGYPSVFYGDYYGIPTHGVPAMRSKIDPILLARQKYAYGPQHDYLDHPDVIGWTREGDSSHPKSGLATLITDGPGGSKRMYAGLKNAGETWYDITGNRSDTVKIGSDGWGEFHVNDGSVSIYVQK

SEQ ID NO: 27947 - protein, 483 aa, Bacillus sp.
HHNGTNGTMMQYFEWYLPNDGNHWNRLNSDASNLKSKGITAVWIPPAWKGASQNDVGYGAYDLYDLGEFNQKGTVRTKYGTRSQLQAAVTSLKNNGIQVYGDVVMNHKGGADATEMVRAVEVNPNNRNQEVTGEYTIEAWTRFDFPGRGNTHSSFKWRWYHFDGVDWDQSRRLNNRIYKFRGKAWDWEVDTEFGNYDYLMYADYDMDHGEVVNELRNWGVWYTNTLGLDGFRIDAVKHIKYSFTRDWINHVRSATGKNMFAVAEFWKNDLGAIENYLQKTNWNHSVFDVPLHYNLYNASKSGGNYDMRNIFNGTVVQRHPSHAVTFVDNHDSQPEEALESFVEEWFKPLAYALTLTREQGYPSVFYGDYYGIPTHGVPAMRSKIDPILEARQKYAYGPQHDYLDHPDVIGWTREGDSSHPKSGLATLITDGPGGSKRMYAGLKNAGETWYDITGNRSDTVKIGSDGWGEFHVNDGSVSIYVQK

SEQ ID NO: 27948 - protein, 485 aa, Bacillus sp.
HHNGTNGTMMQYFEWYLPNDGNHWNRLNSDASNLKSKGITAVWIPPAWKGASQNDVGYGAYDLYDLGEFNQKGTVRTKYGTRSQLQAAVTSLKNNGIQVYGDVVMNHKGGADATEMVRAVEVNPNNRNQEVTGEYTIEAWTRFDFPGRGNTHSSFKWRWYHFDGVDWDQSRRLNNRIYKFRGHGKAWDWEVDTEFGNYDYLMYADYDMDHPEVVNELRNWGVWYTNTLGLDGFRIDAVKHIKYSFTRDWINHVRSATGKNMFAVAEFWKNDLGAIENYLQKTNWNHSVFDVPLHYNLYNASKSQGNYDMRNIFNGTVVQRHPSHAVTFVDNHDSQPEEALESFVEEWFKPLAYALTLTREQGYPSVFYGDYYGIPTHGVPAMRSKIDPILEARQKYAYGPQHDYLDHPDVIGWTREGDSSHPKSGLATLITDGPGGSKRMYAGLKNAGETWYDITGNRSDTVKIGSDGWGEFHVNGKSVSIYVQK

SEQ ID NO: 27949 - protein, 485 aa, Bacillus sp.
HHNGTNGTMMQYFEWYLPNDGNHWNRLNSDASNLKSKGITAVWIPPAWKGASQNDVGYGAYDLYDLGEFNQKGTVRTKYGTRSQLQAAVTSLKNNGIQVYGDVVMNHKGGADATEMVRAVEVNPNNRNQEVTGEYTIEAWTRFDFPGRGNTHSSFKWRWYHFDGVDFDQSRRLNNRIYKFRGHGKAWDWEVDTEFGNYDYLMYADYDMDHPEVVNELRNWGVWYTNTLGLDGFRIDAVKHIKYSFTRDWINHVRSATGKNMFAVAEFWKNDLGAIENYLQKTNWNHSVFDVPLHYNLYNASKSGGNYDMRNIFNGTVVQRHPSHAVTFVDNHDSQPEEALESFVEEWFKPLAYALTLTREQGYPSVFYGDYYGIPTHGVPAMRSKIDPILEARQKYAYGPQHDYLDHPDVIGWTREGDSSHPKSGLATLITDGPGGSKRMYAGLKNAGETWYDITGNRSDTVKIGSDGWGEFHVNDGSVSIYVQK

SEQ ID NO: 27950 - protein, 483 aa, Bacillus sp.
HHNGTNGTMMQYFEWYLPNDGNHWNRLNSDASNLKSKGITAVWIPPAWKGASQNDVGYGAYDLYDLGEFNQKGTVRTKYGTRSQLQAAVTSLKNNGIQVYGDVVMNHKGGADATEMVRAVEVNPNNRNQEVTGEYTIEAWTRFDFPGRGNTHSSFKWAWYHFDGVDWDQSRRLNNRIYKFRGKAWDWEVDTEFGNYDYLMYADYDMDHPEVVNELRNWGVWYTNTLGLDGFRIDAVKHIKYSFTRDWINHVRSATGKNMFAVAEFWKNDLGAIENYLQKTNWNHSVFDVPLHYNLYNASKSGGNYDMRNIFNGTVVQRHPSHAVTFVDNHDSQPEEALESFVEEWFKPLAYALTLTREQGYPSVFYGDYYGIPTHGVPAMRSKIDPILEARQKYAYGPQHDYLDHPDVIGWTREGDSSHPKSGLATLITDGPGGSKRMYAGLKNAGETWYDITGNRSDTVKIGSDGWGEFHVNDGSVSIYVQK

SEQ ID NO: 27951 - protein, 483 aa, Bacillus sp.
HHNGTNGTMMQYFEWYLPNDGNHWNRLNSDASNLKSKGITAVWIPPAWKGASQNDVGYGAYDLYDLGEFNQKGTVRTKYGTRSQLQAAVTSLKNNGIQVYGDVVMNHKGGADATEMVRAVEVNPNNRNQEVTGEYTIEAWTRFDFPGRGNTHSSFKWRWYHFDGVDWDQSRRLNNRIYPFRGKAWDWEVDTEFGNYDYLMYADYDMDHPEVVNELRNWGVWYTNTLGLDGFRIDAVKHIKYSFTRDWINHVRSATGKNMFAVAEFWKNDLGAIENYLQKTNWNHSVFDVPLHYNLYNASKSGGNYDMRNIFNGTVVQRHPSHAVTFVDNHDSQPEEALESFVEEWFKPLAYALTLTREQGYPSVFYGDYYGIPTHGVPAMRSKIDPILEARQKYAYGPQHDYLDHPDVIGWTREGDSSHPKSGLATLITDGPGGSKRMYAGLKNAGETWYDITGNRSDTVKIGSDGWGEFHVNDGSVSIYVQK

SEQ ID NO: 27952 - protein, 483 aa, Bacillus sp.
HHNGTNGTMMQYFEWYLPNDGNHWNRLNSDASNLKSKGITAVWIPPAWKGASQNDVGYGAYDLYDLGEFNQKGTVRTKYGTRSQLQAAVTSLKNNGIQVYGDVVMNHKGGADATEMVRAVEVNPNNRGQEVTGEYTIEAWTRFDFPGRGNTHSSFKWRWYHFDGVDWDQSRRLNNRIYKFRGKAWDWEVDTEFGNYDYLMYADYDMDHPEVVNELRNWGVWYTNTLGLDGFRIDAVKHIKYSFTRDWINHVRSATGKNMFAVAEFWKNDLGAIENYLQKTNWNHSVFDVPLHYNLYNASKSGGNYDMRNIFNGTVVQRHPSHAVTFVDNHDSQPEEALESFVEEWFKPLAYALTLTREQGYPSVFYGDYYGIPTHGVPAMRSKIDPILEARQKYAYGPQHDYLDHPDVIGWTREGDSSHPKSGLATLITDGPGGSKRMYAGLKNAGETWYDITGNRSDTVKIGSDGWGEFHVNDGSVSIYVQK

SEQ ID NO: 27953 - protein, 485 aa, Bacillus sp.
HHNGTNGTMMQYFEWYLPNDGNHWNRLNSDASNLKSKGITAVWIPPAWKGASQNDVGYGAYDLYDLGEFNQKGTVRTKYGTRSQLQAAVTSLKNNGIQVYGDVVMNHKGGADATEMVRAVEVNPNNRNQEVTGEYTIEAWTRFDFPGRGNTHSSFKWRWYHFDGVDWDQSRRLNNRIYKFRGHGKAWDWEVDTEFGNYDYLMYADYDMDHPEVVNELRNWGVWYTNTLGLDGFRIDAVKHIKDSFTRDWINHVRSATGKNMFAVAEFWKNDLGAIENYLQKTNWNHSVFDVPLHYNLYNASKSGGNYDMRNIFNGTVVQRHPSHAVTFVDNHDSQPEEALESFVEEWFKPLAYALTLTREQGYPSVFYGDYYGIPTHGVPAMRSKIDPILEARQKYAYGPQHDYLDHPDVIGWTREGDSSHPKSGLATLITDGPGGSKRMYAGLKNAGETWYDITGNRSDTVKIGSDGWGEFHVNDGSVSIYVQK

SEQ ID NO: 27954 - protein, 483 aa, Bacillus sp.
HHNGTNGTMMQYFEWYLPNDGNHWNRLNSDASNLKSKGITAVWIPPAWKGASQNDVGYGAYDLYDLGEFNQKGTVRTKYGTRSQLQAAVTSLKNNGIQVYGDVVMNHKGGADATEMVRAVEVNPNNRNQEVTGEYTIEAWTRFDFPGRGNTHSSFKWRWYHFDGVDWDQSRRLNNRIYKFRGKTWDWEVDTEFGNYDYLMYADYDMDHPEVVNELRNWGVWYTNTLGLDGFRIDAVKHIKYSFTRDWINHVRSATGKNMFAVAEFWKNDLGAIENYLQKTNWNHSVFDVPLHYNLYNASKSGGNYDMRNIFNGTVVQRHPSHAVTFVDNHDSQPEEALESFVEEWFKPLAYALTLTREQGYPSVFYGDYYGIPTHGVPAMRSKIDPILEARQKYAYGPQHDYLDHPDVIGWTREGDSSHPKSGLATLITDGPGGSKRMYAGLKNAGETWYDITGNRSDTVKIGSDGWGEFHVNDGSVSIYVQK

SEQ ID NO: 27955 - protein, 483 aa, Bacillus sp.
HHNGTNGTMMQYFEWYLPNDGNHWNRLNSDASNLKSKGITAVWIPPAWKGASQNDVGYGAYDLYDLGEFNQKGTVRTKYGTRSQLQAAVTSLKNNGIQVYGDVVMNHKGGADATEMVRAVEVNPNNRNQEVTGEYTIEAWTRFDFPGRGNTHSSFKWRWYHFDGVDWDQSRRLNNRIYKFRGKAWDWEVDTEFGNYDYLMYADYDMDHPEVVNELRNWGVWYTNTLGLDGFRIDAVKHIKYSFTRDWINHVRSATGKNMFAVAEFWQNDLGAIENYLQKTNWNHSVFDVPLHYNLYNASKSGGNYDMRNIFNGTVVQRHPSHAVTFVDNHDSQPEEALESFVEEWFKPLAYALTLTREQGYPSVFYGDYYGIPTHGVPAMRSKIDPILEARQKYAYGPQHDYLDHPDVIGWTREGDSSHPKSGLATLITDGPGGSKRMYAGLKNAGETWYDITGNRSDTVKIGSDGWGEFHVNDGSVSIYVQK

SEQ ID NO: 27956 - protein, 483 aa, Bacillus sp.
HHNGTNGTMMQYFEWYLPNDGNHWNRLNSDASNLKSKGITAVWIPPAWKAASQNDVGYGAYDLYDLGEFNQKGTVRTKYGTRSQLQAAVTSLKNNGIQVYGDVVMNHKGGADATEMVRAVEVNPNNRNQEVTGEYTIEAWTRFDFPGRGNTHSSFKWRWYHFDGVDWDQSRDLQNRIYKFRGKAWDWEVDTEFGNYDYLMYVDYDMDHPEVVNELRNWGVWYTNTLGLDGFRIDAVKHIKYSFTRDWINHVRSATGKNMFAVAEFWKNDLGAIENYLQKTNWNHSVFDVPLHYNLYNASKSGGNYDMRNIFNGTVVQRHPSHAVTFVDNHDSQPEEALESFVEEWFKPLAYALTLTREQGYPSVFYGDYYGIPTHGVPAMRSKIDPILEARQKYAYGPQHDYLDHPDVIGWTREGDSSHPKSGLATLITDGPGGSKRMYAGLKNAGETWYDITGNRSDTVKIGSDGWGEFHVNDGSVSIYVQK

SEQ ID NO: 27957 - protein, 483 aa, Bacillus sp.
HHNGTNGTMMQYFEWYLPNDGNHWNRLNSDASNLKSKGITAVWIPPAWKGASQNDVGYGAYDLYDLGEFNQKGTVRTKYGTRSQLQAAVTSLKNNGIQVYGDVVMNHKGGADATEMVRAVEVNPNNRNQEVTGEYTIEAWTRFDFPGRGNTHSSFKWRWYHFDGVDWDQSRRLNNRIYKFRGKAWDWEVDTEFGNYDYLMYADYDMDHEEVVNELRNWGVWYTNTLGLDGFRIDAVKHIKYSFTRDWINHVRSATGKNMFAVAEFWKNDLGAIENYLQKTNWNHSVFDVPLHYNLYNASKSGGNYDMRNIFNGTVVQRHPSHAVTFVDNHDSQPEEALESFVEEWFKPLAYALTLTREQGYPSVFYGDYYGIPTHGVPAMRSKIDPILEARQKYAYGPQHDYLDHPDVIGWTREGDSSHPKSGLATLITDGPGGSKRMYAGLKNAGETWYDITGNRSDTVKIGSDGWGEFHVNDGSVSIYVQK

SEQ ID NO: 27958 - protein, 485 aa, Bacillus sp.
HHNGTNGTMMQYFEWYLPNDGNHWNRLNSDASNLKSKGITAVWIPPAWKGASQNDVGYGAYDLYDLGEFNQKGTVRTKYGTRSQLQAAVTSLKNNGIQVYGDVVMNHKGGADATEMVRAVEVNPNNRNQEVTGEYTIEAWTRFDFPGRGNTHSSFKWRWYHFDGVDWDQSRRLNNRIYKFRGHGKAWDWEVDTEFGNYDYLMYADYDMDHPEVVNELRNWGVWYTNTLGLDGFRIDAVKHIKSSFTRDWINHVRSATGKNMFAVAEFWKNDLGAIENYLQKTNWNHSVFDVPLHYNLYNASKSGGNYDMRNIFNGTVVQRHPSHAVTFVDNHDSQPEEALESFVEEWFKPLAYALTLTREQGYPSVFYGDYYGIPTHGVPAMRSKIDPILEARQKYAYGPQHDYLDHPDVIGWTREGDSSHPKSGLATLITDGPGGSKRMYAGLKNAGETWYDITGNRSDTVKIGSDGWGEFHVNDGSVSIYVQK

SEQ ID NO: 27959 - protein, 485 aa, Bacillus sp.
HHNGTNGTMMQYFEWYLPNDGNHWNRLNSDASNLKSKGITAVWIPPAWKGASQNDVGYGAYDLYDLGEFNQKGTVRTKYGTRSQLQAAVTSLKNNGIQVYGDVVMNHKGGADATEMVRAVEVNPNNRNQEVTGEYTIEAWTRFDFPGRGNTHSSFKWRWYHFDGVDWDQSRRLNNRIYKFRGHGKAWDWEVDTEFGNYDYLMYADYDMDHPEVVNELRNWGVWYTNTLGLDGFRIDAVKHIKYSFTRDWINHVRSATGKNMFAVAEFWKNDLGKIENYLQKTNWNHSVFDVPLHYNLYNASKSGGNYDMRNIFNGTVVQRHPSHAVTFVDNHDSQPEEALESFVEEWFKPLAYALTLTREQGYPSVFYGDYYGIPTHGVPAMRSKIDPILEARQKYAYGPQHDYLDHPDVIGWTREGDSSHPKSGLATLITDGPGGSKRMYAGLKNAGETWYDITGNRSDTVKIGSDGWGEFHVNDGSVSIYVQK

SEQ ID NO: 27960 - protein, 485 aa, Bacillus sp.
HHNGTNGTMMQYFEWYLPNDGNHWNRLNSDASNLKSKGITAVWIPPAWKGASQNDVGYGAYDLYDLGEFNQHGTVRTKYGTRSQLQAAVTSLKNNGIQVYGDVVMNHKGGADATEMVRAVEVNPNNRNQEVTGEYTIEAWTRFDFPGRGNTHSSFKWRWYHFDGVDWDQSRRLNNRIYKFRGHGKAWDWEVDTEFGNYDYLMYADYDMDHPEVVNELRNWGVWYTNTLGLDGFRIDAVKHIKYSFTRDWINHVRSATGKNMFAVAEFWKNDLGAIENYLQKTNWNHSVFDVPLHYNLYNASKSGGNYDMRNIFNGTVVQRHPSHAVTFVDNHDSQPEEALESFVEEWFKPLAYALTLTREQGYPSVFYGDYYGIPTHGVPAMRSKIDPILEARQKYAYGPQHDYLDHPDVIGWTREGDSSHPKSGLATLITDGPGGSKRMYAGLKNAGETWYDITGNRSDTVKIGSDGWGEFHVNDGSVSIYVQK

SEQ ID NO: 27961 - protein, 485 aa, Bacillus sp.
HHNGTNGTMMQYFEWYLPNDGNHWNRLNSDASNLKSKGITAVWIPPAWKGASQNDVGYGAYDLYDLGEFNQKGTVRTKYGTRSQLQAAVTSLKNNGIQVYGDVVMNHKGGADATEMVRAVEVNPNNRNQEVTGEYTIEAWTRFDFPGRGNTHSSFKWRWYHFDGVDWDQSRRLNNRIYKFRGHGKAWDWEVDTEFGNYDYLMYADYDMDHPEVVNELRNWGVWYTNTLGLDGFRIDAVKHIKYSFTRDWINHVRSATGKNMFAVAEFWKNDLGAIENYLQKTNWNHSVFDVPLHYNLYNASKSGGNYDMRNIFNGTVVQRHPSHAVTFVDNHDSQPEEALESFVEEWFKPAAYALTLTREQGYPSVFYGDYYGIPTHGVPAMRSKIDPILEARQKYAYGPQHDYLDHPDVIGWTREGDSSHPKSGLATLITDGPGGSKRMYAGLKNAGETWYDITGNRSDTVKIGSDGWGEFHVNDGSVSIYVQK

SEQ ID NO: 27962 - protein, 483 aa, Bacillus sp.
HHNGTNGTMMQYFEWYLPNDGNHWNRLNSDASNLKSKGITAVWIPPAWKGASQNDVGYGAYDLYDLGEFNQKGTVRTKYGTRSQLQAAVTSLKNNGIQVYGDVVMNHKGGADATEMVRAVEVNPNNRNQEVTGDYTIEAWTRFDFPGRGNTHSSFKWRWYHFDGVDWDQSRRLNNRIYLFRNKAWDWEVDTEFGNYDYLMYADYDMDHPEVVNELRNWGVWYTNTLGLDGFRIDAVKHIKYSFTRDWINHVRSATGKNMFAVAEFWKNDLGAIENYLQKTNWNHSVFDVPLHYNLYNASKSGGNYDMRNIFNGTVVQRHPSHAVTFVDNHDSQPEEALESFVEEWFKPLAYALTLTREQGYPSVFYGDYYGIPTHGVPAMRSKIDPILEARQKYAYGPQHDYLDHPDVIGWTREGDSSHPKSGLATLITDGPGGSKRMYAGLKNAGETWYDITGNRSDTVKIGSDGWGEFHVNDGSVSIYVQK

SEQ ID NO: 27963 - protein, 483 aa, Bacillus sp.
HHNGTNGTMMQYFEWYLPNDGNHWNRLNSDASNLKSKGITAVWIPPAWKGASQNDVGYGAYDLYDLGEFNQKGTVRTKYGTRSQLQAAVTSLKNNGIQVYGDVVLNHKGGADATEMVRAVEVNPNNRNQEVTGEYTIEAWTRFDFPGRGNTHSSFKWRWYHFDGVDWDQSRRLNNRIYKFRGKAWDWEVDTENGNYDYLMYADIDYDHPEVVNELRIWGVWYTNTLGLDGFRIDAVKHIKYSFTRDWINHVRSATGKNMFAVAEFWKNDLGAIENYLQKTNWNHSVFDVPLHYNLYNASKSGGNYDMRNIFNGTVVQRHPSHAVTFVDNHDSQPEEALESFVEEWFKPLAYALTLTREQGYPSVFYGDYYGIPTHGVPAMRSKIDPILEARQKYAYGPQHDYLDHPDVIGWTREGDSSHPKSGLATLITDGPGGSKRMYAGLKNAGETWYDITGNRSDTVKIGSDGWGEFHVNDGSVSIYVQK

SEQ ID NO: 27964 - protein, 485 aa, Bacillus sp.
HHNGTNGTMMQYFEWYLPNDGNHWNRLNSDASNLKSKGITAVWIPPAWKGASQNDVGYGAYDLYDLGEFNQKGTVRTKYGTRSQLQAAVTSLKNNGIQVYGDVVMNHKGGADATEMVRAVEVNPNNRNQEVTGEYTIEAWTRFDFPGRGNTHSSFKWRWYHFDGVDYDQSRRLNNRIYKFRGHGKAWDWEVDTEFGNYDYLMYADYDMDHPEVVNELRNWGVWYTNTLGLDGFRIDAVKHIKYSFTRDWINHVRSATGKNMFAVAEFWKNDLGAIENYLQKTNWNHSVFDVPLHYNLYNASKSGGNYDMRNIFNGTVVQRHPSHAVTFVDNHDSQPEEALESFVEEWFKPLAYALTLTREQGYPSVFYGDYYGIPTHGVPAMRSKIDPILEARQKYAYGPQHDYLDHPDVIGWTREGDSSHPKSGLATLITDGPGGSKRMYAGLKNAGETWYDITGNRSDTVKIGSDGWGEFHVNDGSVSIYVQK

SEQ ID NO: 27965 - protein, 485 aa, Bacillus sp.
HHNGTNGTMMQYFEWYLPNDGNHWNRLNSDASNLKSKGITAVWIPPAWKGASQNDVGYGAYDLYDLGEFNQKGTVRTKYGTRSQLQAAVTSLKNNGIQVYGDVVMNHKGGADATEMVRAVEVNPNNRNQEVTGEYTIEAWTRFDFPGRGNTHSSFKWRWYHFDGVDWDQSRRLNNRIYKFRGHGKAWDWEVDTEFGNYDYLMYADYDMDHPEVVNELRNWGVWYTNTLGLDGFRIDAVKHIKYSFTRDWINHVRSATGKNMFAVAEFWKNDLGAIENYLQKTGWNHSVFDVPLHYNLYNASKSGGNYDMRNIFNGTVVQRHPSHAVTFVDNHDSQPEEALESFVEEWFKPLAYALTLTREQGYPSVFYGDYYGIPTHGVPAMRSKIDPILEARQKYAYGPQHDYLDHPDVIGWTREGDSSHPKSGLATLITDGPGGSKRMYAGLKNAGETWYDITGNRSDTVKIGSDGWGEFHVNDGSVSIYVQK

SEQ ID NO: 27966 - protein, 483 aa, Bacillus sp.
HHNGTNGTMMQYFEWYLPNDGNHWNRLNSDASNLKSKGITAVWIPPAWKGASQNDVGYGAYDLYDLGEFNQKGTVRTKYGTRSQLQAAVTSLKNNGIQVYGDVVMNHKGGADATEMVRAVEVNPNNRNQEVTGEYTIEAWTRFDFPGRGNTHSSFKWRWYHFDGVDWDQSRRLNNRIYKFRGKAWDWEVETEFGNYDYLMYADYDMDHPEVVNELRNWGVWYTNTLGLDGFRIDAVKHIKYSFTRDWINHVRSATGKNMFAVAEFWKNDLGAIENYLQKTNWNHSVFDVPLHYNLYNASKSGGNYDMRNIFNGTVVQRHPSHAVTFVDNHDSQPEEALESFVEEWFKPLAYALTLTREQGYPSVFYGDYYGIPTHGVPAMRSKIDPILEARQKYAYGPQHDYLDHPDVIGWTREGDSSHPKSGLATLITDGPGGSKRMYAGLKNAGETWYDITGNRSDTVKIGSDGWGEFHVNDGSVSIYVQK

SEQ ID NO: 27967 - protein, 483 aa, Bacillus sp.
HHNGTNGTMMQYFEWYLPNDGNHWNRLNSDASNLKSKGITAVWIPPAWKAASQNDVGYGAYDLYDLGEFNQKGTVRTKYGTRSQLQAAVTSLKNNGIQVYGDVVMNHKGGADATEMVRAVEVNPNNRNQEVTGEYTIEAWTRFDFPGRGNTHSSFKWRWYHFDGVDWDQSRNLENRIYKFRGKAWDWEVDTEFGNYDYLMYADYDMDHPEVVNELRNWGVWYTNTLGLDGFRIDAVKHIKYSFTRDWINHVRSATGKNMFAVAEFWKNDLGAIENYLQKTNWNHSVFDVPLHYNLYNASKSGGNYDMRNIFNGTVVQRHPSHAVTFVDNHDSQPEEALESFVEEWFKPLAYALTLTREQGYPSVFYGDYYGIPTHGVPAMRSKIDPILEARQKYAYGPQHDYLDHPDVIGWTREGDSSHPKSGLATLITDGPGGSKRMYAGLKNAGETWYDITGNRSDTVKIGSDGWGEFHVNDGSVSIYVQK

SEQ ID NO: 27968 - protein, 483 aa, Bacillus sp.
HHNGTNLTMMQYFEWYLPNDGNHWNRLNSDASNLKSKGITAVWIPPAWKGASQNDVGYGAYDLYDLGEFNQKGTVRTKYGTRSQLQAAVTSLKNNGIQVYGDVVMNHKGGADATEMVRAVEVNPNNRNQEVTGEYTIEAWTRFDFPGRGNTHSSFKWRWYHFDGVDWDQSRRLNNRIYKFRGKAWDWEVDTEFGNYDYLMYADYDMDHPEVVNELRNWGVWYTNTLGLDGFRIDAVKHIKYSFTRDWINHVRSATGKNMFAVAEFWKNDLGAIENYLQKTNWNHSVFDVPLHYNLYNASKSGGNYDMRNIFNGTVVQAHPSHAVTFVDNHDSQPEEALESFVEEWFKPLAYALTLTREQGYPSVFYGDYYGIPTHGVPAMRSKIDPILEARQKYAYGPQHDYLDHPDVIGWTREGDSSHPKSGLATLITDGPGGSKRMYAGLKNAGETWYDITGNRSDTVKIGSDGWGEFHVNDGSVSIYVQK

SEQ ID NO: 27969 - protein, 483 aa, Bacillus sp.
HHNGTNGTMMQYFEWYLPNDGNHWNRLNSDASNLKSKGITAVWIPPAWKGASQNDVGYGAYDLYDLGEFNQKGTVRTKYGTRSQLQAAVTSLKNNGIQVYGDVVMNHKGGADATEMVRAVEVNPNNRNQEVTGEYTIEAWTRFDFPGRGNTHSSFKWRWYHFDGVDWDQSRKLNNRIYKFRGKAWDWEVDTEFGNYDYLMYVDYDMDHPEVVNELRNWGVWYTNTLGLDGFRIDAVKHIKYSFTRDWINHVRSATGKNMFAVAEFWKNDLGAIENYLQKTNWNHSVFDVPLHYNLYNASKSGGNYDMRNIFNGTVVQRHPSHAVTFVDNHDSQPEEALESFVDPWFKPLAYALTLTREQGYPSVFYGDYYGIPTHGVPAMRSKIDPILEARQKYAYGPQHDYLDHPDVIGWTREGDSSHPKSGLATLITDGPGGSKRMYAGLKNAGETWYDITGNRSDTVKIGSDGWGEFHVNGGSVSIYVQK

SEQ ID NO: 27970 - protein, 483 aa, Bacillus sp.
HHNGTNGTMMQYFEWYLPNDGNHWNRLNSDASNLKSKGITAVWIPPAWKATSQNDVGYGAYDLYDLGEFNQKGTVRTKYGTRSQLQAAVTSLKNNGIQVYGDVVMNHKGGADATEMVRAVEVNPNNRNQEVTGEYTIEAWTRFDFPGRGNTHSSFKWRWYHFDGVDFDQSRNVNNRIYKFRGKAWDWEVDTEFGNYDYLMYADYDMDHPEVVNELRNWGVWYTNTLGLDGFRIDAVKHIKYSFTRDWINHVRSATGKNMFAVAEFWKNDLGAIENYLQKTNWNHSVFDVPLHYNLYNASKSGGNYDMRNIFNGTVVQRHPSHAVTFVDNHDSQPEEALESFVEEWFKPLAYALTLTREQGYPSVFYGDYYGIPTHGVPAMRSKIDPILEARQKYAYGPQHDYLDHPDVIGWTREGDSSHPKSGLATLITDGPGGSKRMYAGLKNAGETWYDITGNRSDTVKIGSDGWGEFHVNDGSVSIYVQK

SEQ ID NO: 27971 - protein, 485 aa, Bacillus sp.
HHNGTNGTMMQYFEWYLPNDGNHWNRLNSDASNLKSKGITAVWIPPAWKGASQNDVGYGAYDLYDLGEFNQKGTVRTKYGTRSQLQAAVTSLKNNGIQVYGDVVMNHKGGADATEMVRAVEVNPNNRNQEVTGEYTIEAWTRFDFPGRGNTHSSFKWRWYHFDGVDWDQSRRLNNRIYKFRGHGKAWDWEVDTEFGNYDYLMYADYDMDHPEVVNELRNWGVWYTNTLGLDGFRIDAVKHIKYSFTRDWINHVRSATGKNMFAVAEFWKNDLGYIENYLQKTNWNHSVFDVPLHYNLYNASKSGGNYDMRNIFNGTVVQRHPSHAVTFVDNHDSQPEEALESFVEEWFKPLAYALTLTREQGYPSVFYGDYYGIPTHGVPAMRSKIDPILEARQKYAYGPQHDYLDHPDVIGWTREGDSSHPKSGLATLITDGPGGSKRMYAGLKNAGETWYDITGNRSDTVKIGSDGWGEFHVNDGSVSIYVQK

SEQ ID NO: 27972 - protein, 483 aa, Bacillus sp.
HHNGTNGTMMQYFEWYLPNDGNHWNRLNSDASNLKSKGITAVWIPPAWKGASQNDVGYGAYDLYDLGEFNQKGTVRTKYGTRSQLQAAVTSLKNNGIQVYGDVVMNHKGGADATEMVRAVEVNPNNRNQEVTGEYTIEAWTRFDFPGRGNTHSSFKWRWYHFDGVDWDQSRRLNNRIYKFRGKAWDWEVDTEFGNYDYLMYADYDMDHPEVVNELRNWGVWYTNTLGLDGFRIDAVKHIKYSFTRDWINHVRSATGKNMFAVAEFWKNDLGAIENYLQKTNWNHSVFDVPLHYNLYNASKSGGNYDMRNIFNGTVVQRHPSHAVTFVDNHDSQPEEALESFVEEWFKPLAYALTLTREQGYPSVFYGDYYGIPTHGVPAMRSKIDPILEARQKYAYGPQHDYLDHPDVIGWTREGDSSHPKSGLATLITDGPGGSKRMYAGLKNAGETWYDITGNRSDTVKIGSDGWGEFHVNDGAVSIYVQK

SEQ ID NO: 27973 - protein, 485 aa, Bacillus sp.
HHNGTNGTMMQYFEWYLPNDGNHWNRLNSDASNLKSKGITAVWIPPAWKGASQNDVGYGAYDLYDLGEFNQKGTVRTKYGTRSQLQAAVTSLKNNGIQVYGDVVMNHKGGADATEMVRAVEVNPNNRNQEVTGEYTIEAWTRFDFPGRGNTHSSFKWRWYHFDGVDWDQSREFDNRIYKFRGHGKAWDWEVDTEFGNYDYLMYADYDMDHPEVVNELRNWGVWYTNTLGLDGFRIDAVKHIKYSFTRDWINHVRSATGKNMFAVAEFWKNDLGAIENYLQKTNWNHSVFDVPLHYNLYNASKSSGNYDMRNIFNGTVVQRHPSHAVTFVDNHDSQPEEALESFVDEWFKPLAYALTLTREQGYPSVFYGDYYGIPTHGVPAMRSKIDPILEARQKYAYGPQHDYLDHPDVIGWTREGDSSHPKSGLATLITDGPGGSKRMYAGLKNAGETWYDITGNRSDTVKIGSDGWGEFHVNKQSVSIYVQK

SEQ ID NO: 27974 - protein, 485 aa, Bacillus sp.
HHNGTNGTMMQYFEWYLPNDGNHWNRLNSDASNLKSKGITAVWIPPAWKGASQNDVGYGAYDLYDLGEFNQKGTVRTKYGTRSQLQAAVTSLKNNGIQVYGDVVMNHKGGADATEMVRAVEVNPNNRNQEVTGEYTIEAWTRFDFPGRGNTHSSFKWRWYHFDGVDWDQSRRLNNRIYKFRGHGKAWDWEVDTEFGNYDYLMYADYDMDHVEVVNELRNWGVWYTNTLGLDGFRIDAVKHIKYSFTRDWINHVRSATGKNMFAVAEFWKNDLGAIENYLQKTNWNHSVFDVPLHYNLYNASKSGGNYDMRNIFNGTVVQRHPSHAVTFVDNHDSQPEEALESFVEEWFKPLAYALTLTREQGYPSVFYGDYYGIPTHGVPAMRSKIDPILEARQKYAYGPQHDYLDHPDVIGWTREGDSSHPKSGLATLITDGPGGSKRMYAGLKNAGETWYDITGNRSDTVKIGSDGWGEFHVNDGSVSIYVQK

SEQ ID NO: 27975 - protein, 485 aa, Bacillus sp.
HHNGTNGTMMQYFEWYLPNDGNHWNRLNSDASNLKSKGITAVWIPPAWKAASQNDVGYGAYDLYDLGEFNQKGTVRTKYGTRSQLQAAVTSLKNNGIQVYGDVVMNHKGGSDATEMVRAVEVNPNNRNQEVTGEYTIEAWTRFDFPGRGNTHSSFKWRWYHFDGVDWDQSRRFTNRIYKFRGHGKAWDWEVDTEFGNYDYLMYADYDMDHPEVVNELRNWGVWYTNTLGLDGFRIDAVKHIKYSFTRDWINHVRSATGKNMFAVAEFWKNDLGAIENYLQKTNWNHSVFDVPLHYNLYNASKSGGNYDMRNIFNGTVVQRHPSHAVTFVDNHDSQPEEALESFVEEWFKPLAYALTLTREQGYPSVFYGDYYGIPTHGVPAMRSKIDPILEARQKYAYGPQHDYLDHPDVIGWTREGDSSHPKSGLATLITDGPGGSKRMYAGLKNAGETWYDITGNRSDTVKIGSDGWGEFHVNDGSVSIYVQK

SEQ ID NO: 27976 - protein, 485 aa, Bacillus sp.
HHNGTNGTMMQYFEWYLPNDGNHWNRLNSDASNLKSKGITAVWIPPAWKGASQNDVGYGAYDLYDLGEFNQKGTVRTKYGTRSQLQAAVTSLKNNGIQVYGDVVMNHKGGADATEMVRAVEVNPNNRNQEVTGEYTIEAWTRFDFPGRGNTHSSYKWRWYHFDGVDWDQSRRLNNRIYKFRGHGKAWDWEVDTEFGNYDYLMYADYDMDHPEVVNELRNWGVWYTNTLGLDGFRIDAVKHIKYSFTRDWINHVRSATGKNMFAVAEFWKNDLGAIENYLQKTNWNHSVFDVPLHYNLYNASKSGGNYDMRNIFNGTVVQRHPSHAVTFVDNHDSQPEEALESFVEEWFKPLAYALTLTREQGYPSVFYGDYYGIPTHGVPAMRSKIDPILEARQKYAYGPQHDYLDHPDVIGWTREGDSSHPKSGLATLITDGPGGSKRMYAGLKNAGETWYDITGNRSDTVKIGSDGWGEFHVNDGSVSIYVQK

SEQ ID NO: 27977 - protein, 485 aa, Bacillus sp.
HHNGTNHTMMQYFEWYLPNDGNHWNRLNSDASNLKSKGITAVWIPPAWKGASQNDVGYGAYDLYDLGEFNQKGTVRTKYGTRSQLQAAVTSLKNNGIQVYGDVVMNHKGGADATEMVRAVEVNPNNRNQEVTGEYTIEAWTRFDFPGRGNTHSSFKWRWYHFDGVDWDQSRRLNNRIYKFRGHGKAWDWEVDTEFGNYDYLMYADYDMDHPEVVNELRNWGVWYTNTLGLDGFRIDAVKHIKYSFTRDWINHVRSATGKNMFAVAEFWKNDLGAIENYLQKTNWNHSVFDVPLHYNLYNASKSGGNYDMRNIFNGTVVQRHPSHAVTFVDNHDSQPEEALESFVEEWFKPLAYALTLTREQGYPSVFYGDYYGIPTHGVPAMRSKIDPILEARQKYAYGPQHDYLDHPDVIGWTREGDSSHPKSGLATLITDGPGGSKRMYAGLKNAGETWYDITGNRSDTVKIGSDGWGEFHVNDGSVSIYVQK

SEQ ID NO: 27978 - protein, 485 aa, Bacillus sp.
HHNGTNATMMQYFEWYLPNDGNHWNRLNSDASNLKSKGITAVWIPPAWKGASQNDVGYGAYDLYDLGEFNQKGTVRTKYGTRSQLQAAVTSLKNNGIQVYGDVVMNHKGGADATEMVRAVEVNPNNRNQEVTGEYTIEAWTRFDFPGRGNTHSSFKWRWYHFDGVDWDQSRRLNNRIYKFRGHGKAWDWEVDTEFGNYDYLMYADYDMDHPEVVNELRNWGVWYTNTLGLDGFRIDAVKHIKYSFTRDWINHVRSATGKNMFAVAEFWKNDLGAIENYLQKTNWNHSVFDVPLHYNLYNASKSGGNYDMRNIFNGTVVQMHPSHAVTFVDNHDSQPEEALESFVEEWFKPLAYALTLTREQGYPSVFYGDYYGIPTHGVPAMRSKIDPILEARQKYAYGPQHDYLDHPDVIGWTREGDSSHPKSGLATLITDGPGGSKRMYAGLKNAGETWYDITGNRSDTVKIGSDGWGEFHVNDGSVSIYVQK

SEQ ID NO: 27979 - protein, 483 aa, Bacillus sp.
HHNGTNGTMMQYFEWYLPNDGNHWNRLNSDASNLKSKGITAVWIPPAWKGASQNDVGYGAYDLYDLGEFNQKGTVRTKYGTRSQLQAAVTSLKNNGIQVYGDVVMNHKGGADATEMVRAVEVNPNNRNQEVTGEYTIEAWTRFDFPGRGNTHSSFKWRWYHFDGVDWDQSRRLNNRIYKFRGKAWDWEVDTENGNYDYLMYADIDLDHPEVVNELRVWGVWYTNTLGLDGFRIDAVKHIKYSFTRLWINHVRSATGKNMFAVAEFWKNDLGAIENYLQKTNWNHSVFDVPLHYNLYNASKSGGNYDMRNIFNGTVVQRHPSHAVTFVDNHDSQPEEALESFVEEWFKPLAYALTLTREQGYPSVFYGDYYGIPTHGVPAMRSKIDPILEARQKYAYGPQHDYLDHPDVIGWTREGDSSHPKSGLATLITDGPGGSKRMYAGLKNAGETWYDITGNRSDTVKIGSDGWGEFHVNDGSVSIYVQK

SEQ ID NO: 27980 - protein, 485 aa, Bacillus sp.
HHNGTNGTMMQYFEWYLPNDGNHWNRLNSDASNLKSKGITAVWIPPAWKAVSQNDVGYGAYDLYDLGEFNQKGTVRTKYGTRSQLQAAVTSLKNNGIQVYGDVVMNHKGGADATEMVRAVEVNPNNRNQEVTGEYTIEAWTRFDFPGRGNTHSSFKWRWYHFDGVDWDQSRNLSNRIYKFRGHGKAWDWEVDTEFGNYDYLMYADYDMDHPEVVNELRNWGVWYTNTLGLDGFRIDAVKHIKYSFTRDWINHVRSATGKNMFAVAEFWKNDLGAIENYLQKTNWNHSVFDVPLHYNLYNASKSGGNYDMRNIFNGTVVQRHPSHAVTFVDNHDSQPEEALESFVEEWFKPLAYALTLTREQGYPSVFYGDYYGIPTHGVPAMRSKIDPILEARQKYAYGPQHDYLDHPDVIGWTREGDSSHPKSGLATLITDGPGGSKRMYAGLKNAGETWYDITGNRSDTVKIGSDGWGEFHVNDGSVSIYVQK

SEQ ID NO: 27981 - protein, 485 aa, Bacillus sp.
HHNGTNLTMMQYFEWYLPNDGNHWNRLNSDASNLKSKGITAVWIPPAWKGASQNDVGYGAYDLYDLGEFNQKGTVRTKYGTRSQLQAAVTSLKNNGIQVYGDVVMNHKGGADATEMVRAVEVNPNNRNQEVTGEYTIEAWTRFDFPGRGNTHSSFKWRWYHFDGVDWDQSRRLNNRIYKFRGHGKAWDWEVDTEFGNYDYLMYADYDMDHPEVVNELRNWGVWYTNTLGLDGFRIDAVKHIKYSFTRDWINHVRSATGKNMFAVAEFWKNDLGAIENYLQKTNWNHSVFDVPLHYNLYNASKSGGNYDMRNIFNGTVVQAHPSHAVTFVDNHDSQPEEALESFVEEWFKPLAYALTLTREQGYPSVFYGDYYGIPTHGVPAMRSKIDPILEARQKYAYGPQHDYLDHPDVIGWTREGDSSHPKSGLATLITDGPGGSKRMYAGLKNAGETWYDITGNRSDTVKIGSDGWGEFHVNDGSVSIYVQK

SEQ ID NO: 27982 - protein, 483 aa, Synthetic construct
HHNGTNGTMMQYFEWYLPNDGNHWNRLNSDASNLKSKGITAVWIPPAWKGASQNDVGYGAYDLYDLGEFNQKGTVRTKYGTRSQLQAAVTSLKNNGIQVYGDVVMNHKGGADATEMVRAVEVNPNNRNQEVTGEYTIEAWTRFDFPGRGNTHSSFKWRWYHFDGVDWDQSRRLNNRIYKFRGKAWDWEVDTENGNYDYLMYADYDMDFPEVVNEVRNWGVWYTNTLGLDGFRIDAVKHIKYSFTRDWINHVRSATGKNMFAVAEFWKNDLGAIENYLQKTNWNHSVFDVPLHYNLYNASKSGGNYDMRNIFNGTVVQRHPSHAVTFVDNHDSQPEEALESFVEEWFKPLAYALTLTREQGYPSVFYGDYYGIPTHGVPAMRSKIDPILEARQKYAYGPQHDYLDHPDVIGWTREGDSSHPKSGLATLITDGPGGSKRMYAGLKNAGETWYDITGNRSDTVKIGSDGWGEFHVNDGSVSIYVQK

SEQ ID NO: 27983 - protein, 483 aa, Bacillus sp.
HHNGTNGTMMQYFEWYLPNDGNHWNRLNSDASNLKSKGITAVWIPPAWKGASQNDVGYGAYDLYDLGEFNQKGTVRTKYGTRSQLQAAVTSLKNNGIQVYGDVVMNHKGGADATEMVRAVEVNPNNRNQEVTGEYTIEAWTRFDFPGRGNTHSSFKWRWYHFDGVDWDQSRRLNNRIYKFRGKAWDWEVDTEFGNYDYLMYADYDMDHPEVVNELRNWGVWYTNTLGLDGFRIDAVKHIKYSFTRDWINHVRSATGKNMFAVAEFWKNDLGAIENYLQKTNWNHSVFDVPLHYNLYNASKSGGNYDMRNIFNGTVVQRHPSHAVTFVDNHDSQPEEALESFVEEWFKPLAYALTLTREQGYPSVFYGDYYGIPTHGVPAMRSKIDPILEARQKYAYGPQHDYLDHPDVIGWTREGDSSHPKSGLATLITDGPGGSKRMYAGLKNAGETWYDITGNRSDTVKIGSDGWGEFHVNQKSVSIYVQK

SEQ ID NO: 27984 - protein, 483 aa, Bacillus sp.
HHNGTNGTMMQYFEWYLPNDGNHWNRLNSDASNLKSKGITAVWIPPAWKGASQNDVGYGAYDLYDLGEFNQKGTVRTKYGTRSQLQAAVTSLKNNGIQVYGDVVMNHKGGADATEMVRAVEVNPNNRNQEVTGEYTIEAWTRFDFPGRGNTHSSFKWRWYHFDGVDWDQSRRLNNRIYKFRGKAWDWEVDTEFGNYDYLMYADYDMDHPEVVNELRNWGVWYTNTLGLDGFRIDAVKHIKYSFTRDWINHVRSATGKNMFAVAEFWKNDLGAIENYLQKTNWNHSVFDVPLHYNLYNASKSGGNYDMRNIFNGTVVQRHPSHAVTFVDNHDSQPEEALESFVDEWFKPLAYALTLTREQGYPSVFYGDYYGIPTHGVPAMRSKIDPILEARQKYAYGPQHDYLDHPDVIGWTREGDSSHPKSGLATLITDGPGGSKRMYAGLKNAGETWYDITGNRSDTVKIGSDGWGEFHVNQASVSIYVQK

SEQ ID NO: 27985 - protein, 485 aa, Bacillus sp.
HHNGTNGTMMQYFEWYLPNDGNHWNRLNSDASNLKSKGITAVWIPPAWKGASQNDVGYGAYDLYDLGEFNQKGTVRTKYGTRSQLQAAVTSLKNNGIQVYGDVVMNHKGGADATEMVRAVEVNPNNRNQEVTGEYTIEAWTRFDFPGRGNTHSSFKWRWYHFDGVDWDQSRRTTNRIYKFRGHGKAWDWEVDTEFGNYDYLMYVDYDMDHPEVVNELRNWGVWYTNTLGLDGFRIDAVKHIKYSFTRDWINHVRSATGKNMFAVAEFWKNDLGAIENYLQKTNWNHSVFDVPLHYNLYNASKSGGNYDMRNIFNGTVVQRHPSHAVTFVDNHDSQPEEALESFVEEWFKPLAYALTLTREQGYPSVFYGDYYGIPTHGVPAMRSKIDPILEARQKYAYGPQHDYLDHPDVIGWTREGDSSHPKSGLATLITDGPGGSKRMYAGLKNAGETWYDITGNRSDTVKIGSDGWGEFHVNDGSVSIYVQK

SEQ ID NO: 27986 - protein, 483 aa, Bacillus sp.
HHNGTNGTMMQYFEWYLPNDGNHWNRLNSDASNLKSKGITAVWIPPAWKATSQNDVGYGAYDLYDLGEFNQKGTVRTKYGTRSQLQAAVTSLKNNGIQVYGDVVMNHKGGADATEMVRAVEVNPNNRNQEVTGEYTIEAWTRFDFPGRGNTHSSFKWRWYHFDGVDWDQSRRVNNRIYKFRGKAWDWEVDTEFGNYDYLMYVDYDMDHPEVVNELRNWGVWYTNTLGLDGFRIDAVKHIKYSFTRDWINHVRSATGKNMFAVAEFWKNDLGAIENYLQKTNWNHSVFDVPLHYNLYNASKSGGNYDMRNIFNGTVVQRHPSHAVTFVDNHDSQPEEALESFVEEWFKPLAYALTLTREQGYPSVFYGDYYGIPTHGVPAMRSKIDPILEARQKYAYGPQHDYLDHPDVIGWTREGDSSHPKSGLATLITDGPGGSKRMYAGLKNAGETWYDITGNRSDTVKIGSDGWGEFHVNDGSVSIYVQK

SEQ ID NO: 27987 - protein, 485 aa, Bacillus sp.
HHNGTNGTMMQYFEWYLPNDGNHWNRLNSDASNLKSKGITAVWIPPAWKAASQNDVGYGAYDLYDLGEFNQKGTVRTKYGTRSQLQAAVTSLKNNGIQVYGDVVMNHKGGADATEMVRAVEVNPNNRNQEVTGEYTIEAWTRFDFPGRGNTHSSFKWRWYHFDGVDWDQSRRVNNRIYKFRGHGKAWDWEVDTEFGNYDYLMYADYDMDHPEVVNELRNWGVWYTNTLGLDGFRIDAVKHIKYSFTRDWINHVRSATGKNMFAVAEFWKNDLGAIENYLQKTNWNHSVFDVPLHYNLYNASKSGGNYDMRNIFNGTVVQRHPSHAVTFVDNHDSQPEEALESFVEEWFKPLAYALTLTREQGYPSVFYGDYYGIPTHGVPAMRSKIDPILEARQKYAYGPQHDYLDHPDVIGWTREGDSSHPKSGLATLITDGPGGSKRMYAGLKNAGETWYDITGNRSDTVKIGSDGWGEFHVNDGSVSIYVQK

SEQ ID NO: 27988 - protein, 485 aa, Bacillus sp.
HHNGTNGTMMQYFEWYLPNDGNHWNRLNSDASNLKSKGITAVWIPPAWKGASQNDVGYGAYDLYDLGEFNQKGTVRTKYGTRSQLQAAVTSLKNNGIQVYGDVVMNHKGGADATEMVRAVEVNPNNRNQEVTGEYTIEAWTRFDFPGRGNTHSSFKWRWYHFDGVDWDQSRRLNNRIYKFRGHGKAWDWEVDTEFGNYDYLMYADYDMDHPEVVNELRNWGVWYTNTLGLDGFRIDAVKHIKYSFTRDWINHVRSATGKNMFAVAEFWKNDLGAIENYLQKTNWNHSVFDVPLHYNLYNASKSGGNYDMRNIFNGTVVQRHPSHAVTFVDNHDSQPEEALESFVDEWFKPLAYALTLTREQGYPSVFYGDYYGIPTHGVPAMRSKIDPILEARQKYAYGPQHDYLDHPDVIGWTREGDSSHPKSGLATLITDGPGGSKRMYAGLKNAGETWYDITGNRSDTVKIGSDGWGEFHVNQQSVSIYVQK

SEQ ID NO: 27989 - protein, 483 aa, Bacillus sp.
HHNGTNGTMMQYFEWYLPNDGNHWNRLNSDASNLKSKGITAVWIPPAWKGASQNDVGYGAYDLYDLGEFNQKGTVRTKYGTRSQLQAAVTSLKNNGIQVYGDVVMNHKGGADATEMVRAVEVNPNNRNQEVTGEYTIEAWTRFDFPGRGNTHSSFKWRWYHFDGVDWDQSRRLNNRIYKFRGKAWDWEVDTEFGNYDYLMYADYDMDMPEVVNELRNWGVWYTNTLGLDGFRIDAVKHIKYSFTRDWINHVRSATGKNMFAVAEFWKNDLGAIENYLQKTNWNHSVFDVPLHYNLYNASKSGGNYDMRNIFNGTVVQRHPSHAVTFVDNHDSQPEEALESFVEEWFKPLAYALTLTREQGYPSVFYGDYYGIPTHGVPAMRSKIDPILEARQKYAYGPQHDYLDHPDVIGWTREGDSSHPKSGLATLITDGPGGSKRMYAGLKNAGETWYDITGNRSDTVKIGSDGWGEFHVNDGSVSIYVQK

SEQ ID NO: 27990 - protein, 485 aa, Bacillus sp.
HHNGTNGTMMQYFEWYLPNDGNHWNRLNSDASNLKSKGITAVWIPPAWKAASQNDVGYGAYDLYDLGEFNQKGTVRTKYGTRSQLQAAVTSLKNNGIQVYGDVVMNHKGGADATEMVRAVEVNPNNRNQEVTGEYTIEAWTRFDFPGRGNTHSSFKWRWYHFDGVDWDQSRRLNNRIYKFRGHGKAWDWEVDTEFGNYDYLMYADYDMDHPEVVNELRNWGVWYTNTLGLDGFRIDAVKHIKYSFTRDWINHVRSATGKNMFAVAEFWKNDLGAIENYLQKTNWNHSVFDVPLHYNLYNASKSGGNYDMRNIFNGTVVQRHPSHAVTFVDNHDSQPEEALESFVEEWFKPLAYALTLTREQGYPSVFYGDYYGIPTHGVPAMRSKIDPILEARQKYAYGPQHDYLDHPDVIGWTREGDSSHPKSGLATLITDGPGGSKRMYAGLKNAGETWYDITGNRSDTVKIGSDGWGEFHVNDGSVSIYVQK

SEQ ID NO: 27991 - protein, 483 aa, Bacillus sp.
HHNGTNGTMMQYFEWYLPNDGNHWNRLNSDASNLKSKGITAVWIPPAWKGASQNDVGYGAYDLYDLGEFNQKGTVRTKYGTRSQLQAAVTSLKNNGIQVYGDVVMNHKGGADATEMVRAVEVNPNNRNQEVTGEYTIEAWTRFDFPGRGNTHSSFKWRWYHFDGVDWDQSRRLNNRIYKFRGKAWDWEVDTEFGNYDYLMYADYDMDHPEVVNELRNWGVWYTNTLGLDGFRIDAVKHIKFSFTRDWINHVRSATGKNMFAVAEFWKNDLGAIENYLQKTNWNHSVFDVPLHYNLYNASKSGGNYDMRNIFNGTVVQRHPSHAVTFVDNHDSQPEEALESFVEEWFKPLAYALTLTREQGYPSVFYGDYYGIPTHGVPAMRSKIDPILEARQKYAYGPQHDYLDHPDVIGWTREGDSSHPKSGLATLITDGPGGSKRMYAGLKNAGETWYDITGNRSDTVKIGSDGWGEFHVNDGSVSIYVQK

SEQ ID NO: 27992 - protein, 483 aa, Bacillus sp.
HHNGTNGTMMQYFEWYLPNDGNHWNRLNSDASNLKSKGITAVWIPPAWKGASQNDVGYGAYDLYDLGEFNQKGTVRTKYGTRSQLQAAVTSLKNNGIQVYGDVVMNHKGGADATEMVRAVEVNPNNRQQEVTGEYTIEAWTRFDFPGRGNTHSSFKWRWYHFDGVDWDQSRRLNNRIYKFRGKAWDWEVDTEFGNYDYLMYADYDMDHPEVVNELRNWGVWYTNTLGLDGFRIDAVKHIKYSFTRDWINHVRSATGKNMFAVAEFWKNDLGAIENYLQKTNWNHSVFDVPLHYNLYNASKSGGNYDMRNIFNGTVVQRHPSHAVTFVDNHDSQPEEALESFVEEWFKPLAYALTLTREQGYPSVFYGDYYGIPTHGVPAMRSKIDPILEARQKYAYGPQHDYLDHPDVIGWTREGDSSHPKSGLATLITDGPGGSKRMYAGLKNAGETWYDITGNRSDTVKIGSDGWGEFHVNDGSVSIYVQK

SEQ ID NO: 27993 - protein, 485 aa, Bacillus sp.
HHNGTNGTMMQYFEWYLPNDGNHWNRLNSDASNLKSKGITAVWIPPALKGASQNDVGYGAYDLYDLGEFNQKGTVRTKYGTRSQLQAAVTSLKNNGIQVYGDVVMNHKGGADATEMVRAVEVNPNNRNQEVTGEYTIEAWTRFDFPGRGNTHSSFKWRWYHFDGVDWDQSRRLNNRIYKFRGHGKAWDWEVDTEFGNYDYLMYADYDMDHPEVVNELRNWGVWYTNTLGLDGFRIDAVKHIKYSFTRDWINHVRSATGKNMFAVAEFWKNDLGAIENYLQKTNWNHSVFDVPLHYNLYNASKSGGNYDMRNIFNGTVVQRHPSHAVTFVDNHDSQPEEALESFVEEWFKPLAYALTLTREQGYPSVFYGDYYGIPTHGVPAMRSKIDPILEARQKYAYGPQHDYLDHPDVIGWTREGDSSHPKSGLATLITDGPGGSKRMYAGLKNAGETWYDITGNRSDTVKIGSDGWGEFHVNDGSVSIYVQK

SEQ ID NO: 27994 - protein, 485 aa, Bacillus sp.
HHNGTNKTMMQYFEWYLPNDGNHWNRLNSDASNLKSKGITAVWIPPAWKGASQNDVGYGAYDLYDLGEFNQKGTVRTKYGTRSQLQAAVTSLKNNGIQVYGDVVMNHKGGADATEMVRAVEVNPNNRNQEVTGEYTIEAWTRFDFPGRGNTHSSFKWRWYHFDGVDWDQSRRLNNRIYKFRGHGKAWDWEVDTEFGNYDYLMYADYDMDHPEVVNELRNWGVWYTNTLGLDGFRIDAVKHIKYSFMRDWINHVRSATGKNMFAVAEFWKNDLGAIENYLQKTNWNHSVFDVPLHYNLYNASKSGGNYDMRNIFNGTVVQAHPMHAVTFVDNHDSQPEEALESFVEEWFKPLAYALTLTREQGYPSVFYGDYYGIPTHGVPAMRSKIDPILEARQKYAYGPQHDYLDHPDVIGWTREGDSSHPKSGLATLITDGPGGSKRMYAGLKNAGETWYDITGNRSDTVKIGSDGWGEFHVNDGSVSIYVQK

SEQ ID NO: 27995 - protein, 483 aa, Bacillus sp.
HHNGTNGTMMQYFEWYLPNDGNHWNRLNSDASNLKSKGITAVWIPPAWKAVSQNDVGYGAYDLYDLGEFNQKGTVRTKYGTRSQLQAAVTSLKNNGIQVYGDVVMNHKGGADATEMVRAVEVNPNNRNQEVTGEYTIEAWTRFDFPGRGNTHSSFKWRWYHFDGVDWDQSRDLENRIYKFRGKAWDWEVDTEFGNYDYLMYADYDMDHPEVVNELRNWGVWYTNTLGLDGFRIDAVKHIKYSFTRDWINHVRSATGKNMFAVAEFWKNDLGAIENYLQKTNWNHSVFDVPLHYNLYNASKSGGNYDMRNIFNGTVVQAHPNHAVTFVDNHDSQPEEALESFVEEWFKPLAYALTLTREQGYPSVFYGDYYGIPTHGVPAMRSKIDPILEARQKYAYGPQHDYLDHPDVIGWTREGDSSHPKSGLATLITDGPGGSKRMYAGLKNAGETWYDITGNRSDTVKIGSDGWGEFHVNDGSVSIYVQK

SEQ ID NO: 27996 - protein, 483 aa, Bacillus sp.
HHNGTNATMMQYFEWYLPNDGNHWNRLNSDASNLKSKGITAVWIPPAWKGASQNDVGYGAYDLYDLGEFNQKGTVRTKYGTRSQLQAAVTSLKNNGIQVYGDVVMNHKGGADATEMVRAVEVNPNNRNQEVTGEYTIEAWTRFDFPGRGNTHSSFKWRWYHFDGVDWDQSRRLNNRIYKFRGKAWDWEVDTEFGNYDYLMYADYDMDHPEVVNELRNWGVWYTNTLGLDGFRIDAVKHIKYSFTRDWINHVRSATGKNMFAVAEFWKNDLGAIENYLQKTNWNHSVFDVPLHYNLYNASKSGGNYDMRNIFNGTVVQMHPSHAVTFVDNHDSQPEEALESFVEEWFKPLAYALTLTREQGYPSVFYGDYYGIPTHGVPAMRSKIDPILEARQKYAYGPQHDYLDHPDVIGWTREGDSSHPKSGLATLITDGPGGSKRMYAGLKNAGETWYDITGNRSDTVKIGSDGWGEFHVNDGSVSIYVQK

SEQ ID NO: 27997 - protein, 483 aa, Bacillus sp.
HHNGTNGTMMQYFEWYLPNDGNHWNRLNSDASNLKSKGITAVWIPPAWKGASQNDVGYGAYDLYDLGEFNQKGTVRTKYGTRSQLQAAVTSLKNNGIQVYGDVVMNHKGGADATEMVRAVEVNPNNRNQEVTGEYTIEAWTRFDFPGRGNTHSSFKWRWYHFDGVDWDQSRRLNNRIYKFRGKAWDWEVDTEFGNYDYLMYADYDMDHPEVVNELRNWGVWYTNTLGLDGFRIDAVKHIKYSFTRDWINHVRSATGKNMFAVAEFWKNDLGAIENYLQKTNWNHSVFDVPLHYNLYNASQSSGNYDMRNIFNGTVVQRHPSHAVTFVDNHDSQPEEALESFVDEWFKPLAYALTLTREQGYPSVFYGDYYGIPTHGVPAMRSKIDPILEARQKYAYGPQHDYLDHPDVIGWTREGDSSHPKSGLATLITDGPGGSKRMYAGLKNAGETWYDITGNRSDTVKIGSDGWGEFHVNGQSVSIYVQK

SEQ ID NO: 27998 - protein, 483 aa, Bacillus sp.
HHNGTNKTMMQYFEWYLPNDGNHWNRLNSDASNLKSKGITAVWIPPAWKGASQNDVGYGAYDLYDLGEFNQKGTVRTKYGTRSQLQAAVTSLKNNGIQVYGDVVMNHKGGADATEMVRAVEVNPNNRNQEVTGEYTIEAWTRFDFPGRGNTHSSFKWRWYHFDGVDWDQSRRLNNRIYKFRGKAWDWEVDTEFGNYDYLMYADYDMDHPEVVNELRNWGVWYTNTLGLDGFRIDAVKHIKYSFTRDWINHVRSATGKNMFAVAEFWKNDLGAIENYLQKTNWNHSVFDVPLHYNLYNASKSGGNYDMRNIFNGTVVQAHPSHAVTFVDNHDSQPEEALESFVEEWFKPLAYALTLTREQGYPSVFYGDYYGIPTHGVPAMRSKIDPILEARQKYAYGPQHDYLDHQDVIGWTREGDSSHPKSGLATLITDGPGGSKRMYAGLKNAGETWYDITGNRSDTVKIGSDGWGEFHVNDGSVSIYVQK

SEQ ID NO: 27999 - protein, 485 aa, Bacillus sp.
HHNGTNGTMMQYFEWYLPNDGNHWNRLNSDASNLKSKGITAVWIPPAWKGASQNDVGYGAYDLYDLGEFNQKGTVRTKYGTRSQLQAAVTSLKNNGIQVYGDVVMNHKGGADATEMVRAVEVNPNNRNQEVTGEYTIEAWTRFDFPGRGNTHSSFKWRWYHFDGVDWDQSRRLNNRIYKFRGHGKAWDWEVDTEFGNYDYLMYADYDMDHPEVVNELRNWGVWYTNTLGLDGFRIDAVKHIKYSFTRDWINHVRSATGKNMFAVAEFWKNDLGHIENYLQKTNWNHSVFDVPLHYNLYNASKSGGNYDMRNIFNGTVVQRHPSHAVTFVDNHDSQPEEALESFVEEWFKPLAYALTLTREQGYPSVFYGDYYGIPTHGVPAMRSKIDPILEARQKYAYGPQHDYLDHPDVIGWTREGDSSHPKSGLATLITDGPGGSKRMYAGLKNAGETWYDITGNRSDTVKIGSDGWGEFHVNDGSVSIYVQK

SEQ ID NO: 28000 - protein, 485 aa, Bacillus sp.
HHNGTNGTMMQYFEWYLPNDGNHWNRLNSDASNLKSKGITAVWIPPAWKGASQNDVGYGAYDLYDLGEFNQKGTVRTKYGTRSQLQAAVTSLKNNGIQVYGDVVMNHKGGADATEMVRAVEVNPNNRNQEVTGEYTIEAWTRFDFPGRGNTHSSFKWRWYHFDGVDWDQSRRLNNRIYKFRGHGKAWDWEVDTEFGNYDYLMYADYDMDHPEVVNELRNWGVWYTNTLGLDGFRIDAVKHIKYSFTRDWINHVRSATGKNMFAVAEFWKNDLGAIENYLQKTNWNHSVFDVPLHYNLYNASKSGGNYDMRNIFNGTVVQRHPSHAVTFVDNHDSQPEEALESFVDTWFKPLAYALTLTREQGYPSVFYGDYYGIPTHGVPAMRSKIDPILEARQKYAYGPQHDYLDHPDVIGWTREGDSSHPKSGLATLITDGPGGSKRMYAGLKNAGETWYDITGNRSDTVKIGSDGWGEFHVNGSSVSIYVQK

SEQ ID NO: 28001 - protein, 483 aa, Bacillus sp.
HHNGTNGTMMQYFEWYLPNDGNHWNRLNSDASNLKSKGITAVWIPPAWKGASQNDVGYGAYDLYDLGEFNQKGTVRTKYGTRSQLQAAVTSLKNNGIQVYGDVVMNHKGGADATEMVRAVEVNPNNRNQEVTGEYTIEAWTRFDFPGRGNTHSSFKWRWYHFDGVDWDQSRRLNNRIYKFRGKAWDWEVDTEFGNYDYLMYTDYDMDHPEVVNELRNWGVWYTNTLGLDGFRIDAVKHIKYSFTRDWINHVRSATGKNMFAVAEFWKNDLGAIENYLQKTNWNHSVFDVPLHYNLYNASKSGGNYDMRNIFNGTVVQRHPSHAVTFVDNHDSQPEEALESFVEEWFKPLAYALTLTREQGYPSVFYGDYYGIPTHGVPAMRSKIDPILEARQKYAYGPQHDYLDHPDVIGWTREGDSSHPKSGLATLITDGPGGSKRMYAGLKNAGETWYDITGNRSDTVKIGSDGWGEFHVNDGSVSIYVQK

SEQ ID NO: 28002 - protein, 483 aa, Bacillus sp.
HHNGTNGTMMQYFEWYLPNDGNHWNRLNSDASNLKSKGITAVWIPPAWKGASQNDVGYGAYDLYDLGEFNQKGTVRTKYGTRSQLQAAVTSLKNNGIQVYGDVVMNHKGGADQTEMVRAVEVNPNNRNQEVTGEYTIEAWTRFDFPGRGNTHSSFKWRWYHFDGVDWDQSRRLNNRIYKFRGKAWDWEVDTEFGNYDYLMYADYDMDHPEVVNELRNWGVWYTNTLGLDGFRIDAVKHIKYSFTRDWINHVRSATGKNMFAVAEFWKNDLGAIENYLQKTNWNHSVFDVPLHYNLYNASKSGGNYDMRNIFNGTVVQRHPSHAVTFVDNHDSQPEEALESFVEEWFKPLAYALTLTREQGYPSVFYGDYYGIPTHGVPAMRSKIDPILEARQKYAYGPQHDYLDHPDVIGWTREGDSSHPKSGLATLITDGPGGSKRMYAGLKNAGETWYDITGNRSDTVKIGSDGWGEFHVNDGSVSIYVQK

SEQ ID NO: 28003 - protein, 483 aa, Bacillus sp.
HHNGTNGTMMQYFEWYLPNDGNHWNRLNSDASNLKSKGITAVWIPPAWKGASQNDVGYGAYDLYDLGEFNQKGTVRTKYGTRSQLQAAVTSLKNNGIQVYGDVVMNHKGGADATEMVRAVEVNPNNRNQEVTGEYTIEAWTRFDFPGRRNTHSSFKWRWYHFDGVDWDQSRRLNNRIYKFRGKAWDWEVDTEFGNYDYLMYADYDMDHPEVVNELRNWGVWYTNTLGLDGFRIDAVKHIKYSFTRDWINHVRSATGKNMFAVAEFWKNDLGAIENYLQKTNWNHSVFDVPLHYNLYNASKSGGNYDMRNIFNGTVVQRHPSHAVTFVDNHDSQPEEALESFVEEWFKPLAYALTLTREQGYPSVFYGDYYGIPTHGVPAMRSKIDPILEARQKYAYGPQHDYLDHPDVIGWTREGDSSHPKSGLATLITDGPGGSKRMYAGLKNAGETWYDITGNRSDTVKIGSDGWGEFHVNDGSVSIYVQK

SEQ ID NO: 28004 - protein, 485 aa, Bacillus sp.
HHNGTNGTMMQYFEWYLPNDGNHWNRLNSDASNLKSKGITAVWIPPAWKGASQNDVGYGAYDLYDLGEFNQKGTVRTKYGTRSQLQAAVTSLKNNGIQVYGDVVMNHKGGADATEMVRAVEVNPNNRNQEVTGEYTIEAWTRFDFPGRGNTHSSFKWRWYHFDGVDWDQSRRLNNRIYKFRGHGKAWDWEVDTEFGNYDYLMYADYDMDHPESVNELRNWGVWYTNTLGLDGFRIDAVKHIKYSFTRDWINHVRSATGKNMFAVAEFWKNDLGAIENYLQKTNWNHSVFDVPLHYNLYNASKSGGNYDMRNIFNGTVVQRHPSHAVTFVDNHDSQPEEALESFVEEWFKPLAYALTLTREQGYPSVFYGDYYGIPTHGVPAMRSKIDPILEARQKYAYGPQHDYLDHPDVIGWTREGDSSHPKSGLATLITDGPGGSKRMYAGLKNAGETWYDITGNRSDTVKIGSDGWGEFHVNDGSVSIYVQK

SEQ ID NO: 28005 - protein, 485 aa, Bacillus sp.
HHNGTNGTMMQYFEWYLPNDGNHWNRLNSDASNLKSKGITAVWIPPAWKGASQNDVGYGAYDLYDLGEFNQKGTVRTKYGTRSQLQAAVTSLKNNGIKVYGDVVMNHKGGADATEMVRAVEVNPNNRNQEVTGEYTIEAWTRFDFPGRGNTHSSFKWRWYHFDGVDWDQSRRLNNRIYKFRGHGKAWDWEVDTEFGNYDYLMYADYDMDHPEVVNELRNWGVWYTNTLGLDGFRIDAVKHIKYSFTRDWINHVRSATGKNMFAVAEFWKNDLGAIENYLQKTNWNHSVFDVPLHYNLYNASKSGGNYDMRNIFNGTVVQRHPSHAVTFVDNHDSQPEEALESFVEEWFKPLAYALTLTREQGYPSVFYGDYYGIPTHGVPAMRSKIDPILEARQKYAYGPQHDYLDHPDVIGWTREGDSSHPKSGLATLITDGPGGSKRMYAGLKNAGETWYDITGNRSDTVKIGSDGWGEFHVNDGSVSIYVQK

SEQ ID NO: 28006 - protein, 485 aa, Bacillus sp.
HHNGTNGTMMQYFEWYLPNDGNHWNRLNSDASNLKSKGITAVWIPPAWKGASQNDVGYGAYDLYDLGEFNQKGTVRTKYGTRSQLQAAVTSLKNNGIQVYGDVVMNHKGGADATEMVRAVEVNPNNRNQEVTGEYTIEAWTRFDFPGRGNTHSSFKWRWYHFDGVDWDQSRRLNNRIYKFRGHGKAWDWEVDTEFGNYDYLMYADYDMDHPEVVNELRNWGVWYTNTLGLDGFRIDAVKHIKYSFTRDWINHVRSATGKNMFAVAEFWKNDLGAIENYLQKTNWNHSVFDVPLHYNLYNASKSAGNYDMRNIFNGTVVQRHPSHAVTFVDNHDSQPEEALESFVEEWFKPLAYALTLTREQGYPSVFYGDYYGIPTHGVPAMRSKIDPILEARQKYAYGPQHDYLDHPDVIGWTREGDSSHPKSGLATLITDGPGGSKRMYAGLKNAGETWYDITGNRSDTVKIGSDGWGEFHVNDGSVSIYVQK

SEQ ID NO: 28007 - protein, 485 aa, Bacillus sp.
HHNGTNGTMMQYFEWYLPNDGNHWNRLNSDASNLKSKGITAVWIPPAWKGASQNDVGYGAYDLYDLGEFNQKGTVRTKYGTRSQLQAAVTSLKNNGIQVYGDVVMNHKGGADATEMVRAVEVNPNNRNQEVTGEYTIEAWTRFDFPGRGNTHSSFKWRWYHFDGVDWDQSRRLNNRIYKFRGHGKAWDWEVDTEFGNYDYLMYADYDMDHPEVVNELRNWGVWYTNTLGLDGFRIDAVKHIKYSFTRDWINHVRSATGKNMFAVAEFWKNDLGAIENYLQKTHWNHSVFDVPLHYNLYNASKSGGNYDMRNIFNGTVVQRHPSHAVTFVDNHDSQPEEALESFVEEWFKPLAYALTLTREQGYPSVFYGDYYGIPTHGVPAMRSKIDPILEARQKYAYGPQHDYLDHPDVIGWTREGDSSHPKSGLATLITDGPGGSKRMYAGLKNAGETWYDITGNRSDTVKIGSDGWGEFHVNDGSVSIYVQK

SEQ ID NO: 28008 - protein, 483 aa, Bacillus sp.
HHNGTNGTMMQYFEWYLPNDGNHWNRLNSDASNLKSKGITAVWIPPAWKGASQNDVGYGAYDLYDLGEFNQKGTVRTKYGTRSQLQAAVTSLKNNGIQVYGDVVMNHKGGADATEMVRAVEVNPNNRNQEVTGEYTIEAWTRFDFPGRGNTHSSFKWRWYHFDGVDWDQSRRLNNRIYKFRGKAWDWEVDTEFGNYDYLMYADYDMDHPEVVNELRNWGVWYTNTLGLDGFRIDAVKHIKYSFTRDWINHVRSATGKNMFAVAEFWKNDLGAIENYLQKTDWNHSVFDVPLHYNLYNASKSGGNYDMRNIFNGTVVQRHPSHAVTFVDNHDSQPEEALESFVEEWFKPLAYALTLTREQGYPSVFYGDYYGIPTHGVPAMRSKIDPILEARQKYAYGPQHDYLDHPDVIGWTREGDSSHPKSGLATLITDGPGGSKRMYAGLKNAGETWYDITGNRSDTVKIGSDGWGEFHVNDGSVSIYVQK

SEQ ID NO: 28009 - protein, 483 aa, Bacillus sp.
HHNGTNGTMMQYFEWYLPNDGNHWNRLNSDASNLKSKGITAVWIPPAWKAASQNDVGYGAYDLYDLGEFNQKGTVRTKYGTRSQLQAAVTSLKNNGIQVYGDVVMNHKGGADATEMVRAVEVNPNNRNQEVTGEYTIEAWTRFDFPGRGNTHSSFKWRWYHFDGVDWDQSRQLSNRIYKFRGKAWDWEVDTEFGNYDYLMYTDYDMDHPEVVNELRNWGVWYTNTLGLDGFRIDAVKHIKYSFTRDWINHVRSATGKNMFAVAEFWKNDLGAIENYLQKTNWNHSVFDVPLHYNLYNASKSGGNYDMRNIFNGTVVQRHPSHAVTFVDNHDSQPEEALESFVEEWFKPLAYALTLTREQGYPSVFYGDYYGIPTHGVPAMRSKIDPILEARQKYAYGPQHDYLDHPDVIGWTREGDSSHPKSGLATLITDGPGGSKRMYAGLKNAGETWYDITGNRSDTVKIGSDGWGEFHVNDGSVSIYVQK

SEQ ID NO: 28010 - protein, 485 aa, Bacillus sp.
HHNGTNGTMMQYFEWYLPNDGNHWNRLNSDASNLKSKGITAVWIPPAWKGASQNDVGYGAYDLYDLGEFNQKGTVRTKYGTRSQLQAAVTSLKNNGIQVYGDVVMNHKGGADATEMVRAVEVNPNNRNQEVTGEYTIEAWTRFDFPGRGNTHSSFKWRWYHFDGVDWDQSRRLNNRIYKFRGHGKAWDWEVDTEFGNYDYLMYADYDMDHPEVVNELRNWGVWYTNTLGLDGFRIDAVKHIKYSFTRDWINHVRSATGKNMFAVAEFWKNDLGAIENYLQKTNWNHSVFDVPLHYNLYNASKSGGNYDMRNIFNGTVVQRHPSHAVTFVDNHDSQPEEALESFVEEWFKPLAYALTLTREQGYPSVFYGDYYGIPTHGVPAMRSKIDPILEARQKYAYGPQHDYLAHPDVIGWTREGDSSHPKSGLATLITDGPGGSKRMYAGLKNAGETWYDITGNRSDTVKIGSDGWGEFHVNDGSVSIYVQK

SEQ ID NO: 28011 - protein, 485 aa, Bacillus sp.
HHNGTNGTMMQYFEWYLPNDGNHWNRLNSDASNLKSKGITAVWIPPAWKGASQNDVGYGAYDLYDLGEFNQKGTVRTKYGTRSQLQAAVTSLKNNGIQVYGDVVMNHKGGADATEMVRAVEVNPNNRNQEVTGEYTIEAWTRFDFPGRGNTHSSFKWRWYHFDGVDWDQSRRLNNRIYKFRGHGKAWDWEVDTEFGNYDYLMYADYDMDHPEVVNELRNWGVWYTNTLGLDGFRIDAVKHIKYSFTRDWINHVRSATGKNMFAVAEFWKNDLGAIENYLQKTNWNHSVFDVPLGYNLYNASKSGGNYDMRNIFNGTVVQRHPSHAVTFVDNHDSQPEEALESFVEEWFKPLAYALTLTREQGYPSVFYGDYYGIPTHGVPAMRSKIDPILEARQKYAYGPQHDYLDHPDVIGWTREGDSSHPKSGLATLITDGPGGSKRMYAGLKNAGETWYDITGNRSDTVKIGSDGWGEFHVNDGSVSIYVQK

SEQ ID NO: 28012 - protein, 485 aa, Bacillus sp.
HHNGTNGTMMQYFEWYLPNDGNHWNRLNSDASNLKSKGITAVWIPPAWKGASQNDVGYGAYDLYDLGEFNQKGTVRTKYGTRSQLQAAVTSLKNNGIQVYGDVVMNHKGGADATEMVRAVEVNPNNRNQEVTGEYTIEAWTRFDFPGRGNTHSSFKWRWYHFDGVDWDQSRRLNNRIYKFRGHGKAWDWEVDTEFGNYDYLMYADYDMDHPEVVNELRNWGVWYTNTLGLDGFRIDAVKHIKYSFTRDWINHVRSATGKNMFAVAEFWKNDLGAIENYLQKTNWNHSVFDVPLHYNLYNASKSGGNYDMRNIFNGTVVQRHPSHAVTFVDNHDSQPEEALESFVEEWFKPLAYALTLTREQGYPSVFYGDYYGIPTHGVPAMRSKIDPILEARQKYAYGPQHDYLDHPDVIGWTREGDSSHPKSGLATLITDGPGGSKRMYAGLKNAGETWYDITGNRSDTVKIGSDGWGEFHVNDGAVSIYVQK

SEQ ID NO: 28013 - protein, 485 aa, Bacillus sp.
HHNGTNGTMMQYFEWYLPNDGNHWNRLNSDASNLKSKGITAVWIPPAWKGASQNDVGYGAYDLYDLGEFNQKGTVRTKYGTRSQLQAAVTSLKNNGIQVYGDVVMNHKGGADATEMVRAVEVNPNNRNQEVTGEYTIEAWTRFDFPGRGNTHSSFKWRWYHFDGVDWDQSRRLNNRIYKFRGHGKTWDWEVDTEFGNYDYLMYADYDMDHPEVVNELRNWGVWYTNTLGLDGFRIDAVKHIKYSFTRDWINHVRSATGKNMFAVAEFWKNDLGAIENYLQKTNWNHSVFDVPLHYNLYNASKSGGNYDMRNIFNGTVVQRHPSHAVTFVDNHDSQPEEALESFVEEWFKPLAYALTLTREQGYPSVFYGDYYGIPTHGVPAMRSKIDPILEARQKYAYGPQHDYLDHPDVIGWTREGDSSHPKSGLATLITDGPGGSKRMYAGLKNAGETWYDITGNRSDTVKIGSDGWGEFHVNDGSVSIYVQK

SEQ ID NO: 28014 - protein, 483 aa, Bacillus sp.
HHNGTNQTMMQYFEWYLPNDGNHWNRLNSDASNLKSKGITAVWIPPAWKGASQNDVGYGAYDLYDLGEFNQKGTVRTKYGTRSQLQAAVTSLKNNGIQVYGDVVMNHKGGADATEMVRAVEVNPNNRNQEVTGEYTIEAWTRFDFPGRGNTHSSFKWRWYHFDGVDWDQSRRLNNRIYKFRGKAWDWEVDTEFGNYDYLMYADYDMDHPEVVNELRNWGVWYTNTLGLDGFRIDAVKHIKYSFTRDWINHVRSATGKNMFAVAEFWKNDLGAIENYLQKTNWNHSVFDVPLHYNLYNASKSGGNYDMRNIFNGTVVQAQPMHAVTFVDNHDSQPEEALESFVEEWFKPLAYALTLTREQGYPSVFYGDYYGIPTHGVPAMRSKIDPILEARQKYAYGPQHDYLDHPDVIGWTREGDSSHPKSGLATLITDGPGGSKRMYAGLKNAGETWYDITGNRSDTVKIGSDGWGEFHVNDGSVSIYVQK

SEQ ID NO: 28015 - protein, 485 aa, Bacillus sp.
HHNGTNGTMMQYFEWYLPNDGNHWNRLNSDASNLKSKGITAVWIPPAWKGASQNDAGYGAYDLYDLGEFNQKGTVRTKYGTRSQLQAAVTSLKNNGIQVYGDVVMNHKGGADATEMVRAVEVNPNNRNQEVTGEYTIEAWTRFDFPGRGNTHSSFKWRWYHFDGVDWDQSRRLNNRIYKFRGHGKAWDWEVDTEFGNYDYLMYADYDMDHPEVVNELRNWGVWYTNTLGLDGFRIDAVKHIKYSFTRDWINHVRSATGKNMFAVAEFWKNDLGAIENYLQKTNWNHSVFDVPLHYNLYNASKSGGNYDMRNIFNGTVVQRHPSHAVTFVDNHDSQPEEALESFVEEWFKPLAYALTLTREQGYPSVFYGDYYGIPTHGVPAMRSKIDPILEARQKYAYGPQHDYLDHPDVIGWTREGDSSHPKSGLATLITDGPGGSKRMYAGLKNAGETWYDITGNRSDTVKIGSDGWGEFHVNDGSVSIYVQK

SEQ ID NO: 28016 - protein, 483 aa, Bacillus sp.
HHNGTNGTMMQYFEWYLPNDGNHWNRLNSDASNLKSKGITAVWIPPAWKGASQNDVGYGAYDLYDLGEFNQKGTVRTKYGTRSQLQAAVTSLKNNGIQVYGDVVMNHKGGADATEMVRAVEVNPNNRNQEVTGEYTIEAWTRFDFPGRGNTHSSFKWRWYHFDGVDWDQSRRLNNRIYKFRGKAWDWEVDTEFGNYDYLMYADYDMDHPEVVNELRNWGVWYTNTLGLDGFRIDAVKHIKYSFTRDWINHVRSATGKNMFAVAEFWKNDLGAIENYLQKTNWNHSVFDVPLHYNLYNASKSGGNYDMRNIFNGTVVQRHPSHAVTFVDNHDSQPEEALESFVDEWFKPLAYALTLTREQGYPSVFYGDYYGIPTHGVPAMRSKIDPILEARQKYAYGPQHDYLDHPDVIGWTREGDSSHPKSGLATLITDGPGGSKRMYAGLKNAGETWYDITGNRSDTVKIGSDGWGEFHVNQKSVSIYVQK

SEQ ID NO: 28017 - protein, 483 aa, Bacillus sp.
HHNGTNGTMMQYFEWYLPNDGNHWNRLNSDASNLKSKGITAVWIPPAWKGASQNDVGYGAYDLYDLGEFNQKGTVRTKYGTRSQLQAAVTSLKNNGIQVYGDVVMNHKGGADATEMVRAVEVNPNNRNQEVTGEYTIEAWTRFDFPGRGNTHSSFKWRWYHFDGVDWDQSRRLNNRIYKFRGKAWDWEVDTEFGAYDYLMYADYDMDHPEVVNELRNWGVWYTNTLGLDGFRIDAVKHIKYSFTRDWINHVRSATGKNMFAVAEFWKNDLGAIENYLQKTNWNHSVFDVPLHYNLYNASKSGGNYDMRNIFNGTVVQRHPSHAVTFVDNHDSQPEEALESFVEEWFKPLAYALTLTREQGYPSVFYGDYYGIPTHGVPAMRSKIDPILEARQKYAYGPQHDYLDHPDVIGWTREGDSSHPKSGLATLITDGPGGSKRMYAGLKNAGETWYDITGNRSDTVKIGSDGWGEFHVNDGSVSIYVQK

SEQ ID NO: 28018 - protein, 483 aa, Bacillus sp.
HHNGTNGTMMQYFEWYLPNDGNHWNRLNSDASNLKSKGITAVWIPPAWKATSQNDVGYGAYDLYDLGEFNQKGTVRTKYGTRSQLQAAVTSLKNNGIQVYGDVVMNHKGGADLTEMVRAVEVNPNNRNQEVTGEYTIEAWTRFDFPGRGNTHSSFKWRWYHFDGVDWDQSRNVNNRIYKFRGKAWDWEVDTEFGNYDYLMYADYDMDHPEVVNELRNWGVWYTNTLGLDGFRIDAVKHIKYSFTRDWINHVRSATGKNMFAVAEFWKNDLGAIENYLQKTNWNHSVFDVPLHYNLYNASKSGGNYDMRNIFNGTVVQRHPSHAVTFVDNHDSQPEEALESFVEEWFKPLAYALTLTREQGYPSVFYGDYYGIPTHGVPAMRSKIDPILEARQKYAYGPQHDYLDHPDVIGWTREGDSSHPKSGLATLITDGPGGSKRMYAGLKNAGETWYDITGNRSDTVKIGSDGWGEFHVNDGSVSIYVQK

SEQ ID NO: 28019 - protein, 485 aa, Bacillus sp.
HHNGTNGTMMQYFEWYLPNDGNHWNRLNSDASNLKSKGITAVWIPPAWKAASQNDVGYGAYDLYDLGEFNQKGTVRTKYGTRSQLQAAVTSLKNNGIQVYGDVVMNHKGGADATEMVRAVEVNPNNRNQEVTGEYTIEAWTRFDFPGRGNTHSSFKWRWYHFDGVDWDQSRDLNNRIYKFRGHGKAWDWEVDTEFGNYDYLMYADYDMDHPEVVNELRNWGVWYTNTLGLDGFRIDAVKHIKYSFTRDWINHVRSATGKNMFAVAEFWKNDLGAIENYLQKTNWNHSVFDVPLHYNLYNASKSGGNYDMRNIFNGTVVQRHPSHAVTFVDNHDSQPEEALESFVEEWFKPLAYALTLTREQGYPSVFYGDYYGIPTHGVPAMRSKIDPILEARQKYAYGPQHDYLDHPDVIGWTREGDSSHPKSGLATLITDGPGGSKRMYAGLKNAGETWYDITGNRSDTVKIGSDGWGEFHVNDGSVSIYVQK

SEQ ID NO: 28020 - protein, 485 aa, Bacillus sp.
HHNGTNGTMMQYFEWYLPNDGNHWNRLNSDASNLKSKGITAVWIPPAWKAASQNDVGYGAYDLYDLGEFNQKGTVRTKYGTRSQLQAAVTSLKNNGIQVYGDVVMNHKGGADATEMVRAVEVNPNNRNQEVTGEYTIEAWTRFDFPGRGNTHSSFKWRWYHFDGVDWDQSRDLTNRIYKFRGHGKAWDWEVDTEFGNYDYLMYADYDMDHPEVVNELRNWGVWYTNTLGLDGFRIDAVKHIKYSFTRDWINHVRSATGKNMFAVAEFWKNDLGAIENYLQKTNWNHSVFDVPLHYNLYNASKSGGNYDMRNIFNGTVVQRHPSHAVTFVDNHDSQPEEALESFVEEWFKPLAYALTLTREQGYPSVFYGDYYGIPTHGVPAMRSKIDPILEARQKYAYGPQHDYLDHPDVIGWTREGDSSHPKSGLATLITDGPGGSKRMYAGLKNAGETWYDITGNRSDTVKIGSDGWGEFHVNDGSVSIYVQK

SEQ ID NO: 28021 - protein, 485 aa, Bacillus sp.
HVNGTNGTMMQYFEWYLPNDGNHWNRLNSDASNLKSKGITAVWIPPAWKGASQNDVGYGAYDLYDLGEFNQKGTVRTKYGTRSQLQAAVTSLKNNGIQVYGDVVMNHKGGADATEMVRAVEVNPNNRNQEVTGEYTIEAWTRFDFPGRGNTHSSFKWRWYHFDGVDWDQSRRLNNRIYKFRGHGKAWDWEVDTEFGNYDYLMYADYDMDHPEVVNELRNWGVWYTNTLGLDGFRIDAVKHIKYSFTRDWINHVRSATGKNMFAVAEFWKNDLGAIENYLQKTNWNHSVFDVPLHYNLYNASKSGGNYDMRNIFNGTVVQRHPSHAVTFVDNHDSQPEEALESFVEEWFKPLAYALTLTREQGYPSVFYGDYYGIPTHGVPAMRSKIDPILEARQKYAYGPQHDYLDHPDVIGWTREGDSSHPKSGLATLITDGPGGSKRMYAGLKNAGETWYDITGNRSDTVKIGSDGWGEFHVNDGSVSIYVQK

SEQ ID NO: 28022 - protein, 483 aa, Bacillus sp.
HHNGTNGTMMQYFEWYLPNDGNHWNRLNSDASNLKSKGITAVWIPPAWKAASQNDVGYGAYDLYDLGEFNQKGTVRTKYGTRSQLQAAVTSLKNNGIQVYGDVVMNHKGGADATEMVDAVEVNPNNRNQEVTGEYTIEAWTRFDFPGRGNTHSSFKWRWYHFDGVDFDQSRDLQNRIYKFRGKAWDWEVDTEFGNYDYLMYADYDMDHPEVVNELRNWGVWYTNTLGLDGFRIDAVKHIKYSFTRDWINHVRSATGKNMFAVAEFWKNDLGAIENYLQKTNWNHSVFDVPLHYNLYNASKSGGNYDMRNIFNGTVVQRHPSHAVTFVDNHDSQPEEALESFVEEWFKPLAYALTLTREQGYPSVFYGDYYGIPTHGVPAMRSKIDPILEARQKYAYGPQHDYLDHPDVIGWTREGDSSHPKSGLATLITDGPGGSKRMYAGLKNAGETWYDITGNRSDTVKIGSDGWGEFHVNDGSVSIYVQK

SEQ ID NO: 28023 - protein, 485 aa, Bacillus sp.
HHNGTNGTMMQYFEWYLPNDGNHWNRLNSDASNLKSKGITAVWIPPAWKGASQNDVGYGAYDLYDLGEFNQKGTVRTKYGTRSQLQAAVTSLKNNGIQVYGDVVMNHKGGADATEMVRAVEVNPNNRNQEVTGEYTIEAWTRFDFPGRGNTHSSFKWRWYHFDGVDWDQSRKVSNRIYKFRGHGKAWDWEVDTEFGNYDYLMYTDYDMDHPEVVNELRNWGVWYTNTLGLDGFRIDAVKHIKYSFTRDWINHVRSATGKNMFAVAEFWKNDLGAIENYLQKTNWNHSVFDVPLHYNLYNASKSGGNYDMRNIFNGTVVQRHPSHAVTFVDNHDSQPEEALESFVEEWFKPLAYALTLTREQGYPSVFYGDYYGIPTHGVPAMRSKIDPILEARQKYAYGPQHDYLDHPDVIGWTREGDSSHPKSGLATLITDGPGGSKRMYAGLKNAGETWYDITGNRSDTVKIGSDGWGEFHVNDGSVSIYVQK

SEQ ID NO: 28024 - protein, 485 aa, Bacillus sp.
HHNGTNGTMMQYFEWYLPNDGNHWNRLNSDASNLKSKGITAVWIPPAWKGASQNDVGYGAYDLYDLGEFNQKGTVRTKYGTRSQLQAAVTSLKNNGIQVYGDVVMNHKGGADATEMVRAVEVNPNNRNQEVTGEYTIEAWTRFDFPGRGNTHSSFKWRWYHFDGVDWDQSRRLNNRIYKFRGHGKAWDWEVDTEFGNYDYLMYADYDMDHPEVVNELRNWGVWYTNTLGLDGFRIDAVKHIKYSFTRDWINHVRSATGKNMFAVAEFWKNDLGAIENYLQKTNWNHSVFDVPLHYNLYNASKSGGNYDMRNIFNGTVVQRHPSHAVTFVDNHDSQPEEALESFVEEWFKPLAYALTLTREQGYPSVFYGDYYGIPTHGVPAMRSKIDPILEARQKYAYGPQHDYLDHPDVIGWTREGDSSHPKQGLATLITDGPGGSKRMYAGLKNAGETWYDITGNRSDTVKIGSDGWGEFHVNDGSVSIYVQK

SEQ ID NO: 28025 - protein, 483 aa, Bacillus sp.
HHNGTNGTMMQYFEWYLPNDGNHWNRLNSDASNLKSKGITAVWIPPAWKAASQNDVGYGAYDLYDLGEFNQKGTVRTKYGTRSQLQAAVTSLKNNGIQVYGDVVMNHKGGADATEMVRAVEVNPNNRNQEVTGEYTIEAWTRFDFPGRGNTHSSFKWRWYHFDGVDWDQSRELNNRIYKFRGKAWDWEVDTEFGNYDYLMYADYDMDHPEVVNELRNWGVWYTNTLGLDGFRIDAVKHIKYSFTRDWINHVRSATGKNMFAVAEFWKNDLGAIENYLQKTNWNHSVFDVPLHYNLYNASKSGGNYDMRNIFNGTVVQRHPSHAVTFVDNHDSQPEEALESFVEEWFKPLAYALTLTREQGYPSVFYGDYYGIPTHGVPAMRSKIDPILEARQKYAYGPQHDYLDHPDVIGWTREGDSSHPKSGLATLITDGPGGSKRMYAGLKNAGETWYDITGNRSDTVKIGSDGWGEFHVNDGSVSIYVQK

SEQ ID NO: 28026 - protein, 485 aa, Bacillus sp.
HHNGTNGTMMQYFEWYLPNDGNHWNRLNSDASNLKSKGITAVWIPPAWKGASQNDVGYGAYDLYDLGEFNQKGTVRTKYGTRSQLQAAVTSLKNNGIQVYGDVVMNHKGGADATEMVRAVEVNPNNRNQEVTGEYTIEAWTRFDFPGRANTHSSFKWRWYHFDGVDWDQSRRLNNRIYKFRGHGKAWDWEVDTEFGNYDYLMYADYDMDHPEVVNELRNWGVWYTNTLGLDGFRIDAVKHIKYSFTRDWINHVRSATGKNMFAVAEFWKNDLGAIENYLQKTNWNHSVFDVPLHYNLYNASKSGGNYDMRNIFNGTVVQRHPSHAVTFVDNHDSQPEEALESFVEEWFKPLAYALTLTREQGYPSVFYGDYYGIPTHGVPAMRSKIDPILEARQKYAYGPQHDYLDHPDVIGWTREGDSSHPKSGLATLITDGPGGSKRMYAGLKNAGETWYDITGNRSDTVKIGSDGWGEFHVNDGSVSIYVQK

SEQ ID NO: 28027 - protein, 485 aa, Bacillus sp.
HHNGTNGTMMQYFEWYLPNDGNHWNRLNSDASNLKSKGITAVWIPPAWKGASQNDVGYGAYDLYDLGEFNQKGTVRTKYGTRSQLQAAVTSLKNNGIQVYGDVVMNHKGGADATEMVRAVEVNPNNRNQEVTGEYTIEAWTRFDFPGRGNTHSSFKWRWYHFDGVDWDQSRRLNNRIYKFRGHGKAWDWEVDTEFGNYDYLMYADYDMDHPEVVNELRNWGVWYTNTLGLDGFRIDAVKHIKYSFTRDWINHVRSATGKNMFAVAEFWKPDLGAIENYLQKTNWNHSVFDVPLHYNLYNASKSGGNYDMRNIFNGTVVQRHPSHAVTFVDNHDSQPEEALESFVEEWFKPLAYALTLTREQGYPSVFYGDYYGIPTHGVPAMRSKIDPILEARQKYAYGPQHDYLDHPDVIGWTREGDSSHPKSGLATLITDGPGGSKRMYAGLKNAGETWYDITGNRSDTVKIGSDGWGEFHVNDGSVSIYVQK

SEQ ID NO: 28028 - protein, 485 aa, Bacillus sp.
HHNGTNGTMMQYFEWYLPNDGNHWNRLNSDASNLKSKGITAVWIPPAWKGASQNDVGYGAYDLYDLGEFNQKGTVRTKYGTRSQLQAAVTSLKNNGIQVYGDVVMNHKGGADATEMVRAVEVNPNNRNQEVTGEYTIEAWTRFDFPGRGNTHSSFKWRWYHFDGVDWDQSRRLNNRIYKFRGHGKAWDWEVDTEFGNYDYLMYADYDMDHPEVVNELRNWGVWYTNTLGLDGFRIDAVKHIKYSFTRDWINHVRSATGKNMFAVAEFWKNDLGAIENYLQKTRWNHSVFDVPLHYNLYNASKSGGNYDMRNIFNGTVVQRHPSHAVTFVDNHDSQPEEALESFVEEWFKPLAYALTLTREQGYPSVFYGDYYGIPTHGVPAMRSKIDPILEARQKYAYGPQHDYLDHPDVIGWTREGDSSHPKSGLATLITDGPGGSKRMYAGLKNAGETWYDITGNRSDTVKIGSDGWGEFHVNDGSVSIYVQK

SEQ ID NO: 28029 - protein, 485 aa, Bacillus sp.
HHNGTNGTMMQYFEWYLPNDGNHWNRLNSDASNLKSKGITAVWIPPAWKGASQNDVGYGAYDLYDLGEFNQKGTVRTKYGTRSQLQAAVTSLKNNGIQVYGDVVMNHKGGADATEMVRAVEVNPNNRNQEVTGEYTIEAWTRFDFPGRGNTHSSFKWRWYHFDGVDWDQSRRLNNRIYKFRGHGKAWDWEVDTEFGNYDYLMYADYDMDHPEVVNELRNWGVWYTNTLGLDGFRIDAVKHIKYSFTRDWINHVRSATGKNMFAVAEFWKNDLGAIENYLQKTNWNHSVFDAPLHYNLYNASKSGGNYDMRNIFNGTVVQRHPSHAVTFVDNHDSQPEEALESFVEEWFKPLAYALTLTREQGYPSVFYGDYYGIPTHGVPAMRSKIDPILEARQKYAYGPQHDYLDHPDVIGWTREGDSSHPKSGLATLITDGPGGSKRMYAGLKNAGETWYDITGNRSDTVKIGSDGWGEFHVNDGSVSIYVQK

SEQ ID NO: 28030 - protein, 485 aa, Bacillus sp.
HHNGTNGTMMQYFEWYLPNDGNHWNRLNSDASNLKSKGITAVWIPPAWKGASQNDVGYGAYDLYDLGEFNQKGTVRTKYGTRSQFQAAVTSLKNNGIQVYGDVVMNHKGGADATEMVRAVEVNPNNRNQEVTGEYTIEAWTRFDFPGRGNTHSSFKWRWYHFDGVDWDQSRRLNNRIYKFRGHGKAWDWEVDTEFGNYDYLMYADYDMDHPEVVNELRNWGVWYTNTLGLDGFRIDAVKHIKYSFTRDWINHVRSATGKNMFAVAEFWKNDLGAIENYLQKTNWNHSVFDVPLHYNLYNASKSGGNYDMRNIFNGTVVQRHPSHAVTFVDNHDSQPEEALESFVEEWFKPLAYALTLTREQGYPSVFYGDYYGIPTHGVPAMRSKIDPILEARQKYAYGPQHDYLDHPDVIGWTREGDSSHPKSGLATLITDGPGGSKRMYAGLKNAGETWYDITGNRSDTVKIGSDGWGEFHVNDGSVSIYVQK

SEQ ID NO: 28031 - protein, 485 aa, Bacillus sp.
HHNGTNGTMMQYFEWYLPNDGNHWNRLNSDASNLKSKGITAVWIPPAWKGASQNDVGYGAYDLYDLGEFNQKGTVRTKYGTRSQLQAAVTSLKNNGIQVYGDVVMNHKGGADATEMVRAVEVNPNNRNQEVTGEYTIEAWTRFDFPGRGNTHSSFKWRWYHFDGVDWDQSRRLNNRIYKFRGHGKAWDWEVDTEFGNYDYLMYADYDMDHPEVVNELRNWGVWYTNTLGLDGFRIDAVKHIKYSFTRDWINHVRSATGKNMFAVAEFWLNDLGAIENYLQKTNWNHSVFDVPLHYNLYNASKSGGNYDMRNIFNGTVVQRHPSHAVTFVDNHDSQPEEALESFVEEWFKPLAYALTLTREQGYPSVFYGDYYGIPTHGVPAMRSKIDPILEARQKYAYGPQHDYLDHPDVIGWTREGDSSHPKSGLATLITDGPGGSKRMYAGLKNAGETWYDITGNRSDTVKIGSDGWGEFHVNDGSVSIYVQK

SEQ ID NO: 28032 - protein, 485 aa, Bacillus sp.
HHNGTNGTMMQYFEWYLPNDGNHWNRLNSDASNLKSKGITAVWIPPAWKGASQNDVGYGAYDLYDLGEFNQKGTVRTKYGTRSQLQAAVTSLKNNGIQVYGDVVMNHKGGADATEMVRAVEVNPNNRNQEVTGEYTIEAWTRFDFPGRGNTHSSFKWRWYHFDGVDWDQSRRLNNRIYKFRGHGKAWDWEVDTEFGNYDYLMYADYDMDHPEVVNELRNWGVWYTNTLGLDGFRIDAVKHIKYSFTRDWINHVRSATGKNMFAVAEFWKNDLGAIENYLQKTNWNHSVFDVPLHYNLYNASKSGGNYDMRNIFNGTVVQRHPSHAVTFVDNHDSQGEEALESFVEEWFKPLAYALTLTREQGYPSVFYGDYYGIPTHGVPAMRSKIDPILEARQKYAYGPQHDYLDHPDVIGWTREGDSSHPKSGLATLITDGPGGSKRMYAGLKNAGETWYDITGNRSDTVKIGSDGWGEFHVNDGSVSIYVQK

SEQ ID NO: 28033 - protein, 485 aa, Bacillus sp.
HHNGTNGTMMQYFEWYLPNDGNHWNRLNSDASNLKSKGITAVWIPPAWKGASQNDVGYGAYDLYDLGEFNQKGTVRTKYGTRSQLQAAVTSLKNNGIQVYGDVVMNHKGGADATEMVRAVEVNPNNRNQEVTGEYTIEAWTRFDFPGRGNTHSSFKWRWYHFDGVDWDQSRRLNNRIYKFRGHGKAWDWEVDTEFGNYDYLMYADYDMDHPEVVNELRNWGVWYTNTLGLDGFRIDAVKHIKYSFTRDWINHVRSATGKNMFAVAEFWKNDLGAIENYLQKTNWNHSVFDVPLHYNLYNASKSGGNYDMRNIFNGTVVQRKPSHAVTFVDNHDSQPEEALESFVEEWFKPLAYALTLTREQGYPSVFYGDYYGIPTHGVPAMRSKIDPILEARQKYAYGPQHDYLDHPDVIGWTREGDSSHPKSGLATLITDGPGGSKRMYAGLKNAGETWYDITGNRSDTVKIGSDGWGEFHVNDGSVSIYVQK

SEQ ID NO: 28034 - protein, 485 aa, Bacillus sp.
HHNGTNGTMMQYFEWYLPNDGNHWNRLNSDASNLKSKGITAVWIPPAWKGASQNDVGYGAYDLYDLGEFNQKGTVRTKYGTRSQLQAAVTSLKNNGIQVYGDVVMNHKGGADATEMVRAVEVNPNNRNQEVTGEYTIEAWTRFDFPGRGNTHSSFKWRWYHFDGVDWDQSRRLNNRIYKFRGHGKAWDWEVDTEFGNYDYLMYADYDMDHPEVVAELRNWGVWYTNTLGLDGFRIDAVKHIKYSFTRDWINHVRSATGKNMFAVAEFWKNDLGAIENYLQKTNWNHSVFDVPLHYNLYNASKSGGNYDMRNIFNGTVVQRHPSHAVTFVDNHDSQPEEALESFVEEWFKPLAYALTLTREQGYPSVFYGDYYGIPTHGVPAMRSKIDPILEARQKYAYGPQHDYLDHPDVIGWTREGDSSHPKSGLATLITDGPGGSKRMYAGLKNAGETWYDITGNRSDTVKIGSDGWGEFHVNDGSVSIYVQK

SEQ ID NO: 28035 - protein, 483 aa, Bacillus sp.
HHNGTNGTMMQYFEWYLPNDGNHWNRLNSDASNLKSKGITAVWIPPAWKAASQNDVGYGAYDLYDLGEFNQKGTVRTKYGTRSQLQAAVTSLKNNGIQVYGDVVMNHKGGADATEMVRAVEVNPNNRNQEVTGEYTIEAWTRFDFPGRGNTHSSFKWRWYHFDGVDWDQSRNLNNRIYKFRGKAWDWEVDTEFGNYDYLMYADYDMDHPEVVNELRNWGVWYTNTLGLDGFRIDAVKHIKYSFTRDWINHVRSATGKNMFAVAEFWKNDLGAIENYLQKTNWNHSVFDVPLHYNLYNASKSGGNYDMRNIFNGTVVQRHPSHAVTFVDNHDSQPEEALESFVEEWFKPLAYALTLTREQGYPSVFYGDYYGIPTHGVPAMRSKIDPILEARQKYAYGPQHDYLDHPDVIGWTREGDSSHPKSGLATLITDGPGGSKRMYAGLKNAGETWYDITGNRSDTVKIGSDGWGEFHVNDGSVSIYVQK

SEQ ID NO: 28036 - protein, 483 aa, Bacillus sp.
HHNGTNGTMMQYFEWYLPNDGNHWNRLNSDASNLKSKGITAVWIPPAWKAASQNDVGYGAYDLYDLGEFNQKGTVRTKYGTRSQLQAAVTSLKNNGIQVYGDVVMNHKGGADATEMVRAVEVNPNNRNQEVTGEYTIEAWTRFDFPGRGNTHSSFKWRWYHFDGVDWDQSRRLNNRIYKFRGKAWDWEVDTEFGNYDYLMYADYDMDHPEVVNELRNWGVWYTNTLGLDGFRIDAVKHIKYSFTRDWINHVRSATGKNMFAVAEFWKNDLGAIENYLQKTNWNHSVFDVPLHYNLYNASKSGGNYDMRNIFNGTVVQRHPSHAVTFVDNHDSQPEEALESFVEEWFKPLAYALTLTREQGYPSVFYGDYYGIPTHGVPAMRSKIDPILEARQKYAYGPQHDYLDHPDVIGWTREGDSSHPKSGLATLITDGPGGSKRMYAGLKNAGETWYDITGNRSDTVKIGSDGWGEFHVNDGSVSIYVQK

SEQ ID NO: 28037 - protein, 485 aa, Bacillus sp.
HHNGTNGTMMQYFEWYLPNDGNHWNRLNSDASNLKSKGITAVWIPPAWKGASQNDVGYGAYDLYDLGEFNQKGTVRTKYGTRSQLQAAVTSLKNNGIQVYGDVVMNHKGGADATEMVRAVEVNPNNRNQEVTGEYTIEAWTRFDFPGRGNTHSSFKWRWYHFDGVDWDQSRRLNNRIYKFRGHGKAWDWEVDTEFGNYDYLMYADYDMDHPEVVNELRNWGVWYTNTLGLDGFRIDAVKHIKYSFTRDWINHVRSATGKNMFAVAEFWKNDLGAIENYLQKTNWNHSVFDVPLHYNLYNASKSGGNYDMRNIFNGTVVQRHPSHAVTFVDNHDSQPEEALESFVEEWFKPHAYALTLTREQGYPSVFYGDYYGIPTHGVPAMRSKIDPILEARQKYAYGPQHDYLDHPDVIGWTREGDSSHPKSGLATLITDGPGGSKRMYAGLKNAGETWYDITGNRSDTVKIGSDGWGEFHVNDGSVSIYVQK

SEQ ID NO: 28038 - protein, 485 aa, Bacillus sp.
HANGTNGTMMQYFEWYLPNDGNHWNRLNSDASNLKSKGITAVWIPPAWKGASQNDVGYGAYDLYDLGEFNQKGTVRTKYGTRSQLQAAVTSLKNNGIQVYGDVVMNHKGGADATEMVRAVEVNPNNRNQEVTGEYTIEAWTRFDFPGRGNTHSSFKWRWYHFDGVDWDQSRRLNNRIYKFRGHGKAWDWEVDTEFGNYDYLMYADYDMDHPEVVNELRNWGVWYTNTLGLDGFRIDAVKHIKYSFTRDWINHVRSATGKNMFAVAEFWKNDLGAIENYLQKTNWNHSVFDVPLHYNLYNASKSGGNYDMRNIFNGTVVQRHPSHAVTFVDNHDSQPEEALESFVEEWFKPLAYALTLTREQGYPSVFYGDYYGIPTHGVPAMRSKIDPILEARQKYAYGPQHDYLDHPDVIGWTREGDSSHPKSGLATLITDGPGGSKRMYAGLKNAGETWYDITGNRSDTVKIGSDGWGEFHVNDGSVSIYVQK

SEQ ID NO: 28039 - protein, 483 aa, Synthetic construct
HHNGTNGTMMQYFEWYLPNDGNHWNRLNSDASNLKSKGITAVWIPPAWKGASQNDVGYGAYDLYDLGEFNQKGTVRTKYGTRSQLQAAVTSLKNNGIQVYGDVVMNHKGGADATEMVRAVEVNPNNRNQEVTGEYTIEAWTRFDFPGRGNTHSSFKWRWYHFDGVDWDQSRRLNNRIYKFRGKAWDWEVDTENGNYDYLMYADIDMDHPEIPNELRNWGVWYTNTLGLDGFRIDAVKHIKYSFTRDWINHVRSATGKNMFAVAEFWKNDLGAIENYLQKTNWNHSVFDVPLHYNLYNASKSGGNYDMRNIFNGTVVQRHPSHAVTFVDNHDSQPEEALESFVEEWFKPLAYALTLTREQGYPSVFYGDYYGIPTHGVPAMRSKIDPILEARQKYAYGPQHDYLDHPDVIGWTREGDSSHPKSGLATLITDGPGGSKRMYAGLKNAGETWYDITGNRSDTVKIGSDGWGEFHVNDGSVSIYVQK

SEQ ID NO: 28040 - protein, 483 aa, Bacillus sp.
HHNGTNQTMMQYFEWYLPNDGNHWNRLNSDASNLKSKGITAVWIPPAWKGASQNDVGYGAYDLYDLGEFNQKGTVRTKYGTRSQLQAAVTSLKNNGITVYGDVVMNHKGGADATEMVRAVEVNPNNRNQEVTGEYTIEAWTRFDFPGRGNTHSSFKWRWYHFDGVDWDQSRRLNNRIYKFRGKAWDWEVDTEFGNYDYLMYADYDMDHPEVVNELRNWGVWYTNTLGLDGFRIDAVKHIKYSFTRDWINHVRSATGKNMFAVAEFWKNDLGAIENYLQKTNWNHSVFDVPLHYNLYNASKSGGNYDMRNIFNGTVVQAHPMHAVTFVDNHDSQPEEALESFVEEWFKPLAYALTLTREQGYPSVFYGDYYGIPTHGVPAMRSKIDPILEARQKYAYGPQHDYLDHPDVIGWTREGDSSHPKSGLATLITDGPGGSKRMYAGLKNAGETWYDITGNRSDTVKIGSDGWGEFHVNDGSVSIYVQK

SEQ ID NO: 28041 - protein, 485 aa, Bacillus sp.
HHNGTNGTMMQYFEWYLPNDGNHWNRLNSDASNLKSKGITAVWIPPAWKGASQNDVGYGAYDLYDLGEFNQKGTVRTKYGTRSQLQAAVTSLKNNGIQVYGDVVMNHKGGADATEMVRAVEVNPNNRNQEVTGEYTIEAWTRFDFPGRGNTHSSFKWRWYHFDGVDWDQSRRLNNRIYKFRGHGKSWDWEVDTEFGNYDYLMYADYDMDHPEVVNELRNWGVWYTNTLGLDGFRIDAVKHIKYSFTRDWINHVRSATGKNMFAVAEFWKNDLGAIENYLQKTNWNHSVFDVPLHYNLYNASKSGGNYDMRNIFNGTVVQRHPSHAVTFVDNHDSQPEEALESFVEEWFKPLAYALTLTREQGYPSVFYGDYYGIPTHGVPAMRSKIDPILEARQKYAYGPQHDYLDHPDVIGWTREGDSSHPKSGLATLITDGPGGSKRMYAGLKNAGETWYDITGNRSDTVKIGSDGWGEFHVNDGSVSIYVQK

SEQ ID NO: 28042 - protein, 485 aa, Synthetic construct
HHNGTNGTMMQYFEWYLPNDGNHWNRLNSDASNLKSKGITAVWIPPAWKGASQNDVGYGAYDLYDLGEFNQKGTVRTKYGTRSQLQAAVTSLKNNGIQVYGDVVMNHKGGADATEMVRAVEVNPNNRNQEVTGEYTIEAWTRFDFPGRGNTHSSFKWRWYHFDGVDWDQSRRLNNRIYKFRGHGKAWDWEVDTENGNYDYLMYADIDMDHPEVVNELRNWGVWYTNTLGLDGFRIDAVKHIKYSFTRDWINHVRSATGKNMFAVAEFWKNDLGAIENYLQKTNWNHSVFDVPLHYNLYNASKSGGNYDMRNIFNGTVVQRHPSHAVTFVDNHDSQPEEALESFVEEWFKPLAYALTLTREQGYPSVFYGDYYGIPTHGVPAMRSKIDPILEARQKYAYGPQHDYIDHPDVIGWTREGDSSHAKSGLAALITDGPGGSKRMYAGLKNAGETWYDITGNRSDTVKIGSDGWGEFHVNDGSVSIYVQK

SEQ ID NO: 28043 - protein, 483 aa, Bacillus sp.
HHNGTNGTMMQYFEWYLPNDGNHWNRLNSDASNLKSKGITAVWIPPAWKGASQNDVGYGAYDLYDLGEFNQKGTVRTKYGTRSQLQAAVTSLKNNGIQVYGDVVMNHKGGADSTEMVRAVEVNPNNRNQEVTGEYTIEAWTRFDFPGRGNTHSSFKWRWYHFDGVDWDQSRRLNNRIYKFRGKAWDWEVDTEFGNYDYLMYADYDMDHPEVVNELRNWGVWYTNTLGLDGFRIDAVKHIKYSFTRDWINHVRSATGKNMFAVAEFWKNDLGAIENYLQKTNWNHSVFDVPLHYNLYNASKSGGNYDMRNIFNGTVVQRHPSHAVTFVDNHDSQPEEALESFVEEWFKPLAYALTLTREQGYPSVFYGDYYGIPTHGVPAMRSKIDPILEARQKYAYGPQHDYLDHPDVIGWTREGDSSHPKSGLATLITDGPGGSKRMYAGLKNAGETWYDITGNRSDTVKIGSDGWGEFHVNDGSVSIYVQK

SEQ ID NO: 28044 - protein, 483 aa, Bacillus sp.
HHNGTNGTMMQYFEWYLPNDGNHWNRLNSDASNLKSKGITAVWIPPAWKGASQNDVGYGAYDLYDLGEFNQKGTVRTKYGTRSQLQAAVTSLKNNGINVYGDVVMNHKGGADATEMVRAVEVNPNNRNQEVTGEYTIEAWTRFDFPGRGNTHSSFKWRWYHFDGVDWDQSRRLNNRIYKFRGKAWDWEVDTEFGNYDYLMYADYDMDHPEVVNELRNWGVWYTNTLGLDGFRIDAVKHIKYSFTRDWINHVRSATGKNMFAVAEFWKNDLGAIENYLQKTNWNHSVFDVPLHYNLYNASKSGGNYDMRNIFNGTVVQAHPMHAVTFVDNHDSQPEEALESFVEEWFKPLAYVLTLTREQGYPSVFYGDYYGIPTHGVPAMRSKIDPILEARQKYAYGPQHDYLDHPDVIGWTREGDSSHPKSGLATLITDGPGGSKRMYAGLKNAGETWYDITGNRSDTVKIGSDGWGEFHVNDGSVSIYVQK

SEQ ID NO: 28045 - protein, 485 aa, Synthetic construct
HHNGTNGTMMQYFEWYLPNDGNHWNRLNSDASNLKSKGITAVWIPPAWKGASQNDVGYGAYDLYDLGEFNQKGTVRTKYGTRSQLQAAVTSLKNNGIQVYGDVVMNHKGGADATEMVRAVEVNPNNRNQEVTGEYTIEAWTRFDFPGRGNTHSSFKWRWYHFDGVDWDQSRRLNNRIYKFRGHGKAWDWEVDTENGNYDYLMYADIDMDHPEAQNELRNWGVWYTNTLGLDGFRIDAVKHIKYSFTRDWINHVRSATGKNMFAVAEFWKNDLGAIENYLQKTNWNHSVFDVPLHYNLYNASKSGGNYDMRNIFNGTVVQRHPSHAVTFVDNHDSQPEEALESFVEEWFKPLAYALTLTREQGYPSVFYGDYYGIPTHGVPAMRSKIDPILEARQKYAYGPQHDYLDHPDVIGWTREGDSSHPKSGLATLITDGPGGSKRMYAGLKNAGETWYDITGNRSDTVKIGSDGWGEFHVNDGSVSIYVQK

SEQ ID NO: 28046 - protein, 483 aa, Bacillus sp.
HHNGTNGTMMQYFEWYLPNDGNHWNRLNSDASNLKSKGITAVWIPPAWKGASQNDVGYGAYDLYDLGEFNQKGTVRTKYGTRSQLQAAVTSLKNNGIQVYGDVVMNHKGGADATEMVRAVEVNPNNRNQEVTGEYTIEAWTRFDFPGRGNTHSSFKWRWRHFDGVDWDQSRRLNNRIYKFRGKAWDWEVDTEFGNYDYLMYADYDMDHPEVVNELRNWGVWYTNTLGLDGFRIDAVKHIKYSFTRDWINHVRSATGKNMFAVAEFWKNDLGAIENYLQKTNWNHSVFDVPLHYNLYNASKSGGNYDMRNIFNGTVVQRHPSHAVTFVDNHDSQPEEALESFVEEWFKPLAYALTLTREQGYPSVFYGDYYGIPTHGVPAMRSKIDPILEARQKYAYGPQHDYLDHPDVIGWTREGDSSHPKSGLATLITDGPGGSKRMYAGLKNAGETWYDITGNRSDTVKIGSDGWGEFHVNDGSVSIYVQK

SEQ ID NO: 28047 - protein, 483 aa, Bacillus sp.
HHNGTNGTMMQYFEWYLPNDGNHWNRLNSDASNLKSKGITAVWIPPAWKGASQNDVGYGAYDLYDLGEFNQKGTVRTKYGTRSQLQAAVTSLKNNGIQVYGDVVMNHKGGADATEMVRAVEVNPNNRNQEVTGEYTIEAWTRFDFPGRGNTHSSFKWRWYHFDGVDWDQSRRLNNRIYKFRGKAWDWEVDTENGNYDYLMYADIDYDHPEVVGELRNWGVWYTNTLGLDGFRIDAVKHIKYSFTRDWINHVRSATGKNMFAVAEFWKNDLGAIENYLQKTNWNHSVFDVPLHYNLYNASKSGGNYDMRNIFNGTVVQRHPSHAVTFVDNHDSQPEEALESFVEEWFKPLAYALTLTREQGYPSVFYGDYYGIPTHGVPAMRSKIDPILEARQKYAYGPQHDYLDHPDVIGWTREGDSSHPKSGLATLITDGPGGSKRMYAGLKNAGETWYDITGNRSDTVKIGSDGWGEFHVNDGSVSIYVQK

SEQ ID NO: 28048 - protein, 485 aa, Bacillus sp.
HHNGTNGTMMQYFEWYLPNDGNHWNRLNSDASNLKSKGITAVWIPPAWKGASQNDVGYGAYDLYDLGEFNQKGTVRTKYGTRSQLQAAVTSLKNNGIQVYGDVVMNHKGGADATEMVRAVEVNPNNRNQEVTGEYTIEAWTRFDFPGRGNTHSSFKWRWYHFDGVDWDQSRRLNNRIYKFRGHGKAWDWEVDTEFGNYDYLMYADYDMDHPEVVNELRNWGVWYTNTLGLDGFRIDAVKHIKYSFTRDWINHVRSATGKNMFAVAEFWKNDLGAIENYLQKTNWNHSVFDVPLHYNLYNASQSGGNYDMRNIFNGTVVQRHPSHAVTFVDNHDSQPEEALESFVEEWFKPLAYALTLTREQGYPSVFYGDYYGIPTHGVPAMRSKIDPILEARQKYAYGPQHDYLDHPDVIGWTREGDSSHPKSGLATLITDGPGGSKRMYAGLKNAGETWYDITGNRSDTVKIGSDGWGEFHVNQQSVSIYVQK

SEQ ID NO: 28049 - protein, 485 aa, Bacillus sp.
HHNGTNGTMMQYFEWYLPNDGNHWNRLNSDASNLKSKGITAVWIPPAWKAASQNDVGYGAYDLYDLGEFNQKGTVRTKYGTRSQLQAAVTSLKNNGIQVYGDVVMNHKGGADATEMVPAVEVNPNNRNQEVTGEYTIEAWTRFDFPGRGNTHSSFKWRWYHFDGVDWDQSRDLTNRIYKFRGHGKAWDWEVDTEFGNYDYLMYADYDMDHPEVVNELRNWGVWYTNTLGLDGFRIDAVKHIKYSFTRDWINHVRSATGKNMFAVAEFWKNDLGAIENYLQKTNWNHSVFDVPLHYNLYNASKSGGNYDMRNIFNGTVVQRHPSHAVTFVDNHDSQPEEALESFVDPWFKPLAYALTLTREQGYPSVFYGDYYGIPTHGVPAMRSKIDPILEARQKYAYGPQHDYLDHPDVIGWTREGDSSHPKSGLATLITDGPGGSKRMYAGLKNAGETWYDITGNRSDTVKIGSDGWGEFHVNGGSVSIYVQK

SEQ ID NO: 28050 - protein, 485 aa, Bacillus sp.
HHNGTNGTMMQYFEWYLPNDGNHWNRLNSDASNLKSKGITAVWIPPAWKGASQNDVGYGAYDLYDLGEFNQKGTVRTKYGTRSQLQAAVTSLKNNGIQVYGDVVMNHKGGAHATEMVRAVEVNPNNRNQEVTGEYTIEAWTRFDFPGRGNTHSSFKWRWYHFDGVDWDQSRRLNNRIYKFRGHGKAWDWEVDTEFGNYDYLMYADYDMDHPEVVNELRNWGVWYTNTLGLDGFRIDAVKHIKYSFTRDWINHVRSATGKNMFAVAEFWKNDLGAIENYLQKTNWNHSVFDVPLHYNLYNASKSGGNYDMRNIFNGTVVQAHPNHAVTFVDNHDSQPEEALESFVEEWFKPLAYALTLTREQGYPSVFYGDYYGIPTHGVPAMRSKIDPILEARQKYAYGPQHDYLDHPDVIGWTREGDSSHPKSGLATLITDGPGGSKRMYAGLKNAGETWYDITGNRSDTVKIGSDGWGEFHVNDGSVSIYVQK

SEQ ID NO: 28051 - protein, 485 aa, Bacillus sp.
HHNGTNGTMMQYFEWYLPNDGNHWNRLNSDASNLKSKGITAVWIPPAWKGASQNDVGYGAYDLYDLGEFNQKGTVRTKYGTRSQLQAAVTSLKNNGIQVYGDVVMNHKGGADATEMVRAVEVNPNNRNQEVTGEYTIEAWTRFDFPGRGNTHSSFKWRWYHFDGVDWDQSRRLNNRIYKFRGHGKAWDWEVDTEFGNYDYLMYADYDMDHPEVVNELRNWGVWYTNTLGLDGFRIDAVKHIKYSFTRDWINHVRSATGKNMFAVAEFWKNDLGAIENYLQKTNWNHSVFDVPLHYNLYNASKSGANYDMRNIFNGTVVQRHPSHAVTFVDNHDSQPEEALESFVEEWFKPLAYALTLTREQGYPSVFYGDYYGIPTHGVPAMRSKIDPILEARQKYAYGPQHDYLDHPDVIGWTREGDSSHPKSGLATLITDGPGGSKRMYAGLKNAGETWYDITGNRSDTVKIGSDGWGEFHVNDGSVSIYVQK

SEQ ID NO: 28052 - protein, 483 aa, Bacillus sp.
HHNGTNGTMMQYFEWYLPNDGNHWNRLNSDASNLKSKGITAVWIPPAWKGASQNDVGYGAYDLYDLGEFNQKGTVRTKYGTRSQLQAAVTSLKNNGIQVYGDVVMNHKGGADATEMVRAVEVNPNNRNQEVTGEYTIEAWTRFDFPGRGNTHSSFKWRWYHFDGVDWDQSRRLNNRIYKFRAKAWDWEVDTEFGNYDYLMYADYDMDHPEVVNELRNWGVWYTNTLGLDGFRIDAVKHIKYSFTRDWINHVRSATGKNMFAVAEFWKNDLGAIENYLQKTNWNHSVFDVPLHYNLYNASKSGGNYDMRNIFNGTVVQRHPSHAVTFVDNHDSQPEEALESFVEEWFKPLAYALTLTREQGYPSVFYGDYYGIPTHGVPAMRSKIDPILEARQKYAYGPQHDYLDHPDVIGWTREGDSSHPKSGLATLITDGPGGSKRMYAGLKNAGETWYDITGNRSDTVKIGSDGWGEFHVNDGSVSIYVQK

SEQ ID NO: 28053 - protein, 485 aa, Bacillus sp.
HHNGTNGTMMQYFEWYLPNDGNHWNRLNSDASNLKSKGITAVWIPPAWKGASQNDVGYGAYDLYDLGEFNQKGTVRTKYGTRSQLQAAVTSLKNNGIQVYGDVVMNHKGGADYTEMVRAVEVNPNNRNQEVTGEYTIEAWTRFDFPGRGNTHSSFKWRWYHFDGVDWDQSRRLNNRIYKFRGHGKAWDWEVDTEFGNYDYLMYADYDMDHPEVVNELRNWGVWYTNTLGLDGFRIDAVKHIKYSFTRDWINHVRSATGKNMFAVAEFWKNDLGAIENYLQKTNWNHSVFDVPLHYNLYNASKSGGNYDMRNIFNGTVVQRHPSHAVTFVDNHDSQPEEALESFVEEWFKPLAYALTLTREQGYPSVFYGDYYGIPTHGVPAMRSKIDPILEARQKYAYGPQHDYLDHPDVIGWTREGDSSHPKSGLATLITDGPGGSKRMYAGLKNAGETWYDITGNRSDTVKIGSDGWGEFHVNDGSVSIYVQK

SEQ ID NO: 28054 - protein, 485 aa, Bacillus sp.
HHNGTNGTMMQYFEWYLPNDGNHWNRLNSDASNLKSKGITAVWIPPAWKGASQNDVGYGAYDLYDLGEFNQKGTVRTKYGTRSQLQAAVTSLKNNGIQVYGDVVMNHKGGADATEMVRAVEVNPNNRNQEVTGEYTIEAWTRFDFPGRGNTHSSFKWRWYHFDGVDWDQSRRLNNRIYKFRGHGKAWDWEVDTEFGNYDYLMYADYDMDHPEVVNELRNWGVWYTNTLGLDGFRIDAVKHIKYSFTRDWINHVRSATGKNMFAVAEFWKNDLGAIENYLQKTNWNHSVFDVPLHYNLYNASKSGGNYDMRNIFNGTVVQRHPSHAVTFVDNHDSQPEEALESFVEEWFKPLAYALTLTREQGYPSVFYGDYYGIPTHGVPAMRSKIDPILAARQKYAYGPQHDYLDHPDVIGWTREGDSSHPKSGLATLITDGPGGSKRMYAGLKNAGETWYDITGNRSDTVKIGSDGWGEFHVNDGSVSIYVQK

SEQ ID NO: 28055 - protein, 485 aa, Bacillus sp.
HHNGTNGTMMQYFEWYLPNDGNHWNRLNSDASNLKSKGITAVWIPPAWKGASQNDVGYGAYDLYDLGEFNQKGTVRTKYGTRSQLQAAVTSLKNNGIQVYGDVVMNHKGGADATEMVRAVEVNPNNRNQEVTGEYTIEAWTRFDFPGRGNTHSSFKWRWYHFDGVDWDQSRRLNNRIYKFRGHGKAWDWEVDTEFGNYDYLMYADYDMDHPEVVNELRNWGVWYTNTLGLDGFRIDAVKHIKYSFTRDWINHVRSATGKNMFAVAEFWKNDLGAIENYLQKTNWNHSVFDVPLHYNLYNASKSGGNYDMRNIFNGTVVQRHPSHAVTFVDNHDSQPEEALESFVEEWFAPLAYALTLTREQGYPSVFYGDYYGIPTHGVPAMRSKIDPILEARQKYAYGPQHDYLDHPDVIGWTREGDSSHPKSGLATLITDGPGGSKRMYAGLKNAGETWYDITGNRSDTVKIGSDGWGEFHVNDGSVSIYVQK

SEQ ID NO: 28056 - protein, 485 aa, Bacillus sp.
HHNGTNGTMMQYFEWYLPNDGNHWNRLNSDASNLKSKGITAVWIPPAWKGASQNDVGYGAYDLYDLGEFNQKGTVRTKYGTRSQLQAAVTSLKNNGIQVYGDVVMNHKGGADATEMVRAVEVNPNNRNQEVTGEYTIEAWTRFDFPGRGNTHSSFKWRWYHFDGVDWDQSRRLNNRIYKFRGHGKAWDWEVDTEFGNYDYLMYADYDMDHPEVVNELRNWGVWYTNTLGLDGFRIDAVKHIKYSFTRDWINHVRSATGKNMFAVAEFWKNDLGAIENYLQKTNWNHSVFDVPLHYNLYNASKSQGNYDMRNIFNGTVVQRHPSHAVTFVDNHDSQPEEALESFVEPWFKPLAYALTLTREQGYPSVFYGDYYGIPTHGVPAMRSKIDPILEARQKYAYGPQHDYLDHPDVIGWTREGDSSHPKSGLATLITDGPGGSKRMYAGLKNAGETWYDITGNRSDTVKIGSDGWGEFHVNGGSVSIYVQK

SEQ ID NO: 28057 - protein, 485 aa, Bacillus sp.
HHNGTNGTMMQYFEWYLPNDGNHWNRLNSDASNLKSKGITAVWIPPAWKGASQNDVGYGAYDLYDLGEFNQKGTVRTKYGTRSQLQAAVTSLKNNGIQVYGDVVMNHKGGADATEMVRAVEVNPNNRNQEVTGEYTIEAWTRFDFPGRGNTHSSFKWRWYHFDGVDWDQSRRLNNRIYKFRGHGKAWDWEVDTEFGNYDYLMYADYDMDHPEVVNELRNWGVWYTNTLGLDGFRIDAVKHIKYSFTRDWINHVRSATGKNMFAVAEFWKNDLGAIENYLQKTNWNHSVFDVPLHYNLYNASKSGGNYDMRNIFNGTVVQRHPSHAVTFVDNHDSQPEEALESFVEEWFKPLAYALTLTREQGYPSVFYGDYYGIPKHGVPAMRSKIDPILEARQKYAYGPQHDYLDHPDVIGWTREGDSSHPKSGLATLITDGPGGSKRMYAGLKNAGETWYDITGNRSDTVKIGSDGWGEFHVNDGSVSIYVQK

SEQ ID NO: 28058 - protein, 485 aa, Bacillus sp.
HHNGTNGTMMQYFEWYLPNDGNHWNRLNSDASNLKSKGITAVWIPPAWKGASQNDVGYGAYDLYDLGEFNQKGTVRTKYGTRSQLQAAVTSLKNNGIQVYGDVVMNHKGGADQTEMVRAVEVNPNNRNQEVTGEYTIEAWTRFDFPGRGNTHSSFKWRWYHFDGVDWDQSRRLNNRIYKFRGHGKAWDWEVDTEFGNYDYLMYADYDMDHPEVVNELRNWGVWYTNTLGLDGFRIDAVKHIKYSFTRDWINHVRSATGKNMFAVAEFWKNDLGAIENYLQKTNWNHSVFDVPLHYNLYNASKSGGNYDMRNIFNGTVVQRHPSHAVTFVDNHDSQPEEALESFVEEWFKPLAYALTLTREQGYPSVFYGDYYGIPTHGVPAMRSKIDPILEARQKYAYGPQHDYLDHPDVIGWTREGDSSHPKSGLATLITDGPGGSKRMYAGLKNAGETWYDITGNRSDTVKIGSDGWGEFHVNDGSVSIYVQK

SEQ ID NO: 28059 - protein, 485 aa, Bacillus sp.
HHNGTNGTMMQYFEWYLPNDGNHWNRLNSDASNLKSKGITAVWIPPAWKGASQNDVGYGAYDLYDLGEFNQKGTVRTKYGTRSQLQAAVTSLKNNGIQVYGDVVMNHKGGADATEMVRAVEVNPNNRNQEVTGEYTIEAWTRFDFPGRGNTHSSFKWRWYHFDGVDWDQSRRLNNRIYKFRGHGKAWDWEVDTEFGNYDYLMYADYDMDHPEVVNELRNWGVWYTNTLGLDGFRIDAVKHIKYSFTRDWINHVRSATGKNMFAVAEFWKNDLGAIENYLQKTNWNHSVFDVPLHYNLYTASKSGGNYDMRNIFNGTVVQRHPSHAVTFVDNHDSQPEEALESFVEEWFKPLAYALTLTREQGYPSVFYGDYYGIPTHGVPAMRSKIDPILEARQKYAYGPQHDYLDHPDVIGWTREGDSSHPKSGLATLITDGPGGSKRMYAGLKNAGETWYDITGNRSDTVKIGSDGWGEFHVNDGSVSIYVQK

SEQ ID NO: 28060 - protein, 485 aa, Bacillus sp.
HHNGTNGTMMQYFEWYLPNDGNHWNRLNSDASNLKSKGITAVWIPPAWKGASQNDVGYGAYDLYDLGEFNQKGTVRTKYGTRSQLQAAVTSLKNNGIQVYGDVVMNHKGGADATEMVRAVEVNPNNRNQEVTGEYTIEAWTRFDFPGRGNTHSSFKWRWYHFDGVDWDQSRRLNNRIYKFRGHGKAWDWEVDTEFGNYDYLMYADYDMDHPETVNELRNWGVWYTNTLGLDGFRIDAVKHIKYSFTRDWINHVRSATGKNMFAVAEFWKNDLGAIENYLQKTNWNHSVFDVPLHYNLYNASKSGGNYDMRNIFNGTVVQRHPSHAVTFVDNHDSQPEEALESFVEEWFKPLAYALTLTREQGYPSVFYGDYYGIPTHGVPAMRSKIDPILEARQKYAYGPQHDYLDHPDVIGWTREGDSSHPKSGLATLITDGPGGSKRMYAGLKNAGETWYDITGNRSDTVKIGSDGWGEFHVNDGSVSIYVQK

SEQ ID NO: 28061 - protein, 483 aa, Bacillus sp.
HHNGTNGTMMQYFEWYLPNDGNHWNRLNSDASNLKSKGITAVWIPPAWKGASQNDVGYGAYDLYDLGEFNQKGTVRTKYGTRSQLQAAVTSLKNNGIQVYGDVVMNHKGGADATEMVRAVEVNPNNRNQEVTGEYTIEAWTRFDFPGRGNTHSSFKWRWYHFDGVDWDQSRRLNNRIYKFRGKAWDWEVDTEFGNYDYLMYADYDMDHPEVVNELRNWGVWYTNTLGLDGFRIDAVKHIKYSFTRDWINHVRSATGKNMFAVAEFWKNDLGAIENYLQKTNWNHSVFDVPLHYNLYNASKSGANYDMRNIFNGTVVQRHPSHAVTFVDNHDSQPEEALESFVDEWFKPLAYALTLTREQGYPSVFYGDYYGIPTHGVPAMRSKIDPILEARQKYAYGPQHDYLDHPDVIGWTREGDSSHPKSGLATLITDGPGGSKRMYAGLKNAGETWYDITGNRSDTVKIGSDGWGEFHVNDGSVSIYVQK

SEQ ID NO: 28062 - protein, 483 aa, Bacillus sp.
HHNGTNGTMMQYFEWYLPNDGNHWNRLNSDASNLKSKGITAVWIPPAWKGASQNDVRYGAYDLYDLGEFNQKGTVRTKYGTRSQLQAAVTSLKNNGIQVYGDVVMNHKGGADATEMVRAVEVNPNNRNQEVTGEYTIEAWTRFDFPGRGNTHSSFKWRWYHFDGVDWDQSREFDNRIYKFRGKAWDWEVDTEFGNYDYLMYADYDMDHPEVVNELRNWGVWYTNTLGLDGFRIDAVKHIKYSFTRDWINHVRSATGKNMFAVAEFWKNDLGAIENYLQKTNWNHSVFDVPLHYNLYNASQSGGNYDMRNIFNGTVVQRHPSHAVTFVDNHDSQPEEALESFVEPWFKPLAYALTLTREQGYPSVFYGDYYGIPTHGVPAMRSKIDPILEARQKYAYGPQHDYLDHPDVIGWTREGDSSHPKSGLATLITDGPGGSKRMYAGLKNAGETWYDITGNRSDTVKIGSDGWGEFHVNDGSVSIYVQK

SEQ ID NO: 28063 - protein, 483 aa, Bacillus sp.
HHNGTNGTMMQYFEWYLPNDGNHWNRLNSDASNLKSKGITAVWIPPAWKAVSQNDVGYGAYDLYDLGEFNQKGTVRTKYGTRSQLQAAVTSLKNNGIQVYGDVVMNHKGGADATEMVRAVEVNPNNRNQEVTGEYTIEAWTRFDFPGRGNTHSSFKWRWYHFDGVDWDQSRDFNNRIYKFRGKAWDWEVDTEFGNYDYLMYVDYDMDHPEVVNELRNWGVWYTNTLGLDGFRIDAVKHIKYSFTRDWINHVRSATGKNMFAVAEFWKNDLGAIENYLQKTNWNHSVFDVPLHYNLYNASQSGGNYDMRNIFNGTVVQRHPSHAVTFVDNHDSQPEEALESFVEEWFKPLAYALTLTREQGYPSVFYGDYYGIPTHGVPAMRSKIDPILEARQKYAYGPQHDYLDHPDVIGWTREGDSSHPKSGLATLITDGPGGSKRMYAGLKNAGETWYDITGNRSDTVKIGSDGWGEFHVNGSSVSIYVQK

SEQ ID NO: 28064 - protein, 483 aa, Bacillus sp.
HHNGTNGTMMQYFEWYLPNDGNHWNRLNSDASNLKSKGITAVWIPPAWKANSQNDVGYGAYDLYDLGEFNQKGTVRTKYGTRSQLQAAVTSLKNNGIQVYGDVVMNHKGGADATEMVRAVEVNPNNRNQEVTGEYTIEAWTRFDFPGRGNTHSSFKWRWYHFDGVDWDQSRKLKNRIYKFRGKAWDWEVDTEFGNYDYLMYADYDMDHPEVVNELRNWGVWYTNTLGLDGFRIDAVKHIKYSFTRDWINHVRSATGKNMFAVAEFWKNDLGAIENYLQKTNWNHSVFDVPLHYNLYNASKSGGNYDMRNIFNGTVVQRHPSHAVTFVDNHDSQPEEALESFVEEWFKPLAYALTLTREQGYPSVFYGDYYGIPTHGVPAMRSKIDPILEARQKYAYGPQHDYLDHPDVIGWTREGDSSHPKSGLATLITDGPGGSKRMYAGLKNAGETWYDITGNRSDTVKIGSDGWGEFHVNDGSVSIYVQK

SEQ ID NO: 28065 - protein, 485 aa, Bacillus sp.
HHNGTNGTMMQYFEWYLPNDGNHWNRLNSDASNLKSKGITAVWIPPAWKAASQNDVGYGAYDLYDLGEFNQKGTVRTKYGTRSQLQAAVTSLKNNGIQVYGDVVMNHKGGADATEMVRAVEVNPNNRNQEVTGEYTIEAWTRFDFPGRGNTHSSFKWRWYHFDGVDWDQSRKTTNRIYKFRGHGKAWDWEVDTEFGNYDYLMYADYDMDHPEVVNELRNWGVWYTNTLGLDGFRIDAVKHIKYSFTRDWINHVRSATGKNMFAVAEFWKNDLGAIENYLQKTNWNHSVFDVPLHYNLYNASKSGGNYDMRNIFNGTVVQRHPSHAVTFVDNHDSQPEEALESFVEEWFKPLAYALTLTREQGYPSVFYGDYYGIPTHGVPAMRSKIDPILEARQKYAYGPQHDYLDHPDVIGWTREGDSSHPKSGLATLITDGPGGSKRMYAGLKNAGETWYDITGNRSDTVKIGSDGWGEFHVNDGSVSIYVQK

SEQ ID NO: 28066 - protein, 483 aa, Bacillus sp.
HHNGTNGTMMQYFEWYLPNDGNHWNRLNSDASNLKSKGITAVWIPPAWKGASQNDVGYGAYDLYDLGEFNQKGTVRTKYGTRSQLQAAVTSLKNNGIQVYGDVVMNHKGGADATEMVRAVEVNPNNRNQEVTGEYTIEAWTRFDFPGRGNTHSSFKWRWYHFDGVDWDQSRRLNNRIYKFRGKAWDWEVATEFGNYDYLMYADYDMDHPEVVNELRNWGVWYTNTLGLDGFRIDAVKHIKYSFTRDWINHVRSATGKNMFAVAEFWKNDLGAIENYLQKTNWNHSVFDVPLHYNLYNASKSGGNYDMRNIFNGTVVQRHPSHAVTFVDNHDSQPEEALESFVEEWFKPLAYALTLTREQGYPSVFYGDYYGIPTHGVPAMRSKIDPILEARQKYAYGPQHDYLDHPDVIGWTREGDSSHPKSGLATLITDGPGGSKRMYAGLKNAGETWYDITGNRSDTVKIGSDGWGEFHVNDGSVSIYVQK

SEQ ID NO: 28067 - protein, 483 aa, Bacillus sp.
HHNGTNGTMMQYFEWYLPNDGNHWNRLNSDASNLKSKGITAVWIPPAWKGASQNDVGYGAYDLYDLGEFNQKGTVRTKYGTRSQLQAAVTSLKNNGIQVYGDVVMNHKGGADATEMVRAVEVNPNNRNQEVTGEYTIEAWTRFDFPGRGNTHSSFKWRWYHFDGVDWDQSRRLNNRIYKFRGKAWDWEVDTEFGNYDYLMYADYDMDHPEVVNELRNWGVWYTNTLGLDGFRIDAVKHIKYSFTRDWINHVRSATGKNMFAVAEFWINDLGAIENYLQKTNWNHSVFDVPLHYNLYNASKSGGNYDMRNIFNGTVVQRHPSHAVTFVDNHDSQPEEALESFVEEWFKPLAYALTLTREQGYPSVFYGDYYGIPTHGVPAMRSKIDPILEARQKYAYGPQHDYLDHPDVIGWTREGDSSHPKSGLATLITDGPGGSKRMYAGLKNAGETWYDITGNRSDTVKIGSDGWGEFHVNDGSVSIYVQK

SEQ ID NO: 28068 - protein, 483 aa, Bacillus sp.
HHNGTNGTMMQYFEWYLPNDGNHWNRLNSDASNLKSKGITAVWIPPAWKGASQNDVGYGAYDLYDLGEFNQKGTVRTKYGTRSQLQAAVTSLKNNGIQVYGDVVMNHKGGADATEMVRAVEVNPNNRNQEVTGEYTIEAWTRFDFPGRGNTHSSFKWRWYHFDGVDWDQSRRLNNRIYKFRGKAWDWEVDTEFGNYDYLMYADYDMDHPEVVNELRNWGVWYTNTLGLDGFRIDAVKHIKESFTRDWINHVRSATGKNMFAVAEFWKNDLGAIENYLQKTNWNHSVFDVPLHYNLYNASKSGGNYDMRNIFNGTVVQRHPSHAVTFVDNHDSQPEEALESFVEEWFKPLAYALTLTREQGYPSVFYGDYYGIPTHGVPAMRSKIDPILEARQKYAYGPQHDYLDHPDVIGWTREGDSSHPKSGLATLITDGPGGSKRMYAGLKNAGETWYDITGNRSDTVKIGSDGWGEFHVNDGSVSIYVQK

SEQ ID NO: 28069 - protein, 485 aa, Bacillus sp.
HHNGTNKTMMQYFEWYLPNDGNHWNRLNSDASNLKSKGITAVWIPPAWKGASQNDVGYGAYDLYDLGEFNQKGTVRTKYGTRSQLQAAVTSLKNNGIQVYGDVVMNHKGGADATEMVRAVEVNPNNRNQEVTGEYTIEAWTRFDFPGRGNTHSSFKWRWYHFDGVDWDQSRRLNNRIYKFRGHGKAWDWEVDTEFGNYDYLMYADYDMDHPEVVNELRNWGVWYTNTLGLDGFRIDAVKHIKYSFTRDWINHVRSATGKNMFAVAEFWKNDLGAIENYLQKTNWNHSVFDVPLHYNLYNASKSGGNYDMRNIFNGTVVQAHPSHAVTFVDNHDSQPEEALESFVEEWFKPLAYALTLTREQGYPSVFYGDYYGIPTHGVPAMRSKIDPILEARQKYAYGPQHDYLDHQDVIGWTREGDSSHPKSGLATLITDGPGGSKRMYAGLKNAGETWYDITGNRSDTVKIGSDGWGEFHVNDGSVSIYVQK

SEQ ID NO: 28070 - protein, 485 aa, Bacillus sp.
HHNGTNGTMMQYFEWYLPNDGNHWNRLNSDASNLKSKGITAVWIPPAWKAASQNDVGYGAYDLYDLGEFNQKGTVRTKYGTRSQLQAAVTSLKNNGIQVYGDVVMNHKGGADATEMVRAVEVNPNNRNQEVTGEYTIEAWTRFDFPGRGNTHSSFKWRWYHFDGVDWDQSRDTNNRIYKFRGHGKAWDWEVDTEFGNYDYLMYADYDMDHPEVVNELRNWGVWYTNTLGLDGFRIDAVKHIKYSFTRDWINHVRSATGKNMFAVAEFWKNDLGAIENYLQKTNWNHSVFDVPLHYNLYNASKSGGNYDMRNIFNGTVVQRHPSHAVTFVDNHDSQPEEALESFVEEWFKPLAYALTLTREQGYPSVFYGDYYGIPTHGVPAMRSKIDPILEARQKYAYGPQHDYLDHPDVIGWTREGDSSHPKSGLATLITDGPGGSKRMYAGLKNAGETWYDITGNRSDTVKIGSDGWGEFHVNDGSVSIYVQK

SEQ ID NO: 28071 - protein, 483 aa, Bacillus sp.
HHNGTNGTMMQYFEWYLPNDGNHWNRLNSDASNLKSKGITAVWIPPAWKGASQNDVGYGAYDLYDLGEFNQKGTVRTKYGTRSQLQAAVTSLKNNGINVYGDVVMNHKGGADATEMVRAVEVNPNNRNQEVTGEYTIEAWTRFDFPGRGNTHSSFKWRWYHFDGVDWDQSRRLNNRIYKFRGKAWDWEVDTEFGNYDYLMYADYDMDHPEVVNELRNWGVWYTNTLGLDGFRIDAVKHIKYSFTRDWINHVRSATGKNMFAVAEFWKNDLGAIENYLQKTNWNHSVFDVPLHYNLYNASKSGGNYDMRNIFNGTVVQAHPMHAVTFVDNHDSQPEEALESFVEEWFKPLAYALTLTREQGYPSVFYGDYYGIPTHGVPAMRSKIDPILLARQKYAYGPQHDYLDHPDVIGWTREGDSSHPKSGLATLITDGPGGSKRMYAGLKNAGETWYDITGNRSDTVKIGSDGWGEFHVNDGSVSIYVQK

SEQ ID NO: 28072 - protein, 485 aa, Bacillus sp.
HHNGTNGTMMQYFEWYLPNDGNHWNRLNSDASNLKSKGITAVWIPPAWKGISQNDVGYGAYDLYDLGEFNQKGTVRTKYGTRSQLQAAVTSLKNNGIQVYGDVVMNHKGGADATEMVRAVEVNPNNRNQEVTGEYTIEAWTRFDFPGRGNTHSSFKWRWYHFDGVDWDQSRRLNNRIYKFRGHGKAWDWEVDTEFGNYDYLMYTDYDMDHPEVVNELRNWGVWYTNTLGLDGFRIDAVKHIKYSFTRDWINHVRSATGKNMFAVAEFWKNDLGAIENYLQKTNWNHSVFDVPLHYNLYNASKSGGNYDMRNIFNGTVVQRHPSHAVTFVDNHDSQPEEALESFVEEWFKPLAYALTLTREQGYPSVFYGDYYGIPTHGVPAMRSKIDPILEARQKYAYGPQHDYLDHPDVIGWTREGDSSHPKSGLATLITDGPGGSKRMYAGLKNAGETWYDITGNRSDTVKIGSDGWGEFHVNDGSVSIYVQK

SEQ ID NO: 28073 - protein, 485 aa, Bacillus sp.
HHNGTNGTMMQYFEWYLPNDGNHWNRLNSDASNLKSKGITAVWIPPAWKGASQNDVGYGAYDLYDLGEFNQKGTVRTKYGTRSQLQAAVTSLKNNGIQVYGDVVMNHKGGADATEMVPAVEVNPNNRNQEVTGEYTIEAYTRFDFPGRGNTHSSFKWRWYHFDGVDWDQSRRLNNRIYKFRGHGKAWDWEVDTEFGNYDYLMYADYDMDHPEVVNELRNWGVWYTNTLGLDGFRIDAVKHIKYSFTRDWINHVRSATGKNMFAVAEFWKNDLGAIENYLQKTNWNHSVFDVPLHYNLYNASKSGGNYDMRNIFNGTVVQRHPSHAVTFVDNHDSQPEEALESFVEEWFKPLAYALTLTREQGYPSVFYGDYYGIPTHGVPAMRSKIDPILEARQKYAYGPQHDYLDHPDVIGWTREGDSSHPKSGLATLITDGPGGSKRMYAGLKNAGETWYDITGNRSDTVKIGSDGWGEFHVNDGSVSIYVQK

SEQ ID NO: 28074 - protein, 483 aa, Synthetic construct
HHNGTNGTMMQYFEWYLPNDGNHWNRLNSDASNLKSKGITAVWIPPAWKGASQNDVGYGAYDLYDLGEFNQKGTVRTKYGTRSQLQAAVTSLKNNGIQVYGDVVMNHKGGADATEMVRAVEVNPNNRNQEVTGEYTIEAWTRFDFPGRGNTHSSFKWRWYHFDGVDWDQSSRLNNRIYKFRGKAWDWEVDTEFGNYDYLMYADYDMDHPEVVNELRNWGVWYTNTLGLDGFRIDAVKHIKYSFTRDWINHVRSATGKNMFAVAEFWKNDLGAIENYLQKTNWNHSVFDVPLHYNLYNASKSGGNYDMRNIFNGTVVQRHPSHAVTFVDNHDSQPEEALESFVEEWFKPLAYALTLTREQGYPSVFYGDYYGIPTHGVPAMRSKIDPILEARQKYAYGPQHDYLDHPDVIGWTREGDSSHPKSGLATLITDGPGGSKRMYAGLKNAGETWYDITGNRSDTVKIGSDGWGEFHVNDGSVSIYVQK

SEQ ID NO: 28075 - protein, 483 aa, Bacillus sp.
NHNGTNGTMMQYFEWYLPNDGNHWNRLNSDASNLKSKGITAVWIPPAWKGASQNDVGYGAYDLYDLGEFNQKGTVRTKYGTRSQLQAAVTSLKNNGIQVYGDVVMNHKGGADATEMVRAVEVNPNNRNQEVTGEYTIEAWTRFDFPGRGNTHSSFKWRWYHFDGVDWDQSRRLNNRIYKFRGKAWDWEVDTEFGNYDYLMYADYDMDHPEVVNELRNWGVWYTNTLGLDGFRIDAVKHIKYSFTRDWINHVRSATGKNMFAVAEFWKNDLGAIENYLQKTNWNHSVFDVPLHYNLYNASKSGGNYDMRNIFNGTVVQRHPSHAVTFVDNHDSQPEEALESFVEEWFKPLAYALTLTREQGYPSVFYGDYYGIPTHGVPAMRSKIDPILEARQKYAYGPQHDYLDHPDVIGWTREGDSSHPKSGLATLITDGPGGSKRMYAGLKNAGETWYDITGNRSDTVKIGSDGWGEFHVNDGSVSIYVQK

SEQ ID NO: 28076 - protein, 483 aa, Synthetic construct
HHNGTNGTMMQYFEWYLPNDGNHWNRLNSDASNLKSKGITAVWIPPAWKGASQNDVGYGAYDLYDLGEFNQKGTVRTKYGTRSQLQAAVTSLKNNGIQVYGDVVMNHKGGADATEMVRAVEVNPNNRNQEVTGEYTIEAWTRFDFPGRGNTHSSFKWRWYHFDGVDWDQSRRLNNRIYKFRGKAWDWEVDTENGNYDYLMYADYDMDHPEVVNEIRNWGVWYTNTLGLDGFRIDAVKHIKYSFIRDWINHVRSATGKNMFAVAEFWKNDLGAIENYLQKTNWNHSVFDVPLHYNLYNASKSGGNYDMRNIFNGTVVQRHPSHAVTFVDNHDSQPEEALESFVEEWFKPLAYALTLTREQGYPSVFYGDYYGIPTHGVPAMRSKIDPILEARQKYAYGPQHDYLDHPDVIGWTREGDSSHPKSGLATLITDGPGGSKRMYAGLKNAGETWYDITGNRSDTVKIGSDGWGEFHVNDGSVSIYVQK

SEQ ID NO: 28077 - protein, 483 aa, Bacillus sp.
HHNGTNGTMMQYFEWYLPNDGNHWNRLNSDASNLKSKGITAVWIPPAWKGASQNDVGYGAYDLYDLGEFNQKGTVRTKYGTRSQLQAAVTSLKNNGIQVYGDVVMNHKGGADATEMVRAVEVNPNNRNQEVTGEYTIEAWTRFDFPGRGNTHSSFKWRWYHFDGVDWDQSRRLNNRIYKFRGKAWDWEVDTEFGNYDYLMYADYDMDHPEVVNELRNWGVWYTNTLGLDGFRIDAVKHIKYSFTRDWINHVRSATGKNMFAVAEFWKNDLGAIENYLQKTNWNHSVFDVPLHYNLYNASKSRGNYDMRNIFNGTVVQRHPSHAVTFVDNHDSQPEEALESFVEEWFKPLAYALTLTREQGYPSVFYGDYYGIPTHGVPAMRSKIDPILEARQKYAYGPQHDYLDHPDVIGWTREGDSSHPKSGLATLITDGPGGSKRMYAGLKNAGETWYDITGNRSDTVKIGSDGWGEFHVNDGSVSIYVQK

SEQ ID NO: 28078 - protein, 483 aa, Bacillus sp.
HHNGTNGTMMQYFEWYLPNDGNHWNRLNSDASNLKSKGITAVWIPPAWKGASQNDVGYGAYDLYDLGEFNQKGTVRTKYGTRSQLQAAVTSLKNNGIQVYGDVVMNHKGGADATEMVRAVEVNPNNRNQEVTGEYTIEAWTRFDFPGRGNTHSSFKWRWYHFDGVDWDQSRRLNNRIYKFRGKAWDWEVDTEFGNYDYLMYADYDMDHPEVVNELRNWGVWYTNTLGLDGFRIDAVKHIKYSFTRDWINHVRSATGKNMFAVAEFWKNDLGAIENYLQKTNWNHSVFDVPLHYNLYNASNSGGNYDMRNIFNGTVVQRHPSHAVTFVDNHDSQPEEALESFVETWFKPLAYALTLTREQGYPSVFYGDYYGIPTHGVPAMRSKIDPILEARQKYAYGPQHDYLDHPDVIGWTREGDSSHPKSGLATLITDGPGGSKRMYAGLKNAGETWYDITGNRSDTVKIGSDGWGEFHVNQTSVSIYVQK

SEQ ID NO: 28079 - protein, 483 aa, Bacillus sp.
HHNGTNGTMMQYFEWYLPNDGNHWNRLNSDASNLKSKGITAVWIPPAWKGASQNDVGYGAYDLYDLGEFNQKGTVRTKYGTRSQLQAAVTSLKNNGIQVYGDVVMNHKGGADATEMVRAVEVNPNNRNQEVTGEYTIEAWTRFDFPGRGNTHSSFKWRWYHFDGVDWDGSRRLNNRIYKFRGKAWDWEVDTEFGNYDYLMYADYDMDHPEVVNELRNWGVWYTNTLGLDGFRIDAVKHIKYSFTRDWINHVRSATGKNMFAVAEFWKNDLGAIENYLQKTNWNHSVFDVPLHYNLYNASKSGGNYDMRNIFNGTVVQRHPSHAVTFVDNHDSQPEEALESFVEEWFKPLAYALTLTREQGYPSVFYGDYYGIPTHGVPAMRSKIDPILEARQKYAYGPQHDYLDHPDVIGWTREGDSSHPKSGLATLITDGPGGSKRMYAGLKNAGETWYDITGNRSDTVKIGSDGWGEFHVNDGSVSIYVQK

SEQ ID NO: 28080 - protein, 483 aa, Bacillus sp.
HHNGTNGTMMQYFEWYLPNDGNHWNRLNSDASNLKSKGITAVWIPPAWKGASQNDVGYGAYDLYDLGEFNQKGTVRTKYGTRSQLQAAVTSLKNNGIQVYGDVVMNHKGGADATEMVRAVEVNPNNRNQEVTGEYTIEAWTRFDFPGRKNTHSSFKWRWYHFDGVDWDQSRRLNNRIYKFRGKAWDWEVDTEFGNYDYLMYADYDMDHPEVVNELRNWGVWYTNTLGLDGFRIDAVKHIKYSFTRDWINHVRSATGKNMFAVAEFWKNDLGAIENYLQKTNWNHSVFDVPLHYNLYNASKSGGNYDMRNIFNGTVVQRHPSHAVTFVDNHDSQPEEALESFVEEWFKPLAYALTLTREQGYPSVFYGDYYGIPTHGVPAMRSKIDPILEARQKYAYGPQHDYLDHPDVIGWTREGDSSHPKSGLATLITDGPGGSKRMYAGLKNAGETWYDITGNRSDTVKIGSDGWGEFHVNDGSVSIYVQK

SEQ ID NO: 28081 - protein, 483 aa, Bacillus sp.
HHNGTNGTMMQYFEWYLPNDGNHWNRLNSDASNLKSKGITAVWIPPAWKAASQNDVGYGAYDLYDLGEFNQKGTVRTKYGTRSQLQAAVTSLKNNGIQVYGDVVMNHKGGADATEMVRAVEVNPNNRNQEVTGEYTIEAWTRFDFPGRGNTHSSFKWRWYHFDGVDWDQSRELSNRIYKFRGKAWDWEVDTEFGNYDYLMYADYDMDHPEVVNELRNWGVWYTNTLGLDGFRIDAVKHIKYSFTRDWINHVRSATGKNMFAVAEFWKNDLGAIENYLQKTNWNHSVFDVPLHYNLYNASKSGGNYDMRNIFNGTVVQRHPSHAVTFVDNHDSQPEEALESFVEEWFKPLAYALTLTREQGYPSVFYGDYYGIPTHGVPAMRSKIDPILEARQKYAYGPQHDYLDHPDVIGWTREGDSSHPKSGLATLITDGPGGSKRMYAGLKNAGETWYDITGNRSDTVKIGSDGWGEFHVNDGSVSIYVQK

SEQ ID NO: 28082 - protein, 485 aa, Bacillus sp.
HHNGTNGTMMQYFEWYLPNDGNHWNRLNSDASNLKSKGITAVWIPPAWKGASQNDVGYGAYDLYDLGEFNQKGTVRTKYGTRSQLQAAVTSLKNNGINVYGDVVMNHKGGADATEMVRAVEVNPNNRNQEVTGEYTIEAWTRFDFPGRGNTHSSFKWRWYHFDGVDWDMSRRLNNRIYKFRGHGKAWDWEVDTEFGNYDYLMYADYDMDHPEVVNELRNWGVWYTNTLGLDGFRIDAVKHIKYSFTRDWINHVRSATGKNMFAVAEFWKNDLGAIENYLQKTNWNHSVFDVPLHYNLYNASKSGGNYDMRNIFNGTVVQAHPMHAVTFVDNHDSQPEEALESFVEEWFKPLAYALTLTREQGYPSVFYGDYYGIPTHGVPAMRSKIDPILEARQKYAYGPQHDYLDHPDVIGWTREGDSSHPKSGLATLITDGPGGSKRMYAGLKNAGETWYDITGNRSDTVKIGSDGWGEFHVNDGSVSIYVQK

SEQ ID NO: 28083 - protein, 485 aa, Bacillus sp.
HHNGTNGTMMQYFEWYLPNDGNHWNQLNSDASNLKSKGITAVWIPPAWKGASQNDVGYGAYDLYDLGEFNQKGTVRTKYGTRSQLQAAVTSLKNNGIQVYGDVVMNHKGGADATEMVRAVEVNPNNRNQEVTGEYTIEAWTRFDFPGRGNTHSSFKWRWYHFDGVDWDQSRRTNNRIYKFRGHGKAWDWEVDTEFGNYDYLMYADYDMDHPEVVNELRNWGVWYTNTLGLDGFRIDAVKHIKYSFTRDWINHVRSATGKNMFAVAEFWKNDLGAIENYLQKTNWNHSVFDVPLHYNLYNASKSGGNYDMRNIFNGTVVQRHPSHAVTFVDNHDSQPEEALESFVEEWFKPLAYALTLTREQGYPSVFYGDYYGIPTHGVPAMRSKIDPILEARQKYAYGPQHDYLDHPDVIGWTREGDSSHPKSGLATLITDGPGGSKRMYAGLKNAGETWYDITGNRSDTVKIGSDGWGEFHVNDGSVSIYVQK

SEQ ID NO: 28084 - protein, 483 aa, Bacillus sp.
HHNGTNGTMMQYFEWYLPNDGNHWNRLNSDASNLKSKGITAVWIPPAWKGASQNDVGYGAYDLYDLGEFNQKGTVRTKYGTRSQLQAAVTSLKNNGINVYGDVVMNHKGGADATEMVRAVEVNPNNRNQEVTGEYTIEAWTRFDFPGRGNTHSSFKWRWYHFDGVDWDQSRRLNNRIYKFRGKAWDWEVDTEFGNYDYLMYADYDMDHPEVVNELRNWGVWYTNTLGLDGFRIDAVKHIKYSFTRDWINHVRSATGKNMFAVAEFWKNDLGAIENYLQKTNWNHSVFDVPLHYNLYNASKSGGNYDMRNIFNGTVVQSHPMLAVTFVDNHDSQPEEALESFVEEWFKPLAYALTLTREQGYPSVFYGDYYGIPTHGVPAMRSKIDPILEARQKYAYGPQHDYLDHPDVIGWTREGDSSHPKSGLATLITDGPGGSKRMYAGLKNAGETWYDITGNRSDTVKIGSDGWGEFHVNDGSVSIYVQK

SEQ ID NO: 28085 - protein, 485 aa, Bacillus sp.
HHNGTNGTMMQYFEWYLPNDGNHWNRLNSDASNLKSKGITAVWIPPAWKGASQNDVGYGAYDLYDLGEFNQKGTVRTKYGTRSQLQAAVTSLKNNGIQVYGDVVMNHKGGADATEMVRAVEVNPNNRNQEVTGEYTIEAWTRFDFPGRGNTHSSFKWRWYHFDGVDWDQSRRLNNRIYKFRGHGKAWDWEVDTEFGNYDYLMYADYDMDHPEVVNELRNWGVWYTNTLGLDGFRIDAVKHIKFSFTRDWINHVRSATGKNMFAVAEFWKNDLGAIENYLQKTNWNHSVFDVPLHYNLYNASKSGGNYDMRNIFNGTVVQRHPSHAVTFVDNHDSQPEEALESFVEEWFKPLAYALTLTREQGYPSVFYGDYYGIPTHGVPAMRSKIDPILEARQKYAYGPQHDYLDHPDVIGWTREGDSSHPKSGLATLITDGPGGSKRMYAGLKNAGETWYDITGNRSDTVKIGSDGWGEFHVNDGSVSIYVQK

SEQ ID NO: 28086 - protein, 485 aa, Bacillus sp.
HHNGTNGTMMQYFEWYLPNDGNHWNRLNSDASNLKSKGITAVWIPPAWKGASQNDVGYGAYDLYDLGEFNQKVTVRTKYGTRSQLQAAVTSLKNNGIQVYGDVVMNHKGGADATEMVRAVEVNPNNRNQEVTGEYTIEAWTRFDFPGRGNTHSSFKWRWYHFDGVDWDQSRRLNNRIYKFRGHGKAWDWEVDTEFGNYDYLMYADYDMDHPEVVNELRNWGVWYTNTLGLDGFRIDAVKHIKYSFTRDWINHVRSATGKNMFAVAEFWKNDLGAIENYLQKTNWNHSVFDVPLHYNLYNASKSGGNYDMRNIFNGTVVQRHPSHAVTFVDNHDSQPEEALESFVEEWFKPLAYALTLTREQGYPSVFYGDYYGIPTHGVPAMRSKIDPILEARQKYAYGPQHDYLDHPDVIGWTREGDSSHPKSGLATLITDGPGGSKRMYAGLKNAGETWYDITGNRSDTVKIGSDGWGEFHVNDGSVSIYVQK

SEQ ID NO: 28087 - protein, 485 aa, Bacillus sp.
HHNGTNGTMMQYFEWYLPNDGNHWNRLNSDASNLKSKGITEVWIPPAWKGISQNDVGYGAYDLYDLGEFNQKGTVRTKYGTRSQLQAAVTSLKNNGIQVYGDVVMNHKGGADATEMVRAVEVNPNNRNQEVTGEYTIEAWTRFDFPGRGNTHSSFKWRWYHFDGVDWDQSRDTNNRIYKFRGHGKAWDWEVDTEFGNYDYLMYADYDMDHPEVVNELRNWGVWYTNTLGLDGFRIDAVKHIKYSFTRDWINHVRSATGKNMFAVAEFWKNDLGAIENYLQKTNWNHSVFDVPLHYNLYNASKSGGNYDMRNIFNGTVVQRHPSHAVTFVDNHDSQPEEALESFVEEWFKPLAYALTLTREQGYPSVFYGDYYGIPTHGVPAMRSKIDPILEARQKYAYGPQHDYLDHPDVIGWTREGDSSHPKSGLATLITDGPGGSKRMYAGLKNAGETWYDITGNRSDTVKIGSDGWGEFHVNDGSVSIYVQK

SEQ ID NO: 28088 - protein, 485 aa, Bacillus sp.
HHNGTNNTMMQYFEWYLPNDGNHWNRLNSDASNLKSKGITAVWIPPAWKGASQNDVGYGAYDLYDLGEFNQKGTVRTKYGTRSQLQAAVTSLKNNGIQVYGDVVMNHKGGADATEMVRAVEVNPNNRNQEVTGEYTIEAWTRFDFPGRGNTHSSFKWRWYHFDGVDWDQSRRLNNRIYKFRGHGKAWDWEVDTEFGNYDYLMYADYDMDHPEVVNELRNWGVWYTNTLGLDGFRIDAVKHIKYSFTRDWINHVRSATGKNMFAVAEFWKNDLGAIENYLQKTNWNHSVFDVPLHYNLYNASKSGGNYDMRNIFNGTVVQSHPSHAVTFVDNHDSQPEEALESFVEEWFKPLAYALTLTREQGYPSVFYGDYYGIPTHGVPAMRSKIDPILEARQKYAYGPQHDYLDHPDVIGWTREGDSSHPKSGLATLITDGPGGSKRMYAGLKNAGETWYDITGNRSDTVKIGSDGWGEFHVNDGSVSIYVQK

SEQ ID NO: 28089 - protein, 485 aa, Bacillus sp.
HHNGTNGTMMQYFEWYLPNDGNHWNRLNSDASNLKSKGITAVWIPPAWKAVSQNDVGYGAYDLYDLGEFNQKGTVRTKYGTRSQLQAAVTSLKNNGIQVYGDVVMNHKGGADATEMVRAVEVNPNNRNQEVTGEYTIEAWTRFDFPGRGNTHSSFKWRWYHFDGVDWDQSRRFDNRIYKFRGHGKAWDWEVDTEFGNYDYLMYADYDMDHPEVVNELRNWGVWYTNTLGLDGFRIDAVKHIKYSFTRDWINHVRIATGKNMFAVAEFWKNDLGAIENYLQKTNWNHSVFDVPLHYNLYNASKSGGNYDMRNIFNGTVVQRHPSHAVTFVDNHDSQPEEALESFVDEWFKPLAYALTLTREQGYPSVFYGDYYGIPTHGVPAMRSKIDPILEARQKYAYGPQHDYLDHPDVIGWTREGDSSHPKSGLATLITDGPGGSKRMYAGLKNAGETWYDITGNRSDTVKIGSDGWGEFHVNDQSVSIYVQK

SEQ ID NO: 28090 - protein, 483 aa, Bacillus sp.
HHNGTNGTMMQYFEWYLPNDGNHWNRLNSDASNLKSKGITAVWIPPAWKGASQNDVGYGAYDLYDLGEFNQKGTVRTKYGTRSQLQAAVTSLKNNGIQVYGDVVMNHKGGADATEMVRAVEVNPNNRNQEVTGEYTIEAWTRFDFPGRGNTHSSFKWRWYHFDGVDWDQSRRLNNRIYKFRGKAWDWEVDTEFGNYDYLMYADYDMDHPEVVNELRNWGVWYTNTLGLDGFRIDAVKHIKYSFTRDWINHVRSATGKNMFAVAEFWKNDLGAIENYLQKTNWNHSVFDVPLHYNLYNASKSGGNYDMRNIFNGTVVQRHPSHAVTFVDNHDSQPEEALESFVDEWFKPLAYALTLTREQGYPSVFYGDYYGIPTHGVPAMRSKIDPILEARQKYAYGPQHDYLDHPDVIGWTREGDSSHPKSGLATLITDGPGGSKRMYAGLKNAGETWYDITGNRSDTVKIGSDGWGEFHVNQSSVSIYVQK

SEQ ID NO: 28091 - protein, 483 aa, Bacillus sp.
HHNGTNGTMMQYFEWYLPNDGNHWNRLNSDASNLKSKGITAVWIPPAWKGASQNDVGYGAYDLYDLGEFNQKGTVRTKYGTRSQLQAAVTSLKNNGIQVYGDVVMNHKGGADATEMVRAVEVNPNNRNQEVTGEYTIEAWTRFDFPGRGNTHSSFKWRWYHFDGVDWDQSRRLNNRIYKFRGKAWDWEVDTEFGNYDYLMYADYDMDHPEVVNELRNWGVWYTNTLGLDGFRIDAVKHIKYSFTRDWINHVRSATGKNMFAVAEFWKNDLGAIENYLQKTNWNHSVFDVPLHYNLYNASKSGGNYDMRNIFNGTVVQRHPSHAVTFVDNHDSQPEEALESFVDPWFKPLAYALTLTREQGYPSVFYGDYYGIPTHGVPAMRSKIDPILEARQKYAYGPQHDYLDHPDVIGWTREGDSSHPKSGLATLITDGPGGSKRMYAGLKNAGETWYDITGNRSDTVKIGSDGWGEFHVNGASVSIYVQK

SEQ ID NO: 28092 - protein, 485 aa, Bacillus sp.
HHNGTNGTMMQYFEWYLPNDGNHWNRLNSDASNLKSKGITAVWIPPAWKGASQNDVGYGAYDLYDLGEFNQKGTVRTKYGTRSQLQAAVTSLKNNGIQVYGDVVMNHKGGADATEMVRAVEVNPNNRNQEVTGEYTIEAWSRFDFPGRGNTHSSFKWRWYHFDGVDWDQSRRLNNRIYKFRGHGKAWDWEVDTEFGNYDYLMYADYDMDHPEVVNELRNWGVWYTNTLGLDGFRIDAVKHIKYSFTRDWINHVRSATGKNMFAVAEFWKNDLGAIENYLQKTNWNHSVFDVPLHYNLYNASKSGGNYDMRNIFNGTVVQRHPSHAVTFVDNHDSQPEEALESFVEEWFKPLAYALTLTREQGYPSVFYGDYYGIPTHGVPAMRSKIDPILEARQKYAYGPQHDYLDHPDVIGWTREGDSSHPKSGLATLITDGPGGSKRMYAGLKNAGETWYDITGNRSDTVKIGSDGWGEFHVNDGSVSIYVQK

SEQ ID NO: 28093 - protein, 485 aa, Bacillus sp.
HHNGTNGTMMQYFEWYLPNDGNHWNRLNSDASNLKSKGITAVWIPPAWKGASQNDVRYGAYDLYDLGEFNQKGTVRTKYGTRSQLQAAVTSLKNNGIQVYGDVVMNHKGGADATEMVRAVEVNPNNRNQEVTGEYTIEAWTRFDFPGRGNTHSSFKWRWYHFDGVDWDQSREFDNRIYKFRGHGKAWDWEVDTEFGNYDYLMYADYDMDHPEVVNELRNWGVWYTNTLGLDGFRIDAVKHIKYSFTRDWINHVRSATGKNMFAVAEFWKNDLGAIENYLQKTNWNHSVFDVPLHYNLYNASQSGGNYDMRNIFNGTVVQRHPSHAVTFVDNHDSQPEEALESFVEPWFKPLAYALTLTREQGYPSVFYGDYYGIPTHGVPAMRSKIDPILEARQKYAYGPQHDYLDHPDVIGWTREGDSSHPKSGLATLITDGPGGSKRMYAGLKNAGETWYDITGNRSDTVKIGSDGWGEFHVNDGSVSIYVQK

SEQ ID NO: 28094 - protein, 485 aa, Bacillus sp.
HHNGTNGTMMQYFEWYLPNDGNHWNRLNSDASNLKSKGITAVWIPPAWKGASQNDVGYGAYDLYDLGEFNQKGTVRTKYGTRSQLQAAVTSLKNNGIQVYGDVVMNHKGGADATEMVRAVEVNPNNRNQEVTGEYTIEAWTRFDFPGRGNTHSSFKWRWYHFDGVDWDQSRRLNNRIYKFRGHGKAWDWEVDTEFGNYDYLMYADYDMDHPEVVNELRNWGVWYTNTLGLDGFRIDAVKHIKYSFTRDWINHVRSATGKNMFAVAEFWKNDLGAIENYLQKTNWNHSVFDVPLHYNLYNASKSGGNYDMRNIFNGTVVQRHPSHAVTFVDNHDSQPEEALESFVEEWFKPLAYALTLTREQGYPSVFYGDYYGIPTHGVPAMRSKIDPILEARQKYAYGPQHDYLDHPDVIGWTREGDSSHPKSGLATLITDGPGGSKRMYAGLKNAGETWYDITGNRSDTVKIGSGGWGEFHVNDGSVSIYVQK

SEQ ID NO: 28095 - protein, 485 aa, Bacillus sp.
HHNGTNGTMMQYFEWYLPNDGNHWNRLNSDASNLKSKGITAVWIPPAWKGASQNDVGYGAYDLYDLGEFNQKGTVRTKYGTRSQLQAAVTSLKNNGIQVYGDVVMNHKGGADATEMVRAVEVNPNNRNQEVTGEYTIEAWTRFDFPGRGNTHSSFKWRWYHFDGVDWDMSRRLNNRIYKFRGHGKAWDWEVDTEFGNYDYLMYADYDMDHPEVVNELRNWGVWYTNTLGLDGFRIDAVKHIKYSFTRDWINHVRSATGKNMFAVAEFWKNDLGAIENYLQKTNWNHSVFDVPLHYNLYNASKSGGNYDMRNIFNGTVVQRHPSHAVTFVDNHDSQPEEALESFVEEWFKPLAYALTLTREQGYPSVFYGDYYGIPTHGVPAMRSKIDPILEARQKYAYGPQHDYLDHPDVIGWTREGDSSHPKSGLATLITDGPGGSKRMYAGLKNAGETWYDITGNRSDTVKIGSDGWGEFHVNDGSVSIYVQK

SEQ ID NO: 28096 - protein, 483 aa, Bacillus sp.
HHNGTNGTMMQYFEWYLPNDGNHWNRLNSDASNLKSKGITAVWIPPAWKGASQNDVGYGAYDLYDLGEFNQKGTVRTKYGTRSQLQAAVTSLKNNGIQVYGDVVMNHKGGADATEMVRAVEVNPNNRNQEVTGEYTIEAWTRFDFPGRGNTHSSFKWRWYHFDGVDWDQSRRLNNRIYKFRPKAWEWEVDTENGNYDYLMYADIDMDHPEVVNELRNWGVWYTNTLGLDGFRIDAVKHIKYSFTRDWINHVRSATGKNMFAVAEFWKNDLGAIENYLQKTNWNHSVFDVPLHYNLYNASKSGGNYDMRNIFNGTVVQRHPSHAVTFVDNHDSQPEEALESFVEEWFKPLAYALTLTREQGYPSVFYGDYYGIPTHGVPAMRSKIDPILEARQKYAYGPQHDYLDHPDVIGWTREGDSSHPKSGLATLITDGPGGSKRMYAGLKNAGETWYDITGNRSDTVKIGSDGWGEFHVNDGSVSIYVQK

SEQ ID NO: 28097 - protein, 485 aa, Bacillus sp.
HHNGTNGTMMQYFEWYLPNDGNHWNRLNSDASNLKSKGITAVWIPPAWKGASQNDVGYGAYDLYDLGEFNQKGTVRTKYGTRSQLQAAVTSLKNNGIQVYGDVVMNHKGGADATEMVRAVEVNPNNRNQEVTGEYTIEAWTRFDFPGRGNTHSSFKWRWYHFDGVDWDQSREFDNRIYKFRGHGKAWDWEVDTEFGNYDYLMYADYDMDHPEVVNELRNWGVWYTNTLGLDGFRIDAVKHIKYSFMRDWINHVRIATGKNMFAVAEFWKNDLGAIENYLQKTNWNHSVFDVPLHYNLYNASKSGGNYDMRNIFNGTVVQRHPSHAVTFVDNHDSQPEEALESFVDEWFKPLAYALTLTREQGYPSVFYGDYYGIPTHGVPAMRSKIDPILEARQKYAYGPQHDYLDHPDVIGWTREGDSSHPKSGLATLITDGPGGSKRMYAGLKNAGETWYDITGNRSDTVKIGSDGWGEFHVNDQSVSIYVQK

SEQ ID NO: 28098 - protein, 485 aa, Bacillus sp.
HHNGTNGTMMQYFEWYLPNDGNHWNRLNSDASNLKSKGITAVWIPPAWKGASQNDVGYGAYDLYDLGEFNQKGTVRTKYGTRSQLQAAVTSLKNNGIQVYGDVVMNHKGGADATEMVRAVEVNPNNRNQEVTGEYTIEAWTRFDFPGRGNTHSSFKWRWYHFDGVDWDQSRRLNNRIYKFRGHGKAWDWEVDTEFGNYDYLMYADYDMDHGEVVNELRNWGVWYTNTLGLDGFRIDAVKHIKYSFTRDWINHVRSATGKNMFAVAEFWKNDLGAIENYLQKTNWNHSVFDVPLHYNLYNASKSGGNYDMRNIFNGTVVQRHPSHAVTFVDNHDSQPEEALESFVEEWFKPLAYALTLTREQGYPSVFYGDYYGIPTHGVPAMRSKIDPILEARQKYAYGPQHDYLDHPDVIGWTREGDSSHPKSGLATLITDGPGGSKRMYAGLKNAGETWYDITGNRSDTVKIGSDGWGEFHVNDGSVSIYVQK

SEQ ID NO: 28099 - protein, 485 aa, Bacillus sp.
HHNGTNGTMMQYFEWYLPNDGNHWNRLNSDASNLKSKGITAVWIPPAWKGASQNDVGYGAYDLYDLGEFNQKGTVRTKYGTRSQLQAAVTSLKNNGIQVYGDVVMNHKGGADATEMVRAVEVNPNNRNQEVTGEYTIEAWTRFDFPGRGNTHSSFKWRWYHFDGVDWDQSSRLNNRIYKFRGHGKAWDWEVDTEFGNYDYLMYADYDMDHPEVVNELRNWGVWYTNTLGLDGFRIDAVKHIKYSFTRDWINHVRSATGKNMFAVAEFWKNDLGAIENYLQKTNWNHSVFDVPLHYNLYNASKSGGNYDMRNIFNGTVVQRHPSHAVTFVDNHDSQPEEALESFVEEWFKPLAYALTLTREQGYPSVFYGDYYGIPTHGVPAMRSKIDPILEARQKYAYGPQHDYLDHPDVIGWTREGDSSHPKSGLATLITDGPGGSKRMYAGLKNAGETWYDITGNRSDTVKIGSDGWGEFHVNDGSVSIYVQK

SEQ ID NO: 28100 - protein, 485 aa, Bacillus sp.
HHNGTNGTMMQYFEWYLPNDGNHWNRLNSDASNLKSKGITAVWIPPAWKGASQNDVGYGAYDLYDLGEFNQKGTVRTKYGTRSQLQAAVTSLKNNGIQVYGDVVMNHKGGADATEMVRAVEVNPNNRVQEVTGEYTIEAWTRFDFPGRGNTHSSFKWRWYHFDGVDWDQSRRLNNRIYKFRGHGKAWDWEVDTEFGNYDYLMYADYDMDHPEVVNELRNWGVWYTNTLGLDGFRIDAVKHIKYSFTRDWINHVRSATGKNMFAVAEFWKNDLGAIENYLQKTNWNHSVFDVPLHYNLYNASKSGGNYDMRNIFNGTVVQRHPSHAVTFVDNHDSQPEEALESFVEEWFKPLAYALTLTREQGYPSVFYGDYYGIPTHGVPAMRSKIDPILEARQKYAYGPQHDYLDHPDVIGWTREGDSSHPKSGLATLITDGPGGSKRMYAGLKNAGETWYDITGNRSDTVKIGSDGWGEFHVNDGSVSIYVQK

SEQ ID NO: 28101 - protein, 485 aa, Bacillus sp.
HHNGTNGTMMQYFEWYLPNDGNHWNRLNSDASNLKSKGITAVWIPPAWKAASQNDVGYGAYDLYDLGEFNQKGTVRTKYGTRSQLQAAVTSLKNNGIQVYGDVVMNHKGGADATEMVRAVEVNPNNRNQEVTGEYTIEAWTRFDFPGRGNTHSSFKWRWYHFDGVDWDQSRETSNRIYKFRGHGKAWDWEVDTEFGNYDYLMYADYDMDHPEVVNELRNWGVWYTNTLGLDGFRIDAVKHIKYSFTRDWINHVRSATGKNMFAVAEFWKNDLGAIENYLQKTNWNHSVFDVPLHYNLYNASKSGGNYDMRNIFNGTVVQRHPSHAVTFVDNHDSQPEEALESFVEEWFKPLAYALTLTREQGYPSVFYGDYYGIPTHGVPAMRSKIDPILEARQKYAYGPQHDYLDHPDVIGWTREGDSSHPKSGLATLITDGPGGSKRMYAGLKNAGETWYDITGNRSDTVKIGSDGWGEFHVNDGSVSIYVQK

SEQ ID NO: 28102 - protein, 485 aa, Bacillus sp.
HHNGTNGTMMQYFEWYLPNDGNHWNRLNSDASNLKSKGITAVWIPPAWKAASQNDVGYGAYDLYDLGEFNQKGTVRTKYGTRSQLQAAVTSLKNNGIQVYGDVVMNHKGGADATEMVRAVEVNPNNRNQEVTGEYTIEAWTRFDFPGRGNTHSSFKWRWYHFDGVDFDQSRQLNNRIYKFRGHGKAWDWEVDTEFGNYDYLMYADYDMDHPEVVNELRNWGVWYTNTLGLDGFRIDAVKHIKYSFTRDWINHVRSATGKNMFAVAEFWKNDLGAIENYLQKTNWNHSVFDVPLHYNLYNASKSGGNYDMRNIFNGTVVQRHPSHAVTFVDNHDSQPEEALESFVEEWFKPLAYALTLTREQGYPSVFYGDYYGIPTHGVPAMRSKIDPILEARQKYAYGPQHDYLDHPDVIGWTREGDSSHPKSGLATLITDGPGGSKRMYAGLKNAGETWYDITGNRSDTVKIGSDGWGEFHVNDGSVSIYVQK

SEQ ID NO: 28103 - protein, 483 aa, Bacillus sp.
HHNGTNGTMMQYFEWYLPNDGNHWNRLNSDASNLKSKGITAVWIPPAWKGASQNDVGYGAYDLYDLGEFNQKGTVRTKYGTRSQLQAAVTSLKNNGIQVYGDVVMNHKGGADATEMVRAVEVNPNNRNQEVTGEYTIEAWTRFDFPGRGNTHSSFKWRWYHFDGVDWDQSRRLNNRIYKFRGKAWDWEVDTEFGNYDYLMYADYDMDHPEVVNELRNWGVWYTNTLGLDGFRIDAVKHIKYSFTRDWINHVRSATGKNMFAVAEFWKNDLGAIENYLQKTAWNHSVFDVPLHYNLYNASKSGGNYDMRNIFNGTVVQRHPSHAVTFVDNHDSQPEEALESFVEEWFKPLAYALTLTREQGYPSVFYGDYYGIPTHGVPAMRSKIDPILEARQKYAYGPQHDYLDHPDVIGWTREGDSSHPKSGLATLITDGPGGSKRMYAGLKNAGETWYDITGNRSDTVKIGSDGWGEFHVNDGSVSIYVQK

SEQ ID NO: 28104 - protein, 485 aa, Bacillus sp.
HHNGTNGTMMQYFEWYLPNDGNHWNRLNSDASNLKSKGITAVWIPPAWKATSQNDVGYGAYDLYDLGEFNQKGTVRTKYGTRSQLQAAVTSLKNNGIQVYGDVVMNHKGGADATEMVRAVEVNPNNRNQEVTGEYTIEAYTRFDFPGRGNTHSSFKWRWYHFDGVDWDQSRDLNNRIYKFRGHGKAWDWEVDTEFGNYDYLMYADYDMDHPEVVNELRNWGVWYTNTLGLDGFRIDAVKHIKYSFTRDWINHVRSATGKNMFAVAEFWKNDLGAIENYLQKTNWNHSVFDVPLHYNLYNASKSGGNYDMRNIFNGTVVQRHPSHAVTFVDNHDSQPEEALESFVEEWFKPLAYALTLTREQGYPSVFYGDYYGIPTHGVPAMRSKIDPILEARQKYAYGPQHDYLDHPDVIGWTREGDSSHPKSGLATLITDGPGGSKRMYAGLKNAGETWYDITGNRSDTVKIGSDGWGEFHVNDGSVSIYVQK

SEQ ID NO: 28105 - protein, 483 aa, Bacillus sp.
HHNGTNGTMMQYFEWYLPNDGNHWNRLNSDASNLKSKGITAVWIPPAWKGASQNDVGYGAYDLYDLGEFNQKGTVRTKYGTRSQLQAAVTSLKNNGIQVYGDVVMNHKGGADATEMVRAVEVNPNNRNQEVTGEYTIEAWTRFDFPGRGNTHSSFKWRWYHFDGVDWDQSRRLNNRIYKFRNKAWDWEVDTEFGNYDYLMYADYDMDHPEVVNELRNWGVWYTNTLGLDGFRIDAVKHIKYSFTRDWINHVRSATGKNMFAVAEFWKNDLGAIENYLQKTNWNHSVFDVPLHYNLYNASKSGGNYDMRNIFNGTVVQRHPSHAVTFVDNHDSQPEEALESFVEEWFKPLAYALTLTREQGYPSVFYGDYYGIPTHGVPAMRSKIDPILEARQKYAYGPQHDYLDHPDVIGWTREGDSSHPKSGLATLITDGPGGSKRMYAGLKNAGETWYDITGNRSDTVKIGSDGWGEFHVNDGSVSIYVQK

SEQ ID NO: 28106 - protein, 483 aa, Bacillus sp.
HHNGTNGTMMQYFEWYLPNDGNHWNRLNSDASNLKSKGITAVWIPPAWKAASQNDVGYGAYDLYDLGEFNQKGTVRTKYGTRSQLQAAVTSLKNNGIQVYGDVVMNHKGGADATEMVRAVEVNPNNRNQEVTGEYTIEAWTRFDFPGRGNTHSSFKWRWYHFDGVDWDQSRDLDNRIYKFRGKAWDWEVDTEFGNYDYLMYADYDMDHPEVVNELRNWGVWYTNTLGLDGFRIDAVKHIKYSFTRDWINHVRSATGKNMFAVAEFWKNDLGAIENYLQKTNWNHSVFDVPLHYNLYNASKSGGNYDMRNIFNGTVVQRHPSHAVTFVDNHDSQPEEALESFVEEWFKPLAYALTLTREQGYPSVFYGDYYGIPTHGVPAMRSKIDPILEARQKYAYGPQHDYLDHPDVIGWTREGDSSHPKSGLATLITDGPGGSKRMYAGLKNAGETWYDITGNRSDTVKIGSDGWGEFHVNDGSVSIYVQK

SEQ ID NO: 28107 - protein, 485 aa, Bacillus sp.
HHNGTNGTMMQYFEWYLPNDGNHWNRLNSDASNLKSKGITAVWIPPAWKGASQNDVGYGAYDLYDLGEFNQKGTVRTKYGTRSQLQAAVTSLKNNGITVYGDVVMNHKGGADATEMVRAVEVNPNNRNQEVTGEYTIEAWTRFDFPGRGNTHSSFKWRWYHFDGVDWDQSRRLNNRIYKFRGHGKAWDWEVDTEFGNYDYLMYADYDMDHPEVVNELRNWGVWYTNTLGLDGFRIDAVKHIKYSFTRDWINHVRSATGKNMFAVAEFWKNDLGAIENYLQKTNWNHSVFDVPLHYNLYNASKSGGNYDMRNIFNGTVVQRHPSHAVTFVDNHDSQPEEALESFVEEWFKPLAYALTLTREQGYPSVFYGDYYGIPTHGVPAMRSKIDPILEARQKYAYGPQHDYLDHPDVIGWTREGDSSHPKSGLATLITDGPGGSKRMYAGLKNAGETWYDITGNRSDTVKIGSDGWGEFHVNDGSVSIYVQK

SEQ ID NO: 28108 - protein, 485 aa, Bacillus sp.
HHNGTNGTMMQYFEWYLPNDGNHWNRLNSDASNLKSKGITAVWIPPAWKGASQNDVGYGAYDLYDLGEFNQKGTVRTKYGTRSQLQAAVTSLKNNGIQVYGDVVMNHKGGADATEMVRAVEVNPNNRNQEVTGEYTIEAWTRFDFPGRGNTHSSFKWRWYHFDGVDWDQSRRLNNRIYKFRGHGKAWDWEVDTEFGNYDYLMYADYDMDHPEVVNELRNWGVWYTNTLGLDGFRIDAVKHIKYSFTRDWINHVRSATGKNMFAVAEFWKNDLGAIENYLQKTNWNHSVFDVPLHYNLYNASKSAGNYDMRNIFNGTVVQRHPSHAVTFVDNHDSQPEEALESFVETWFKPLAYALTLTREQGYPSVFYGDYYGIPTHGVPAMRSKIDPILEARQKYAYGPQHDYLDHPDVIGWTREGDSSHPKSGLATLITDGPGGSKRMYAGLKNAGETWYDITGNRSDTVKIGSDGWGEFHVNGGSVSIYVQK

SEQ ID NO: 28109 - protein, 485 aa, Bacillus sp.
HHNGTNGTMMQYFEWYLPNDGNHWNRLNSDASNLKSKGITAVWIPPAWKGASQNDVGYGAYDLYDLGEFNQKGTVRTKYGTRSQLQAAVTSLKNNGIQVYGDVVMNHKGGADATEMVRAVEVNPNNRNQEVTGEYTIEAWTRFDFPGRGNTHSSFKWRWYHFDGVDWDQSRRLNNRIYKFRGHGKMWDWEVDTEFGNYDYLMYADYDMDHPEVVNELRNWGVWYTNTLGLDGFRIDAVKHIKYSFTRDWINHVRSATGKNMFAVAEFWKNDLGAIENYLQKTNWNHSVFDVPLHYNLYNASKSGGNYDMRNIFNGTVVQRHPSHAVTFVDNHDSQPEEALESFVEEWFKPLAYALTLTREQGYPSVFYGDYYGIPTHGVPAMRSKIDPILEARQKYAYGPQHDYLDHPDVIGWTREGDSSHPKSGLATLITDGPGGSKRMYAGLKNAGETWYDITGNRSDTVKIGSDGWGEFHVNDGSVSIYVQK

SEQ ID NO: 28110 - protein, 485 aa, Bacillus sp.
HHNGTNGTMMQYFEWYLPNDGNHWNRLNSDASNLKSKGITAVWIPPAWKGASQNDVGYGAYDLYDLGEFNQKGTVRTKYGTRSQLQAAVTSLKNNGIQVYGDVVMNHKGGADATEMVRAVEVNPNNRNQEVTGEYTIEAWTRFDFPGRGNTHSSFKWRWYHFDGVDWDQSRRLNNRIYKFRGHGKAWDWEVDTEFGNYDYLMYADYDMDHPEVVNELRNWGVWYTNTLGLDGFRIDAVKHIKYSFTRDWINHVRSATGKNMFAVAEFWKNDLGAIENYLQKTNWNHSVFDVPLHYNLYNASKSGGNYDMRNIFNGTVVQRHPSHAVTFVDNHDSQPEEALESFVEEWFKPLAYALTLTREQGYPSVFYGDYYGIPTHGVPAMRSKIDPILEARQKYAYGPQHDYLDHPDVIGWTREGDSSHPKSGLVTLITDGPGGSKRMYAGLKNAGETWYDITGNRSDTVKIGSDGWGEFHVNDGSVSIYVQK

SEQ ID NO: 28111 - protein, 483 aa, Synthetic construct
HHNGTNGTMMQYFEWYLPNDGNHWNRLNSDASNLKSKGITAVWIPPAWKGASQNDVGYGAYDLYDLGEFNQKGTVRTKYGTRSQLQAAVTSLKNNGIQVYGDVVMNHKGGADATEMVRAVEVNPNNRNQEVTGEYTIEAWTRFDFPGRGNTHSSFKWRWYHFDGVDWDQSRRLNNRIYKFRGKAWDWEVDTENGNYDYLMYADIDMDHPEPLNELRNWGVWYTNTLGLDGFRIDAVKHIKYSFTRDWINHVRSATGKNMFAVAEFWKNDLGAIENYLQKTNWNHSVFDVPLHYNLYNASKSGGNYDMRNIFNGTVVQRHPSHAVTFVDNHDSQPEEALESFVEEWFKPLAYALTLTREQGYPSVFYGDYYGIPTHGVPAMRSKIDPILEARQKYAYGPQHDYLDHPDVIGWTREGDSSHPKSGLATLITDGPGGSKRMYAGLKNAGETWYDITGNRSDTVKIGSDGWGEFHVNDGSVSIYVQK

SEQ ID NO: 28112 - protein, 485 aa, Bacillus sp.
HHNGTNGTMMQYFEWYLPNDGNHWNRLNSDASNLKSKGITAVWIPPAWKGASQNDVGYGAYDLYDLGEFNQKGTVRTKYGTRSQLQAAVTSLKNNGIQVYGDVVMNHKGGADATEMVRAVEVNPNNRNQEVTGEYTIEAWTRFDFPGRGNTHSSFKWRWYHFDGVDWDQSRRLNNRIYKFRGHGKAWDWEVDTEFGNYDYLMYADYDMDHPEVVNELRNWGVWYTNTLGLDGFRIDAVKHIKYSFTRDWINHVRSATGKNMFAVAEFWKNDLGAIENYLQKTNWNHSVFDVPLHYNLYNASKSGGNYDMRNIFNGTVVQRHPSHAVTFVDNHDSQPEEALESFVETWFKPLAYALTLTREQGYPSVFYGDYYGIPTHGVPAMRSKIDPILEARQKYAYGPQHDYLDHPDVIGWTREGDSSHPKSGLATLITDGPGGSKRMYAGLKNAGETWYDITGNRSDTVKIGSDGWGEFHVNGQSVSIYVQK

SEQ ID NO: 28113 - protein, 483 aa, Bacillus sp.
HHNGTNGTMMQYFEWYLPNDGNHWNRLNSDASNLKSKGITAVWIPPAWKGASQNDVGYGAYDLYDLGEFNQKGTVRTKYGTRSQLQAAVTSLKNNGIQVYGDVVMNHKGGADATEMVRAVEVNPNNRNQEVTGEYTIEAWTRFDFPGRGNTHSSFKWRWYHFDGVDWDQSRRLNNRIYKFRGKAWDWEVDTEFGNYDYLMYADYDMDHPEVVNELRNWGVWYTNTLGLDGFRIDAVKHIKYSFTRDWINHVRSATGKNMFAVAEFWRNDLGAIENYLQKTNWNHSVFDVPLHYNLYNASKSGGNYDMRNIFNGTVVQRHPSHAVTFVDNHDSQPEEALESFVEEWFKPLAYALTLTREQGYPSVFYGDYYGIPTHGVPAMRSKIDPILEARQKYAYGPQHDYLDHPDVIGWTREGDSSHPKSGLATLITDGPGGSKRMYAGLKNAGETWYDITGNRSDTVKIGSDGWGEFHVNDGSVSIYVQK

SEQ ID NO: 28114 - protein, 483 aa, Bacillus sp.
HHNGTNGTMMQYFEWYLPNDGNHWNRLNSDASNLKSKGITAVWIPPAWKGASQNDVGYGAYDLYDLGEFNQKGTVRTKYGTRSQLQAAVTSLKNNGIQVYGDVVMNHKGGADATEMVRAVEVNPNNRNQEVTGEYTIEAWTRFDFPGRGNTHSSFKWRWYHFDGVDWDQSRRLNNRIYKFRGKAWDWEVDTENGNYDYLMYADIDYDHPEVVNELRNWGVWYTNTLGLDGFRIDAVKHIKYSFTRVWINHVRSATGKNMFAVAEFWKNDLGAIENYLQKTNWNHSVFDVPLHYNLYNASKSGGNYDMRNIFNGTVVQRHPSHAVTFVDNHDSQPEEALESFVEEWFKPLAYALTLTREQGYPSVFYGDYYGIPTHGVPAMRSKIDPILEARQKYAYGPQHDYLDHPDVIGWTREGDSSHPKSGLATLITDGPGGSKRMYAGLKNAGETWYDITGNRSDTVKIGSDGWGEFHVNDGSVSIYVQK

SEQ ID NO: 28115 - protein, 483 aa, Bacillus sp.
HHNGTNGTMMQYFEWYLPNDGNHWNRLNSDASNLKSKGITAVWIPPAWKGASQNDVGYGAYDLYDLGEFNQKGTVRTKYGTRSQLQAAVTSLKNNGIQVYGDVVMNHKGGADATEMVRAVEVNPNNRNQEVTGEYTIEAWTRFDFPGRGNTHSSFKWRWYHFDGVDWDQSRRLNNRIYKFRGKAWDWEVDTEFGNYDYLMYADYDMDHPEVVNELRNWGVWYTNTLGLDGFRIDAVKHIKYSFTRDWINHVRSATGKNMFAVAEFWNNDLGAIENYLQKTNWNHSVFDVPLHYNLYNASKSGGNYDMRNIFNGTVVQRHPSHAVTFVDNHDSQPEEALESFVEEWFKPLAYALTLTREQGYPSVFYGDYYGIPTHGVPAMRSKIDPILEARQKYAYGPQHDYLDHPDVIGWTREGDSSHPKSGLATLITDGPGGSKRMYAGLKNAGETWYDITGNRSDTVKIGSDGWGEFHVNDGSVSIYVQK

SEQ ID NO: 28116 - protein, 483 aa, Bacillus sp.
HHNGTNGTMMQYFEWYLPNDGNHWNRLNSDASNLKSKGITAVWIPPAWKGASQNDVGYGAYDLYDLGEFNQKGTVRTKYGTRSQLQAAVTSLKNNGIQVYGDVVMNHKGGADATEMVRAVEVNPNNRNQEVTGEYTIEAWTRFDFPGRGNTHSSFKWRWYHFDGVDWDQSRRLNNRIYKFRGKAWDWEVDTEFGNYDYLMYADYDMDHPEVVNELRNWGVWYTNTLGLDGFRIDAVKHIKYSFTRDWINHVRSATGKNMFAVAEFWKNDLGAIENYLQKTNWNHSVFDVPLHYNLYNASQSGGNYDMRNIFNGTVVQRHPSHAVTFVDNHDSQPEEALESFVEPWFKPLAYALTLTREQGYPSVFYGDYYGIPTHGVPAMRSKIDPILEARQKYAYGPQHDYLDHPDVIGWTREGDSSHPKSGLATLITDGPGGSKRMYAGLKNAGETWYDITGNRSDTVKIGSDGWGEFHVNKGSVSIYVQK

SEQ ID NO: 28117 - protein, 483 aa, Bacillus sp.
HHNGTNGTMMQYFEWYLPNDGNHWNRLNSDASNLKSKGITAVWIPPAWKASSQNDVGYGAYDLYDLGEFNQKGTVRTKYGTRSQLQAAVTSLKNNGIQVYGDVVMNHKGGADLTEMVDAVEVNPNNRNQEVTGEYTIEAWTRFDFPGRGNTHSSFKWRWYHFDGVDWDQSRDLQNRIYKFRGKAWDWEVDTEFGNYDYLMYADYDMDHPEVVNELRNWGVWYTNTLGLDGFRIDAVKHIKYSFTRDWINHVRSATGKNMFAVAEFWKNDLGAIENYLQKTNWNHSVFDVPLHYNLYNASKSGGNYDMRNIFNGTVVQRHPSHAVTFVDNHDSQPEEALESFVEEWFKPLAYALTLTREQGYPSVFYGDYYGIPTHGVPAMRSKIDPILEARQKYAYGPQHDYLDHPDVIGWTREGDSSHPKSGLATLITDGPGGSKRMYAGLKNAGETWYDITGNRSDTVKIGSDGWGEFHVNDGSVSIYVQK

SEQ ID NO: 28118 - protein, 483 aa, Bacillus sp.
HHNGTNGTMMQYFEWYLPNDGNHWNRLNSDASNLKSKGITAVWIPPAWKGASQNDVGYGAYDLYDLGEFNQKGTVRTKYGTRSQLQAAVTSLKNNGIQVYGDVVMNHKGGADATEMVRAVEVNPNNRNQEVTGEYTIEAWTRFDFPGRGNTHSSFKWRWYHFDGVDWDQSRRLNNRIYKFRGKAWDWEVDTEFGNYDYLMYADYDMDHPEVVNELRNWGVWYTNTLGLDGFRIDAVKHIKYSFTRDWINHVRSATGKNMFAVAEFWKNDLGAIENYLQKTNWNHSVFDVPLHYNLYNASKSGGNYDMRNIFNGTVVQRHPSHAVTFVDNHDSQPEEALESFVEEWFKPLAYALTLTREQGYPSVFYGDYYGIPTHGVPAMRSKIDPILRARQKYAYGPQHDYLDHPDVIGWTREGDSSHPKSGLATLITDGPGGSKRMYAGLKNAGETWYDITGNRSDTVKIGSDGWGEFHVNDGSVSIYVQK

SEQ ID NO: 28119 - protein, 483 aa, Bacillus sp.
HHNGTNGTMMQYFEWYLPNDGNHWNRLNSDASNLKSKGITAVWIPPAWKGASQNDVGYGAYDLYDLGEFNQKGTVRTKYGTRSQLQAAVTSLKNNGIQVYGDVVMNHKGGADATEMVRAVEVNPNNRNQEVTGEYTIEAWTRFDFPGRGNTHSSFKWRWYHFDGVDWDQSRRLNNRIYKFRGKAWDWEVDTEFGNYDYLMYADYDMDHPEVVNELRNWGVWYTNTLGLDGFRIDAVKHIKYSFTRDWINHVRSATGKNMFAVAEFWKNDLGAIENYLQKTNWNHSVFDVPLHYNLYNASKSGGNYDMRNIFNGTVVQRHPSHAVTFVDNHDSQPEEALESFVEEWFKPLAYALTLTREQGYPSVFYGDYYGIPTHGVPAMRSKIDPILLARQKYAYGPQHDYLDHPDVIGWTREGDSSHPKSGLATLITDGPGGSKRMYAGLKNAGETWYDITGNRSDTVKIGSDGWGEFHVNDGSVSIYVQK

SEQ ID NO: 28120 - protein, 485 aa, Bacillus sp.
HHNGTNGTMMQYFEWYLPNDGNHWNRLNSDASNLKSKGITAVWIPPAWKAVSQNDVGYGAYDLYDLGEFNQKGTVRTKYGTRSQLQAAVTSLKNNGIQVYGDVVMNHKGGADATEMVRAVEVNPNNRNQEVTGEYTIEAWTRFDFPGRGNTHSSFKWRWYHFDGVDWDQSRDLTNRIYKFRGHGKAWDWEVDTEFGNYDYLMYADYDMDHPEVVNELRNWGVWYTNTLGLDGFRIDAVKHIKYSFTRDWINHVRSATGKNMFAVAEFWKNDLGAIENYLQKTNWNHSVFDVPLHYNLYNASKSGGNYDMRNIFNGTVVQRHPSHAVTFVDNHDSQPEEALESFVEEWFKPLAYALTLTREQGYPSVFYGDYYGIPTHGVPAMRSKIDPILEARQKYAYGPQHDYLDHPDVIGWTREGDSSHPKSGLATLITDGPGGSKRMYAGLKNAGETWYDITGNRSDTVKIGSDGWGEFHVNDGSVSIYVQK

SEQ ID NO: 28121 - protein, 483 aa, Bacillus sp.
HHNGTNGTMMQYFEWYLPNDGNHWNRLNSDASNLKSKGITAVWIPPAWKGASQNDVGYGAYDLYDLGEFNQKGTVRTKYGTRSQLQAAVTSLKNNGIQVYGDVVMNHKGGADATEMVRAVEVNPNNRNQEVTGEYTIEAWTRFDFPGRGNTHSSFKWRWYHFDGVDWDQSRRLNNRIYKFRGKAWDWEVDTEFGNYDYLMYADYDMDHPEVVNELRNWGVWYTNTLGLDGFRIDAVKHIKYSFTRDWINHVRSATGKNMFAVAEFWKNDLGAIENYLQKTNWNHSVFDVPLHYNLYNASKSGGNYDMRNIFNGTVVQRHPSHAVTFVDNHDSQPEEALESFVDTWFKPLAYALTLTREQGYPSVFYGDYYGIPTHGVPAMRSKIDPILEARQKYAYGPQHDYLDHPDVIGWTREGDSSHPKSGLATLITDGPGGSKRMYAGLKNAGETWYDITGNRSDTVKIGSDGWGEFHVNDGSVSIYVQK

SEQ ID NO: 28122 - protein, 485 aa, Bacillus sp.
HHNGTNNTMMQYFEWYLPNDGNHWNRLNSDASNLKSKGITAVWIPPAWKGASQNDVGYGAYDLYDLGEFNQKGTVRTKYGTRSQLQAAVTSLKNNGIQVYGDVVMNHKGGADATEMVRAVEVNPNNRNQEVTGEYTIEAWTRFDFPGRGNTHSSFKWRWYHFDGVDWDQSRRLNNRIYKFRGHGKAWDWEVDTEFGNYDYLMYADYDMDHPEVVNELRNWGVWYTNTLGLDGFRIDAVKHIKYSFTRDWINHVRSATGKNMFAVAEFWKNDLGAIENYLQKTNWNHSVFDVPLHYNLYNASKSGGNYDMRNIFNGTVVQAHPNHAVTFVDNHDSQPEEALESFVEEWFKPLAYALTLTREQGYPSVFYGDYYGIPTHGVPAMRSKIDPILEARQKYAYGPQHDYLDHPDVIGWTREGDSSHPKSGLATLITDGPGGSKRMYAGLKNAGETWYDITGNRSDTVKIGSDGWGEFHVNDGSVSIYVQK

SEQ ID NO: 28123 - protein, 483 aa, Bacillus sp.
HHNGTNGTMMQYFEWYLPNDGNHWNRLNSDASNLKSKGITAVWIPPAWKAASQNDVGYGAYDLYDLGEFNQKGTVRTKYGTRSQLQAAVTSLKNNGIQVYGDVVMNHKGGADATEMVRAVEVNPNNRNQEVTGEYTIEAWTRFDFPGRGNTHSSFKWRWYHFDGVDWDQSRDLTNRIYKFRGKAWDWEVDTEFGNYDYLMYADYDMDHPEVVNELRNWGVWYTNTLGLDGFRIDAVKHIKYSFTRDWINHVRSATGKNMFAVAEFWKNDLGAIENYLQKTNWNHSVFDVPLHYNLYNASKSGGNYDMRNIFNGTVVQRHPSHAVTFVDNHDSQPEEALESFVEEWFKPLAYALTLTREQGYPSVFYGDYYGIPTHGVPAMRSKIDPILEARQKYAYGPQHDYLDHPDVIGWTREGDSSHPKSGLATLITDGPGGSKRMYAGLKNAGETWYDITGNRSDTVKIGSDGWGEFHVNDGSVSIYVQK

SEQ ID NO: 28124 - protein, 483 aa, Synthetic construct
HHNGTNGTMMQYFEWYLPNDGNHWNRLNSDASNLKSKGITAVWIPPAWKGASQNDVGYGAYDLYDLGEFNQKGTVRTKYGTRSQLQAAVTSLKNNGIQVYGDVVMNHKGGADATEMVRAVEVNPNNRNQEVTGEYTIEAWTRFDFPGRGNTHSSFKWRWYHFDGVDWDQSRRLNNRIYKFRGKAWDWEVDTENGNYDYLMYADFDMDYPEVVNEQRNWGVWYTNTLGLDGFRIDAVKHIKYSFTRDWINHVRSATGKNMFAVAEFWKNDLGAIENYLQKTNWNHSVFDVPLHYNLYNASKSGGNYDMRNIFNGTVVQRHPSHAVTFVDNHDSQPEEALESFVEEWFKPLAYALTLTREQGYPSVFYGDYYGIPTHGVPAMRSKIDPILEARQKYAYGPQHDYLDHPDVIGWTREGDSSHPKSGLATLITDGPGGSKRMYAGLKNAGETWYDITGNRSDTVKIGSDGWGEFHVNDGSVSIYVQK

SEQ ID NO: 28125 - protein, 483 aa, Bacillus sp.
HHNGTNGTMMQYFEWYLPNDGNHWNRLNSDASNLKSKGITAVWIPPAWKAASQNDVGYGAYDLYDLGEFNQKGTVRTKYGTRSQLQAAVTSLKNNGIQVYGDVVMNHKGGADATEMVRAVEVNPNNRNQEVTGEYTIEAWTRFDFPGRGNTHSSFKWRWYHFDGVDWDQSRRVHNRIYKFRGKAWDWEVDTEFGNYDYLMYADYDMDHPEVVNELRNWGVWYTNTLGLDGFRIDAVKHIKYSFTRDWINHVRSATGKNMFAVAEFWKNDLGAIENYLQKTNWNHSVFDVPLHYNLYNASKSGGNYDMRNIFNGTVVQRHPSHAVTFVDNHDSQPEEALESFVEEWFKPLAYALTLTREQGYPSVFYGDYYGIPTHGVPAMRSKIDPILEARQKYAYGPQHDYLDHPDVIGWTREGDSSHPKSGLATLITDGPGGSKRMYAGLKNAGETWYDITGNRSDTVKIGSDGWGEFHVNDGSVSIYVQK

SEQ ID NO: 28126 - protein, 483 aa, Bacillus sp.
HHNGTNGTMMQYFEWYLPNDGNHWNRLNSDASNLKSKGITAVWIPPAWKGASQNDVGYGAYDLYDLGEFNQKGTVRTKYGTRSQLQAAVTSLKNNGIQVYGDVVMNHKGGADATEMVRAVEVNPNNRNQEVTGEYTIEAWTRFDFPGRGNTHSSFKWRWYHFDGVDWDQSRRLNNRIYKFRGKAWDWEVDTEFGNYDYLMYADYDMDHPEVVNELRNWGVWYTNTLGLDGFRIDAVKHIKYSFTRDWINHVRSATGKNMFAVAEFWKNDLGAIENYLQKTNWNHSVFDVPLHYNLYNASKSGGNYDMRNIFNGTVVQRHPSRAVTFVDNHDSQPEEALESFVEEWFKPLAYALTLTREQGYPSVFYGDYYGIPTHGVPAMRSKIDPILEARQKYAYGPQHDYLDHPDVIGWTREGDSSHPKSGLATLITDGPGGSKRMYAGLKNAGETWYDITGNRSDTVKIGSDGWGEFHVNDGSVSIYVQK

SEQ ID NO: 28127 - protein, 483 aa, Synthetic construct
HHNGTNGTMMQYFEWYLPNDGNHWNRLNSDASNLKSKGITAVWIPPAWKGASQNDVGYGAYDLYDLGEFNQKGTVRTKYGTRSQLQAAVTSLKNNGIQVYGDVVMNHKGGADATEMVRAVEVNPNNRNQEVTGEYTIEAWTRFDFPGRGNTHSSFKWRWYHFDGVDWDQSRRLNNRIYKFRGKAWDWEVDTENGNYDYLMYADIDMDHPEPTNELRNWGVWYTNTLGLDGFRIDAVKHIKYSFTRDWINHVRSATGKNMFAVAEFWKNDLGAIENYLQKTNWNHSVFDVPLHYNLYNASKSGGNYDMRNIFNGTVVQRHPSHAVTFVDNHDSQPEEALESFVEEWFKPLAYALTLTREQGYPSVFYGDYYGIPTHGVPAMRSKIDPILEARQKYAYGPQHDYLDHPDVIGWTREGDSSHPKSGLATLITDGPGGSKRMYAGLKNAGETWYDITGNRSDTVKIGSDGWGEFHVNDGSVSIYVQK

SEQ ID NO: 28128 - protein, 485 aa, Bacillus sp.
HHNGTNGTMMQYFEWYLPNDGNHWNRLNSDASNLKSKGITAVWIPPAWKGASQNDVGYGAYDLYDLGEFNQKGTVRTKYGTRSQLQAAVTSLKNNGIQVYGDVVMNHKGGADATEMVRPVEVNPNNRNQEVTGEYTIEAWTRFDFPGRGNTHSSFKWRWYHFDGVDWDQSRRLNNRIYKFRGHGKAWDWEVDTEFGNYDYLMYADYDMDHPEVVNELRNWGVWYTNTLGLDGFRIDAVKHIKYSFTRDWINHVRSATGKNMFAVAEFWKNDLGAIENYLQKTNWNHSVFDVPLHYNLYNASKSGGNYDMRNIFNGTVVQRHPSHAVTFVDNHDSQPEEALESFVEEWFKPLAYALTLTREQGYPSVFYGDYYGIPTHGVPAMRSKIDPILEARQKYAYGPQHDYLDHPDVIGWTREGDSSHPKSGLATLITDGPGGSKRMYAGLKNAGETWYDITGNRSDTVKIGSDGWGEFHVNDGSVSIYVQK

SEQ ID NO: 28129 - protein, 483 aa, Bacillus sp.
HHNGTNGTMMQYFEWYLPNDGNHWNRLNSDASNLKSKGITAVWIPPAWKAASQNDVGYGAYDLYDLGEFNQKGTVRTKYGTRSQLQAAVTSLKNNGIQVYGDVVMNHKGGADATEMVRAVEVNPNNRNQEVTGEYTIEAWTRFDFPGRGNTHSSFKWRWYHFDGVDWDQSRKLNNRIYKFRGKAWDWEVDTEFGNYDYLMYADYDMDHPEVVNELRNWGVWYTNTLGLDGFRIDAVKHIKYSFTRDWINHVRSATGKNMFAVAEFWKNDLGAIENYLQKTNWNHSVFDVPLHYNLYNASKSGGNYDMRNIFNGTVVQRHPSHAVTFVDNHDSQPEEALESFVEEWFKPLAYALTLTREQGYPSVFYGDYYGIPTHGVPAMRSKIDPILEARQKYAYGPQHDYLDHPDVIGWTREGDSSHPKSGLATLITDGPGGSKRMYAGLKNAGETWYDITGNRSDTVKIGSDGWGEFHVNDGSVSIYVQK

SEQ ID NO: 28130 - protein, 483 aa, Bacillus sp.
HHNGTNGTMMQYFEWYLPNDGNHWNRLNSDASNLKSKGITAVWIPPAWKGASQNDVGYGAYDLYDLGEFNQKGTVRTKYGTRSQLQAAVTSLKNNGIQVYGDVVMNHKGGADATEMVRAVEVNPNNRNQEVTGEYTIEAWTRFDFPGRGNTHSSFKWRWYHFDGVDWDQSRRLNNRIYKFRGKAWDWEVDTEFGNYDYLMYADYDMDHPEVVNELRNWGVWYTNTLGLDGFRIDAVKHIKYSFTRDWINHVRSATGKNMFAVAEFWKPDLGAIENYLQKTNWNHSVFDVPLHYNLYNASKSGGNYDMRNIFNGTVVQRHPSHAVTFVDNHDSQPEEALESFVEEWFKPLAYALTLTREQGYPSVFYGDYYGIPTHGVPAMRSKIDPILEARQKYAYGPQHDYLDHPDVIGWTREGDSSHPKSGLATLITDGPGGSKRMYAGLKNAGETWYDITGNRSDTVKIGSDGWGEFHVNDGSVSIYVQK

SEQ ID NO: 28131 - protein, 483 aa, Bacillus sp.
HHNGTNETMMQYFEWYLPNDGNHWNRLNSDASNLKSKGITAVWIPPAWKGASQNDVGYGAYDLYDLGEFNQKGTVRTKYGTRSQLQAAVTSLKNNGIQVYGDVVMNHKGGADATEMVRAVEVNPNNRNQEVTGEYTIEAWTRFDFPGRGNTHSSFKWRWYHFDGVDWDQSRRLNNRIYKFRGKAWDWEVDTEFGNYDYLMYADYDMDHPEVVNELRNWGVWYTNTLGLDGFRIDAVKHIKYSFTRDWINHVRSATGKNMFAVAEFWKNDLGAIENYLQKTNWNHSVFDVPLHYNLYNASKSGGNYDMRNIFNGTVVQAHPNHAVTFVDNHDSQPEEALESFVEEWFKPLAYALTLTREQGYPSVFYGDYYGIPTHGVPAMRSKIDPILEARQKYAYGPQHDYLDHPDVIGWTREGDSSHPKSGLATLITDGPGGSKRMYAGLKNAGETWYDITGNRSDTVKIGSDGWGEFHVNDGSVSIYVQK

SEQ ID NO: 28132 - protein, 483 aa, Bacillus sp.
HHNGTNGTMMQYFEWYLPNDGNHWNRLNSDASNLKSKGITAVWIPPAWKGASQNDVGYGAYDLYDLGEFNQKGTVRTKYGTRSQLQAAVTSLKNNGIQVYGDVVMNHKGGADATEMVRAVEVNPNNRNQEVTGEYTIEAWTRFDFPGRGNTHSSFKWRWYHFDGVDWDQSRRLNNRIYLFRGKAWDWEVPTENGNYDYLMYADIDMDHPEVVNELRNWGVWYTNTLGLDGFRIDAVKHIKYSFTRDWINHVRSATGKNMFAVAEFWKNDLGAIENYLQKTNWNHSVFDVPLHYNLYNASKSGGNYDMRNIFNGTVVQRHPSHAVTFVDNHDSQPEEALESFVEEWFKPLAYALTLTREQGYPSVFYGDYYGIPTHGVPAMRSKIDPILEARQKYAYGPQHDYLDHPDVIGWTREGDSSHPKSGLATLITDGPGGSKRMYAGLKNAGETWYDITGNRSDTVKIGSDGWGEFHVNDGSVSIYVQK

SEQ ID NO: 28133 - protein, 485 aa, Bacillus sp.
HHNVTNGTMMQYFEWYLPNDGNHWNRLNSDASNLKSKGITAVWIPPAWKGASQNDVGYGAYDLYDLGEFNQKGTVRTKYGTRSQLQAAVTSLKNNGIQVYGDVVMNHKGGADATEMVRAVEVNPNNRNQEVTGEYTIEAWTRFDFPGRGNTHSSFKWRWYHFDGVDWDQSRRLNNRIYKFRGHGKAWDWEVDTEFGNYDYLMYADYDMDHPEVVNELRNWGVWYTNTLGLDGFRIDAVKHIKYSFTRDWINHVRSATGKNMFAVAEFWKNDLGAIENYLQKTNWNHSVFDVPLHYNLYNASKSGGNYDMRNIFNGTVVQRHPSHAVTFVDNHDSQPEEALESFVEEWFKPLAYALTLTREQGYPSVFYGDYYGIPTHGVPAMRSKIDPILEARQKYAYGPQHDYLDHPDVIGWTREGDSSHPKSGLATLITDGPGGSKRMYAGLKNAGETWYDITGNRSDTVKIGSDGWGEFHVNDGSVSIYVQK

SEQ ID NO: 28134 - protein, 483 aa, Bacillus sp.
HHNGTNGTMMQYFEWYLPNDGNHWNRLNSDASNLKSKGITAVWIPPAWKGASQNDVGYGAYDLYDLGEFNQKGTVRTKYGTRSQLQAAVTSLKNNGIQVYGDVVMNHKGGADATEMVRAVEVNPNNRNQEVTGEYTIEAWTRFDFPGRGNTHSSFKWRWYHFDGVDWDQSRRLNNRIYKFRGKAWDWEVDTEFGNYDYLMYADYDMDHPEVVNELRNWGVWYTNTLGLDGFRIDAVKHIKYSFTRDWINHVRSATGKNMFAVAEFWKNDLGAIENYLQKTNWNHSVFDVPLHYNLYNASNSGGNYDMRNIFNGTVVQRHPSHAVTFVDNHDSQPEEALESFVDTWFKPLAYALTLTREQGYPSVFYGDYYGIPTHGVPAMRSKIDPILEARQKYAYGPQHDYLDHPDVIGWTREGDSSHPKSGLATLITDGPGGSKRMYAGLKNAGETWYDITGNRSDTVKIGSDGWGEFHVNQQSVSIYVQK

SEQ ID NO: 28135 - protein, 483 aa, Bacillus sp.
HHNGTNGTMMQYFEWYLPNDGNHWNRLNSDASNLKSKGITAVWIPPAWKGASQNDVGYGAYDLYDLGEFNQKGTVRTKYGTRSQLQAAVTSLKNNGIQVYGDVVMNHKGGADATEMVRAVEVNPNNRNQEVTGEYTIEAWTRFDFPGRGNTHSSFKWRWYHFDGVDWDQSRRLNNRIYKFRGKAWDWEVDTEFGNYDYLMYADYDMDHPEVVNELRNWGVWYTNTLGLDGFRIDAVKHIKYSFTRDWINHVRSATGKNMFAVAEFWKNDLGAIENYLQKTNWNHSVFDVPLHYNLYNASQSGGNYDMRNIFNGTVVQRHPSHAVTFVDNHDSQPEEALESFVDEWFKPLAYALTLTREQGYPSVFYGDYYGIPTHGVPAMRSKIDPILEARQKYAYGPQHDYLDHPDVIGWTREGDSSHPKSGLATLITDGPGGSKRMYAGLKNAGETWYDITGNRSDTVKIGSDGWGEFHVNKQSVSIYVQK

SEQ ID NO: 28136 - protein, 483 aa, Bacillus sp.
HHNGTNGTMMQYFEWYLPNDGNHWNRLNSDASNLKSKGITAVWIPPAWKGASQNDVGYGAYDLYDLGEFNQKGTVRTKYGTRSQLQAAVTSLKNNGIQVYGDVVMNHKGGADATEMVRAVEVNPNNRNQEVTGEYTIEAWTRFDFPGRGNTHSSFKWRWYHFDGVDWDQSRRLNNRIYKFRGKAWDWEVDTEFGNYDYLMYADYDMDHPEVVNELRNWGVWYTNTLGLDGFRIDAVKHIKYSFTRDWINHVRSATGKNMFAVAEFWKNDLGGIENYLQKTNWNHSVFDVPLHYNLYNASKSGGNYDMRNIFNGTVVQRHPSHAVTFVDNHDSQPEEALESFVEEWFKPLAYALTLTREQGYPSVFYGDYYGIPTHGVPAMRSKIDPILEARQKYAYGPQHDYLDHPDVIGWTREGDSSHPKSGLATLITDGPGGSKRMYAGLKNAGETWYDITGNRSDTVKIGSDGWGEFHVNDGSVSIYVQK

SEQ ID NO: 28137 - protein, 483 aa, Bacillus sp.
HHNGTNGTMMQYFEWYLPNDGNHWNRLNSDASNLKSKGITAVWIPPAWKGASQNDVGYGAYDLYDLGEFNQKGTVRTKYGTRSQLQAAVTSLKNNGIQVYGDVVMNHKGGADATEMVRAVEVNPNNRNQEVTGEYTIEAWTRFDFPGRGNTHSSFKWRWYHFDGVDWDQSRRVNNRIYKFRGKAWDWEVDTEFGNYDYLMYVDYDMDHPEVVNELRNWGVWYTNTLGLDGFRIDAVKHIKYSFTRDWINHVRSATGKNMFAVAEFWKNDLGAIENYLQKTNWNHSVFDVPLHYNLYNASKSGGNYDMRNIFNGTVVQRHPSHAVTFVDNHDSQPEEALESFVEEWFKPLAYALTLTREQGYPSVFYGDYYGIPTHGVPAMRSKIDPILEARQKYAYGPQHDYLDHPDVIGWTREGDSSHPKSGLATLITDGPGGSKRMYAGLKNAGETWYDITGNRSDTVKIGSDGWGEFHVNDGSVSIYVQK

SEQ ID NO: 28138 - protein, 483 aa, Bacillus sp.
HHNGTNGTMMQYFEWYLPNDGNHWNRLNSDASNLKSKGITAVWIPPAWKGASQNDVGYGAYDLYDLGEFNQKGTVRTKYGTRSQLQAAVTSLKNNGIQVYGDVVMNHKGGADATEMVRAVEVNPNNRNQEVTGEYTIEAWTRFDFPGRGNTHSSFKWRWYHFDGVDWDQSRRLNNRIYKFRGKAWDWEVDTEFGNYDYLMYADYDMDHPEVVNELRNWGVWYTNTLGLDGFRIDAVKHIKLSFTRDWINHVRSATGKNMFAVAEFWKNDLGAIENYLQKTNWNHSVFDVPLHYNLYNASKSGGNYDMRNIFNGTVVQRHPSHAVTFVDNHDSQPEEALESFVEEWFKPLAYALTLTREQGYPSVFYGDYYGIPTHGVPAMRSKIDPILEARQKYAYGPQHDYLDHPDVIGWTREGDSSHPKSGLATLITDGPGGSKRMYAGLKNAGETWYDITGNRSDTVKIGSDGWGEFHVNDGSVSIYVQK

SEQ ID NO: 28139 - protein, 483 aa, Bacillus sp.
HHNGTNGTMMQYFEWYLPNDGNHWNRLNSDASNLKSKGITAVWIPPAWKGASQNDVGYGAYDLYDLGEFNQKGTVRTKYGTRSQLQAAVTSLKNNGIQVYGDVVMNHKGGADATEMVRAVEVNPNNRNQEVTGEYTIEAWTRFDFPGRGNTHSSFKWRWYHFDGVDWDQSRQLDNRIYKFRGKAWDWEVDTEFGNYDYLMYADYDMDHPEVVNELRNWGVWYTNTLGLDGFRIDAVKHIKYSFTRDWINHVRSATGKNMFAVAEFWKNDLGAIENYLQKTNWNHSVFDVPLHYNLYNASKSQGNYDMRNIFNGTVVQRHPSHAVTFVDNHDSQPEEALESFVDTWFKPLAYALTLTREQGYPSVFYGDYYGIPTHGVPAMRSKIDPILEARQKYAYGPQHDYLDHPDVIGWTREGDSSHPKSGLATLITDGPGGSKRMYAGLKNAGETWYDITGNRSDTVKIGSDGWGEFHVNGSSVSIYVQK

SEQ ID NO: 28140 - protein, 483 aa, Bacillus sp.
HHNGTNGTMMQYFEWYLPNDGNHWNRLNSDASNLKSKGITAVWIPPAWKGASQNDVGYGAYDLYDLGEFNQKGTVRTKYGTRSQLQAAVTSLKNNGIQVYGDVVMNHKGGADATEMVRAVEVNPNNRNQEVTGEYTIEAWTRFDFPGRGNTHSSFKWRWYHFDGVDFDQSRQLNNRIYKFRGKAWDWEVDTEFGNYDYLMYADYDMDHPEVVNELRNWGVWYTNTLGLDGFRIDAVKHIKYSFTRDWINHVRSATGKNMFAVAEFWKNDLGAIENYLQKTNWNHSVFDVPLHYNLYNASKSGGNYDMRNIFNGTVVQRHPSHAVTFVDNHDSQPEEALESFVETWFKPLAYALTLTREQGYPSVFYGDYYGIPTHGVPAMRSKIDPILEARQKYAYGPQHDYLDHPDVIGWTREGDSSHPKSGLATLITDGPGGSKRMYAGLKNAGETWYDITGNRSDTVKIGSDGWGEFHVNDGSVSIYVQK

SEQ ID NO: 28141 - protein, 483 aa, Bacillus sp.
HHNGTNGTMMQYFEWYLPNDGNHWNRLNSDASNLKSKGITAVWIPPAWKGASQNDVGYGAYDLYDLGEFNQKGTVRTKYGTRSQLQAAVTSLKNNGIQVYGDVVMNHKGGADATEMVRAVEVNPNNRNQEVTGEYTIEAWTRFDFPGRGNTHSSFKWRWYHFDGADWDQSRRLNNRIYKFRGKAWDWEVDTEFGNYDYLMYADYDMDHPEVVNELRNWGVWYTNTLGLDGFRIDAVKHIKYSFTRDWINHVRSATGKNMFAVAEFWKNDLGAIENYLQKTNWNHSVFDVPLHYNLYNASKSGGNYDMRNIFNGTVVQRHPSHAVTFVDNHDSQPEEALESFVEEWFKPLAYALTLTREQGYPSVFYGDYYGIPTHGVPAMRSKIDPILEARQKYAYGPQHDYLDHPDVIGWTREGDSSHPKSGLATLITDGPGGSKRMYAGLKNAGETWYDITGNRSDTVKIGSDGWGEFHVNDGSVSIYVQK

SEQ ID NO: 28142 - protein, 483 aa, Bacillus sp.
HHNGTNNTMMQYFEWYLPNDGNHWNRLNSDASNLKSKGITAVWIPPAWKGASQNDVGYGAYDLYDLGEFNQKGTVRTKYGTRSQLQAAVTSLKNNGIQVYGDVVMNHKGGADATEMVRAVEVNPNNRNQEVTGEYTIEAWTRFDFPGRGNTHSSFKWRWYHFDGVDWDQSRRLNNRIYKFRGKAWDWEVDTEFGNYDYLMYADYDMDHPEVVNELRNWGVWYTNTLGLDGFRIDAVKHIKYSFTRDWINHVRSATGKNMFAVAEFWKNDLGAIENYLQKTNWNHSVFDVPLHYNLYNASKSGGNYDMRNIFNGTVVQMHPSHAVTFVDNHDSQPEEALESFVEEWFKPLAYALTLTREQGYPSVFYGDYYGIPTHGVPAMRSKIDPILEARQKYAYGPQHDYLDHPDVIGWTREGDSSHPKSGLATLITDGPGGSKRMYAGLKNAGETWYDITGNRSDTVKIGSDGWGEFHVNDGSVSIYVQK

SEQ ID NO: 28143 - protein, 483 aa, Bacillus sp.
HHNGTNGTMMQYFEWYLPNDGNHWNRLNSDASNLKSKGITAVWIPPAWKGASQNDVGYGAYDLYDLGEFNQKGTVRTKYGTRSQLQAAVTSLKNNGIQVYGDVVMNHKGGADATEMVRAVEVNPNNRNQEVTGEYTIEAWTRFDFPGRGNTHSSFKWRWYHFDGVDWDQSRRLNNRIYKFRGKAWDWEVDTEFGNYDYLMYADYDMDHPEVVNELRNWGVWYTNTLGLDGFRIDAVKHIKYSFTRDWINHVRSATGKNMFAVAEFWKNDLGAIENYLQKTNWNHSVFDVPLHYNLYNASKSGGNYDMRNIFNGTVVQRHPSHAVTFVDNHDSQPEEALESFVETWFKPLAYALTLTREQGYPSVFYGDYYGIPTHGVPAMRSKIDPILEARQKYAYGPQHDYLDHPDVIGWTREGDSSHPKSGLATLITDGPGGSKRMYAGLKNAGETWYDITGNRSDTVKIGSDGWGEFHVNGSSVSIYVQK

SEQ ID NO: 28144 - protein, 483 aa, Synthetic construct
HHNGTNGTMMQYFEWYLPNDGNHWNRLNSDASNLKSKGITAVWIPPAWKGASQNDVGYGAYDLYDLGEFNQKGTVRTKYGTRSQLQAAVTSLKNNGIQVYGDVVMNHKGGADATEMVRAVEVNPNNRNQEVTGEYTIEAWTRFDFPGRGNTHSSFKWRWYHFDGVDWDQSRRLNNRIYKFRGKAWDWEVDTENGNYDYLMYADIDMDHPEAQNELRNWGVWYTNTLGLDGFRIDAVKHIKYSFTRDWINHVRSATGKNMFAVAEFWKNDLGAIENYLQKTNWNHSVFDVPLHYNLYNASKSGGNYDMRNIFNGTVVQRHPSHAVTFVDNHDSQPEEALESFVEEWFKPLAYALTLTREQGYPSVFYGDYYGIPTHGVPAMRSKIDPILEARQKYAYGPQHDYLDHPDVIGWTREGDSSHPKSGLATLITDGPGGSKRMYAGLKNAGETWYDITGNRSDTVKIGSDGWGEFHVNDGSVSIYVQK

SEQ ID NO: 28145 - protein, 483 aa, Bacillus sp.
HHNGTNGTMMQYFEWYLPNDGNHWNRLNSDASNLKSKGITAVWIPPAWKGASQNDVGYGAYDIYDLGEFNQKGTVRTKYGTRSQLQAAVTSLKNNGIQVYGDVVMNHKGGADATEMVRAVEVNPNNRNQEVTGEYTIEAWTRFDFPGRGNTHSSFKWRWYHFDGVDWDQSRRLNNRIYKFRGKAWDWEVDTENGNYDYLMYADIDYDHPEVVNELRNWGVWYTNTLGLDGFRIDAVKHIKYSFTRDWINHVRSATGKNMFAVAEFWKNDLGAIENYLQKTNWNHSVFDVPLHYNLYNASKSGGNYDMRNIFNGTVVQRHPSHAVTFVDNHDSQPEEALESFVEEWFKPLAYALTLTREQGYPSVFYGDYYGIPTHGVPAMRSKIDPILEARQKYAYGPQHDYLDHPDVIGWTREGDSSHPKSGLATLITDGPGGSKRMYAGLKNAGETWYDITGNRSDTVKIGSDGWGEFHVNDGSVSIYVQK

SEQ ID NO: 28146 - protein, 483 aa, Bacillus sp.
HHNGTNGTMMQYFEWYLPNDGNHWNRLNSDASNLKSKGITAVWIPPAWKGASQNDVGYGAYDLYDLGEFNQKGTVRTKYGTRSQLQAAVTSLKNNGIQVYGDVVMNHKGGADATEMVRAVEVNPNNRNQEVTGEYTIEAWTRFDFPGRGNTHSSFKWRWYHFDGVDWDQSRRLNNRIYKFRGKAWDWEVDTEFGNYDYLMYADYDMDHPEVVNELRNWGVWYTNTLGLDGFRIDAVKHIKYSFTRDWINHVRSATGKNMFAVAEFWKNDLGAIENYLQKTNWNHSVFDVPLHYNLYNASKSGGNYDMRNIFNGTVVQRHPSHAVTFVDNHDSQPEEALESFVEGWFKPLAYALTLTREQGYPSVFYGDYYGIPTHGVPAMRSKIDPILEARQKYAYGPQHDYLDHPDVIGWTREGDSSHPKSGLATLITDGPGGSKRMYAGLKNAGETWYDITGNRSDTVKIGSDGWGEFHVNDGSVSIYVQK

SEQ ID NO: 28147 - protein, 483 aa, Bacillus sp.
HHNGTNGTMMQYFEWYLPNDGNHWNRLNSDASNLKSKGITAVWIPPAWKGASQNDVGYGAYDLYDLGEFNQKGTVRTKYGTRSQLQAAVTSLKNNGIQVYGDVVMNHKGGADATEMVRAVEVNPNNRNQEVTGEYTIEAWTRFDFPGRGNTHSSFKWRWYHFDGVDWDQSRRLNNRIYKFRGKAWDWEVDTEFGNYDYLMYADYDMDHPEVVNELRNWGVWYTNTLGLDGFRIDAVKHIKYSFTRDWINHVRSATGKNMFAVAEFWKADLGAIENYLQKTNWNHSVFDVPLHYNLYNASKSGGNYDMRNIFNGTVVQRHPSHAVTFVDNHDSQPEEALESFVEEWFKPLAYALTLTREQGYPSVFYGDYYGIPTHGVPAMRSKIDPILEARQKYAYGPQHDYLDHPDVIGWTREGDSSHPKSGLATLITDGPGGSKRMYAGLKNAGETWYDITGNRSDTVKIGSDGWGEFHVNDGSVSIYVQK

SEQ ID NO: 28148 - protein, 483 aa, Bacillus sp.
HHNGTNGTMMQYFEWYLPNDGNHWNRLNSDASNLKSKGITAVWIPPAWKGASQNDVGYGAYDLYDLGEFNQKGTVRTKYGTRSQLQAAVTSLKNNGIQVYGDVVMNHKGGADATEMVRAVEVNPNNRNQEVTGEYTIEAWTRFDFPGRGNTHSSFKWRWYHFDGVDWDQSRRLNNRIYKFRGKAWDWEVDTENGNYDYLMYADIDMDYPEVVSELRMWGVWYTNTLGLDGFRIDAVKHIKYSFTRDWINHVRSATGKNMFAVAEFWKNDLGAIENYLQKTNWNHSVFDVPLHYNLYNASKSGGNYDMRNIFNGTVVQRHPSHAVTFVDNHDSQPEEALESFVEEWFKPLAYALTLTREQGYPSVFYGDYYGIPTHGVPAMRSKIDPILEARQKYAYGPQHDYLDHPDVIGWTREGDSSHPKSGLATLITDGPGGSKRMYAGLKNAGETWYDITGNRSDTVKIGSDGWGEFHVNDGSVSIYVQK

SEQ ID NO: 28149 - protein, 483 aa, Bacillus sp.
HHNGTNGTMMQYFEWYLPNDGNHWNRLNSDASNLKSKGITAVWIPPAWKGASQNDVGYGAYDLYDLGEFNQKGTVRTKYGTRSQLQAAVTSLKNNGIQVYGDVVMNHKGGAHATEMVRAVEVNPNNRNQEVTGEYTIEAWTRFDFPGRGNTHSSFKWRWYHFDGVDWDQSRRLNNRIYKFRGKAWDWEVDTEFGNYDYLMYADYDMDHPEVVNELRNWGVWYTNTLGLDGFRIDAVKHIKYSFTRDWINHVRSATGKNMFAVAEFWKNDLGAIENYLQKTNWNHSVFDVPLHYNLYNASKSGGNYDMRNIFNGTVVQAHPNHAVTFVDNHDSQPEEALESFVEEWFKPLAYALTLTREQGYPSVFYGDYYGIPTHGVPAMRSKIDPILEARQKYAYGPQHDYLDHPDVIGWTREGDSSHPKSGLATLITDGPGGSKRMYAGLKNAGETWYDITGNRSDTVKIGSDGWGEFHVNDGSVSIYVQK

SEQ ID NO: 28150 - protein, 483 aa, Bacillus sp.
HHNGTNGTMMQYFEWYLPNDGNHWNRLNSDASNLKSKGITAVWIPPAWKAVSQNDVGYGAYDLYDLGEFNQKGTVRTKYGTRSQLQAAVTSLKNNGIQVYGDVVMNHKGGADATEMVRAVEVNPNNRNQEVTGEYTIEAWTRFDFPGRGNTHSSFKWRWYHFDGVDWDQSRDLENRIYKFRGKAWDWEVDTEFGNYDYLMYADYDMDHPEVVNELRNWGVWYTNTLGLDGFRIDAVKHIKYSFTRDWINHVRSATGKNMFAVAEFWKNDLGAIENYLQKTNWNHSVFDVPLHYNLYNASKSGGNYDMRNIFNGTVVQVHPSHAVTFVDNHDSQPEEALESFVEEWFKPLAYALTLTREQGYPSVFYGDYYGIPTHGVPAMRSKIDPILEARQKYAYGPQHDYLDHPDVIGWTREGDSSHPKSGLATLITDGPGGSKRMYAGLKNAGETWYDITGNRSDTVKIGSDGWGEFHVNYGSVSIYVQK

SEQ ID NO: 28151 - protein, 485 aa, Synthetic construct
HHNGTNGTMMQYFEWYLPNDGNHWNRLNSDASNLKSKGITAVWIPPAWKGASQNDVGYGAYDIYDLGEFNQKGTVRTKYGTRSQLQAAVTSLKNNGIQVYGDVVMNHKGGADATEMVRAVEVNPNNRNQEVTGEYTIEAWTRFDFPGRGNTHSSFKWRWYHFDGVDWDQSRRLNNRIYKFRGHGKAWDWEVDTENGNYDYLMYADYDMDHPEVVNELRNWGVWYTNTLGLDGFRIDAVKHVKYSFTRDWINHVRSATGKNMFAVAEFWKNDLGAIENYLQKTNWNHSVFDVPLHYNLYNASKSGGNYDMRNIFNGTVVQRHPSHAVTFVDNHDSQPEEALESFVEEWFKPLAYALTLTREQGYPSVFYGDYYGIPTHGVPAMRSKIDPILEARQKYAYGPQHDYLDHPDVIGWTREGDSSHPKSGLATLITDGPGGSKRMYAGLKNAGETWYDITGNRSDTVKIGSDGWGEFHVNDGSVSIYVQK

SEQ ID NO: 28152 - protein, 483 aa, Bacillus sp.
HHNGTNGTMMQYFEWYLPNDGNHWNRLNSDASNLKSKGITAVWIPPAWKATSQNDVGYGAYDLYDLGEFNQKGTVRTKYGTRSQLQAAVTSLKNNGIQVYGDVVMNHKGGADATEMVRAVEVNPNNRNQEVTGEYTIEAWTRFDFPGRGNTHSSFKWRWYHFDGVDFDQSRNVNNRIYKFRGKAWDWEVDTEFGNYDYLMYADYDMDHPEVVNELRNWGVWYTNTLGLDGFRIDAVKHIKYSFTRDWINHVRSATGKNMFAVAEFWKNDLGAIENYLQKTNWNHSVFDVPLHYNLYNASKSGGNYDMRNIFNGTVVQAHPNHAVTFVDNHDSQPEEALESFVEEWFKPLAYALTLTREQGYPSVFYGDYYGIPTHGVPAMRSKIDPILEARQKYAYGPQHDYLDHPDVIGWTREGDSSHPKSGLATLITDGPGGSKRMYAGLKNAGETWYDITGNRSDTVKIGSDGWGEFHVNDGSVSIYVQK

SEQ ID NO: 28153 - protein, 483 aa, Bacillus sp.
HHNGTNGTMMQYFEWYLPNDGNHWNRLNSDASNLKSKGITAVWIPPAWKGASQNDVGYGAYDLYDLGEFNQKGTVRTKYGTRSQLQAAVTSLKNNGIQVYGDVVMNHKGGADATEMVRAVEVNPNNRNQEVTGEYTIEAWTRFDFPGRGNTHSSFKWRWYHFDGVDWDQSRDLQNRIYKFRGKAWDWEVDTEFGNYDYLMYADYDMDHPEVVNELRNWGVWYTNTLGLDGFRIDAVKHIKYSFTRDWINHVRSATGKNMFAVAEFWKNDLGAIENYLQKTNWNHSVFDVPLHYNLYNASKSGGNYDMRNIFNGTVVQRHPSHAVTFVDNHDSQPEEALESFVETWFKPLAYALTLTREQGYPSVFYGDYYGIPTHGVPAMRSKIDPILEARQKYAYGPQHDYLDHPDVIGWTREGDSSHPKSGLATLITDGPGGSKRMYAGLKNAGETWYDITGNRSDTVKIGSDGWGEFHVNKASVSIYVQK

SEQ ID NO: 28154 - protein, 483 aa, Bacillus sp.
HHNGTNGTMMQYFEWYLPNDGNHWNRLNSDASNLKSKGITAVWIPPAWKGASQNDVGYGAYDLYDLGEFNQKGTVRTKYGTRSQLQAAVTSLKNNGIQVYGDVVMNHKGGADATEMVRAVEVNPNNRNQEVTGEYTIEAWTRFDFPGRGNTHSSFKWRWYHFDGVDWDQSRRLNNRIYKFRGKAWDWEVDTEFGNYDYLMYADYDMDHPEVVNELRNWGVWYTNTLGLDGFRIDAVKHIKYSFTRDWINHVRSATGKNMFAVAEFFKNDLGAIENYLQKTNWNHSVFDVPLHYNLYNASKSGGNYDMRNIFNGTVVQRHPSHAVTFVDNHDSQPEEALESFVEEWFKPLAYALTLTREQGYPSVFYGDYYGIPTHGVPAMRSKIDPILEARQKYAYGPQHDYLDHPDVIGWTREGDSSHPKSGLATLITDGPGGSKRMYAGLKNAGETWYDITGNRSDTVKIGSDGWGEFHVNDGSVSIYVQK

SEQ ID NO: 28155 - protein, 485 aa, Synthetic construct
HHNGTNGTMMQYFEWYLPNDGNHWNRLNSDASNLKSKGITAVWIPPAWKGASQNDVGYGAYDLYDLGEFNQKGTVRTKYGTRSQLQAAVTSLKNNGIQVYGDVVMNHKGGADATEMVRAVEVNPNNRNQEVTGEYTIEAWTRFDFPGRGNTHSSFKWRWYHFDGVDWDQSRRLNNRIYKFRGHGKAWDWEVDTENGNYDYLMYADIDMDHPENINELRNWGVWYTNTLGLDGFRIDAVKHIKYSFTRDWINHVRSATGKNMFAVAEFWKNDLGAIENYLQKTNWNHSVFDVPLHYNLYNASKSGGNYDMRNIFNGTVVQRHPSHAVTFVDNHDSQPEEALESFVEEWFKPLAYALTLTREQGYPSVFYGDYYGIPTHGVPAMRSKIDPILEARQKYAYGPQHDYLDHPDVIGWTREGDSSHPKSGLATLITDGPGGSKRMYAGLKNAGETWYDITGNRSDTVKIGSDGWGEFHVNDGSVSIYVQK

SEQ ID NO: 28156 - protein, 483 aa, Bacillus sp.
HHNGTNGTMMQYFEWYLPNDGNHWNRLNSDASNLKSKGITAVWIPPAWKGASQNDVGYGAYDLYDLGEFNQKGTVRTKYGTRSQLQAAVTSLKNNGIQVYGDVVMNHKGGADATEMVRAVEVNPNNRNQEVTGEYTIEAWTRFDFPGRGNTHSSFKWRWYHFDGVDWDQSRRLNNRIYKFRGKAWDWEVDTENGNYDYLMYADIDMDHPEVVPLLRNWGVWYTNTLGLDGFRIDAVKHIKYSFTRDWINHVRSATGKNMFAVAEFWKNDLGAIENYLQKTNWNHSVFDVPLHYNLYNASKSGGNYDMRNIFNGTVVQRHPSHAVTFVDNHDSQPEEALESFVEEWFKPLAYALTLTREQGYPSVFYGDYYGIPTHGVPAMRSKIDPILEARQKYAYGPQHDYLDHPDVIGWTREGDSSHPKSGLATLITDGPGGSKRMYAGLKNAGETWYDITGNRSDTVKIGSDGWGEFHVNDGSVSIYVQK

SEQ ID NO: 28157 - protein, 483 aa, Bacillus sp.
HHNGTNGTMMQYFEWYLPNDGNHWNRLNSDASNLKSKGITAVWIPPAWKGASQNDVGYGAYDLYDLGEFNQKGTVRTKYGTRSQLQAAVTSLKNNGIQVYGDVVMNHKGGADATEMVRAVEVNPNNRNQEVTGEYTIEAWTRFDFPGRGNTHSSFKWRWYHFDGVDWDQSRKLSNRIYKFRGKAWDWEVDTEFGNYDYLMYGDYDMDHPEVVNELRNWGVWYTNTLGLDGFRIDAVKHIKYSFTRDWINHVRSATGKNMFAVAEFWKNDLGAIENYLQKTNWNHSVFDVPLHYNLYNASKSGGNYDMRNIFNGTVVQRHPSHAVTFVDNHDSQPEEALESFVEEWFKPLAYALTLTREQGYPSVFYGDYYGIPTHGVPAMRSKIDPILEARQKYAYGPQHDYLDHPDVIGWTREGDSSHPKSGLATLITDGPGGSKRMYAGLKNAGETWYDITGNRSDTVKIGSDGWGEFHVNDGSVSIYVQK

SEQ ID NO: 28158 - protein, 483 aa, Bacillus sp.
HHNGTNGTMMQYFEWYLPNDGNHWNRLNSDASNLKSKGITAVWIPPAWKGASQNDVGYGAYDLYDLGEFNQKGTVRTKYGTRSQLQAAVTSLKNNGIQVYGDVVMNHKGGADATEMVRAVEVNPNNRNQEVTGEYTIEAWTRFDFPGRGNTHSSFKWRWHHFDGVDWDQSRRLNNRIYKFRGKAWDWEVDTEFGNYDYLMYADYDMDHPEVVNELRNWGVWYTNTLGLDGFRIDAVKHIKYSFTRDWINHVRSATGKNMFAVAEFWKNDLGAIENYLQKTNWNHSVFDVPLHYNLYNASKSGGNYDMRNIFNGTVVQRHPSHAVTFVDNHDSQPEEALESFVEEWFKPLAYALTLTREQGYPSVFYGDYYGIPTHGVPAMRSKIDPILEARQKYAYGPQHDYLDHPDVIGWTREGDSSHPKSGLATLITDGPGGSKRMYAGLKNAGETWYDITGNRSDTVKIGSDGWGEFHVNDGSVSIYVQK

SEQ ID NO: 28159 - protein, 483 aa, Bacillus sp.
HHNGTNGTMMQYFEWYLPNDGNHWNRLNSDASNLKSKGITAVWIPPAWKGASQNDVGYGAYDLYDLGEFNQKGTVRTKYGTRSQLQAAVTSLKNNGIQVYGDVVMNHKGGADATEMVRAVEVNPNNRNQEVTGEYTIEAWTRFDFPGRGNTHSSFKWRWYHFDGVDWDQSRRLNNRIYKFRGKAWDWEVDTEFGNYDYLMYADYDMDHPEVVNELRNWGVWYTNTLGLDGFRIDAVKHIKYSFTRDWINHVRSATGKNMFAVAEFWKNDLGAIENYLQKTNWNHSVFDVPLHYNLYGASKSGGNYDMRNIFNGTVVQRHPSHAVTFVDNHDSQPEEALESFVEEWFKPLAYALTLTREQGYPSVFYGDYYGIPTHGVPAMRSKIDPILEARQKYAYGPQHDYLDHPDVIGWTREGDSSHPKSGLATLITDGPGGSKRMYAGLKNAGETWYDITGNRSDTVKIGSDGWGEFHVNDGSVSIYVQK

SEQ ID NO: 28160 - protein, 483 aa, Bacillus sp.
HHNGTNGTMMQYFEWYLPNDGNHWNRLNSDASNLKSKGITAVWIPPAWKGASQNDVGYGAYDVYDLGEFNQKGTVRTKYGTRSQLQAAVTSLKNNGIQVYGDVVMNHKGGADATEMVRAVEVNPNNRNQEVTGEYTIEAWTRFDFPGRGNTHSSFKWRWYHFDGVDWDQSRRLNNRIYKFRGKAWDWEVDTENGNYDYLMYADIDFDHPEVVNELRNWGVWYTNTLGLDGFRIDAVKHIKYSFTRDWINHVRSATGKNMFAVAEFWKNDLGAIENYLQKTNWNHSVFDVPLHYNLYNASKSGGNYDMRNIFNGTVVQRHPSHAVTFVDNHDSQPEEALESFVEEWFKPLAYALTLTREQGYPSVFYGDYYGIPTHGVPAMRSKIDPILEARQKYAYGPQHDYLDHPDVIGWTREGDSSHPKSGLATLITDGPGGSKRMYAGLKNAGETWYDITGNRSDTVKIGSDGWGEFHVNDGSVSIYVQK

SEQ ID NO: 28161 - protein, 483 aa, Bacillus sp.
HHNGTNGTMMQYFEWYLPNDGNHWNRLNSDASNLKSKGITAVWIPPAWKAASQNDVGYGAYDLYDLGEFNQKGTVRTKYGTRSQLQAAVTSLKNNGIQVYGDVVMNHKGGADATEMVRAVEVNPNNRNQEVTGEYTIEAWTRFDFPGRGNTHSSFKWRWYHFDGVDWDQSRQLNNRIYKFRGKAWDWEVDTEFGNYDYLMYVDYDMDHPEVVNELRNWGVWYTNTLGLDGFRIDAVKHIKYSFTRDWINHVRSATGKNMFAVAEFWKNDLGAIENYLQKTNWNHSVFDVPLHYNLYNASKSGGNYDMRNIFNGTVVQRHPSHAVTFVDNHDSQPEEALESFVEEWFKPLAYALTLTREQGYPSVFYGDYYGIPTHGVPAMRSKIDPILEARQKYAYGPQHDYLDHPDVIGWTREGDSSHPKSGLATLITDGPGGSKRMYAGLKNAGETWYDITGNRSDTVKIGSDGWGEFHVNDGSVSIYVQK

SEQ ID NO: 28162 - protein, 483 aa, Bacillus sp.
HHNGTNGTMMQYFEWYLPNDGNHWNRLNSDASNLKSKGITAVWIPPAWKGASQNDVGYGAYDLYDLGEFNQKGTVRTKYGTRSQLQAAVTSLKNNGIQVYGDVVMNHKGGADATEMVRAVEVNPNNRNQEVTGEYTIEAWTRFDFPGRGNTHSSFKWRWYHFDGVDWDQSRRLNNRIYKFRGKAWDWEVDTENGNYDYLMYADIDFDHPEVVNELRNWGVWYTNTLGLDGFRIDAVKHIKYSFTRVWINHVRSATGKNMFAVAEFWKNDLGAIENYLQKTNWNHSVFDVPLHYNLYNASKSGGNYDMRNIFNGTVVQRHPSHAVTFVDNHDSQPEEALESFVEEWFKPLAYALTLTREQGYPSVFYGDYYGIPTHGVPAMRSKIDPILEARQKYAYGPQHDYLDHPDVIGWTREGDSSHPKSGLATLITDGPGGSKRMYAGLKNAGETWYDITGNRSDTVKIGSDGWGEFHVNDGSVSIYVQK

SEQ ID NO: 28163 - protein, 483 aa, Bacillus sp.
HHNGTNGTMMQYFEWYLPNDGNHWNRLNSDASNLKSKGITAVWIPPAWKGASQNDVGYGAYDLYDLGEFNQKGTVRTKYGTRSQLQAAVTSLKNNGIQVYGDVVMNHKGGADATEMVRAVEVNPNNRNQEVTGEYTIEAWTRFDFPGRGNTHSSFKWRWYHFDGVDWDQSRRLDNRIYKFRGKAWDWEVDTEFGNYDYLMYTDYDMDHPEVVNELRNWGVWYTNTLGLDGFRIDAVKHIKYSFTRDWINHVRSATGKNMFAVAEFWKNDLGAIENYLQKTNWNHSVFDVPLHYNLYNASKSGGNYDMRNIFNGTVVQVHPSHAVTFVDNHDSQPEEALESFVEEWFKPLAYALTLTREQGYPSVFYGDYYGIPTHGVPAMRSKIDPILEARQKYAYGPQHDYLDHPDVIGWTREGDSSHPKSGLATLITDGPGGSKRMYAGLKNAGETWYDITGNRSDTVKIGSDGWGEFHVNYGSVSIYVQK

SEQ ID NO: 28164 - protein, 485 aa, Synthetic construct
HHNGTNGTMMQYFEWYLPNDGNHWNRLNSDASNLKSKGITAVWIPPAWKGASQNDVGYGAYDVYDLGEFNQKGTVRTKYGTRSQLQAAVTSLKNNGIQVYGDVVLNHKGGADATEMVRAVEVNPNNRNQEVTGEYTIEAWTRFDFPGRGNTHSSFKWRWYHFDGVDWDQSRRLNNRIYKFRGHGKAWDWEVDTENGNYDYLMYADYDMDHPEVVNELRNWGVWYTNTLGLDGFRIDAVKHIKYSFTRDWINHVRSATGKNMFAVAEFWKNDLGAIENYLQKTNWNHSVFDVPLHYNLYNASKSGGNYDMRNIFNGTVVQRHPSHAVTFVDNHDSQPEEALESFVEEWFKPLAYALTLTREQGYPSVFYGDYYGIPTHGVPAMRSKIDPILEARQKYAYGPQHDYLDHPDVIGWTREGDSSHPKSGLATLITDGPGGSKRMYAGLKNAGETWYDITGNRSDTVKIGSDGWGEFHVNDGSVSIYVQK

SEQ ID NO: 28165 - protein, 483 aa, Synthetic construct
HHNGTNGTMMQYFEWYLPNDGNHWNRLNSDASNLKSKGITAVWIPPAWKGASQNDVGYGAYDLYDLGEFNQKGTVRTKYGTRSQLQAAVTSLKNNGIQVYGDVVMNHKGGADATEMVRAVEVNPNNRNQEVTGEYTIEAWTRFDFPGRGNTHSSFKWRWYHFDGVDWDQSRRLNNRIYKFRGKAWDWEVDTENGNYDYLMYADYDMDFPEVVNEHRNWGVWYTNTLGLDGFRIDAVKHIKYSFTRDWINHVRSATGKNMFAVAEFWKNDLGAIENYLQKTNWNHSVFDVPLHYNLYNASKSGGNYDMRNIFNGTVVQRHPSHAVTFVDNHDSQPEEALESFVEEWFKPLAYALTLTREQGYPSVFYGDYYGIPTHGVPAMRSKIDPILEARQKYAYGPQHDYLDHPDVIGWTREGDSSHPKSGLATLITDGPGGSKRMYAGLKNAGETWYDITGNRSDTVKIGSDGWGEFHVNDGSVSIYVQK

SEQ ID NO: 28166 - protein, 483 aa, Bacillus sp.
HHNGTNGTMMQYFEWYLPNDGNHWNRLNSDASNLKSKGITAVWIPPAWKGASQNDVGYGAYDLYDLGEFNQKGTVRTKYGTRSQLQAAVTSLKNNGIQVYGDVVMNHKGGADATEMVRAVEVNPNNRNQEVTGEYTIEAWTRFDFPGRGNTHSSFKWRWYHFDGVDWDQSRRLNNRIYKFRGKAWDWEVDTEFGNYDYLMYADYDMDHWEVVNELRNWGVWYTNTLGLDGFRIDAVKHIKYSFTRDWINHVRSATGKNMFAVAEFWKNDLGAIENYLQKTNWNHSVFDVPLHYNLYNASKSGGNYDMRNIFNGTVVQRHPSHAVTFVDNHDSQPEEALESFVEEWFKPLAYALTLTREQGYPSVFYGDYYGIPTHGVPAMRSKIDPILEARQKYAYGPQHDYLDHPDVIGWTREGDSSHPKSGLATLITDGPGGSKRMYAGLKNAGETWYDITGNRSDTVKIGSDGWGEFHVNDGSVSIYVQK

SEQ ID NO: 28167 - protein, 483 aa, Bacillus sp.
HHNGTNGTMMQYFEWYLPNDGNHWNRLNSDASNLKSKGITAVWIPPAWKGASQNDVGYGAYDLYDLGEFNQKGTVRTKYGTRSQLQAAVTSLKNNGIQVYGDVVMNHKGGADATEMVRAVEVNPNNRNQEVTGEYTIEAWTRFDFPGRGNTHSSFKWRWYHFDGVDWDQSRRLNNRIYKFRGKAWDWEVDTEFGNYDYLMYADYDMDHPEVVNELRNWGVWYTNTLGLDGFRIDAVKHIKYSFTRDWINHVRSATGKNMFAVAEFWKNDLGAIENYLQKTNWNHSVFDVPLHYNLYNASQSGGNYDMRNIFNGTVVQRHPSHAVTFVDNHDSQPEEALESFVDEWFKPLAYALTLTREQGYPSVFYGDYYGIPTHGVPAMRSKIDPILEARQKYAYGPQHDYLDHPDVIGWTREGDSSHPKSGLATLITDGPGGSKRMYAGLKNAGETWYDITGNRSDTVKIGSDGWGEFHVNKKSVSIYVQK

SEQ ID NO: 28168 - protein, 485 aa, Synthetic construct
HHNGTNGTMMQYFEWYLPNDGNHWNRLNSDASNLKSKGITAVWIPPAWKGASQNDVGYGAYDLYDLGEFNQKGTVRTKYGTRSQLQAAVTSLKNNGIQVYGDVVMNHKGGADATEMVRAVEVNPNNRNQEVTGEYTIEAWTRFDFPGRGNTHSSFKWRWYHFDGVDWDQSRRLNNRIYKFRGHGKAWDWEVDTENGNYDYLMYADIDMDHPEPTNELRNWGVWYTNTLGLDGFRIDAVKHIKYSFTRDWINHVRSATGKNMFAVAEFWKNDLGAIENYLQKTNWNHSVFDVPLHYNLYNASKSGGNYDMRNIFNGTVVQRHPSHAVTFVDNHDSQPEEALESFVEEWFKPLAYALTLTREQGYPSVFYGDYYGIPTHGVPAMRSKIDPILEARQKYAYGPQHDYLDHPDVIGWTREGDSSHPKSGLATLITDGPGGSKRMYAGLKNAGETWYDITGNRSDTVKIGSDGWGEFHVNDGSVSIYVQK

SEQ ID NO: 28169 - protein, 485 aa, Synthetic construct
HHNGTNGTMMQYFEWYLPNDGNHWNRLNSDASNLKSKGITAVWIPPAWKGASQNDVGYGAYDLYDLGEFNQKGTVRTKYGTRSQLQAAVTSLKNNGIQVYGDVVMNHKGGADATEMVRAVEVNPNNRNQEVTGEYTIEAWTRFDFPGRGNTHSSFKWRWYHFDGVDWDQSRRLNNRIYKFRGHGKAWDWEVDTENGNYDYLMYADIDMDHPEPLNELRNWGVWYTNTLGLDGFRIDAVKHIKYSFTRDWINHVRSATGKNMFAVAEFWKNDLGAIENYLQKTNWNHSVFDVPLHYNLYNASKSGGNYDMRNIFNGTVVQRHPSHAVTFVDNHDSQPEEALESFVEEWFKPLAYALTLTREQGYPSVFYGDYYGIPTHGVPAMRSKIDPILEARQKYAYGPQHDYLDHPDVIGWTREGDSSHPKSGLATLITDGPGGSKRMYAGLKNAGETWYDITGNRSDTVKIGSDGWGEFHVNDGSVSIYVQK

SEQ ID NO: 28170 - protein, 483 aa, Bacillus sp.
HHNGTNGTMMQYFEWYLPNDGNHWNRLNSDASNLKSKGITAVWIPPAWKAASQNDVGYGAYDLYDLGEFNQKGTVRTKYGTRSQLQAAVTSLKNNGIQVYGDVVMNHKGGADATEMVRAVEVNPNNRNQEVTGEYTIEAWTRFDFPGRGNTHSSFKWRWYHFDGVDWDQSRRTSNRIYKFRGKAWDWEVDTEFGNYDYLMYADYDMDHPEVVNELRNWGVWYTNTLGLDGFRIDAVKHIKYSFTRDWINHVRSATGKNMFAVAEFWKNDLGAIENYLQKTNWNHSVFDVPLHYNLYNASKSGGNYDMRNIFNGTVVQRHPSHAVTFVDNHDSQPEEALESFVEEWFKPLAYALTLTREQGYPSVFYGDYYGIPTHGVPAMRSKIDPILEARQKYAYGPQHDYLDHPDVIGWTREGDSSHPKSGLATLITDGPGGSKRMYAGLKNAGETWYDITGNRSDTVKIGSDGWGEFHVNDGSVSIYVQK

SEQ ID NO: 28171 - protein, 483 aa, Bacillus sp.
HHNGTNGTMMQYFEWYLPNDGNHWNRLNSDASNLKSKGITAVWIPPAWKGASQNDVGYGAYDLYDLGEFNQKGTVRTKYGTRSQLQAAVTSLKNNGIQVYGDVVMNHKGGADATEMVRAVEVNPNNRNQEVTGEYTIEAWTRFDFPGRGNTHSSFKWRWYHFDGVDWDQSRRLNNRIYKFRGKAWDWEVDTEFGNYDYLMYADYDMDHPEVVNELRNWGVWYTNTLGLDGFRIDAVKHIKYSFTRDWINHVRSATGKNMFAVAEFWKNDLGAIENYLQKTNWNHSVFDVPLHYNLYNASKSQGNYDMRNIFNGTVVQRHPSHAVTFVDNHDSQPEEALESFVDTWFKPLAYALTLTREQGYPSVFYGDYYGIPTHGVPAMRSKIDPILEARQKYAYGPQHDYLDHPDVIGWTREGDSSHPKSGLATLITDGPGGSKRMYAGLKNAGETWYDITGNRSDTVKIGSDGWGEFHVNGGSVSIYVQK

SEQ ID NO: 28172 - protein, 485 aa, Synthetic construct
HHNGTNGTMMQYFEWYLPNDGNHWNRLNSDASNLKSKGITAVWIPPAWKGASQNDVGYGAYDLYDLGEFNQKGTVRTKYGTRSQLQAAVTSLKNNGIQVYGDVVMNHKGGADATEMVRAVEVNPNNRNQEVTGEYTIEAWTRFDFPGRGNTHSSFKWRWYHFDGVDWDQSRRLNNRIYKFRGHGKAWDWEVDTENGNYDYLMYADIDMDHPESTNELRNWGVWYTNTLGLDGFRIDAVKHIKYSFTRDWINHVRSATGKNMFAVAEFWKNDLGAIENYLQKTNWNHSVFDVPLHYNLYNASKSGGNYDMRNIFNGTVVQRHPSHAVTFVDNHDSQPEEALESFVEEWFKPLAYALTLTREQGYPSVFYGDYYGIPTHGVPAMRSKIDPILEARQKYAYGPQHDYLDHPDVIGWTREGDSSHPKSGLATLITDGPGGSKRMYAGLKNAGETWYDITGNRSDTVKIGSDGWGEFHVNDGSVSIYVQK

SEQ ID NO: 28173 - protein, 483 aa, Bacillus sp.
HHNGTNGTMMQYFEWYLPNDGNHWNRLNSDASNLKSKGITAVWIPPAWKGASQNDVGYGAYDLYDLGEFNQKGTVRTKYGTRSQLQAAVTSLKNNGIQVYGDVVMNHKGGADATEMVRAVEVNPNNRNQEVTGEYTIEAWTRFDFPGRGNTHSSFKWRWYHFDGSDWDQSRRLNNRIYKFRGKAWDWEVDTEFGNYDYLMYADYDMDHPEVVNELRNWGVWYTNTLGLDGFRIDAVKHIKYSFTRDWINHVRSATGKNMFAVAEFWKNDLGAIENYLQKTNWNHSVFDVPLHYNLYNASKSGGNYDMRNIFNGTVVQRHPSHAVTFVDNHDSQPEEALESFVEEWFKPLAYALTLTREQGYPSVFYGDYYGIPTHGVPAMRSKIDPILEARQKYAYGPQHDYLDHPDVIGWTREGDSSHPKSGLATLITDGPGGSKRMYAGLKNAGETWYDITGNRSDTVKIGSDGWGEFHVNDGSVSIYVQK

SEQ ID NO: 28174 - protein, 483 aa, Bacillus sp.
HHNGTNGTMMQYFEWYLPNDGNHWNRLNSDASNLKSKGITAVWIPPAWKGASQNDVGYGAYDLYDLGEFNQKGTVRTKYGTRSQLQAAVTSLKNNGIQVYGDVVMNHKGGADATEMVRAVEVNPNNRNQEVTGEYTIEAWTRFDFPGRGNTHSSFKWRWYHFDGVDWDQSRRLNNRIYKFRGKAWDWEVDTEFGNYDYLMYADYDMDHPEVVNELRNWGVWYTNTLGLDGFRIDAVKHIKYSFTRDWINHVRSATGKNMFAVAEFLKNDLGAIENYLQKTNWNHSVFDVPLHYNLYNASKSGGNYDMRNIFNGTVVQRHPSHAVTFVDNHDSQPEEALESFVEEWFKPLAYALTLTREQGYPSVFYGDYYGIPTHGVPAMRSKIDPILEARQKYAYGPQHDYLDHPDVIGWTREGDSSHPKSGLATLITDGPGGSKRMYAGLKNAGETWYDITGNRSDTVKIGSDGWGEFHVNDGSVSIYVQK

SEQ ID NO: 28175 - protein, 483 aa, Bacillus sp.
HHNGTNGTMMQYFEWYLPNDGNHWNRLNSDASNLKSKGITAVWIPPAWKGASQNDVGYGAYDLYDLGEFNQKGTVRTKYGTRSQLQAAVTSLKNNGIQVYGDVVMNHKGGADATEMVRAVEVNPNNRNQEVTGEYTIEAWTRFDFPGRGNTHSSFKWRWYHFDGVDWDQSRRLNNRIYKFRGKAWDWEVDTENGNYDYLMYADIDFDFPEVVNELRIWGVWYTNTLGLDGFRIDAVKHIKYSFTRDWINHVRSATGKNMFAVAEFWKNDLGAIENYLQKTNWNHSVFDVPLHYNLYNASKSGGNYDMRNIFNGTVVQRHPSHAVTFVDNHDSQPEEALESFVEEWFKPLAYALTLTREQGYPSVFYGDYYGIPTHGVPAMRSKIDPILEARQKYAYGPQHDYLDHPDVIGWTREGDSSHPKSGLATLITDGPGGSKRMYAGLKNAGETWYDITGNRSDTVKIGSDGWGEFHVNDGSVSIYVQK

SEQ ID NO: 28176 - protein, 485 aa, Synthetic construct
HHNGTNGTMMQYFEWYLPNDGNHWNRLNSDASNLKSKGITAVWIPPAWKGASQNDVGYGAYDLYDLGEFNQKGTVRTKYGTRSQLQAAVTSLKNNGIQVYGDVVMNHKGGADATEMVRAVEVNPNNRNQEVTGEYTIEAWTRFDFPGRGNTHSSFKWRWYHFDGVDWDQSRRLNNRIYKFRGHGKAWDWEVDTENGNYDYLMYADIDMDHPEGTNELRNWGVWYTNTLGLDGFRIDAVKHIKYSFTRDWINHVRSATGKNMFAVAEFWKNDLGAIENYLQKTNWNHSVFDVPLHYNLYNASKSGGNYDMRNIFNGTVVQRHPSHAVTFVDNHDSQPEEALESFVEEWFKPLAYALTLTREQGYPSVFYGDYYGIPTHGVPAMRSKIDPILEARQKYAYGPQHDYLDHPDVIGWTREGDSSHPKSGLATLITDGPGGSKRMYAGLKNAGETWYDITGNRSDTVKIGSDGWGEFHVNDGSVSIYVQK

SEQ ID NO: 28177 - protein, 483 aa, Bacillus sp.
HHNGTNGTMMQYFEWYLPNDGNHWNRLNSDASNLKSKGITAVWIPPAWKGASQNDVGYGAYDLYDLGEFNQKGTVRTKYGTRSQLQAAVTSLKNNGIQVYGDVVMNHKGGADATEMVRAVEVNPNNRNQEVTGEYTIEAWTRFDFPGRGNTHSSFKWRWYHFDGVDWDQSRRLDNRIYKFRGKAWDWEVDTEFGNYDYLMYADYDMDHPEVVNELRNWGVWYTNTLGLDGFRIDAVKHIKYSFTRDWINHVRSATGKNMFAVAEFWKNDLGAIENYLQKTNWNHSVFDVPLHYNLYNASKSGGNYDMRNIFNGTVVQRHPSHAVTFVDNHDSQPEEALESFVDPWFKPLAYALTLTREQGYPSVFYGDYYGIPTHGVPAMRSKIDPILEARQKYAYGPQHDYLDHPDVIGWTREGDSSHPKSGLATLITDGPGGSKRMYAGLKNAGETWYDITGNRSDTVKIGSDGWGEFHVNKGSVSIYVQK

SEQ ID NO: 28178 - protein, 483 aa, Bacillus sp.
HHNGTNGTMMQYFEWYLPNDGNHWNRLNSDASNLKSKGITAVWIPPAWKAVSQNDVGYGAYDLYDLGEFNQKGTVRTKYGTRSQLQAAVTSLKNNGIQVYGDVVMNHKGGADATEMVRAVEVNPNNRNQEVTGEYTIEAWTRFDFPGRGNTHSSFKWRWYHFDGVDWDQSRDLENRIYKFRGKAWDWEVDTEFGNYDYLMYADYDMDHPEVVNELRNWGVWYTNTLGLDGFRIDAVKHIKYSFTRDWINHVRSATGKNMFAVAEFWKNDLGAIENYLQKTNWNHSVFDVPLHYNLYNASKSGGNYDMRNIFNGTVVQRHPSHAVTFVDNHDSQPEEALESFVEEWFKPLAYALTLTREQGYPSVFYGDYYGIPTHGVPAMRSKIDPILEARQKYAYGPQHDYLDHPDVIGWTREGDSSHPKSGLATLITDGPGGSKRMYAGLKNAGETWYDITGNRSDTVKIGSDGWGEFHVNDGSVSIYVQK

SEQ ID NO: 28179 - protein, 483 aa, Bacillus sp.
HHNGTNGTMMQYFEWYLPNDGNHWNRLNSDASNLKSKGITAVWIPPAWKATSQNDVGYGAYDLYDLGEFNQKGTVRTKYGTRSQLQAAVTSLKNNGIQVYGDVVMNHKGGADATEMVRAVEVNPNNRNQEVTGEYTIEAWTRFDFPGRGNTHSSFKWRWYHFDGVDWDQSRELNNRIYKFRGKAWDWEVDTEFGNYDYLMYVDYDMDHPEVVNELRNWGVWYTNTLGLDGFRIDAVKHIKYSFTRDWINHVRSATGKNMFAVAEFWKNDLGAIENYLQKTNWNHSVFDVPLHYNLYNASKSGGNYDMRNIFNGTVVQRHPSHAVTFVDNHDSQPEEALESFVEEWFKPLAYALTLTREQGYPSVFYGDYYGIPTHGVPAMRSKIDPILEARQKYAYGPQHDYLDHPDVIGWTREGDSSHPKSGLATLITDGPGGSKRMYAGLKNAGETWYDITGNRSDTVKIGSDGWGEFHVNDGSVSIYVQK

SEQ ID NO: 28180 - protein, 483 aa, Bacillus sp.
HHNGTNGTMMQYFEWYLPNDGNHWNRLNSDASNLKSKGITAVWIPPAWKGASQNDVGYGAYDLYDLGEFNQKGTVRTKYGTRSQLQAAVTSLKNNGIQVYGDVVMNHKGGADLTEMVRAVEVNPNNRNQEVTGEYTIEAWTRFDFPGRGNTHSSFKWRWYHFDGVDWDQSRRLNNRIYKFRGKAWDWEVDTEFGNYDYLMYADYDMDHPEVVNELRNWGVWYTNTLGLDGFRIDAVKHIKYSFTRDWINHVRSATGKNMFAVAEFWKNDLGAIENYLQKTNWNHSVFDVPLHYNLYNASKSGGNYDMRNIFNGTVVQRHPSHAVTFVDNHDSQPEEALESFVEEWFKPLAYALTLTREQGYPSVFYGDYYGIPTHGVPAMRSKIDPILEARQKYAYGPQHDYLDHPDVIGWTREGDSSHPKSGLATLITDGPGGSKRMYAGLKNAGETWYDITGNRSDTVKIGSDGWGEFHVNDGSVSIYVQK

SEQ ID NO: 28181 - protein, 483 aa, Bacillus sp.
HHNGTNGTMMQYFEWYLPNDGNHWNRLNSDASNLKSKGITAVWIPPAWKGASQNDVGYGAYDLYDLGEFNQKGTVRTKYGTRSQLQAAVTSLKNNGIQVYGDVVMNHKGGADATEMVRAVEVNPNNRNQEVTGEYTIEAWTRFDFPGRGNTHSSFKWRWYHFDGVDWDQSRRLNNRIYKFRGKAWDWEVDTEFGNYDYLMYADYDMDHPEVVNELRNWGVWYTNTLGLDGFRIDAVKHIKYSFTRDWINHVRSATGKNMFAVAEFWKNDLGAIENYLQKTNWNHSVFDVPLHYNLYRASKSGGNYDMRNIFNGTVVQRHPSHAVTFVDNHDSQPEEALESFVEEWFKPLAYALTLTREQGYPSVFYGDYYGIPTHGVPAMRSKIDPILEARQKYAYGPQHDYLDHPDVIGWTREGDSSHPKSGLATLITDGPGGSKRMYAGLKNAGETWYDITGNRSDTVKIGSDGWGEFHVNDGSVSIYVQK

SEQ ID NO: 28182 - protein, 483 aa, Bacillus sp.
HHNGTNGTMMQYFEWYLPNDGNHWNRLNSDASNLKSKGITAVWIPPAWKAVSQNDVGYGAYDLYDLGEFNQKGTVRTKYGTRSQLQAAVTSLKNNGIQVYGDVVMNHKGGADATEMVRAVEVNPNNRNQEVTGEYTIEAWTRFDFPGRGNTHSSFKWRWYHFDGVDWDQSRNLSNRIYKFRGKAWDWEVDTEFGNYDYLMYADYDMDHPEVVNELRNWGVWYTNTLGLDGFRIDAVKHIKYSFTRDWINHVRSATGKNMFAVAEFWKNDLGAIENYLQKTNWNHSVFDVPLHYNLYNASKSGGNYDMRNIFNGTVVQRHPSHAVTFVDNHDSQPEEALESFVEEWFKPLAYALTLTREQGYPSVFYGDYYGIPTHGVPAMRSKIDPILEARQKYAYGPQHDYLDHPDVIGWTREGDSSHPKSGLATLITDGPGGSKRMYAGLKNAGETWYDITGNRSDTVKIGSDGWGEFHVNDGSVSIYVQK

SEQ ID NO: 28183 - protein, 485 aa, Synthetic construct
HHNGTNGTMMQYFEWYLPNDGNHWNRLNSDASNLKSKGITAVWIPPAWKGASQNDVGYGAYDLYDLGEFNQKGTVRTKYGTRSQLQAAVTSLKNNGIQVYGDVVMNHKGGADATEMVRAVEVNPNNRNQEVTGEYTIEAWTRFDFPGRGNTHSSFKWRWYHFDGVDWDQSRRLNNRIYKFRGHGKAWDWEVDTENGNYDYLMYADYDFDHPEVVNEVRNWGVWYTNTLGLDGFRIDAVKHIKYSFTRDWINHVRSATGKNMFAVAEFWKNDLGAIENYLQKTNWNHSVFDVPLHYNLYNASKSGGNYDMRNIFNGTVVQRHPSHAVTFVDNHDSQPEEALESFVEEWFKPLAYALTLTREQGYPSVFYGDYYGIPTHGVPAMRSKIDPILEARQKYAYGPQHDYLDHPDVIGWTREGDSSHPKSGLATLITDGPGGSKRMYAGLKNAGETWYDITGNRSDTVKIGSDGWGEFHVNDGSVSIYVQK

SEQ ID NO: 28184 - protein, 483 aa, Bacillus sp.
HHNGTNGTMMQYFEWYLPNDGNHWNRLNSDASNLKSKGITAVWIPPAWKGASQNDVGYGAYDLYDLGEFNQKGTVRTKYGTRSQLQAAVTSLKNNGIQVYGDVVMNHKGGADATEMVRAVEVNPNNRNQEVTGEYTIEAWTRFDFPGRGNTHSSFKWRWYHFDGVDWDQSRRLNNRIYKFRGKAWDWEVDTENGNYDYLMYADIDNDYPEVVNELRMWGVWYTNTLGLDGFRIDAVKHIKYSFTRDWINHVRSATGKNMFAVAEFWKNDLGAIENYLQKTNWNHSVFDVPLHYNLYNASKSGGNYDMRNIFNGTVVQRHPSHAVTFVDNHDSQPEEALESFVEEWFKPLAYALTLTREQGYPSVFYGDYYGIPTHGVPAMRSKIDPILEARQKYAYGPQHDYLDHPDVIGWTREGDSSHPKSGLATLITDGPGGSKRMYAGLKNAGETWYDITGNRSDTVKIGSDGWGEFHVNDGSVSIYVQK

SEQ ID NO: 28185 - protein, 483 aa, Bacillus sp.
HHNGTNGTMMQYFEWYLPNDGNHWNRLNSDASNLKSKGITAVWIPPAWKGASQNDVGYGAYDLYDLGEFNQKGTVRTKYGTRSQLQAAVTSLKNNGIQVYGDVVMNHKGGADATEMVRAVEVNPNNRNQEVTGEYTIEAWTRFDFPGRGNTHSSFKWRWYHFDGVDWDQSRRLNNRIYKFRSKAWEWEVDTENGNYDYLMYADIDMDHPEVVNELRNWGVWYTNTLGLDGFRIDAVKHIKYSFTRDWINHVRSATGKNMFAVAEFWKNDLGAIENYLQKTNWNHSVFDVPLHYNLYNASKSGGNYDMRNIFNGTVVQRHPSHAVTFVDNHDSQPEEALESFVEEWFKPLAYALTLTREQGYPSVFYGDYYGIPTHGVPAMRSKIDPILEARQKYAYGPQHDYLDHPDVIGWTREGDSSHPKSGLATLITDGPGGSKRMYAGLKNAGETWYDITGNRSDTVKIGSDGWGEFHVNDGSVSIYVQK

SEQ ID NO: 28186 - protein, 483 aa, Bacillus sp.
HHNGTNGTMMQYFEWYLPNDGNHWNRLNSDASNLKSKGITAVWIPPAWKGASQNDVGYGAYDLYDLGEFNQKGTVRTKYGTRSQLQAAVTSLKNNGIQVYGDVVMNHKGGADATEMVRAVEVNPNNRNQEVTGEYTIEAWTRFDFPGRGNTHSSFKWRWYHFDGVDWDQSRRLNNRIYKFRGKAWDWEVDTEFGNYDYLMYADYDMDHPEVVNELRNWGVWYTNTLGLDGFRIDAVKHIKYSFTRDWINHVRSATGKNMFAVAEFWKNDLGAIENYLQHTNWNHSVFDVPLHYNLYNASKSGGNYDMRNIFNGTVVQRHPSHAVTFVDNHDSQPEEALESFVEEWFKPLAYALTLTREQGYPSVFYGDYYGIPTHGVPAMRSKIDPILEARQKYAYGPQHDYLDHPDVIGWTREGDSSHPKSGLATLITDGPGGSKRMYAGLKNAGETWYDITGNRSDTVKIGSDGWGEFHVNDGSVSIYVQK

SEQ ID NO: 28187 - protein, 483 aa, Bacillus sp.
HHNGTNGTMMQYFEWYLPNDGNHWNRLNSDASNLKSKGITAVWIPPAWKGASQNDVGYGAYDLYDLGEFNQKGTVRTKYGTRSQLQAAVTSLKNNGIQVYGDVVMNHKGGADATEMVRAVEVNPNNRNQEVTGEYTIEAWTRFDFPGRGNTHSSFKWRWYHFDGVDWDQSREFDNRIYKFRGKAWDWEVDTEFGNYDYLMYADYDMDHPEVVNELRNWGVWYTNTLGLDGFRIDAVKHIKYSFTRDWINHVRSATGKNMFAVAEFWKNDLGAIENYLQKTNWNHSVFDVPLHYNLYNASQSGGNYDMRNIFNGTVVQRHPSHAVTFVDNHDSQPEEALESFVEPWFKPLAYALTLTREQGYPSVFYGDYYGIPTHGVPAMRSKIDPILEARQKYAYGPQHDYLDHPDVIGWTREGDSSHPKSGLATLITDGPGGSKRMYAGLKNAGETWYDITGNRSDTVKIGSDGWGEFHVNKSSVSIYVQK

SEQ ID NO: 28188 - protein, 485 aa, Synthetic construct
HHNGTNGTMMQYFEWYLPNDGNHWNRLNSDASNLKSKGITAVWIPPAWKGASQNDVGYGAYDLYDLGEFNQKGTVRTKYGTRSQLQAAVTSLKNNGIQVYGDVVMNHKGGADATEMVRAVEVNPNNRNQEVTGEYTIEAWTRFDFPGRGNTHSSFKWRWYHFDGVDWDQSRRLNNRIYKFRGHGKAWDWEVDTENGNYDYLMYADIDMDHPEIPNELRNWGVWYTNTLGLDGFRIDAVKHIKYSFTRDWINHVRSATGKNMFAVAEFWKNDLGAIENYLQKTNWNHSVFDVPLHYNLYNASKSGGNYDMRNIFNGTVVQRHPSHAVTFVDNHDSQPEEALESFVEEWFKPLAYALTLTREQGYPSVFYGDYYGIPTHGVPAMRSKIDPILEARQKYAYGPQHDYLDHPDVIGWTREGDSSHPKSGLATLITDGPGGSKRMYAGLKNAGETWYDITGNRSDTVKIGSDGWGEFHVNDGSVSIYVQK

SEQ ID NO: 28189 - protein, 483 aa, Bacillus sp.
HHNGTNGTMMQYFEWYLPNDGNHWNRLNSDASNLKSKGITAVWIPPAWKGASQNDVGYGAYDLYDLGEFNQKGTVRTKYGTRSQLQAAVTSLKNNGIQVYGDVVMNHKGGADATEMVPAVEVNPNNRNQEVTGEYTIEAWTRFDFPGRGNTHSSFKWRWYHFDGVDWDQSRRLNNRIYKFRNKAWDWEVDTEFGNYDYLMYADYDMDHPEVVNELRNWGVWYTNTLGLDGFRIDAVKHIKYSFTRDWINHVRSATGKNMFAVAEFWKNDLGAIENYLQKTNWNHSVFDVPLHYNLYNASKSGGNYDMRNIFNGTVVQRHPSHAVTFVDNHDSQPEEALESFVEEWFKPLAYALTLTREQGYPSVFYGDYYGIPTHGVPAMRSKIDPILEARQKYAYGPQHDYLDHPDVIGWTREGDSSHPKSGLATLITDGPGGSKRMYAGLKNAGETWYDITGNRSDTVKIGSDGWGEFHVNDGSVSIYVQK

SEQ ID NO: 28190 - protein, 483 aa, Bacillus sp.
HHNGTNGTMMQYFEWYLPNDGNHWNRLNSDASNLKSKGITAVWIPPAWKAVSQNDVGYGAYDLYDLGEFNQKGTVRTKYGTRSQLQAAVTSLKNNGIQVYGDVVMNHKGGADATEMVRAVEVNPNNRNQEVTGEYTIEAWTRFDFPGRGNTHSSFKWRWYHFDGVDWDQSREFTNRIYKFRGKAWDWEVDTEFGNYDYLMYVDYDMDHPEVVNELRNWGVWYTNTLGLDGFRIDAVKHIKYSFTRDWINHVRSATGKNMFAVAEFWKNDLGAIENYLQKTNWNHSVFDVPLHYNLYNASKSGGNYDMRNIFNGTVVQRHPSHAVTFVDNHDSQPEEALESFVEEWFKPLAYALTLTREQGYPSVFYGDYYGIPTHGVPAMRSKIDPILEARQKYAYGPQHDYLDHPDVIGWTREGDSSHPKSGLATLITDGPGGSKRMYAGLKNAGETWYDITGNRSDTVKIGSDGWGEFHVNDGSVSIYVQK

SEQ ID NO: 28191 - protein, 483 aa, Bacillus sp.
HHNGTNGTMMQYFEWYLPNDGNHWNRLNSDASNLKSKGITAVWIPPAWKGASQNDVGYGAYDLYDLGEFNQKGTVRTKYGTRSQLQAAVTSLKNNGIQVYGDVVLNHKGGADATEMVRAVEVNPNNRNQEVTGEYTIEAWTRFDFPGRGNTHSSFKWRWYHFDGVDWDQSRRLNNRIYKFRGKAWDWEVDTENGNYDYLMYADIDFDHPEVVNELRNWGVWYTNTLGLDGFRIDAVKHIKYSFTRDWINHVRSATGKNMFAVAEFWKNDLGAIENYLQKTNWNHSVFDVPLHYNLYNASKSGGNYDMRNIFNGTVVQRHPSHAVTFVDNHDSQPEEALESFVEEWFKPLAYALTLTREQGYPSVFYGDYYGIPTHGVPAMRSKIDPILEARQKYAYGPQHDYLDHPDVIGWTREGDSSHPKSGLATLITDGPGGSKRMYAGLKNAGETWYDITGNRSDTVKIGSDGWGEFHVNDGSVSIYVQK

SEQ ID NO: 28192 - protein, 483 aa, Bacillus sp.
HHNGTNGTMMQYFEWYLPNDGNHWNRLNSDASNLKSKGITAVWIPPAWKAFSQNDVGYGAYDLYDLGEFNQKGTVRTKYGTRSQLQAAVTSLKNNGIQVYGDVVMNHKGGADATEMVRAVEVNPNNRNQEVTGEYTIEAWTRFDFPGRGNTHSSFKWRWYHFDGVDWDQSRDLNNRIYKFRGKAWDWEVDTEFGNYDYLMYADYDMDHPEVVNELRNWGVWYTNTLGLDGFRIDAVKHIKYSFTRDWINHVRSATGKNMFAVAEFWKNDLGAIENYLQKTNWNHSVFDVPLHYNLYNASKSGGNYDMRNIFNGTVVQRHPSHAVTFVDNHDSQPEEALESFVEEWFKPLAYALTLTREQGYPSVFYGDYYGIPTHGVPAMRSKIDPILEARQKYAYGPQHDYLDHPDVIGWTREGDSSHPKSGLATLITDGPGGSKRMYAGLKNAGETWYDITGNRSDTVKIGSDGWGEFHVNDGSVSIYVQK

SEQ ID NO: 28193 - protein, 485 aa, Synthetic construct
HHNGTNGTMMQYFEWYLPNDGNHWNRLNSDASNLKSKGITAVWIPPAWKGASQNDVGYGAYDVYDLGEFNQKGTVRTKYGTRSQLQAAVTSLKNNGIQVYGDVVMNHKGGADATEMVRAVEVNPNNRNQEVTGEYTIEAWTRFDFPGRGNTHSSFKWRWYHFDGVDWDQSRRLNNRIYKFRGHGKAWDWEVDTENGNYDYLMYADYDMDHPEVVNEIRNWGVWYTNTLGLDGFRIDAVKHIKYSFTRDWINHVRSATGKNMFAVAEFWKNDLGAIENYLQKTNWNHSVFDVPLHYNLYNASKSGGNYDMRNIFNGTVVQRHPSHAVTFVDNHDSQPEEALESFVEEWFKPLAYALTLTREQGYPSVFYGDYYGIPTHGVPAMRSKIDPILEARQKYAYGPQHDYLDHPDVIGWTREGDSSHPKSGLATLITDGPGGSKRMYAGLKNAGETWYDITGNRSDTVKIGSDGWGEFHVNDGSVSIYVQK

SEQ ID NO: 28194 - protein, 483 aa, Synthetic construct
HHNGTNGTMMQYFEWYLPNDGNHWNRLNSDASNLKSKGITAVWIPPAWKGASQNDVGYGAYDLYDLGEFNQKGTVRTKYGTRSQLQAAVTSLKNNGIQVYGDVVMNHKGGADATEMVRAVEVNPNNRNQEVTGEYTIEAWTRFDFPGRGNTHSSFKWRWYHFDGVDWDQSRRLNNRIYKFRSKEWDWEVDTENGNYDYLMYADIDMDHPEVVNELRNWGVWYTNTLGLDGFRIDAVKHIKYSFTRDWINHVRSATGKNMFAVAEFWKNDLGAIENYLQKTNWNHSVFDVPLHYNLYNASKSGGNYDMRNIFNGTVVQRHPSHAVTFVDNHDSQPEEALESFVEEWFKPLAYALTLTREQGYPSVFYGDYYGIPTHGVPAMRSKIDPILEARQKYAYGPQHDYLDHPDVIGWTREGDSSHPKSGLATLITDGPGGSKRMYAGLKNAGETWYDITGNRSDTVKIGSDGWGEFHVNDGSVSIYVQK

SEQ ID NO: 28195 - protein, 483 aa, Bacillus sp.
HHNGTNGTMMQYFEWYLPNDGNHWNRLNSDASNLKSKGITAVWIPPAWKGASQNDVGYGAYDLYDLGEFNQKGTVRTKYGTRSQLQAAVTSLKNNGIQVYGDVVMNHKGGADATEMVRAVEVNPNNRNQEVTGEYTIEAWTRFDFPGRGNTHSSFKWRWYHFDGVDWDQSRRLNNRIYKFRGKMWDWEVDTEFGNYDYLMYADYDMDHPEVVNELRNWGVWYTNTLGLDGFRIDAVKHIKYSFTRDWINHVRSATGKNMFAVAEFWKNDLGAIENYLQKTNWNHSVFDVPLHYNLYNASKSGGNYDMRNIFNGTVVQRHPSHAVTFVDNHDSQPEEALESFVEEWFKPLAYALTLTREQGYPSVFYGDYYGIPTHGVPAMRSKIDPILEARQKYAYGPQHDYLDHPDVIGWTREGDSSHPKSGLATLITDGPGGSKRMYAGLKNAGETWYDITGNRSDTVKIGSDGWGEFHVNDGSVSIYVQK

SEQ ID NO: 28196 - protein, 485 aa, Bacillus sp.
HHNGTNGTMMQYFEWYLPNDGNHWNRLNSDASNLKSKGITAVWIPPAWKGASQNDVGYGAYDLYDLGEFNQKGTVRTKYGTRSQLQAAVTSLKNNGIQVYGDVVMNHKGGADATEMVRAVEVNPNNRNQEVTGEYTIEAWTRFDFPGRFNTHSSFKWRWYHFDGVDWDQSRRLNNRIYKFRGHGKAWDWEVDTEFGNYDYLMYADYDMDHPEVVNELRNWGVWYTNTLGLDGFRIDAVKHIKYSFTRDWINHVRSATGKNMFAVAEFWKNDLGAIENYLQKTNWNHSVFDVPLHYNLYNASKSGGNYDMRNIFNGTVVQRHPSHAVTFVDNHDSQPEEALESFVEEWFKPLAYALTLTREQGYPSVFYGDYYGIPTHGVPAMRSKIDPILEARQKYAYGPQHDYLDHPDVIGWTREGDSSHPKSGLATLITDGPGGSKRMYAGLKNAGETWYDITGNRSDTVKIGSDGWGEFHVNDGSVSIYVQK

SEQ ID NO: 28197 - protein, 485 aa, Bacillus sp.
HHNGTNGTMMQYFEWYLPNDGNHWNRLNSDASNLKSKGITAVWIPPAWKAASQNDVGYGAYDLYDLGEFNQKGTVRTKYGTRSQLQAAVTSLKNNGIQVYGDVVMNHKGGADATEMVRAVEVNPNNRNQEVTGEYTIEAWTRFDFPGRGNTHSSFKWRWYHFDGVDWDQSRDTSNRIYKFRGHGKAWDWEVDTEFGNYDYLMYADYDMDHPEVVNELRNWGVWYTNTLGLDGFRIDAVKHIKYSFTRDWINHVRSATGKNMFAVAEFWKNDLGAIENYLQKTNWNHSVFDVPLHYNLYNASKSGGNYDMRNIFNGTVVQRHPSHAVTFVDNHDSQPEEALESFVEEWFKPLAYALTLTREQGYPSVFYGDYYGIPTHGVPAMRSKIDPILEARQKYAYGPQHDYLDHPDVIGWTREGDSSHPKSGLATLITDGPGGSKRMYAGLKNAGETWYDITGNRSDTVKIGSDGWGEFHVNDGSVSIYVQK

SEQ ID NO: 28198 - protein, 483 aa, Bacillus sp.
HHNGTNGTMMQYFEWYLPNDGNHWNRLNSDASNLKSKGITAVWIPPAWKGASQNDVGYGAYDLYDLGEFNQKGTVRTKYGTRSQLQAAVTSLKNNGIQVYGDVVMNHKGGADATEMVRAVEVNPNNRNQEVTGEYTIEAWTRFDFPGRGNTHSSFKWRWYHFDGVDWDQSRRLNNRIYKFRGKAWDWEVDTEFGNYDYLMYADYDMDHPEVVNELRNWGVWYTNTLGLDGFRIDAVKHIKYSFTRDWINHVRSATGKNMFAVAEFWKNDLGAIENYLQKTNWNHSVFDVPLHYNLYNASKSAGNYDMRNIFNGTVVQRHPSHAVTFVDNHDSQPEEALESFVDEWFKPLAYALTLTREQGYPSVFYGDYYGIPTHGVPAMRSKIDPILEARQKYAYGPQHDYLDHPDVIGWTREGDSSHPKSGLATLITDGPGGSKRMYAGLKNAGETWYDITGNRSDTVKIGSDGWGEFHVNDGSVSIYVQK

SEQ ID NO: 28199 - protein, 485 aa, Bacillus sp.
HHNGTNGTMMQYFEWYLPNDGNHWNRLNSDASNLKSKGITAVWIPPAWKAASQNDVGYGAYDLYDLGEFNQKGTVRTKYGTRSQLQAAVTSLKNNGIQVYGDVVMNHKGGADATEMVRAVEVNPNNRNQEVTGEYTIEAWTRFDFPGRGNTHSSFKWRWYHFDGVDWDQSRQLSNRIYKFRGHGKAWDWEVDTEFGNYDYLMYTDYDMDHPEVVNELRNWGVWYTNTLGLDGFRIDAVKHIKYSFTRDWINHVRSATGKNMFAVAEFWKNDLGAIENYLQKTNWNHSVFDVPLHYNLYNASKSGGNYDMRNIFNGTVVQRHPSHAVTFVDNHDSQPEEALESFVEEWFKPLAYALTLTREQGYPSVFYGDYYGIPTHGVPAMRSKIDPILEARQKYAYGPQHDYLDHPDVIGWTREGDSSHPKSGLATLITDGPGGSKRMYAGLKNAGETWYDITGNRSDTVKIGSDGWGEFHVNDGSVSIYVQK

SEQ ID NO: 28200 - protein, 483 aa, Bacillus sp.
HHNGTNGTMMQYFEWYLPNDGNHWNRLNSDASNLKSKGITAVWIPPAWKSASQNDVGYGAYDLYDLGEFNQKGTVRTKYGTRSQLQAAVTSLKNNGIQVYGDVVMNHKGGADATEMVRAVEVNPNNRNQEVTGEYTIEAWTRFDFPGRGNTHSSFKWRWYHFDGVDWDQSRKLDNRIYKFRGKAWDWEVDTEFGNYDYLMYADYDMDHPEVVNELRNWGVWYTNTLGLDGFRIDAVKHIKYSFTRDWINHVRSATGKNMFAVAEFWKNDLGAIENYLQKTNWNHSVFDVPLHYNLYNASKSGGNYDMRNIFNGTVVQRHPSHAVTFVDNHDSQPEEALESFVEEWFKPLAYALTLTREQGYPSVFYGDYYGIPTHGVPAMRSKIDPILEARQKYAYGPQHDYLDHPDVIGWTREGDSSHPKSGLATLITDGPGGSKRMYAGLKNAGETWYDITGNRSDTVKIGSDGWGEFHVNDGSVSIYVQK

SEQ ID NO: 28201 - protein, 483 aa, Bacillus sp.
HHNGTNGTMMQYFEWYLPNDGNHWNRLNSDASNLKSKGITAVWIPPAWKGASQNDVGYGAYDLYDLGEFNQKGTVRTKYGTRSQLQAAVTSLKNNGIQVYGDVVMNHKGGADATEMVRAVEVNPNNRNQEVTGEYTIEAWTRFDFPGRGNTHSSFKWRWYHFDGVDWDQSRRLNNRIYKFRGKAWDWEVDTEFGNYDYLMYADYDMDHPEVVNELRNWGVWYTNTLGLDGFRIDAVKHIKYSFTRDWINHVRSATGKNMFAVAEFWKNDLGAIENYLQKTNWNHSVFDVPLHYNLYNASKSGGNYDMRNIFNGTVVQRHPSHAVTFVDNHDSQPEEALESFVEEWFKPAAYALTLTREQGYPSVFYGDYYGIPTHGVPAMRSKIDPILEARQKYAYGPQHDYLDHPDVIGWTREGDSSHPKSGLATLITDGPGGSKRMYAGLKNAGETWYDITGNRSDTVKIGSDGWGEFHVNDGSVSIYVQK

SEQ ID NO: 28202 - protein, 483 aa, Bacillus sp.
HHNGTNGTMMQYFEWYLPNDGNHWNRLNSDASNLKSKGITAVWIPPAWKGASQNDVGYGAYDLYDLGEFNQKGTVRTKYGTRSQLQAAVTSLKNNGIQVYGDVVMNHKGGADATEMVRAVEVNPNNRNQEVTGEYTIEAWTRFDFPGRGNTHSSYKWRWYHFDGVDWDQSRRLNNRIYKFRGKAWDWEVDTEFGNYDYLMYADYDMDHPEVVNELRNWGVWYTNTLGLDGFRIDAVKHIKYSFTRDWINHVRSATGKNMFAVAEFWKNDLGAIENYLQKTNWNHSVFDVPLHYNLYNASKSGGNYDMRNIFNGTVVQRHPSHAVTFVDNHDSQPEEALESFVEEWFKPLAYALTLTREQGYPSVFYGDYYGIPTHGVPAMRSKIDPILEARQKYAYGPQHDYLDHPDVIGWTREGDSSHPKSGLATLITDGPGGSKRMYAGLKNAGETWYDITGNRSDTVKIGSDGWGEFHVNDGSVSIYVQK

SEQ ID NO: 28203 - protein, 485 aa, Bacillus sp.
HHNGTNGTMMQYFEWYLPNDGNHWNRLNSDASNLKSKGITAVWIPPAWKGASQNDVGYGAYDLYDLGEFNQKGTVRTKYGTRSQLQAAVTSLKNNGIQVYGDVVMNHKGGADATEMVRAVEVNPNNRNQEVTGEYTIEAWTRFDFPGRGNTHSSFKWRWYHFDGVDWDQSRRLNNRIYKFRSHGKVWDWEVDTEFGNYDYLMYADYDMDHPEVVNELRNWGVWYTNTLGLDGFRIDAVKHIKYSFTRDWINHVRSATGKNMFAVAEFWKNDLGAIENYLQKTNWNHSVFDVPLHYNLYNASKSGGNYDMRNIFNGTVVQRHPSHAVTFVDNHDSQPEEALESFVEEWFKPLAYALTLTREQGYPSVFYGDYYGIPTHGVPAMRSKIDPILEARQKYAYGPQHDYLDHPDVIGWTREGDSSHPKSGLATLITDGPGGSKRMYAGLKNAGETWYDITGNRSDTVKIGSDGWGEFHVNDGSVSIYVQK

SEQ ID NO: 28204 - protein, 483 aa, Bacillus sp.
HHNGTNGTMMQYFEWYLPNDGNHWNRLNSDASNLKSKGITAVWIPPAWKATSQNDVGYGAYDLYDLGEFNQKGTVRTKYGTRSQLQAAVTSLKNNGIQVYGDVVMNHKGGADLTEMVDAVEVNPNNRNQEVTGEYTIEAWTRFDFPGRGNTHSSFKWRWYHFDGVDWDQSRNVNNRIYKFRGKAWDWEVDTEFGNYDYLMYADYDMDHPEVVNELRNWGVWYTNTLGLDGFRIDAVKHIKYSFTRDWINHVRSATGKNMFAVAEFWKNDLGAIENYLQKTNWNHSVFDVPLHYNLYNASKSGGNYDMRNIFNGTVVQRHPSHAVTFVDNHDSQPEEALESFVEEWFKPLAYALTLTREQGYPSVFYGDYYGIPTHGVPAMRSKIDPILEARQKYAYGPQHDYLDHPDVIGWTREGDSSHPKSGLATLITDGPGGSKRMYAGLKNAGETWYDITGNRSDTVKIGSDGWGEFHVNDGSVSIYVQK

SEQ ID NO: 28205 - protein, 483 aa, Bacillus sp.
HHNGTNGTMMQYFEWYLPNDGNHWNRLNSDASNLKSKGITAVWIPPAWKGASQNDVGYGAYDLYDLGEFNQKGTVRTKYGTRSQLQAAVTSLKNNGIQVYGDVVMNHKGGADATEMVRAVEVNPNNRNQEVTGEYTIEAWTRFDFPGRGNTHSSFKWRWYHFDGVDWDQSERLNNRIYKFRGKAWDWEVDTEFGNYDYLMYADYDMDHPEVVNELRNWGVWYTNTLGLDGFRIDAVKHIKYSFTRDWINHVRSATGKNMFAVAEFWKNDLGAIENYLQKTNWNHSVFDVPLHYNLYNASKSGGNYDMRNIFNGTVVQRHPSHAVTFVDNHDSQPEEALESFVEEWFKPLAYALTLTREQGYPSVFYGDYYGIPTHGVPAMRSKIDPILEARQKYAYGPQHDYLDHPDVIGWTREGDSSHPPSGLATLITDGPGGSKRMYAGLKNAGETWYDITGNRSDTVKIGSDGWGEFHVNDGSVSIYVQK

SEQ ID NO: 28206 - protein, 483 aa, Bacillus sp.
HHNGTNGTMMQYFEWYLPNDGNHWNRLNSDASNLKSKGITAVWIPPAWKGASQNDVGYGAYDLYDLGEFNQKGTVRTKYGTRSQLQAAVTSLKNNGIQVYGDVVMNHKGGADATEMVRAVEVNPNNRNQEVTGEYTIEAWTRFDFPGRGNTHSSFKWRWYHFDGVDWDQSRRLNNRIYKFRGKAWDWEVDTEFGNYDYLMYADYDMDHPEVVNELRNWGVWYTNTLGLDGFRIDAVKHIKYSFTRDWINHVRSATGKNMFAVAEFWKNDLGAIENYLQKTNWNHSVFDVPLHYNLYNASKSGGNYDMRNIFNGTVVQRHPSHAVTFVDNHDSQPEEALESFVEPWFKPLAYALTLTREQGYPSVFYGDYYGIPTHGVPAMRSKIDPILEARQKYAYGPQHDYLDHPDVIGWTREGDSSHPKSGLATLITDGPGGSKRMYAGLKNAGETWYDITGNRSDTVKIGSDGWGEFHVNGKSVSIYVQK

SEQ ID NO: 28207 - protein, 483 aa, Bacillus sp.
HHNGTNGTMMQYFEWYLPNDGNHWNRLNSDASNLKSKGITAVWIPPAWKGASQNDVGYGAYDLYDLGEFNQKGTVRTKYGTRSQLQAAVTSLKNNGIQVYGDVVMNHKGGADATEMVRAVEVNPNNRNQEVTGEYTIEAWTRFDFPGRGNTHSSFKWRWYHFDGVDWDQSRRLNNRIYKFRGKAWDWEVDTEFGNYDYLMYADYDVDHPEVVNELRNWGVWYTNTLGLDGFRIDAVKHIKYSFTRDWINHVRSATGKNMFAVAEFWKNDLGAIENYLQKTNWNHSVFDVPLHYNLYNASKSGGNYDMRNIFNGTVVQRHPSHAVTFVDNHDSQPEEALESFVEEWFKPLAYALTLTREQGYPSVFYGDYYGIPTHGVPAMRSKIDPILEARQKYAYGPQHDYLDHPDVIGWTREGDSSHPKSGLATLITDGPGGSKRMYAGLKNAGETWYDITGNRSDTVKIGSDGWGEFHVNDGSVSIYVQK

SEQ ID NO: 28208 - protein, 485 aa, Bacillus sp.
HHNGTNGTMMQYFEWYLPNDGNHWNRLNSDASNLKSKGITAVWIPPAWKGASQNDVGYGAYDLYDLGEFNQKGTVRTKYGTRSQLQAAVTSLKNNGIQVYGDVVMNHKGGADATEMVRAVEVNPNNRNQEVTGEYTIEAWTRFDFPGRGNTHSSFKWRWYHFDGVDWDQSREFDNRIYKFRGHGKAWDWEVDTEFGNYDYLMYADYDMDHPEVVNELRNWGVWYTNTLGLDGFRIDAVKHIKYSFTRDWINHVRSATGKNMFAVAEFWKNDLGAIENYLQKTNWNHSVFDVPLHYNLYNASQSGGNYDMRNIFNGTVVQRHPSHAVTFVDNHDSQPEEALESFVEPWFKPLAYALTLTREQGYPSVFYGDYYGIPTHGVPAMRSKIDPILEARQKYAYGPQHDYLDHPDVIGWTREGDSSHPKSGLATLITDGPGGSKRMYAGLKNAGETWYDITGNRSDTVKIGSDGWGEFHVNKSSVSIYVQK

SEQ ID NO: 28209 - protein, 485 aa, Bacillus sp.
HHNGTNGTMMQYFEWYLPNDGNHWNRLNSDASNLKSKGITAVWIPPAWKGASQNDVGYGAYDLYDLGEFNQKGTVRTKYGTRSQLQAAVTSLKNNGIQVYGDVVMNHKGGADATEMVRAVEVNPNNRNQEVTGEYTIEAWTRFDFPGRGNTHSSFKWRWYHFDGVDWDQSRRLNNRIYKFRGHGKAWDWEVDTEFGNYDYLMYADYDMDHPEVVNELRNWGVWYTNTLGLDGFRIDAVKHIKYSFTRDWINHVRSATGKNMFAVAEFWKNDLGAIENYLQKTNWNHSVFDVPLHYNLYNASQSGGNYDMRNIFNGTVVQRHPSHAVTFVDNHDSQPEEALESFVEPWFKPLAYALTLTREQGYPSVFYGDYYGIPTHGVPAMRSKIDPILEARQKYAYGPQHDYLDHPDVIGWTREGDSSHPKSGLATLITDGPGGSKRMYAGLKNAGETWYDITGNRSDTVKIGSDGWGEFHVNKGSVSIYVQK

SEQ ID NO: 28210 - protein, 483 aa, Bacillus sp.
HHNGTNGTMMQYFEWYLPNDGNHWNRLNSDASNLKSKGITAVWIPPAWKAASQNDVGYGAYDLYDLGEFNQKGTVRTKYGTRSQLQAAVTSLKNNGIQVYGDVVMNHKGGADATEMVRAVEVNPNNRNQEVTGEYTIEAWTRFDFPGRGNTHSSFKWRWYHFDGVDWDQSRDLDNRIYKFRGKAWDWEVDTEFGNYDYLMYADYDMDHPEVVNELRNWGVWYTNTLGLDGFRIDAVKHIKYSFTRDWINHVRSATGKNMFAVAEFWKNDLGAIENYLQKTNWNHSVFDVPLHYNLYNASKSGGNYDMRNIFNGTVVQVHPSHAVTFVDNHDSQPEEALESFVEEWFKPLAYALTLTREQGYPSVFYGDYYGIPTHGVPAMRSKIDPILEARQKYAYGPQHDYLDHPDVIGWTREGDSSHPKSGLATLITDGPGGSKRMYAGLKNAGETWYDITGNRSDTVKIGSDGWGEFHVNDGSVSIYVQK

SEQ ID NO: 28211 - protein, 485 aa, Bacillus sp.
HHNGTNGTMMQYFEWYLPNDGNHWNRLNSDASNLKSKGITAVWIPPAWKGASQNDVGYGAYDLYDLGEFNQKGTVRTKYGTRSQLQAAVTSLKNNGIQVYGDVVMNHKGGADATEMVRAVEVNPNNRNQEVTGEYTIEAWTRFDFPGRGNTHSSFKWRWYHFDGVDWDQSRRLNNRIYKFRAHGKAWDWEVDTEFGNYDYLMYADYDMDHPEVVNELRNWGVWYTNTLGLDGFRIDAVKHIKYSFTRDWINHVRSATGKNMFAVAEFWKNDLGAIENYLQKTNWNHSVFDVPLHYNLYNASKSGGNYDMRNIFNGTVVQRHPSHAVTFVDNHDSQPEEALESFVEEWFKPLAYALTLTREQGYPSVFYGDYYGIPTHGVPAMRSKIDPILEARQKYAYGPQHDYLDHPDVIGWTREGDSSHPKSGLATLITHGPGGSKRMYAGLKNAGETWYDITGNRSDTVKIGSDGWGEFHVNDGSVSIYVQK

SEQ ID NO: 28212 - protein, 485 aa, Bacillus sp.
HHNGTNGTMMQYFEWYLPNDGNHWNRLNSDASNLKSKGITAVWIPPAWKGASQNDVGYGAYDLYDLGEFNQKGTVRTKYGTRSQLQAAVTSLKNNGIQVYGDVVMNHKGGADATEMVRAVEVNPNNRNQEVTGEYTIEAWTRFDFPGRGNTHSSFKWRWYHFDGVDWDQSRRLNNRIYKFRGHGKAWDWEVDTEFGNYDYLMYADYDMDHPEVVNEFRNWGVWYTNTLGLDGFRIDAVKHIKYSFTRDWINHVRSATGKNMFAVAEFWKNDLGAIENYLQKTNWNHSVFDVPLHYNLYNASKSGGNYDMRNIFNGTVVQRHPSHAVTFVDNHDSQPEEALESFVEEWFKPLAYALTLTREQGYPSVFYGDYYGIPTHGVPAMRSKIDPILEARQKYAYGPQHDYLDHPDVIGWTREGDSSHPKSGLATLITDGPGGSKRMYAGLKNAGETWYDITGNRSDTVKIGSDGWGEFHVNDGSVSIYVQK

SEQ ID NO: 28213 - protein, 483 aa, Bacillus sp.
HHNGTNGTMMQYFEWYLPNDGNHWNRLNSDASNLKSKGITAVWIPPAWKGASQNDVGYGAYDLYDLGEFNQKGTVRTKYGTRSQLQAAVTSLKNNGIQVYGDVVMNHKGGADATEMVRAVEVNPNNRNQEVTGEYTIEAWTRFDFPGRGNTHSSFKWRWYHFDGVDWDQSRRLNNRIYKFRGKAWDWEVDTENGFYDYLMYADIDMDHPEVVPELRNWGVWYTNTLGLDGFRIDAVKHIKYSFTRDWINHVRSATGKNMFAVAEFWKNDLGAIENYLQKTNWNHSVFDVPLHYNLYNASKSGGNYDMRNIFNGTVVQRHPSHAVTFVDNHDSQPEEALESFVEEWFKPLAYALTLTREQGYPSVFYGDYYGIPTHGVPAMRSKIDPILEARQKYAYGPQHDYLDHPDVIGWTREGDSSHPKSGLATLITDGPGGSKRMYAGLKNAGETWYDITGNRSDTVKIGSDGWGEFHVNDGSVSIYVQK

SEQ ID NO: 28214 - protein, 483 aa, Bacillus sp.
HHNGTNGTMMQYFEWYLPNDGNHWNRLNSDASNLKSKGITAVWIPPAWKAVSQNDVGYGAYDLYDLGEFNQKGTVRTKYGTRSQLQAAVTSLKNNGIQVYGDVVMNHKGGADATEMVRAVEVNPNNRNQEVTGEYTIEAWTRFDFPGRGNTHSSFKWRWYHFDGVDWDQSRRLSNRIYKFRGKAWDWEVDTEFGNYDYLMYADYDMDHPEVVNELRNWGVWYTNTLGLDGFRIDAVKHIKYSFTRDWINHVRSATGKNMFAVAEFWKNDLGAIENYLQKTNWNHSVFDVPLHYNLYNASKSGGNYDMRNIFNGTVVQAHPNHAVTFVDNHDSQPEEALESFVEEWFKPLAYALTLTREQGYPSVFYGDYYGIPTHGVPAMRSKIDPILEARQKYAYGPQHDYLDHPDVIGWTREGDSSHPKSGLATLITDGPGGSKRMYAGLKNAGETWYDITGNRSDTVKIGSDGWGEFHVNDGSVSIYVQK

SEQ ID NO: 28215 - protein, 485 aa, Bacillus sp.
HHNGTNGTMMQYFEWYLPNDGNHWNRLNSDASNLKSKGITAVWIPPAWKGASQNDVGYGAYDLYDLGEFNQKGTVRTKYGTRSQLQAAVTSLKNNGIQVYGDVVMNHKGGADATEMVRAVEVNPNNRNQEVTGEYTIEAWTRFDFPGRGNTHSSFKWRWYHFDGVDWDQSRRLNNRIYKFRGHGKAWDWEVDTEFGNYDYLMYADYDMDHPEVVNELRNWGVWYTNTLGLDGFRIDAVKHIKESFTRDWINHVRSATGKNMFAVAEFWKNDLGAIENYLQKTNWNHSVFDVPLHYNLYNASKSGGNYDMRNIFNGTVVQRHPSHAVTFVDNHDSQPEEALESFVEEWFKPLAYALTLTREQGYPSVFYGDYYGIPTHGVPAMRSKIDPILEARQKYAYGPQHDYLDHPDVIGWTREGDSSHPKSGLATLITDGPGGSKRMYAGLKNAGETWYDITGNRSDTVKIGSDGWGEFHVNDGSVSIYVQK

SEQ ID NO: 28216 - protein, 485 aa, Bacillus sp.
HHNGTNGTMMQYFEWYLPNDGNHWNRLNSDASNLKSKGITAVWIPPAWKGASQNDVGYGAYDLYDLGEFNQKGTVRTKYGTRSQLQAAVTSLKNNGIQVYGDVVMNHKGGADATEMVRAVEVNPNNRNQEVTGEYTIEAWTRFDFPGRGNTHSSFKWRWYHFDGVDWDQSRNVNNRIYKFRGHGKAWDWEVDTEFGNYDYLMYADYDMDHPEVVNELRNWGVWYTNTLGLDGFRIDAVKHIKYSFTRDWINHVRSATGKNMFAVAEFWKNDLGAIENYLQKTNWNHSVFDVPLHYNLYNASKSGGNYDMRNIFNGTVVQRHPSHAVTFVDNHDSQPEEALESFVDEWFKPLAYALTLTREQGYPSVFYGDYYGIPTHGVPAMRSKIDPILEARQKYAYGPQHDYLDHPDVIGWTREGDSSHPKSGLATLITDGPGGSKRMYAGLKNAGETWYDITGNRSDTVKIGSDGWGEFHVNKSSVSIYVQK

SEQ ID NO: 28217 - protein, 485 aa, Bacillus sp.
HHNGTNGTMMQYFEWYLPNDGNHWNRLNSDASNLKSKGITAVWIPPAWKAASQNDVGYGAYDLYDLGEFNQKGTVRTKYGTRSQLQAAVTSLKNNGIQVYGDVVMNHKGGADATEMVRAVEVNPNNRNQEVTGEYTIEAWTRFDFPGRGNTHSSFKWRWYHFDGVDWDQSRDLTNRIYKFRGHGKAWDWEVDTEFGNYDYLMYADYDMDHPEVVNELRNWGVWYTNTLGLDGFRIDAVKHIKYSFTRDWINHVRSATGKNMFAVAEFWKNDLGAIENYLQKTNWNHSVFDVPLHYNLYNASKSGGNYDMRNIFNGTVVQRHPSHAVTFVDNHDSQPEEALESFVDPWFKPLAYALTLTREQGYPSVFYGDYYGIPTHGVPAMRSKIDPILEARQKYAYGPQHDYLDHPDVIGWTREGDSSHPKSGLATLITDGPGGSKRMYAGLKNAGETWYDITGNRSDTVKIGSDGWGEFHVNGGSVSIYVQK

SEQ ID NO: 28218 - protein, 485 aa, Bacillus sp.
HHNGTNGTMMQYFEWYLPNDGNHWNRLNSDASNLKSKGITAVWIPPAWKGASQNDVGYGAYDLYDLGEFNQKGTVRTKYGTRSQLQAAVTSLKNNGIQVYGDVVMNHKGGADATEMVRAVEVNPNNRNQEVTGEYTIEAWTRFQFPGRGNTHSSFKWRWYHFDGVDWDQSRRLNNRIYKFRGHGKAWDWEVDTEFGNYDYLMYADYDMDHPEVVNELRNWGVWYTNTLGLDGFRIDAVKHIKYSFTRDWINHVRSATGKNMFAVAEFWKNDLGAIENYLQKTNWNHSVFDVPLHYNLYNASKSGGNYDMRNIFNGTVVQRHPSHAVTFVDNHDSQPEEALESFVEEWFKPLAYALTLTREQGYPSVFYGDYYGIPTHGVPAMRSKIDPILEARQKYAYGPQHDYLDHPDVIGWTREGDSSHPKSGLATLITDGPGGSKRMYAGLKNAGETWYDITGNRSDTVKIGSDGWGEFHVNDGSVSIYVQK

SEQ ID NO: 28219 - protein, 485 aa, Bacillus sp.
HHNGTNGTMMQYFEWYLPNDGNHWNRLNSDASNLKSKGITAVWIPPAWKGASQNDVGYGAYDLYDLGEFNQKGTVRTKYGTRSQLQAAVTSLKNNGIQVYGDVVMNHKGGADATEMVRAVEVNPNNRHQEVTGEYTIEAWTRFDFPGRGNTHSSFKWRWYHFDGVDWDQSRRLNNRIYKFRGHGKAWDWEVDTEFGNYDYLMYADYDMDHPEVVNELRNWGVWYTNTLGLDGFRIDAVKHIKYSFTRDWINHVRSATGKNMFAVAEFWKNDLGAIENYLQKTNWNHSVFDVPLHYNLYNASKSGGNYDMRNIFNGTVVQRHPSHAVTFVDNHDSQPEEALESFVEEWFKPLAYALTLTREQGYPSVFYGDYYGIPTHGVPAMRSKIDPILEARQKYAYGPQHDYLDHPDVIGWTREGDSSHPKSGLATLITDGPGGSKRMYAGLKNAGETWYDITGNRSDTVKIGSDGWGEFHVNDGSVSIYVQK

SEQ ID NO: 28220 - protein, 485 aa, Bacillus sp.
HHNGTNGTMMQYFEWYLPNDGNHWNRLNSDASNLKSKGITAVWIPPAWKAASQNDVGYGAYDLYDLGEFNQKGTVRTKYGTRSQLQAAVTSLKNNGIQVYGDVVMNHKGGADLTEMVDAVEVNPNNRNQEVTGEYTIEAWTRFDFPGRGNTHSSFKWRWYHFDGVDWDQSRQLNNRIYKFRGHGKAWDWEVDTEFGNYDYLMYADYDMDHPEVVNELRNWGVWYTNTLGLDGFRIDAVKHIKYSFTRDWINHVRSATGKNMFAVAEFWKNDLGAIENYLQKTNWNHSVFDVPLHYNLYNASKSGGNYDMRNIFNGTVVQRHPSHAVTFVDNHDSQPEEALESFVEEWFKPLAYALTLTREQGYPSVFYGDYYGIPTHGVPAMRSKIDPILEARQKYAYGPQHDYLDHPDVIGWTREGDSSHPKSGLATLITDGPGGSKRMYAGLKNAGETWYDITGNRSDTVKIGSDGWGEFHVNDGSVSIYVQK

SEQ ID NO: 28221 - protein, 485 aa, Bacillus sp.
HHNGTNGTMMQYFEWYLPNDGNHWNRLNSDASNLKSKGITAVWIPPAWKGASQNDVGYGAYDLYDLGEFNQKGTVRTKYGTRSQLQAAVTSLKNNGIQVYGDVVMNHKGGADATEMVRAVEVNPNNRNQEVTGEYTIEAWTRFDFPGRGNTHSSFKWRWYHFDGVDWDQSRRLNNRIYKFRGHGKAWDWEVDTEFGNYDYLMYADYDMDHPEVVNELRNWGVWYTNTLGLDGFRIDAVKHIKYSFTRDWINHVRSATGKNMFAVAEFWKNDLGAIENYLQKTNWNHSVFDVPLHYNLYNASKSVGNYDMRNIFNGTVVQRHPSHAVTFVDNHDSQPEEALESFVEEWFKPLAYALTLTREQGYPSVFYGDYYGIPTHGVPAMRSKIDPILEARQKYAYGPQHDYLDHPDVIGWTREGDSSHPKSGLATLITDGPGGSKRMYAGLKNAGETWYDITGNRSDTVKIGSDGWGEFHVNDGSVSIYVQK

SEQ ID NO: 28222 - protein, 485 aa, Bacillus sp.
HHNGTNGTMMQYFEWYLPNDGNHWNRLNSDASNLKSKGITAVWIPPAWKGASQNDVGYGAYDLYDLGEFNQKGTVRTKYGTRSQLQAAVTSLKNNGIQVYGDVVMNHKGGADATEMVRAVEVNPNNRQQEVTGDYTIEAWTRFDFPGRGNTHSSFKWRWYHFDGVDWDQSRRLNNRIYLFRGHGKAWDWEVDTEFGNYDYLMYADYDMDHPEVVNELRNWGVWYTNTLGLDGFRIDAVKHIKYSFTRDWINHVRSATGKNMFAVAEFWKNDLGAIENYLQKTNWNHSVFDVPLHYNLYNASKSGGNYDMRNIFNGTVVQRHPSHAVTFVDNHDSQPEEALESFVEEWFKPLAYALTLTREQGYPSVFYGDYYGIPTHGVPAMRSKIDPILEARQKYAYGPQHDYLDHPDVIGWTREGDSSHPKSGLATLITDGPGGSKRMYAGLKNAGETWYDITGNRSDTVKIGSDGWGEFHVNDGSVSIYVQK

SEQ ID NO: 28223 - protein, 485 aa, Bacillus sp.
HHNGTNGTMMQYFEWYLPNDGNHWNRLNSDASNLKSKGITAVWIPPAWKGASQNDVGYGAYDLYDLGEFNQKGTVRTKYGTRSQLQAAVTSLKNNGIQVYGDVVMNHKGGADATEMVRAVEVNPNNRNQEVTGEYTIEAWTRFDFPGRGNTHSSFKWRWYHFDGVDWDQSRRLNNRIYKFRGHGKAWDWEVDTEFGNYDYLMYADYDMDHPEVVNELRNWGVWYTNTLGLDGFRIDAVKHIKYSFTRDWINHVRSATGKNMFAVAEFWKNDLGAIENYLQKTNWNHSVFDVPLHYNLYKASKSGGNYDMRNIFNGTVVQRHPSHAVTFVDNHDSQPEEALESFVEEWFKPLAYALTLTREQGYPSVFYGDYYGIPTHGVPAMRSKIDPILEARQKYAYGPQHDYLDHPDVIGWTREGDSSHPKSGLATLITDGPGGSKRMYAGLKNAGETWYDITGNRSDTVKIGSDGWGEFHVNDGSVSIYVQK

SEQ ID NO: 28224 - protein, 485 aa, Bacillus sp.
HHNGTNGTMMQYFEWYLPNDGNHWNRLNSDASNLKSKGITAVWIPPAWKGASQNDVGYGAYDLYDLGEFNQKGTVRTKYGTRSQLQAAVTSLKNNGIQVYGDVVMNHKGGADATEMVRAVEVNPNNRNQEVTGEYTIEAWTRFDFPGRGNTHSSFKWRWYHFDGVDWDQSRRLNNRIYKFRGHGKAWDWEVDTEFGNYDYLMYADYDMDHPEVVNELRNWGVWYTNTLGLDGFRIDAVKHIKYSFTRDWINHVRSATGKNMFAVAEFWKNDLGAIENYLQKTNWNHSVFDVPLHYNLYNASKSGGNYDMRNIFNGTVVQRHPSHAVTFVDNHDSQPEEALESFVEEWFKPLAYALTLTREQGYPSVFYGDYYGIPTHGVPAMRSKIDPILEARQKYAYGPQHDYLDHPDVIGWTREGDSSHPKSGLATLITDGPGGSKRMYAGLKNAGETWYDITGNRSDTVKIGSDGWGEFHVNDQSVSIYVQK

SEQ ID NO: 28225 - protein, 485 aa, Bacillus sp.
HHCGTNGTMMQYFEWYLPNDGNHWNRLNSDASNLKSKGITAVWIPPAWKGASQNDVGYGAYDLYDLGEFNQKGTVRTKYGTRSQLQAAVTSLKNNGIQVYGDVVMNHKGGADATEMVRAVEVNPNNRNQEVTGEYTIEAWTRFDFPGRGNTHSSFKWRWYHFDGVDWDQSRRLNNRIYKFRGHGKAWDWEVDTEFGNYDYLMYADYDMDHPEVVNELRNWGVWYTNTLGLDGFRIDAVKHIKYSFTRDWINHVRSATGKNMFAVAEFWKNDLGAIENYLQKTNWNHSVFDVPLHYNLYNASKSGGNYDMRNIFNGTVVQRHPSHAVTFVDNHDSQPEEALESFVEEWFKPLAYALTLTREQGYPSVFYGDYYGIPTHGVPAMRSKIDPILEARQKYAYGPQHDYLDHPDVIGWTREGDSSHPKSGLATLITDGPGGSKRMYAGLKNAGETWYDITGNRSDTVKIGSDGWGEFHVNDGSVSIYVQK

SEQ ID NO: 28226 - protein, 483 aa, Synthetic construct
HHNGTNGTMMQYFEWYLPNDGNHWNRLNSDASNLKSKGITAVWIPPAWKGASQNDVGYGAYDLYDLGEFNQKGTVRTKYGTRSQLQAAVTSLKNNGIQVYGDVVMNHKGGADATEMVRAVEVNPNNRNQEVTGEYTIEAWTRFDFPGRGNTHSSFKWRWYHFDGVDWDQSRRLNNRIYKFRGKAWDWEVDTENGNYDYLMYADYDMDYPEVVNEQRNWGVWYTNTLGLDGFRIDAVKHIKYSFTRDWINHVRSATGKNMFAVAEFWKNDLGAIENYLQKTNWNHSVFDVPLHYNLYNASKSGGNYDMRNIFNGTVVQRHPSHAVTFVDNHDSQPEEALESFVEEWFKPLAYALTLTREQGYPSVFYGDYYGIPTHGVPAMRSKIDPILEARQKYAYGPQHDYLDHPDVIGWTREGDSSHPKSGLATLITDGPGGSKRMYAGLKNAGETWYDITGNRSDTVKIGSDGWGEFHVNDGSVSIYVQK

SEQ ID NO: 28227 - protein, 485 aa, Bacillus sp.
HHNGTNGTMMQYFEWYLPNDGNHWNRLNSDASNLKSKGITAVWIPPAWKGASQNDVGYGAYDLYDLGEFNQKGTVRTKYGTRSQLQAAVTSLKNNGIQVYGDVVMNHKGGADATEMVRAVEVNPNNRNQEVTGEYTIEAWTRFDFPGRGNTHSSFKWRWYHFDGVDWDQSRRLNNRIYKFRGHGKAWDWEVDTEFGNYDYLMYADYDMDHWEVVNELRNWGVWYTNTLGLDGFRIDAVKHIKYSFTRDWINHVRSATGKNMFAVAEFWKNDLGAIENYLQKTNWNHSVFDVPLHYNLYNASKSGGNYDMRNIFNGTVVQRHPSHAVTFVDNHDSQPEEALESFVEEWFKPLAYALTLTREQGYPSVFYGDYYGIPTHGVPAMRSKIDPILEARQKYAYGPQHDYLDHPDVIGWTREGDSSHPKSGLATLITDGPGGSKRMYAGLKNAGETWYDITGNRSDTVKIGSDGWGEFHVNDGSVSIYVQK

SEQ ID NO: 28228 - protein, 485 aa, Bacillus sp.
HHNGTNGTMMQYFEWYLPNDGNHWNRLNSDASNLKSKGITAVWIPPAWKGASQNDVGYGAYDLYDLGEFNQKGTVRTKYGTRSQLQAAVTSLKNNGIQVYGDVVMNHKGGADATEMVRAVEVNPNNRNQEVTGEYTIEAWTRFDFPGRGNTHSSFKWRWYHFDGVDWDQSRRLNNRIYKFRGHGKAWDWEVDTEFGNYDYLMYADYDMDHPEVVNELRNWGVWYTNTLGLDGFRIDAVKHIKYSFTRDWINHVRSATGKNMFAVAEFWKNDLGAIENYLQKTNWNHSVFDVPLHYNLYNASKSGGNYDMRNIFNGTVVQAHPSQAVTFVDNHDSQPEEALESFVEEWFKPLAYALTLTREQGYPSVFYGDYYGIPTHGVPAMRSKIDPILEARQKYAYGPQHDYLDHPDVIGWTREGDSSHPKSGLATLITDGPGGSKRMYAGLKNAGETWYDITGNRSDTVKIGSDGWGEFHVNDGSVSIYVQK

SEQ ID NO: 28229 - protein, 485 aa, Bacillus sp.
HHNGTNGTMMQYFEWYLPNDGNHWNRLNSDASNLKSKGITAVWIPPAWKAASQNDVGYGAYDLYDLGEFNQKGTVRTKYGTRSQLQAAVTSLKNNGIQVYGDVVMNHKGGADATEMVRAVEVNPNNRNQEVTGEYTIEAWTRFDFPGRGNTHSSFKWRWYHFDGVDWDQSRNLTNRIYKFRGHGKAWDWEVDTEFGNYDYLMYADYDMDHPEVVNELRNWGVWYTNTLGLDGFRIDAVKHIKYSFTRDWINHVRSATGKNMFAVAEFWKNDLGAIENYLQKTNWNHSVFDVPLHYNLYNASKSGGNYDMRNIFNGTVVQRHPSHAVTFVDNHDSQPEEALESFVEEWFKPLAYALTLTREQGYPSVFYGDYYGIPTHGVPAMRSKIDPILEARQKYAYGPQHDYLDHPDVIGWTREGDSSHPKSGLATLITDGPGGSKRMYAGLKNAGETWYDITGNRSDTVKIGSDGWGEFHVNDGSVSIYVQK

SEQ ID NO: 28230 - protein, 483 aa, Bacillus sp.
HHNGTNGTMMQYFEWYLPNDGNHWNRLNSDASNLKSKGITAVWIPPAWKGASQNDVGYGAYDLYDLGEFNQKGTVRTKYGTRSQLQAAVTSLKNNGIQVYGDVVMNHKGGADATEMVRAVEVNPNNRNQEVTGEYTIEAWTRFDFPGRGNTHSSFKWRWYHFDGVDWDQSRRLNNRIYKFRGKAWDWEVDTEFGNYDYLMYADYDMDHPEVVNELRNWGVWYTNTLGLDGFRIDAVKHQKYSFTRDWINHVRSATGKNMFAVAEFWKNDLGAIENYLQKTNWNHSVFDVPLHYNLYNASKSGGNYDMRNIFNGTVVQRHPSHAVTFVDNHDSQPEEALESFVEEWFKPLAYALTLTREQGYPSVFYGDYYGIPTHGVPAMRSKIDPILEARQKYAYGPQHDYLDHPDVIGWTREGDSSHPKSGLATLITDGPGGSKRMYAGLKNAGETWYDITGNRSDTVKIGSDGWGEFHVNDGSVSIYVQK

SEQ ID NO: 28231 - protein, 483 aa, Bacillus sp.
HHNGTNGTMMQYFEWYLPNDGNHWNRLNSDASNLKSKGITAVWIPPAWKGASQNDVGYGAYDLYDLGEFNQKGTVRTKYGTRSQLQAAVTSLKNNGINVYGDVVMNHKGGADATEMVRAVEVNPNNRNQEVTGEYTIEAWTRFDFPGRGNTHSSFKWRWYHFDGVDWDQSRRLNNRIYKFRGKAWDWEVDTEFGNYDYLMYADYDMDHPEVVNELRNWGVWYTNTLGLDGFRIDAVKHIKYSFTRDWINHVRSATGKNMFAVAEFWKNDLGAIENYLQKTNWNHSVFDVPLHYNLYNASKSVGNYDMRNIFNGTVVQAHPMHAVTFVDNHDSQPEEALESFVEEWFKPLAYALTLTREQGYPSVFYGDYYGIPTHGVPAMRSKIDPILEARQKYAYGPQHDYLDHPDVIGWTREGDSSHPKSGLATLITDGPGGSKRMYAGLKNAGETWYDITGNRSDTVKIGSDGWGEFHVNDGSVSIYVQK

SEQ ID NO: 28232 - protein, 483 aa, Bacillus sp.
HHNGTNGTMMQYFEWYLPNDGNHWNRLNSDASNLKSKGITAVWIPPAWKGASQNDVGYGAYDLYDLGEFNQKGTVRTKYGTRSQLQAAVTSLKNNGIQVYGDVVMNHKGGADATEMVRAVEVNPNNRMQEVTGEYTIEAWTRFDFPGRGNTHSSFKWRWYHFDGVDWDQSRRLNNRIYKFRGKAWDWEVDTEFGNYDYLMYADYDMDHPEVVNELRNWGVWYTNTLGLDGFRIDAVKHIKYSFTRDWINHVRSATGKNMFAVAEFWKNDLGAIENYLQKTNWNHSVFDVPLHYNLYNASKSGGNYDMRNIFNGTVVQRHPSHAVTFVDNHDSQPEEALESFVEEWFKPLAYALTLTREQGYPSVFYGDYYGIPTHGVPAMRSKIDPILEARQKYAYGPQHDYLDHPDVIGWTREGDSSHPKSGLATLITDGPGGSKRMYAGLKNAGETWYDITGNRSDTVKIGSDGWGEFHVNDGSVSIYVQK

SEQ ID NO: 28233 - protein, 483 aa, Bacillus sp.
HHNGTNGTMMQYFEWYLPNDGNHWNRLNSDASNLKSKGITAVWIPPAWKAVSQNDVGYGAYDLYDLGEFNQKGTVRTKYGTRSQLQAAVTSLKNNGIQVYGDVVMNHKGGADATEMVRAVEVNPNNRNQEVTGEYTIEAWTRFDFPGRGNTHSSFKWRWYHFDGVDWDQSREFTNRIYKFRGKAWDWEVDTEFGNYDYLMYVDYDMDHPEVVNELRNWGVWYTNTLGLDGFRIDAVKHIKYSFTRDWINHVRSATGKNMFAVAEFWKNDLGAIENYLQKTNWNHSVFDVPLHYNLYNASKSGGNYDMRNIFNGTVVQRHPSHAVTFVDNHDSQPEEALESFVDPWFKPLAYALTLTREQGYPSVFYGDYYGIPTHGVPAMRSKIDPILEARQKYAYGPQHDYLDHPDVIGWTREGDSSHPKSGLATLITDGPGGSKRMYAGLKNAGETWYDITGNRSDTVKIGSDGWGEFHVNGGSVSIYVQK

SEQ ID NO: 28234 - protein, 485 aa, Synthetic construct
HHNGTNGTMMQYFEWYLPNDGNHWNRLNSDASNLKSKGITAVWIPPAVKGASQNDVGYGVYDLYDLGEFNQKGTVRTKYGTRSQLQAAVTSLKNNGIQVYGDVVMNHKGGADATEMVRAVEVNPNNRNQEVTGEYTIEAWTRFDFPGRGNTHSSFKWRWYHFDGVDWDQSRRLNNRIYKFRGHGKAWDWEVDTENGNYDYLMYADIDMDHPEVVNELRNWGVWYTNTLGLDGFRIDAVKHIKYSFTRDWINHVRSATGKNMFAVAEFWKNDLGAIENYLQKTNWNHSVFDVPLHYNLYNASKSGGNYDMRNIFNGTVVQRHPSHAVTFVDNHDSQPEEALESFVEEWFKPLAYALTLTREQGYPSVFYGDYYGIPTHGVPAMRSKIDPILEARQKYAYGPQHDYLDHPDVIGWTREGDSSHPKSGLATLITDGPGGSKRMYAGLKNAGETWYDITGNRSDTVKIGSDGWGEFHVNDGSVSIYVQK

SEQ ID NO: 28235 - protein, 483 aa, Synthetic construct
HHNGTNGTMMQYFEWYLPNDGNHWNRLNSDASNLKSKGITAVWIPPAWKGASQNDVGYGAYDVYDLGEFNQKGTVRTKYGTRSQLQAAVTSLKNNGIQVYGDVVMNHKGGADATEMVRAVEVNPNNRNQEVTGEYTIEAWTRFDFPGRGNTHSSFKWRWYHFDGVDWDQSRRLNNRIYKFRGKAWDWEVDTENGNYDYLMYADYDMDHPEVVNEIRNWGVWYTNTLGLDGFRIDAVKHIKYSFTRDWINHVRSATGKNMFAVAEFWKNDLGAIENYLQKTNWNHSVFDVPLHYNLYNASKSGGNYDMRNIFNGTVVQRHPSHAVTFVDNHDSQPEEALESFVEEWFKPLAYALTLTREQGYPSVFYGDYYGIPTHGVPAMRSKIDPILEARQKYAYGPQHDYLDHPDVIGWTREGDSSHPKSGLATLITDGPGGSKRMYAGLKNAGETWYDITGNRSDTVKIGSDGWGEFHVNDGSVSIYVQK

SEQ ID NO: 28236 - protein, 483 aa, Bacillus sp.
HHNGTNGTMMQYFEWYLPNDGNHWNRLNSDASNLKSKGITAVWIPPAWKATSQNDVGYGAYDLYDLGEFNQKGTVRTKYGTRSQLQAAVTSLKNNGIQVYGDVVMNHKGGADATEMVRAVEVNPNNRNQEVTGEYTIEAWTRFDFPGRGNTHSSFKWRWYHFDGVDWDQSRDLNNRIYKFRGKAWDWEVDTEFGNYDYLMYADYDMDHPEVVNELRNWGVWYTNTLGLDGFRIDAVKHIKYSFTRDWINHVRIATGKNMFAVAEFWKNDLGAIENYLQKTNWNHSVFDVPLHYNLYNASKSGGNYDMRNIFNGTVVQRHPSHAVTFVDNHDSQPEEALESFVDEWFKPLAYALTLTREQGYPSVFYGDYYGIPTHGVPAMRSKIDPILEARQKYAYGPQHDYLDHPDVIGWTREGDSSHPKSGLATLITDGPGGSKRMYAGLKNAGETWYDITGNRSDTVKIGSDGWGEFHVNDQSVSIYVQK

SEQ ID NO: 28237 - protein, 485 aa, Bacillus sp.
HHNGTNGTMMQYFEWYLPNDGNHWNRLNSDASNLKSKGITAVWIPPAWKGASQNDVGYGAYDLYDLGEFNQKGTVRTKYGTRSQLQAAVTSLKNNGIQVYGDVVMNHKGGADATEMVRAVEVNPNNRNQEVTGEYTIEAWTRFDFPGRGNTHSSFKWRWYHFDGVDWDQSRKLNNRIYKFRGHGKAWDWEVDTEFGNYDYLMYVDYDMDHPEVVNELRNWGVWYTNTLGLDGFRIDAVKHIKYSFTRDWINHVRSATGKNMFAVAEFWKNDLGAIENYLQKTNWNHSVFDVPLHYNLYNASKSGGNYDMRNIFNGTVVQRHPSHAVTFVDNHDSQPEEALESFVDPWFKPLAYALTLTREQGYPSVFYGDYYGIPTHGVPAMRSKIDPILEARQKYAYGPQHDYLDHPDVIGWTREGDSSHPKSGLATLITDGPGGSKRMYAGLKNAGETWYDITGNRSDTVKIGSDGWGEFHVNGGSVSIYVQK

SEQ ID NO: 28238 - protein, 483 aa, Bacillus sp.
HHNGTNGTMMQYFEWYLPNDGNHWNRLNSDASNLKSKGITAVWIPPAWKGASQNDVGYGAYDLYDLGEFNQKGTVRTKYGTRSQLQAAVTSLKNNGIQVYGDVVMNHKGGADATEMVRAVEVNPNNRNQEVTGEYTIEAWTRFDFPGRGNTHSSFKWRWYHFDGVDWDQSRRLNNRIYKFRGKAWDWEVDTEFGNYDYLMYADYDMDHPEVVNELRNWGVWYTNTLGLDGFRIDAVKHIKTSFTRDWINHVRSATGKNMFAVAEFWKNDLGAIENYLQKTNWNHSVFDVPLHYNLYNASKSGGNYDMRNIFNGTVVQRHPSHAVTFVDNHDSQPEEALESFVEEWFKPLAYALTLTREQGYPSVFYGDYYGIPTHGVPAMRSKIDPILEARQKYAYGPQHDYLDHPDVIGWTREGDSSHPKSGLATLITDGPGGSKRMYAGLKNAGETWYDITGNRSDTVKIGSDGWGEFHVNDGSVSIYVQK

SEQ ID NO: 28239 - protein, 483 aa, Bacillus sp.
HHNGTNGTMMQYFEWYLPNDGNHWNRLNSDASNLKSKGITAVWIPPAWKGASQNDVGYGAYDLYDLGEFNQKGTVRTKYGTRSQLQAAVTSLKNNGIQVYGDVVMNHKGGADATEMVRAVEVNPNNRNQEVTGEYTIEAWTRFDFPGRGNTHSSFKWRWYHFDGVDWDQSRRLNNRIYKFRGKAWDWEVDTEFGNYDYLMYADYDMDHPEVVNELRNWGVWYTNTLGLDGFRIDAVKHIKYSFTRDWINHVRSATGKNMFAVAEFWKNDLGAIENYLQKTNWNHSVFDVPLHYNLYNASKSGGNYDMRNIFNGTVVQRHPSWAVTFVDNHDSQPEEALESFVEEWFKPLAYALTLTREQGYPSVFYGDYYGIPTHGVPAMRSKIDPILEARQKYAYGPQHDYLDHPDVIGWTREGDSSHPKSGLATLITDGPGGSKRMYAGLKNAGETWYDITGNRSDTVKIGSDGWGEFHVNDGSVSIYVQK

SEQ ID NO: 28240 - protein, 483 aa, Bacillus sp.
HHNGTNGTMMQYFEWYLPNDGNHWNRLNSDASNLKSKGITAVWIPPAWKGASQNDVGYGAYDLYDLGEFNQKGTVRTKYGTRSQLQAAVTSLKNNGIQVYGDVVMNHKGGADATEMVRAVEVNPNNRNQEVTGEYTIEAWTRFDFPGRGNTHSSFKWRWYHFDGVDWDQSRRLNNRIYKFRGKAWDWEVDTENGNYDYLMYADIDFDYPEVVNELRQWGVWYTNTLGLDGFRIDAVKHIKYSFTRDWINHVRSATGKNMFAVAEFWKNDLGAIENYLQKTNWNHSVFDVPLHYNLYNASKSGGNYDMRNIFNGTVVQRHPSHAVTFVDNHDSQPEEALESFVEEWFKPLAYALTLTREQGYPSVFYGDYYGIPTHGVPAMRSKIDPILEARQKYAYGPQHDYLDHPDVIGWTREGDSSHPKSGLATLITDGPGGSKRMYAGLKNAGETWYDITGNRSDTVKIGSDGWGEFHVNDGSVSIYVQK

SEQ ID NO: 28241 - protein, 483 aa, Synthetic construct
HHNGTNGTMMQYFEWYLPNDGNHWNRLNSDASNLKSKGITAVWIPPAWKGASQNDVGYGAYDLYDLGEFNQKGTVRTKYGTRSQLQAAVTSLKNNGIQVYGDVVMNHKGGADATEMVRAVEVNPNNRNQEVTGEYTIEAWTRFDFPGRGNTHSSFKWRWYHFDGVDWDQSRRLNNRIYKFRGKAWDWEVDTEFGNYDYLMYADYDMDYPEVVNELRNWGVWYTNTLGLDGFRIDAVKHIKYSFTRDWINHVRSATGKNMFAVAEFWKNDLGAIENYLQKTNWNHSVFDVPLHYNLYNASKSGGNYDMRNIFNGTVVQRHPSHAVTFVDNHDSQPEEALESFVEEWFKPLAYALTLTREQGYPSVFYGDYYGIPTHGVPAMRSKIDPILEARQKYAYGPQHDYLDHPDVIGWTREGDSSHPKSGLATLITDGPGGSKRMYAGLKNAGETWYDITGNRSDTVKIGSDGWGEFHVNDGSVSIYVQK

SEQ ID NO: 28242 - protein, 483 aa, Bacillus sp.
HHNGTNGTMMQYFEWYLPNDGNHWNRLNSDASNLKSKGITAVWIPPAWKGASQNDVGYGAYDLYDLGEFNQKGTVRTKYGTRSQLQAAVTSLKNNGIQVYGDVVMNHKGGADATEMVRAVEVNPNNRNQEVTGEYTIEAWTRFDFPGRGNTHSSFKWRWYHFDGVDWDQSRRLNNRIYKFRGKAWDWEVDTEFGNYDYLMYADYDMDHPEVVNELRNWGVWYTNTLGLDGFRIDAVKHIKYSFTRDWINHVRSATGKNMFAVAEFWKNDLGAIENYLQKTNWNHSVFDVPLHYNLYNASKSGGNYDMRNIFNGTVVQRHPSHAVTFVDNHDSQPEEALESFVEEWFKPLAYALTLTREQGYPSVFYGDYYGIPTHGVPAMRSKIDPILAARQKYAYGPQHDYLDHPDVIGWTREGDSSHPKSGLATLITDGPGGSKRMYAGLKNAGETWYDITGNRSDTVKIGSDGWGEFHVNDGSVSIYVQK

SEQ ID NO: 28243 - protein, 485 aa, Synthetic construct
HHNGTNGTMMQYFEWYLPNDGNHWNRLNSDASNLKSKGITAVWIPPAWKGASQNDVGYGAYDLYDLGEFNQKGTVRTKYGTRSQLQAAVTSLKNNGIQVYGDVVMNHKGGADATEMVRAVEVNPNNRNQEVTGEYTIEAWTRFDFPGRGNTHSSFKWRWYHFDGVDWDQSRRLNNRIYKFRGHGKAWDWEVDTENGNYDYLMYADFDFDHPEVVNEIRNWGVWYTNTLGLDGFRIDAVKHIKYSFTRDWINHVRSATGKNMFAVAEFWKNDLGAIENYLQKTNWNHSVFDVPLHYNLYNASKSGGNYDMRNIFNGTVVQRHPSHAVTFVDNHDSQPEEALESFVEEWFKPLAYALTLTREQGYPSVFYGDYYGIPTHGVPAMRSKIDPILEARQKYAYGPQHDYLDHPDVIGWTREGDSSHPKSGLATLITDGPGGSKRMYAGLKNAGETWYDITGNRSDTVKIGSDGWGEFHVNDGSVSIYVQK

SEQ ID NO: 28244 - protein, 483 aa, Synthetic construct
HHNGTNGTMMQYFEWYLPNDGNHWNRLNSDASNLKSKGITAVWIPPAWKGTSQADVGYGAYDLYDLGEFNQKGTVRTKYGTRSQLQAAVTSLKNNGIQVYGDVVMNHKAGADATEMVTAVEVNPNNRNQEVTGDYTIEAYTRFDFPGRGNTHSSFKWRWYHFDGVDWDQSRSLNNRIYKFRGKAWDWPVDTENGNYDYLMYADLDMDHPEVVNELRNWGVWYTNTLGLDGFRIDAVKHIKFSFTRDWINHVRSATGKNMFAVAEYWKNDLGAIENYLNFTNWNHSVFDVPLHYNLYAASNSGGNYDMRNIFNGTVVQKHPSHAVTFVDNHDTQPEESLESFVEEWFKPLAYALTLTREQGYPSVFYGDYYGIPTHGVPAMRSKIDPILEARQKYAYGPQHDYLDHPDIIGWTREGDSSHPKSGLATLITDGPGGSKRMYAGLKNAGETWYDITGNRSDTVKIGSDGWGTFHVNKGSVSIYVQK

SEQ ID NO: 28245 - protein, 485 aa, Bacillus sp.
HHNGTNGTMMQYFEWYLPNDGNHWNRLNSDASNLKSKGITAVWIPPAWKGASQNDVGYGAYDLYDLGEFNQKGTVRTKYGTRSQLQAAVTSLKNNGIQVYGDVVMNHKGGADATEMVRAVEVNPNNRNQEVTGEYTIEAWTRFDFPGRGNTHSSFKWRWYHFDGVDWDQSRRLNNRIYKFRGHGKAWDWEVDTEFGNYDYLMYADYDMDHPEVVNELRNWGVWYTNTLGLDGFRIDAVKHIKYSFTRDWINHVRSATGKNMFAVAEFWKNDLGAIENYLQKTNWNHSVFDVPLHYNLYNASKSGGNYDMRNIFNGTVVQRHPSHAVTFVDNHDSQPEEALESFVEEWFKPLAYALTLTREQGYSSVFYGDYYGIPTHGVPAMRSKIDPILEARQKYAYGPQHDYLDHPDVIGWTREGDSSHPKSGLATLITDGPGGSKRMYAGLKNAGETWYDITGNRSDTVKIGSDGWGEFHVNDGSVSIYVQK

SEQ ID NO: 28246 - protein, 485 aa, Bacillus sp.
HHNGTNNTMMQYFEWYLPNDGNHWNRLNSDASNLKSKGITAVWIPPAWKGASQNDVGYGAYDLYDLGEFNQKGTVRTKYGTRSQLQAAVTSLKNNGIQVYGDVVMNHKGGADATEMVRAVEVNPNNRNQEVTGEYTIEAWTRFDFPGRGNTHSSFKWRWYHFDGVDWDQSRRLNNRIYKFRGHGKAWDWEVDTEFGNYDYLMYADYDMDHPEVVNELRNWGVWYTNTLGLDGFRIDAVKHIKYSFTRDWINHVRSATGKNMFAVAEFWKNDLGAIENYLQKTNWNHSVFDVPLHYNLYNASKSGGNYDMRNIFNGTVVQMHPSHAVTFVDNHDSQPEEALESFVEEWFKPLAYALTLTREQGYPSVFYGDYYGIPTHGVPAMRSKIDPILEARQKYAYGPQHDYLDHPDVIGWTREGDSSHPKSGLATLITDGPGGSKRMYAGLKNAGETWYDITGNRSDTVKIGSDGWGEFHVNDGSVSIYVQK

SEQ ID NO: 28247 - protein, 485 aa, Bacillus sp.
HHNGTNETMMQYFEWYLPNDGNHWNRLNSDASNLKSKGITAVWIPPAWKGASQNDVGYGAYDLYDLGEFNQKGTVRTKYGTRSQLQAAVTSLKNNGIQVYGDVVMNHKGGADATEMVRAVEVNPNNRNQEVTGEYTIEAWTRFDFPGRGNTHSSFKWRWYHFDGVDWDQSRRLNNRIYKFRGHGKAWDWEVDTEFGNYDYLMYADYDMDHPEVVNELRNWGVWYTNTLGLDGFRIDAVKHIKYSFTRDWINHVRSATGKNMFAVAEFWKNDLGAIENYLQKTNWNHSVFDVPLHYNLYNASKSGGNYDMRNIFNGTVVQAHPSHAVTFVDNHDSQPEEALESFVEEWFKPLAYALTLTREQGYPSVFYGDYYGIPTHGVPAMRSKIDPILEARQKYAYGPQHDYLDHPDVIGWTREGDSSHPKSGLATLITDGPGGSKRMYAGLKNAGETWYDITGNRSDTVKIGSDGWGEFHVNDGSVSIYVQK

SEQ ID NO: 28248 - protein, 483 aa, Bacillus sp.
HHNGTNGTMMQYFEWYLPNDGNHWNRLNSDASNLKSKGITAVWIPPAWKGASQNDVGYGAYDLYDLGEFNQKGTVRTKYGTRSQLQAAVTSLKNNGIQVYGDVVMNHKGGADATEMVRAVEVNPNNRNQEVTGEYTIEAWTRFDFPGRGNTHSSFKWRWYHFDGVDWDQSRRLNNRIYKFRGKAWDWEVDTEFGNYDYLMYADYDMDHPEVVNELRNWGVWYTNTLGLDGFRIDAVKHIKYSFTRDWINHVRSATGKNMFAVAEFWKNDLGAIENYLQKTNWNHSVFDVPLHYNLYNASQSGGNYDMRNIFNGTVVQRHPSHAVTFVDNHDSQPEEALESFVEEWFKPLAYALTLTREQGYPSVFYGDYYGIPTHGVPAMRSKIDPILEARQKYAYGPQHDYLDHPDVIGWTREGDSSHPKSGLATLITDGPGGSKRMYAGLKNAGETWYDITGNRSDTVKIGSDGWGEFHVNQQSVSIYVQK

SEQ ID NO: 28249 - protein, 483 aa, Bacillus sp.
HHNGTNGTMMQYFEWYLPNDGNHWNRLNSDASNLKSKGITAVWIPPAWKGASQNDVGYGAYDLYDLGEFNQKGTVRTKYGTRSQLQAAVTSLKNNGIQVYGDVVINHKGGADATEMVRAVEVNPNNRNQEVTGEYTIEAWTRFDFPGRGNTHSSFKWRWYHFDGVDWDQSRRLNNRIYKFRGKAWDWEVDTENGNYDYLMYADIDYDHPEVVNELRIWGVWYTNTLGLDGFRIDAVKHIKYSFTRDWINHVRSATGKNMFAVAEFWKNDLGAIENYLQKTNWNHSVFDVPLHYNLYNASKSGGNYDMRNIFNGTVVQRHPSHAVTFVDNHDSQPEEALESFVEEWFKPLAYALTLTREQGYPSVFYGDYYGIPTHGVPAMRSKIDPILEARQKYAYGPQHDYLDHPDVIGWTREGDSSHPKSGLATLITDGPGGSKRMYAGLKNAGETWYDITGNRSDTVKIGSDGWGEFHVNDGSVSIYVQK

SEQ ID NO: 28250 - protein, 483 aa, Bacillus sp.
HHNGTNGTMMQYFEWYLPNDGNHWNRLNSDASNLKSKGITAVWIPPAWKGASQNDVGYGAYDLYDLGEFNQKGTVRTKYGTRSQLQAAVTSLKNNGIQVYGDVVMNHKGGADATEMVRAVEVNPNNRNQEVTGEYTIEAWTRFDFPGRGNTHSSFKWRWYHFDGVDWDQSRRLNNRIYKFRGKAWDWEVDTENGNYDYLMYADIDYDYPEVVNELRQWGVWYTNTLGLDGFRIDAVKHIKYSFTRDWINHVRSATGKNMFAVAEFWKNDLGAIENYLQKTNWNHSVFDVPLHYNLYNASKSGGNYDMRNIFNGTVVQRHPSHAVTFVDNHDSQPEEALESFVEEWFKPLAYALTLTREQGYPSVFYGDYYGIPTHGVPAMRSKIDPILEARQKYAYGPQHDYLDHPDVIGWTREGDSSHPKSGLATLITDGPGGSKRMYAGLKNAGETWYDITGNRSDTVKIGSDGWGEFHVNDGSVSIYVQK

SEQ ID NO: 28251 - protein, 483 aa, Bacillus sp.
HHNGTNGTMMQYFEWYLPNDGNHWNRLNSDASNLKSKGITAVWIPPAWKGASQNDVGYGAYDLYDLGEFNQKGTVRTKYGTRSQLQAAVTSLKNNGIQVYGDVVMNHKGGADATEMVRAVEVNPNNRNQEVTGEYTIEAWTRFDFPGRGNTHSSFKWRWYHFDGVDWDQSRDFDNRIYKFRGKAWDWEVDTEFGNYDYLMYADYDMDHPEVVNELRNWGVWYTNTLGLDGFRIDAVKHIKYSFTRDWINHVRSATGKNMFAVAEFWKNDLGAIENYLQKTNWNHSVFDVPLHYNLYNASKSGGNYDMRNIFNGTVVQRHPSHAVTFVDNHDSQPEEALESFVDPWFKPLAYALTLTREQGYPSVFYGDYYGIPTHGVPAMRSKIDPILEARQKYAYGPQHDYLDHPDVIGWTREGDSSHPKSGLATLITDGPGGSKRMYAGLKNAGETWYDITGNRSDTVKIGSDGLGEFHVNDGSVSIYVQK

SEQ ID NO: 28252 - protein, 483 aa, Bacillus sp.
HHNGTNGTMMQYFEWYLPNDGNHWNRLNSDASNLKSKGITAVWIPPAWKGASQNDVGYGAYDLYDLGEFNQKGTVRTKYGTRSQLQAAVTSLKNNGIQVYGDVVMNHKGGADATEMVRAVEVNPNNRNQEVTGEYTIEAWTRFDFPGRGNTHSSFKWRWYHFDGVDWDQSRRLNNRIYKFRGKAWDWEVDTEFGNYDYLMYADYDMDHPEVVNELRNWGVWYTNTLGLDGFRIDAVKHIKYSFTRDWINHVRSATGKNMFAVAEFWKNDLGAIENYLQKTNWNHSVFDVPLHYNLYNASKSGGNYDMRNIFNGTVVQRHPSHAVTFVDNHDSQPEEALESFVDEWFKPLAYALTLTREQGYPSVFYGDYYGIPTHGVPAMRSKIDPILEARQKYAYGPQHDYLDHPDVIGWTREGDSSHPKSGLATLITDGPGGSKRMYAGLKNAGETWYDITGNRSDTVKIGSDGWGEFHVNQQSVSIYVQK

SEQ ID NO: 28253 - protein, 483 aa, Bacillus sp.
HHNGTNGTMMQYFEWYLPNDGNHWNRLNSDASNLKSKGITAVWIPPAWKAASQNDVGYGAYDLYDLGEFNQKGTVRTKYGTRSQLQAAVTSLKNNGIQVYGDVVMNHKGGADATEMVRAVEVNPNNRNQEVTGEYTIEAWTRFDFPGRGNTHSSFKWRWYHFDGVDWDQSRELTNRIYKFRGKAWDWEVDTEFGNYDYLMYADYDMDHPEVVNELRNWGVWYTNTLGLDGFRIDAVKHIKYSFTRDWINHVRSATGKNMFAVAEFWKNDLGAIENYLQKTNWNHSVFDVPLHYNLYNASKSGGNYDMRNIFNGTVVQRHPSHAVTFVDNHDSQPEEALESFVEEWFKPLAYALTLTREQGYPSVFYGDYYGIPTHGVPAMRSKIDPILEARQKYAYGPQHDYLDHPDVIGWTREGDSSHPKSGLATLITDGPGGSKRMYAGLKNAGETWYDITGNRSDTVKIGSDGWGEFHVNDGSVSIYVQK

SEQ ID NO: 28254 - protein, 485 aa, Bacillus sp.
HHNGTNGTMMQYFEWYLPNDGNHWNRLNSDASNLKSKGITAVWIPPAWKGASQNDVGYGAYDLYDLGEFNQKGTVRTKYGTRSQLQAAVTSLKNNGIQVYGDVVMNHKGGADATEMVRAVEVNPNNRNQEVTGEYTIEAWTRFDFPGRGNTHSSFKWRWYHFDGVDWDQSRRLNNRIYKFRGHGKAWDWEVDTEFGNYDYLMYADYDMDHPEVVNELRNWGVWYTNTLGLDGFRIDAVKHIKYSFTRDWINHVRSATGKNMFAVAEFWKNDLGAIENYLQKTNWNHSVFDVPLHYNLYNASNSGGNYDMRNIFNGTVVQRHPSHAVTFVDNHDSQPEEALESFVETWFKPLAYALTLTREQGYPSVFYGDYYGIPTHGVPAMRSKIDPILEARQKYAYGPQHDYLDHPDVIGWTREGDSSHPKSGLATLITDGPGGSKRMYAGLKNAGETWYDITGNRSDTVKIGSDGWGEFHVNQTSVSIYVQK

SEQ ID NO: 28255 - protein, 485 aa, Bacillus sp.
HHNGTNGTMMQYFEWYLPNDGNHWNRLNSDASNLKSKGITAVWIPPAWKGASQNDVGYGAYDLYDLGEFNQKGTVRTKYGTRSQLQAAVTSLKNNGIQVYGDVVMNHKGGADATEMVRAVEVNPNNRNQEVTGEYTIEAWTRFDFPGRGNTHSSFKWRWYHFDGVDWDQSRRLNNRIYKFRGHGKAWDWEVDTEFGNYDYLMYADYDMDHPEVVNELRNWGVWYTNTLGLDGFRIDAVKHIKYSFTRDWINHVRSATGKNMFAVAEFWKNDLGAIENYLQKTNWNHSVFDVPLHYNLYNASKSGGNYDMRNIFNGTVVQRLPSHAVTFVDNHDSQPEEALESFVEEWFKPLAYALTLTREQGYPSVFYGDYYGIPTHGVPAMRSKIDPILEARQKYAYGPQHDYLDHPDVIGWTREGDSSHPKSGLATLITDGPGGSKRMYAGLKNAGETWYDITGNRSDTVKIGSDGWGEFHVNDGSVSIYVQK

SEQ ID NO: 28256 - protein, 485 aa, Bacillus sp.
HHNGTNGTMMQYFEWYLPNDGNHWNRLNSDASNLKSKGITAVWIPPAWKGASQNDVGYGAYDLYDLGEFNQKGTVRTKYGTRSQLQAAVTSLKNNGIQVYGDVVMNHKGGADATEMVRAVEVNPNNRNQEVTGEYTIEAWTRFDFPGRGNTHSSFKWRWYHFDGVDWDQSRDFNNRIYKFRGHGKAWDWEVDTEFGNYDYLMYADYDMDHPEVVNELRNWGVWYTNTLGLDGFRIDAVKHIKYSFTRDWINHVRSATGKNMFAVAEFWKNDLGAIENYLQKTNWNHSVFDVPLHYNLYNASKSGGNYDMRNIFNGTVVQRHPSHAVTFVDNHDSQPEEALESFVEEWFKPLAYALTLTREQGYPSVFYGDYYGIPTHGVPAMRSKIDPILEARQKYAYGPQHDYLDHPDVIGWTREGDSSHPKSGLATLITDGPGGSKRMYAGLKNTGETWYNITGNRSDTVKIGSDGWGEFHVNDGSVSIYVQK

SEQ ID NO: 28257 - protein, 483 aa, Bacillus sp.
HHNGTNGTMMQYFEWYLPNDGNHWNRLNSDASNLKSKGITAVWIPPAWKGASQNDVGYGAYDLYDLGEFNQKGTVRTKYGTRSQLQAAVTSLKNNGIQVYGDVVMNHKGGADTTEMVRAVEVNPNNRNQEVTGEYTIEAWTRFDFPGRGNTHSSFKWRWYHFDGVDWDQSRDLQNRIYKFRGKAWDWEVDTEFGNYDYLMYADYDMDHPEVVNELRNWGVWYTNTLGLDGFRIDAVKHIKYSFTRDWINHVRSATGKNMFAVAEFWKNDLGAIENYLQKTNWNHSVFDVPLHYNLYNASKSGGNYDMRNIFNGTVVQRHPSHAVTFVDNHDSQPEEALESFVETWFKPLAYALTLTREQGYPSVFYGDYYGIPTHGVPAMRSKIDPILEARQKYAYGPQHDYLDHPDVIGWTREGDSSHPKSGLATLITDGPGGSKRMYAGLKNAGETWYDITGNRSDTVKIGSDGWGEFHVNKGSVSIYVQK

SEQ ID NO: 28258 - protein, 483 aa, Bacillus sp.
HHNGTNGTMMQYFEWYLPNDGNHWNRLNSDASNLKSKGITAVWIPPAWKGASQNDVGYGAYDLYDLGEFNQKGTVRTKYGTRSQLQAAVTSLKNNGIQVYGDVVMNHKGGADATEMVRAVEVNPNNRNQEVTGEYTIEAWTRFDFPGRGNTHSSFKWRWYHFDGVDWDQSRRLNNRIYKFRGKAWDWEVDTEFGNYDYLMYADYDMDHPEVVNELRNWGVWYTNTLGLDGFRIDAVKHIKYSFTRDWINHVRSATGKNMFAVAEFWKNDLGAIENYLQKTNWNHSVFDVPLHYNLYNASKSAGNYDMRNIFNGTVVQRHPSHAVTFVDNHDSQPEEALESFVDEWFKPLAYALTLTREQGYPSVFYGDYYGIPTHGVPAMRSKIDPILEARQKYAYGPQHDYLDHPDVIGWTREGDSSHPKSGLATLITDGPGGSKRMYAGLKNAGETWYDITGNRSDTVKIGSDGWGEFHVNQGSVSIYVQK

SEQ ID NO: 28259 - protein, 483 aa, Bacillus sp.
HHNGTNGTMMQYFEWYLPNDGNHWNRLNSDASNLKSKGITAVWIPPAWKGASQNDVGYGAYDLYDLGEFNQKGTVRTKYGTRSQLQAAVTSLKNNGIQVYGDVVMNHKGGADATEMVRAVEVNPNNRNQEVTGEYTIEAWTRFDFPGRGNTHSSFKWRWYHFDGVDWDQSRRLNNRIYKFRGKAWDWEVDTEFGNYDYLMYADYDMDHPEVVNELRNWGVWYTNTLGLDGFRIDAVKHIKYSFTRDWINHVRSATGKNMFAVAEFWKNDLGAIENYLQKTNWNHSVFDVPLHYNLYNASKSGGNYDMRNIFNGTVVQRHPSHAVTFVDNHDSQPEEALESFVEEWFKPLAYALTLTRESGYPSVFYGDYYGIPTHGVPAMRSKIDPILEARQKYAYGPQHDYLDHPDVIGWTREGDSSHPKSGLATLITDGPGGSKRMYAGLKNAGETWYDITGNRSDTVKIGSDGWGEFHVNDGSVSIYVQK

SEQ ID NO: 28260 - protein, 485 aa, Synthetic construct
HHNGTNGTMMQYFEWYLPNDGNHWNRLNSDASNLKSKGITAVWIPPAWKGASQNDVGYGAYDLYDLGEFNQKGTVRTKYGTRSQLQAAVTSLKNNGIQVYGDVVMNHKGGADATEMVRAVEVNPNNRNQEVTGEYTIEAWTRFDFPGRGNTHSSFKWRWYHFDGVDWDQSRRLNNRIYKFRGHGKAWDWEVDTENGNYDYLMYADFDYDHPEVVNEQRNWGVWYTNTLGLDGFRIDAVKHIKYSFTRDWINHVRSATGKNMFAVAEFWKNDLGAIENYLQKTNWNHSVFDVPLHYNLYNASKSGGNYDMRNIFNGTVVQRHPSHAVTFVDNHDSQPEEALESFVEEWFKPLAYALTLTREQGYPSVFYGDYYGIPTHGVPAMRSKIDPILEARQKYAYGPQHDYLDHPDVIGWTREGDSSHPKSGLATLITDGPGGSKRMYAGLKNAGETWYDITGNRSDTVKIGSDGWGEFHVNDGSVSIYVQK

SEQ ID NO: 28261 - protein, 483 aa, Bacillus sp.
HHNGTNGTMMQYFEWYLPNDGNHWNRLNSDASNLKSKGITAVWIPPAWKAASQNDVGYGAYDLYDLGEFNQKGTVRTKYGTRSQLQAAVTSLKNNGIQVYGDVVMNHKGGADATEMVRAVEVNPNNRNQEVTGEYTIEAWTRFDFPGRGNTHSSFKWRWYHFDGVDWDQSRNTDNRIYKFRGKAWDWEVDTEFGNYDYLMYADYDMDHPEVVNELRNWGVWYTNTLGLDGFRIDAVKHIKYSFTRDWINHVRSATGKNMFAVAEFWKNDLGAIENYLQKTNWNHSVFDVPLHYNLYNASKSGGNYDMRNIFNGTVVQRHPSHAVTFVDNHDSQPEEALESFVEEWFKPLAYALTLTREQGYPSVFYGDYYGIPTHGVPAMRSKIDPILEARQKYAYGPQHDYLDHPDVIGWTREGDSSHPKSGLATLITDGPGGSKRMYAGLKNAGETWYDITGNRSDTVKIGSDGWGEFHVNDGSVSIYVQK

SEQ ID NO: 28262 - protein, 483 aa, Synthetic construct
HHNGTNGTMMQYFEWYLPNDGNHWNRLNSDASNLKSKGITAVWIPPAWKGASQNDVGYGAYDLYDLGEFNQKGTVRTKYGTRSQLQAAVTSLKNNGIQVYGDVVMNHKGGADATEMVRAVEVNPNNRNQEVTGEYTIEAWTRFDFPGRGNTHSSFKWRWYHFDGVDWDQSRRLNNRIYKFRGKAWDWEVDTENGNYDYLMYADYDMDLPESVNELRNWGVWYTNTLGLDGFRIDAVKHIKYSFTRDWINHVRSATGKNMFAVAEFWKNDLGAIENYLQKTNWNHSVFDVPLHYNLYNASKSGGNYDMRNIFNGTVVQRHPSHAVTFVDNHDSQPEEALESFVEEWFKPLAYALTLTREQGYPSVFYGDYYGIPTHGVPAMRSKIDPILEARQKYAYGPQHDYLDHPDVIGWTREGDSSHPKSGLATLITDGPGGSKRMYAGLKNAGETWYDITGNRSDTVKIGSDGWGEFHVNDGSVSIYVQK

SEQ ID NO: 28263 - protein, 483 aa, Bacillus sp.
HHNGTNGTMMQYFEWYLPNDGNHWNRLNSDASNLKSKGITAVWIPPAWKAASQNDVGYGAYDLYDLGEFNQKGTVRTKYGTRSQLQAAVTSLKNNGIQVYGDVVMNHKGGADATEMVRAVEVNPNNRNQEVTGEYTIEAWTRFDFPGRGNTHSSFKWRWYHFDGVDWDQSREVSNRIYKFRGKAWDWEVDTEFGNYDYLMYADYDMDHPEVVNELRNWGVWYTNTLGLDGFRIDAVKHIKYSFTRDWINHVRSATGKNMFAVAEFWKNDLGAIENYLQKTNWNHSVFDVPLHYNLYNASKSGGNYDMRNIFNGTVVQRHPSHAVTFVDNHDSQPEEALESFVEEWFKPLAYALTLTREQGYPSVFYGDYYGIPTHGVPAMRSKIDPILEARQKYAYGPQHDYLDHPDVIGWTREGDSSHPKSGLATLITDGPGGSKRMYAGLKNAGETWYDITGNRSDTVKIGSDGWGEFHVNDGSVSIYVQK

SEQ ID NO: 28264 - protein, 485 aa, Bacillus sp.
HHNGTNGTMMQYFEWYLPNDGNHWNRLNSDASNLKSKGITAVWIPPAWKGASQNDVGYGAYDLYDLGEFNQKGTVRTKYGTRSQLQAAVTSLKNNGIQVYGDVVMNHKGGADATEMVRAVEVNPNNRNQEVTGEYTIEAWTRFDFPGRGNTHSSFKWRWYHFDGVDWDQSRRLNNRIYKFRGHGKAWDWEVDTEFGNYDYLMYADYDMDHPEVVNELRNWGVWYTNTLGLDGFRIDAVKHIKYSFTRDWINHVRSATGKNMFAVAEFWKNDLGAIENYLQKTAWNHSVFDVPLHYNLYNASKSGGNYDMRNIFNGTVVQRHPSHAVTFVDNHDSQPEEALESFVEEWFKPLAYALTLTREQGYPSVFYGDYYGIPTHGVPAMRSKIDPILEARQKYAYGPQHDYLDHPDVIGWTREGDSSHPKSGLATLITDGPGGSKRMYAGLKNAGETWYDITGNRSDTVKIGSDGWGEFHVNDGSVSIYVQK

SEQ ID NO: 28265 - protein, 485 aa, Bacillus sp.
HHNGTNGTMMQYFEWYLPNDGNHWNRLNSDASNLKSKGITAVWIPPAWKAASQNDVGYGAYDLYDLGEFNQKGTVRTKYGTRSQLQAAVTSLKNNGIQVYGDVVMNHKGGADATEMVRAVEVNPNNRNQEVTGEYTIEAWTRFDFPGRGNTHSSFKWRWYHFDGVDWDQSRDLSNRIYKFRGHGKAWDWEVDTEFGNYDYLMYADYDMDHPEVVNELRNWGVWYTNTLGLDGFRIDAVKHIKYSFTRDWINHVRSATGKNMFAVAEFWKNDLGAIENYLQKTNWNHSVFDVPLHYNLYNASKSGGNYDMRNIFNGTVVQRHPSHAVTFVDNHDSQPEEALESFVEEWFKPLAYALTLTREQGYPSVFYGDYYGIPTHGVPAMRSKIDPILEARQKYAYGPQHDYLDHPDVIGWTREGDSSHPKSGLATLITDGPGGSKRMYAGLKNAGETWYDITGNRSDTVKIGSDGWGEFHVNDGSVSIYVQK

SEQ ID NO: 28266 - protein, 483 aa, Bacillus sp.
HHNGTNGTMMQYFEWYLPNDGNHWNRLNSDASNLKSKGITAVWIPPAWKGASQNDVGYGAYDLYDLGEFNQKGTVRTKYGTRSQLQAAVTSLKNNGIQVYGDVVMNHKGGADATEMVRAVEVNPNNRNQEVTGEYTIEAWTRFDFPGRGNTHSSFKWRWYHFDGVDWDQSRRLNNRIYKFRGKAWDWEVDTEFGNYDYLMYADYDMDHPEVVNELRNWGVWYTNTLGLDGFRIDAVKHIKYSFTRDWINHVRSATGKNMFAVAEFWMNDLGAIENYLQKTNWNHSVFDVPLHYNLYNASKSGGNYDMRNIFNGTVVQRHPSHAVTFVDNHDSQPEEALESFVEEWFKPLAYALTLTREQGYPSVFYGDYYGIPTHGVPAMRSKIDPILEARQKYAYGPQHDYLDHPDVIGWTREGDSSHPKSGLATLITDGPGGSKRMYAGLKNAGETWYDITGNRSDTVKIGSDGWGEFHVNDGSVSIYVQK

SEQ ID NO: 28267 - protein, 483 aa, Bacillus sp.
HHNGTNGTMMQYFEWYLPNDGNHWNRLNSDASNLKSKGITAVWIPPAWKGASQNDVGYGAYDLYDLGEFNQKGTVRTKYGTRSQLQAAVTSLKNNGIQVYGDVVMNHKGGADATEMVRAVEVNPNNRNQEVTGEYNIEAWTRFDFPGRGNTHSSFKWRWYHFDGVDWDQSRQLDNRIYKFRGKAWDWEVDTEFGNYDYLMYTDYDMDHPEVVNELRNWGVWYTNTLGLDGFRIDAVKHIKYSFTRDWINHVRSATGKNMFAVAEFWKNDLGAIENYLQKTNWNHSVFDVPLHYNLYNASKSGGNYDMRNIFNGTVVQRHPSHAVTFVDNHDSQPEEALESFVEEWFKPLAYALTLTREQGYPSVFYGDYYGIPTHGVPAMRSKIDPILEARQKYAYGPQHDYLDHPDVIGWTREGDSSHPKSGLATLITDGPGGSKRMYAGLKNAGETWYDITGNRSDTVKIGSDGWGEFHVNDGSVSIYVQK

SEQ ID NO: 28268 - protein, 485 aa, Bacillus sp.
HHNGTNETMMQYFEWYLPNDGNHWNRLNSDASNLKSKGITAVWIPPAWKGASQNDVGYGAYDLYDLGEFNQKGTVRTKYGTRSQLQAAVTSLKNNGIQVYGDVVMNHKGGADATEMVRAVEVNPNNRNQEVTGEYTIEAWTRFDFPGRGNTHSSFKWRWYHFDGVDWDQSRRLNNRIYKFRGHGKAWDWEVDTEFGNYDYLMYADYDMDHPEVVNELRNWGVWYTNTLGLDGFRIDAVKHIKYSFTRDWINHVRSATGKNMFAVAEFWKNDLGAIENYLQKTNWNHSVFDVPLHYNLYNASKSGGNYDMRNIFNGTVVQMHPSHAVTFVDNHDSQPEEALESFVEEWFKPLAYALTLTREQGYPSVFYGDYYGIPTHGVPAMRSKIDPILEARQKYAYGPQHDYLDHPDVIGWTREGDSSHPKSGLATLITDGPGGSKRMYAGLKNAGETWYDITGNRSDTVKIGSDGWGEFHVNDGSVSIYVQK

SEQ ID NO: 28269 - protein, 483 aa, Bacillus sp.
HHNGTNGTMMQYFEWYLPNDGNHWNRLNSDASNLKSKGITAVWIPPAWKGASQNDVGYGAYDLYDLGEFNQKGTVRTKYGTRSQLQAAVTSLKNNGIQVYGDVVMNHKGGADATEMVRAVEVNPNNRNQEVTGEYTIEAWTRFDFPGRGNTHSSFKWRWYHFDGVDWDQSRRLNNRIYKFRGKAWDWEVDTEFGNYDYLMYADYDMDHPEVINELRNWGVWYTNTLGLDGFRIDAVKHIKYSFTRDWINHVRSATGKNMFAVAEFWKNDLGAIENYLQKTNWNHSVFDVPLHYNLYNASKSGGNYDMRNIFNGTVVQRHPSHAVTFVDNHDSQPEEALESFVEEWFKPLAYALTLTREQGYPSVFYGDYYGIPTHGVPAMRSKIDPILEARQKYAYGPQHDYLDHPDVIGWTREGDSSHPKSGLATLITDGPGGSKRMYAGLKNAGETWYDITGNRSDTVKIGSDGWGEFHVNDGSVSIYVQK

SEQ ID NO: 28270 - protein, 483 aa, Bacillus sp.
HHNGTNGTMMQYFEWYLPNDGNHWNRLNSDASNLKSKGITAVWIPPAWKGASQNDVGYGAYDLYDLGEFNQKGTVRTKYGTRSQLQAAVTSLKNNGIQVYGDVVMNHKGGADATEMVRAVEVNPNNRNQEVTGEYTIEAWTRFDFPGRGNTHSSFKWRWYHFDGVDWDQSRRLNNRIYKFRGKAWDWEVDTEFGNYDYLMYADYDMDHPEVVNELRNWGVWYTNTLGLDGFRIDAVKHIKYSFTRDWINHVRSATGKNMFAVAEFWKNDLGAIENYLQKTNWNHSVFDVPLHYNLYNASKSGGNYDMRNIFNGTVVQRHPSHAVTFVDNHDSQPEEALESFVEEWFKPLAYALTLTREQGYPSVFYGDYYGIPTHGVPAMRSKIDPILKARQKYAYGPQHDYLDHPDVIGWTREGDSSHPKSGLATLITDGPGGSKRMYAGLKNAGETWYDITGNRSDTVKIGSDGWGEFHVNDGSVSIYVQK

SEQ ID NO: 28271 - protein, 483 aa, Bacillus sp.
HHNGTNGTMMQYFEWYLPNDGNHWNRLNSDASNLKSKGITAVWIPPAWKGASQNDVGYGAYDLYDLGEFNQKGTVRTKYGTRSQLQAAVTSLKNNGIQVYGDVVMNHKGGADATEMVRAVEVNPNNRNQEVTGEYTIEAWTRFDFPGRGNTHSSFKWRWYHFDGLDWDQSRRLNNRIYKFRGKAWDWEVDTEFGNYDYLMYADYDMDHPEVVNELRNWGVWYTNTLGLDGFRIDAVKHIKYSFTRDWINHVRSATGKNMFAVAEFWKNDLGAIENYLQKTNWNHSVFDVPLHYNLYNASKSGGNYDMRNIFNGTVVQRHPSHAVTFVDNHDSQPEEALESFVEEWFKPLAYALTLTREQGYPSVFYGDYYGIPTHGVPAMRSKIDPILEARQKYAYGPQHDYLDHPDVIGWTREGDSSHPKSGLATLITDGPGGSKRMYAGLKNAGETWYDITGNRSDTVKIGSDGWGEFHVNDGSVSIYVQK

SEQ ID NO: 28272 - protein, 483 aa, Bacillus sp.
HHNGTNGTMMQYFEWYLPNDGNHWNRLNSDASNLKSKGITAVWIPPAWKGASQNDVGYGAYDLYDLGEFNQKGTVRTKYGTRSQLQAAVTSLKNNGIQVYGDVVMNHKGGADATEMVRAVEVNPNNRNQEVTGEYTIEAWTRFDFPGRGNTHSSFKWRWYHFDGVDWDQSRRLNNRIYKFRGKAWDWEVDTEFGNYDYLMYADYDMDHPEVVNELRNWGVWYTNTLGLDGFRIDAVKHIKYSFTRDWINHVRSATGKNMFAVAEFWKNDLGAIENYLQKTNWNHSVFDVPLHYNLYNASKSGGNYDMRNIFNGTVVQRHPSHAVTFVDNHDSQPEEALESFVDTWFKPLAYALTLTREQGYPSVFYGDYYGIPTHGVPAMRSKIDPILEARQKYAYGPQHDYLDHPDVIGWTREGDSSHPKSGLATLITDGPGGSKRMYAGLKNAGETWYDITGNRSDTVKIGSDGWGEFHVNGASVSIYVQK

SEQ ID NO: 28273 - protein, 485 aa, Bacillus sp.
HHNGTNGTMMQYFEWYLPNDGNHWNRLNSDASNLKSKGITAVWIPPAWKGASQNDVGYGAYDLYDLGEFNQKGTVRTKYGTRSQLQAAVTSLKNNGIQVYGDVVMNHKGGADATEMVRAVEVNPNNRNQEVTGEYTIEAYTRFDFPGRGNTHSSFKWRWYHFDGVDWDQSRRLNNRIYKFRGHGKAWDWEVDTEFGNYDYLMYADYDMDHPEVVNELRNWGVWYTNTLGLDGFRIDAVKHIKYSFTRDWINHVRSATGKNMFAVAEFWKNDLGAIENYLQKTNWNHSVFDVPLHYNLYNASKSGGNYDMRNIFNGTVVQAHPSHAVTFVDNHDSQPEEALESFVEEWFKPLAYALTLTREQGYPSVFYGDYYGIPTHGVPAMRSKIDPILEARQKYAYGPQHDYLDHPDVIGWTREGDSSHPKSGLATLITDGPGGSKRMYAGLKNAGETWYDITGNRSDTVKIGSDGWGEFHVNDGSVSIYVQK

SEQ ID NO: 28274 - protein, 483 aa, Bacillus sp.
HHNGTNGTMMQYFEWYLPNDGNHWNRLNSDASNLKSKGITAVWIPPAWKGASQNDVGYGAYDLYDLGEFNQKGTVRTKYGTRSQLQAAVTSLKNNGIQVYGDVVMNHKGGADATEMVRAVEVNPNNRNQEVTGEYTIEAWTRFDFPGRGNTHSSFKWRWYHFDGVDWDQSRRLNNRIYKFRGKAWDWEVDTENGNYDYLMYADIDYDHPEVVNELRIWGVWYTNTLGLDGFRIDAVKHIKYSFTRIWINHVRSATGKNMFAVAEFWKNDLGAIENYLQKTNWNHSVFDVPLHYNLYNASKSGGNYDMRNIFNGTVVQRHPSHAVTFVDNHDSQPEEALESFVEEWFKPLAYALTLTREQGYPSVFYGDYYGIPTHGVPAMRSKIDPILEARQKYAYGPQHDYLDHPDVIGWTREGDSSHPKSGLATLITDGPGGSKRMYAGLKNAGETWYDITGNRSDTVKIGSDGWGEFHVNDGSVSIYVQK

SEQ ID NO: 28275 - protein, 485 aa, Bacillus sp.
HHNGTNGTMMQYFEWYLPNDGNHWNRLNSDASNLKSKGITAVWIPPAWKGASQNDVGYGAYDLYDLGEFNQKGTVRTKYGTRSQLQAAVTSLKNNGIQVYGDVVMNHKGGADATEMVRAVEVNPNNRNQEVTGEYTIEAWTRFDFPGRGNTHSSFKWRWYHFDGVDWDQSRRLNNRIYKFRGHGKAWDWEVDTEFGNYDYLMYADYDMDHPEVVNELRNWGVWYTNTLGLDGFRIDAVKHIKISFTRDWINHVRSATGKNMFAVAEFWKNDLGAIENYLQKTNWNHSVFDVPLHYNLYNASKSGGNYDMRNIFNGTVVQRHPSHAVTFVDNHDSQPEEALESFVEEWFKPLAYALTLTREQGYPSVFYGDYYGIPTHGVPAMRSKIDPILEARQKYAYGPQHDYLDHPDVIGWTREGDSSHPKSGLATLITDGPGGSKRMYAGLKNAGETWYDITGNRSDTVKIGSDGWGEFHVNDGSVSIYVQK

SEQ ID NO: 28276 - protein, 485 aa, Bacillus sp.
HHNGTNGTMMQYFEWYLPNDGNHWNRLNSDASNLKSKGITAVWIPPAWKAASQNDVGYGAYDLYDLGEFNQKGTVRTKYGTRSQLQAAVTSLKNNGIQVYGDVVMNHKGGADATEMVRAVEVNPNNRNQEVTGEYTIEAWTRFDFPGRGNTHSSFKWRWYHFDGVDWDQSRDLDNRIYKFRGHGKAWDWEVDTEFGNYDYLMYADYDMDHPEVVNELRNWGVWYTNTLGLDGFRIDAVKHIKYSFTRDWINHVRSATGKNMFAVAEFWKNDLGAIENYLQKTNWNHSVFDVPLHYNLYNASKSGGNYDMRNIFNGTVVQRHPSHAVTFVDNHDSQPEEALESFVDPWFKPLAYALTLTREQGYPSVFYGDYYGIPTHGVPAMRSKIDPILEARQKYAYGPQHDYLDHPDVIGWTREGDSSHPKSGLATLITDGPGGSKRMYAGLKNAGETWYDITGNRSDTVKIGSDGWGEFHVNGGSVSIYVQK

SEQ ID NO: 28277 - protein, 485 aa, Bacillus sp.
HHNGTNGTMMQYFEWYLPNDGNHWNRLNSDASNLKSKGITAVWIPPAWKGASQNDVGYGAYDLYDLGEFNQKGTVRTKYGTRSQLQAAVTSLKNNGIQVYGDVVMNHKGGADATEMVRAVEVNPNNRNQEVTGEYTIEAWTRFDFPGRGNTHSSFKWRWYHFDGVDWDQSRRLNNRIYKFRGHGKAWDWEVDTEFGNYDYLMYADYDMDSPEVVNELRNWGVWYTNTLGLDGFRIDAVKHIKYSFTRDWINHVRSATGKNMFAVAEFWKNDLGAIENYLQKTNWNHSVFDVPLHYNLYNASKSGGNYDMRNIFNGTVVQRHPSHAVTFVDNHDSQPEEALESFVEEWFKPLAYALTLTREQGYPSVFYGDYYGIPTHGVPAMRSKIDPILEARQKYAYGPQHDYLDHQDVIGWTREGDSSHPKSGLATLITDGPGGSKRMYAGLKNAGETWYDITGNRSDTVKIGSDGWGEFHVNDGSVSIYVQK

SEQ ID NO: 28278 - protein, 483 aa, Bacillus sp.
HHNGTNGTMMQYFEWYLPNDGNHWNRLNSDASNLKSKGITAVWIPPAWKGASQNDVGYGAYDLYDLGEFNQKGTVRTKYGTRSQLQAAVTSLKNNGIQVYGDVVMNHKGGADATEMVRAVEVNPNNRNQEVTGEYTIEAWTRFDFPGRGNTHSSFKWRWYHFDGVDWDQSRRLNNRIYKFRGKAWDWEVDTEFGNYDYLMYADYDMDHPEVVNELRNWGVWYTNTLGLDGFRIDAVKHIKYSFTRDWINHVRSATGKNMFAVAEFWKNDLGAIENYLQKTNWNHSVFDVPLHYNLYNASKSAGNYDMRNIFNGTVVQRHPSHAVTFVDNHDSQPEEALESFVETWFKPLAYALTLTREQGYPSVFYGDYYGIPTHGVPAMRSKIDPILEARQKYAYGPQHDYLDHPDVIGWTREGDSSHPKSGLATLITDGPGGSKRMYAGLKNAGETWYDITGNRSDTVKIGSDGWGEFHVNGGSVSIYVQK

SEQ ID NO: 28279 - protein, 483 aa, Bacillus sp.
HHNGTNGTMMQYFEWYLPNDGNHWNRLNSDASNLKSKGITAVWIPPAWKGASQNDVGYGAYDLYDLGEFNQKGTVRTKYGTRSQLQAAVTSLKNNGIQVYGDVVMNHKGGADATEMVRAVEVNPNNRNQEVTGEYTIEAWTRFDFPGRGNTHSSFKWRWYHFDGVDWDKSRRLNNRIYKFRGKAWDWEVDTEFGNYDYLMYADYDMDHPEVVNELRNWGVWYTNTLGLDGFRIDAVKHIKYSFTRDWINHVRSATGKNMFAVAEFWKNDLGAIENYLQKTNWNHSVFDVPLHYNLYNASKSGGNYDMRNIFNGTVVQRHPSHAVTFVDNHDSQPEEALESFVEEWFKPLAYALTLTREQGYPSVFYGDYYGIPTHGVPAMRSKIDPILEARQKYAYGPQHDYLDHPDVIGWTREGDSSHPKSGLATLITDGPGGSKRMYAGLKNAGETWYDITGNRSDTVKIGSDGWGEFHVNDGSVSIYVQK

SEQ ID NO: 28280 - protein, 485 aa, Bacillus sp.
HHNGTNGTMMQYFEWYLPNDGNHWNRLNSDASNLKSKGITAVWIPPAWKGASQNDVGYGAYDLYDLGEFNQKGTVRTKYGTRSQLQAAVTSLKNNGIQVYGDVVMNHKGGADATEMVRAVEVNPNNRNQEVTGEYTIEAWTRFDFPGRGNTHSSFKWRWYHFDGVDWDQSRRLNNRIYKFRGHGKAWDWEVDTEFGNYDYLMYADYDMDHPEVVNELRNWGVWYTNTLGLDGFRIDAVKHIKYSFTRDWINHVRSATGKNMFAVAEFWMNDLGAIENYLQKTNWNHSVFDVPLHYNLYNASKSGGNYDMRNIFNGTVVQRHPSHAVTFVDNHDSQPEEALESFVEEWFKPLAYALTLTREQGYPSVFYGDYYGIPTHGVPAMRSKIDPILEARQKYAYGPQHDYLDHPDVIGWTREGDSSHPKSGLATLITDGPGGSKRMYAGLKNAGETWYDITGNRSDTVKIGSDGWGEFHVNDGSVSIYVQK

SEQ ID NO: 28281 - protein, 485 aa, Bacillus sp.
HHNGTNGTMMQYFEWYLPNDGNHWNRLNSDASNLKSKGITAVWIPPAWKAFSQNDVGYGAYDLYDLGEFNQKGTVRTKYGTRSQLQAAVTSLKNNGIQVYGDVVMNHKGGADATEMVRAVEVNPNNRNQEVTGEYTIEAWTRFDFPGRGNTHSSFKWRWYHFDGVDWDQSRDLNNRIYKFRGHGKAWDWEVDTEFGNYDYLMYADYDMDHPEVVNELRNWGVWYTNTLGLDGFRIDAVKHIKYSFTRDWINHVRSATGKNMFAVAEFWKNDLGAIENYLQKTNWNHSVFDVPLHYNLYNASKSGGNYDMRNIFNGTVVQRHPSHAVTFVDNHDSQPEEALESFVEEWFKPLAYALTLTREQGYPSVFYGDYYGIPTHGVPAMRSKIDPILEARQKYAYGPQHDYLDHPDVIGWTREGDSSHPKSGLATLITDGPGGSKRMYAGLKNAGETWYDITGNRSDTVKIGSDGWGEFHVNDGSVSIYVQK

SEQ ID NO: 28282 - protein, 485 aa, Bacillus sp.
HHNGTNGTMMQYFEWYLPNDGNHWNRLNSDASNLKSKGITAVWIPPAWKGASQNDVGYGAYDLYDLGEFNQKGTVRTKYGTRSQLQAAVTSLKNNGIQVYGDVVMNHKGGADATEMVRAVEVNPNNRNQEVTGEYTIEAWTRFDFPGRGNTHSSFKWRWYHFDGVDWDQSRRLNNRIYKFRGHGKAWDWEVDTEFGNYDYLMYADYDMDHPEVVNELRNWGVWYTNTLGLDGFRIDAVKHIKYSFTRDWINHVRSATGKNMFAVAEFWSNDLGAIENYLQKTNWNHSVFDVPLHYNLYNASKSGGNYDMRNIFNGTVVQRHPSHAVTFVDNHDSQPEEALESFVEEWFKPLAYALTLTREQGYPSVFYGDYYGIPTHGVPAMRSKIDPILEARQKYAYGPQHDYLDHPDVIGWTREGDSSHPKSGLATLITDGPGGSKRMYAGLKNAGETWYDITGNRSDTVKIGSDGWGEFHVNDGSVSIYVQK

SEQ ID NO: 28283 - protein, 485 aa, Bacillus sp.
HHNGTNGTMMQYFEWYLPNDGNHWNRLNSDASNLKSKGITAVWIPPAWKAASQNDVGYGAYDLYDLGEFNQKGTVRTKYGTRSQLQAAVTSLKNNGIQVYGDVVMNHKGGADATEMVRAVEVNPNNRNQEVTGEYTIEAWTRFDFPGRGNTHSSFKWRWYHFDGVDWDQSREVSNRIYKFRGHGKAWDWEVDTEFGNYDYLMYADYDMDHPEVVNELRNWGVWYTNTLGLDGFRIDAVKHIKYSFTRDWINHVRSATGKNMFAVAEFWKNDLGAIENYLQKTNWNHSVFDVPLHYNLYNASKSGGNYDMRNIFNGTVVQRHPSHAVTFVDNHDSQPEEALESFVEEWFKPLAYALTLTREQGYPSVFYGDYYGIPTHGVPAMRSKIDPILEARQKYAYGPQHDYLDHPDVIGWTREGDSSHPKSGLATLITDGPGGSKRMYAGLKNAGETWYDITGNRSDTVKIGSDGWGEFHVNDGSVSIYVQK

SEQ ID NO: 28284 - protein, 483 aa, Bacillus sp.
HHNGTNGTMMQYFEWYLPNDGNHWNRLNSDASNLKSKGITAVWIPPAWKGASQNDVGYGAYDLYDLGEFNQKGTVRTKYGTRSQLQAAVTSLKNNGIQVYGDVVMNHKGGADATEMVRAVEVNPNNRNQEVTGEYTIEAWTRFDFPGRGNTHSSFKWRWYHFDGVDWDQSRRLNNRIYKFRGKAWDWEVDTEFGNYDYLMYADYDADHPEVVNELRNWGVWYTNTLGLDGFRIDAVKHIKYSFTRDWINHVRSATGKNMFAVAEFWKNDLGAIENYLQKTNWNHSVFDVPLHYNLYNASKSGGNYDMRNIFNGTVVQRHPSHAVTFVDNHDSQPEEALESFVEEWFKPLAYALTLTREQGYPSVFYGDYYGIPTHGVPAMRSKIDPILEARQKYAYGPQHDYLDHPDVIGWTREGDSSHPKSGLATLITDGPGGSKRMYAGLKNAGETWYDITGNRSDTVKIGSDGWGEFHVNDGSVSIYVQK

SEQ ID NO: 28285 - protein, 485 aa, Bacillus sp.
HHNGTNGTMMQYFEWYLPNDGNHWNRLNSDASNLKSKGITAVWIPPAWKGASQNDVGYGAYDLYDLGEFNQKGTVRTKYGTRSQLQAAVTSLKNNGIQVYGDVVMNHKGGADATEMVRAVEVNPNNRNQEVTGEYTIEAWTRFDFPGRGNTHSSFKWRWYHFDGVDWDQSRRLNNRIYKFRGHGKAWDWEVDTEFGNYDYLMYADYDMDHPEVVNELRNWGVWYTNTLGLDGFRIDAVKHIKYSFTRDWINHVRSATGKNMFAVAEFWKNDLGAIENYLQKTNWNHSVFDVPLHYNLYNASKSGGNYDMRNIFNGTVVQRAPSHAVTFVDNHDSQPEEALESFVEEWFKPLAYALTLTREQGYPSVFYGDYYGIPTHGVPAMRSKIDPILEARQKYAYGPQHDYLDHPDVIGWTREGDSSHPKSGLATLITDGPGGSKRMYAGLKNAGETWYDITGNRSDTVKIGSDGWGEFHVNDGSVSIYVQK

SEQ ID NO: 28286 - protein, 485 aa, Bacillus sp.
HHNGTNGTMMQYFEWYLPNDGNHWNRLNSDASNLKSKGIMAVWIPPAWKGASQNDVGYGAYDLYDLGEFNQKGTVRTKYGTRSQLQAAVTSLKNNGIQVYGDVVMNHKGGADATEMVRAVEVNPNNRNQEVTGEYTIEAWTRFDFPGRGNTHSSFKWRWYHFDGVDWDQSRRLNNRIYKFRGHGKAWDWEVDTEFGNYDYLMYADYDMDHPEVVNELRNWGVWYTNTLGLDGFRIDAVKHIKYSFTRDWINHVRSATGKNMFAVAEFWKNDLGAIENYLQKTNWNHSVFDVPLHYNLYNASKSGGNYDMRNIFNGTVVQRHPSHAVTFVDNHDSQPEEALESFVEEWFKPLAYALTLTREQGYPSVFYGDYYGIPTHGVPAMRSKIDPILEARQKYAYGPQHDYLDHPDVIGWTREGDSSHPKSGLATLITDGPGGSKRMYAGLKNAGETWYDITGNRSDTVKIGSDGWGEFHVNDGSVSIYVQK

SEQ ID NO: 28287 - protein, 485 aa, Bacillus sp.
HHNGTNGTMMQYFEWYLPNDGNHWNRLNSDASNLKSKGITAVWIPPAWKGASQNDVGYGAYDLYDLGEFNQKGTVRTKYGTRSQLQAAVTSLKNNGIQVYGDVVMNHKGGADATEMVRAVEVNPNNRNQEVTGEYTIEAWTRFDFPGRGNTHSSFKWRWYHFDGVDWDQSRKVSNRIYKFRGHGKAWDWEVDTEFGNYDYLMYTDYDMDHPEVVNELRNWGVWYTNTLGLDGFRIDAVKHIKYSFTRDWINHVRSATGKNMFAVAEFWKNDLGAIENYLQKTNWNHSVFDVPLHYNLYNASKSGGNYDMRNIFNGTVVQRHPSHAVTFVDNHDSQPEEALESFVEEWFKPLAYALTLTREQGYPSVFYGDYYGIPTHGVPAMRSKIDPILEARQKYAYGPQHDYLDHPDVIGWTREGDSSHPKSGLATFITDGPGGSKRMYAGLKNAGETWYDITGNRSDTVKIGSDGWGEFHVNDGSVSIYVQK

SEQ ID NO: 28288 - protein, 483 aa, Bacillus sp.
HHNGTNGTMMQYFEWYLPNDGNHWNRLNSDASNLKSKGITAVWIPPAWKGASQNDVGYGAYDLYDLGEFNQKGTVRTKYGTRSQLQAAVTSLKNNGIQVYGDVVMNHKGGADATEMVRAVEVNPNNRNQEVTGEYTIEAWTRFDFPGRGNTHSSFKWRWYHFDGVDWDQSREINNRIYKFRGKAWDWEVDTEFGNYDYLMYTDYDMDHPEVVNELRNWGVWYTNTLGLDGFRIDAVKHIKYSFTRDWINHVRSATGKNMFAVAEFWKNDLGAIENYLQKTNWNHSVFDVPLHYNLYNASKSGGNYDMRNIFNGTVVQRHPSHAVTFVDNHDSQPEEALESFVEEWFKPLAYALTLTREQGYPSVFYGDYYGIPTHGVPAMRSKIDPILEARQKYAYGPQHDYLDHPDVIGWTREGDSSHPKSGLATLITDGPGGSKRMYAGLKNAGETWYDITGNRSDTVKIGSDGWGEFHVNDGSVSIYVQK

SEQ ID NO: 28289 - protein, 483 aa, Bacillus sp.
HHNGTNGTMMQYFEWYLPNDGNHWNRLNSDASNLKSKGITAVWIPPAWKGASQNDVGYGAYDLYDLGEFNQKGTVRTKYGTRSQLQAAVTSLKNNGISVYGDVVMNHKGGADATEMVRAVEVNPNNRNQEVTGEYTIEAWTRFDFPGRGNTHSSFKWRWYHFDGVDWDQSRRLNNRIYKFRGKAWDWEVDTEFGNYDYLMYADYDMDHPEVVNELRNWGVWYTNTLGLDGFRIDAVKHIKYSFTRDWINHVRSATGKNMFAVAEFWKNDLGAIENYLQKTNWNHSVFDVPLHYNLYNASKSGGNYDMRNIFNGTVVQAHPSHAVTFVDNHDSQPEEALESFVEEWFKPLAYALTLTREQGYPSVFYGDYYGIPTHGVPAMRSKIDPILEARQKYAYGPQHDYLDHPDVIGWTREGDSSHPKSGLATLITDGPGGSKRMYAGLKNAGETWYDITGNRSDTVKIGSDGWGEFHVNDGSVSIYVQK

SEQ ID NO: 28290 - protein, 485 aa, Bacillus sp.
HHNGTNGTMMQYFEWYLPNDGNHWNRLNSDASNLKSKGITAVWIPPAWKAASQNDVGYGAYDLYDLGEFNQKGTVRTKYGTRSQLQAAVTSLKNNGIQVYGDVVMNHKGGADATEMVRAVEVNPNNRNQEVTGEYTIEAWTRFDFPGRGNTHSSFKWRWYHFDGVDWDQSRDLDNRIYKFRGHGKAWDWEVDTEFGNYDYLMYADYDMDHPEVVNELRNWGVWYTNTLGLDGFRIDAVKHIKYSFTRDWINHVRSATGKNMFAVAEFWKNDLGAIENYLQKTNWNHSVFDVPLHYNLYNASKSGGNYDMRNIFNGTVVQVHPSHAVTFVDNHDSQPEEALESFVEEWFKPLAYALTLTREQGYPSVFYGDYYGIPTHGVPAMRSKIDPILEARQKYAYGPQHDYLDHPDVIGWTREGDSSHPKSGLATLITDGPGGSKRMYAGLKNAGETWYDITGNRSDTVKIGSDGWGEFHVNDGSVSIYVQK

SEQ ID NO: 28291 - protein, 483 aa, Bacillus sp.
HHNGTNGTMMQYFEWYLPNDGNHWNRLNSDASNLKSKGITAVWIPPAWKGASQNDVGYGAYDLYDLGEFNQKGTVRTKYGTRSQLQAAVTSLKNNGIQVYGDVVMNHKGGADATEMVRAVEVNPNNRNQEVTGEYTIEAWTRFDFPGRGNTHSSFKWRWYHFDGVDWDQSRRLNNRIYKFRGKAWDWEVDTEFGNYDYLMYADYDMDHPEVVNELRNWGVWYTNTLGLDGFRIDAVKHIKYSFTRDWINHVRSATGKNMFAVAEFWKNDLGAIENYLQKTLWNHSVFDVPLHYNLYNASKSGGNYDMRNIFNGTVVQRHPSHAVTFVDNHDSQPEEALESFVEEWFKPLAYALTLTREQGYPSVFYGDYYGIPTHGVPAMRSKIDPILEARQKYAYGPQHDYLDHPDVIGWTREGDSSHPKSGLATLITDGPGGSKRMYAGLKNAGETWYDITGNRSDTVKIGSDGWGEFHVNDGSVSIYVQK

SEQ ID NO: 28292 - protein, 485 aa, Bacillus sp.
HHNGTNGTMMQYFEWYLPNDGNHWNRLNSDASNLKSKGITAVWIPPAWKGASQNDVGYGAYDLYDLGEFNQKGTVRTKYGTRSQLQAAVTSLKNNGIQVYGDVVMNHKGGADATEMVRAVEVNPNNRNQEVTGEYTIEAWTRFDFPGRGNTHSSFKWRWYHFDGVDWDQSRRLNNRIYKFRGHGKAWDWEVDTEFGNYDYLMYADYDMDHPEVVNELRNWGVWYTNTLGLDGFRIDAVKHIKYSFTRDWINHVRSATGKNMFAVAEFWKNDLGAIENYLQKTNWNHSVFDVPLHYNLYGASKSGGNYDMRNIFNGTVVQRHPSHAVTFVDNHDSQPEEALESFVEEWFKPLAYALTLTREQGYPSVFYGDYYGIPTHGVPAMRSKIDPILEARQKYAYGPQHDYLDHPDVIGWTREGDSSHPKSGLATLITDGPGGSKRMYAGLKNAGETWYDITGNRSDTVKIGSDGWGEFHVNDGSVSIYVQK

SEQ ID NO: 28293 - protein, 485 aa, Bacillus sp.
HHNGTNGTMMQYFEWYLPNDGNHWNRLNSDASNLKSKGITAVWIPPAWKGASQNDVGYGAYDLYDLGEFNQKGTVRTKYGTRSQLQAAVTSLKNNGIQVYGDVVMNHKGGADATEMVRAVEVNPNNRNQEVTGEYTIEAWTRFDFPGRGNTHSSFKWRWYHFDGVDWDQSRRLNNRIYSFRGHGKAWDWEVDTEFGNYDYLMYADYDMDHPEVVNELRNWGVWYTNTLGLDGFRIDAVKHIKYSFTRDWINHVRSATGKNMFAVAEFWKNDLGAIENYLQKTNWNHSVFDVPLHYNLYNASKSGGNYDMRNIFNGTVVQRHPSHAVTFVDNHDSQPEEALESFVEEWFKPLAYALTLTREQGYPSVFYGDYYGIPTHGVPAMRSKIDPILEARQKYAYGPQHDYLDHPDVIGWTREGDSSHPKSGLATLITDGPGGSKRMYAGLKNAGETWYDITGNRSDTVKIGSDGWGEFHVNDGSVSIYVQK

SEQ ID NO: 28294 - protein, 485 aa, Bacillus sp.
HHNGTNGTMMQYFEWYLPNDGNHWNRLNSDASNLKSKGITAVWIPPAWKGASQNDVGYGAYDLYDLGEFNQKGTVRTKYGTRSQLQAAVTSLKNNGIQVYGDVVMNHKGGADATEMVRAVEVNPNNRNQEVTGEYTIEAWTRFDFPGRGNTHSSFKWRWYHFDGVDWDQSRRLNNRIYKFGGHGKAWDWEVDTEFGNYDYLMYADYDMDHPEVVNELRNWGVWYTNTLGLDGFRIDAVKHIKYSFTRDWINHVRSATGKNMFAVAEFWKNDLGAIENYLQKTNWNHSVFDVPLHYNLYNASKSGGNYDMRNIFNGTVVQRHPSHAVTFVDNHDSQPEEALESFVEEWFKPLAYALTLTREQGYPSVFYGDYYGIPTHGVPAMRSKIDPILEARQKYAYGPQHDYLDHPDVIGWTREGDSSHPKSGLATLITDGPGGSKRMYAGLKNAGETWYDITGNRSDTVKIGSDGWGEFHVNDGSVSIYVQK

SEQ ID NO: 28295 - protein, 483 aa, Bacillus sp.
HHNGTNKTMMQYFEWYLPNDGNHWNRLNSDASNLKSKGITAVWIPPAWKGASQNDVGYGAYDLYDLGEFNQKGTVRTKYGTRSQLQAAVTSLKNNGIQVYGDVVMNHKGGADATEMVRAVEVNPNNRNQEVTGEYTIEAWTRFDFPGRGNTHSSFKWRWYHFDGVDWDQSRRLNNRIYKFRGKAWDWEVDTEFGNYDYLMYADYDMDHPEVVNELRNWGVWYTNTLGLDGFRIDAVKHIKYSFTRDWINHVRSATGKNMFAVAEFWKNDLGAIENYLQKTNWNHSVFDVPLHYNLYNASKSGGNYDMRNIFNGTVVQMHPSHAVTFVDNHDSQPEEALESFVEEWFKPLAYALTLTREQGYPSVFYGDYYGIPTHGVPAMRSKIDPILEARQKYAYGPQHDYLDHPDVIGWTREGDSSHPKSGLATLITDGPGGSKRMYAGLKNAGETWYDITGNRSDTVKIGSDGWGEFHVNDGSVSIYVQK

SEQ ID NO: 28296 - protein, 485 aa, Bacillus sp.
HHNGTNGTMMQYFEWYLPNDGNHWNRLNSDASNLKSKGITAVWIPPAWKGASQNDVGYGAYDLYDLGEFNQKGTVRTKYGTRSQLQAAVTSLKNNGIQVYGDVVMNHKGGADATEMVRAVEVNPNNRNQEVTGEYTIEAWTRFDFPGRGNTHSSFKWRWYHFDGVDWDQSRRLNNRIYKFRGHGKAWDWEVDTEFGNYDYLMYADYDMDHPEVVNELRNWGVWYTNTLGLDGFRIDAVKHIKYSFTRDWINHVRSATGKNMFAVAEFWKNDLGLIENYLQKTNWNHSVFDVPLHYNLYNASKSGGNYDMRNIFNGTVVQRHPSHAVTFVDNHDSQPEEALESFVEEWFKPLAYALTLTREQGYPSVFYGDYYGIPTHGVPAMRSKIDPILEARQKYAYGPQHDYLDHPDVIGWTREGDSSHPKSGLATLITDGPGGSKRMYAGLKNAGETWYDITGNRSDTVKIGSDGWGEFHVNDGSVSIYVQK

SEQ ID NO: 28297 - protein, 483 aa, Synthetic construct
HHNGTNGTMMQYFEWYLPNDGNHWNRLNSDASNLKSKGITAVWIPPAWKGASQNDVGYGAYDLYDLGEFNQKGTVRTKYGTRSQLQAAVTSLKNNGIQVYGDVVMNHKGGADATEMVRAVEVNPNNRNQEVTGEYTIEAWTRFDFPGRGNTHSSFKWRWYHFDGVDWDQSRRLNNRIYKFRGKAWDWEVDTENGNYDYLMYADNDMDYPEVVNEMRNWGVWYTNTLGLDGFRIDAVKHIKYSFTRDWINHVRSATGKNMFAVAEFWKNDLGAIENYLQKTNWNHSVFDVPLHYNLYNASKSGGNYDMRNIFNGTVVQRHPSHAVTFVDNHDSQPEEALESFVEEWFKPLAYALTLTREQGYPSVFYGDYYGIPTHGVPAMRSKIDPILEARQKYAYGPQHDYLDHPDVIGWTREGDSSHPKSGLATLITDGPGGSKRMYAGLKNAGETWYDITGNRSDTVKIGSDGWGEFHVNDGSVSIYVQK

SEQ ID NO: 28298 - protein, 485 aa, Bacillus sp.
HHNSTNGTMMQYFEWYLPNDGNHWNRLNSDASNLKSKGITAVWIPPAWKGASQNDVGYGAYDLYDLGEFNQKGTVRTKYGTRSQLQAAVTSLKNNGIQVYGDVVMNHKGGADATEMVRAVEVNPNNRNQEVTGEYTIEAWTRFDFPGRGNTHSSFKWRWYHFDGVDWDQSRRLNNRIYKFRGHGKAWDWEVDTEFGNYDYLMYADYDMDHPEVVNELRNWGVWYTNTLGLDGFRIDAVKHIKYSFTRDWINHVRSATGKNMFAVAEFWKNDLGAIENYLQKTNWNHSVFDVPLHYNLYNASKSGGNYDMRNIFNGTVVQRHPSHAVTFVDNHDSQPEEALESFVEEWFKPLAYALTLTREQGYPSVFYGDYYGIPTHGVPAMRSKIDPILEARQKYAYGPQHDYLDHPDVIGWTREGDSSHPKSGLATLITDGPGGSKRMYAGLKNAGETWYDITGNRSDTVKIGSDGWGEFHVNDGSVSIYVQK

SEQ ID NO: 28299 - protein, 483 aa, Bacillus sp.
HHNGTNGTMMQYFEWYLPNDGNHWNRLNSDASNLKSKGITAVWIPPAWKGASQNDVGYGAYDLYDLGEFNQKGTVRTKYGTRSQLQAAVTSLKNNGIQVYGDVVMNHKGGADATEMVRAVEVNPNNRNQEVTGEYTIEAWTRFDFPGRGNTHSSFKWRWYHFDGVDWDQSRRLNNRIYKFRGKAWDWEVDTEFGNYDYLMYADYDMDHPEVVNELRNWGVWYTNTLGLDGFRIDAVKHIKYSFTRDWINHVRSATGKNMFAVAEFWKNDLGAIENYLQKTSWNHSVFDVPLHYNLYNASKSGGNYDMRNIFNGTVVQRHPSHAVTFVDNHDSQPEEALESFVEEWFKPLAYALTLTREQGYPSVFYGDYYGIPTHGVPAMRSKIDPILEARQKYAYGPQHDYLDHPDVIGWTREGDSSHPKSGLATLITDGPGGSKRMYAGLKNAGETWYDITGNRSDTVKIGSDGWGEFHVNDGSVSIYVQK

SEQ ID NO: 28300 - protein, 483 aa, Bacillus sp.
HHNGTNGTMMQYFEWYLPNDGNHWNRLNSDASNLKSKGITAVWIPPAWKAASQNDVGYGAYDLYDLGEFNQKGTVRTKYGTRSQLQAAVTSLKNNGIQVYGDVVMNHKGGADATEMVRAVEVNPNNRNQEVTGEYTIEAWTRFDFPGRGNTHSSFKWRWYHFDGVDWDQSRDLQNRIYKFRGKAWDWEVDTEFGNYDYLMYVDYDMDHPEVVNELRNWGVWYTNTLGLDGFRIDAVKHIKYSFTRDWINHVRSATGKNMFAVAEFWKNDLGAIENYLQKTNWNHSVFDVPLHYNLYNASKSGGNYDMRNIFNGTVVQAHPNHAVTFVDNHDSQPEEALESFVEEWFKPLAYALTLTREQGYPSVFYGDYYGIPTHGVPAMRSKIDPILEARQKYAYGPQHDYLDHPDVIGWTREGDSSHPKSGLATLITDGPGGSKRMYAGLKNAGETWYDITGNRSDTVKIGSDGWGEFHVNDGSVSIYVQK

SEQ ID NO: 28301 - protein, 485 aa, Bacillus sp.
HHSGTNGTMMQYFEWYLPNDGNHWNRLNSDASNLKSKGITAVWIPPAWKGASQNDVGYGAYDLYDLGEFNQKGTVRTKYGTRSQLQAAVTSLKNNGIQVYGDVVMNHKGGADATEMVRAVEVNPNNRNQEVTGEYTIEAWTRFDFPGRGNTHSSFKWRWYHFDGVDWDQSRRLNNRIYKFRGHGKAWDWEVDTEFGNYDYLMYADYDMDHPEVVNELRNWGVWYTNTLGLDGFRIDAVKHIKYSFTRDWINHVRSATGKNMFAVAEFWKNDLGAIENYLQKTNWNHSVFDVPLHYNLYNASKSGGNYDMRNIFNGTVVQRHPSHAVTFVDNHDSQPEEALESFVEEWFKPLAYALTLTREQGYPSVFYGDYYGIPTHGVPAMRSKIDPILEARQKYAYGPQHDYLDHPDVIGWTREGDSSHPKSGLATLITDGPGGSKRMYAGLKNAGETWYDITGNRSDTVKIGSDGWGEFHVNDGSVSIYVQK

SEQ ID NO: 28302 - protein, 485 aa, Bacillus sp.
HHNGTNGTMMQYFEWYLPNDGNHWNRLNSDASNLKSKGITAVWIPPAWKGASQNDVGYGAYDLYDLGEFNQKGTVRTKYGTRSQLQAAVTSLKNNGISVYGDVVMNHKGGADATEMVRAVEVNPNNRNQEVTGEYTIEAWTRFDFPGRGNTHSSFKWRWYHFDGVDWDQSRRLNNRIYKFRGHGKAWDWEVDTEFGNYDYLMYADYDMDHPEVVNELRNWGVWYTNTLGLDGFRIDAVKHIKYSFTRDWINHVRSATGKNMFAVAEFWKNDLGAIENYLQKTNWNHSVFDVPLHYNLYNASKSGGNYDMRNIFNGTVVQRHPSHAVTFVDNHDSQPEEALESFVEEWFKPLAYALTLTREQGYPSVFYGDYYGIPTHGVPAMRSKIDPILEARQKYAYGPQHDYLDHPDVIGWTREGDSSHPKSGLATLITDGPGGSKRMYAGLKNAGETWYDITGNRSDTVKIGSDGWGEFHVNDGSVSIYVQK

SEQ ID NO: 28303 - protein, 483 aa, Bacillus sp.
HHNGTNGTMMQYFEWYLPNDGNHWNRLNSDASNLKSKGITAVWIPPAWKGASQNDVGYGAYDLYDLGEFNQKGTVRTKYGTRSQLQAAVTSLKNNGIQVYGDVVMNHKGGADATEMVRAVEVNPNNRNQEVTGEYTIEAWTRFDFPGRGNTHSSFKWRWYHFDGVDWDQSRRLNNRIYLFRGKAWDWEVDTEFGNYDYLMYADYDMDHPEVVNELRNWGVWYTNTLGLDGFRIDAVKHIKYSFTRDWINHVRSATGKNMFAVAEFWKNDLGAIENYLQKTNWNHSVFDVPLHYNLYNASKSGGNYDMRNIFNGTVVQRHPSHAVTFVDNHDSQPEEALESFVEEWFKPLAYALTLTREQGYPSVFYGDYYGIPTHGVPAMRSKIDPILEARQKYAYGPQHDYLDHPDVIGWTREGDSSHPKSGLATLITDGPGGSKRMYAGLKNAGETWYDITGNRSDTVKIGSDGWGEFHVNDGSVSIYVQK

SEQ ID NO: 28304 - protein, 485 aa, Bacillus sp.
HHNGTNGTMMQYFEWYLPNDGNHWNRLNSDASNLKSKGITAVWIPPAWKGASQNDVGYGAYDLYDLGEFNQKGTVRTKYGTRSQLQAAVTSLKNNGIQVYGDVVMNHKGGADATEMVRAVEVNPNNRNQEVTGEYTIEAWTRFDFPGRGNTHSSFKWRWYHFDGVDWDQSRRLNNRIYKFRGHGKAWDWEVDTEFGNYDYLMYADYDMDHPEVVNELRNWGVWYTNTLGLDGFRIDAVKHIKYSFTRDWINHVRIATGKNMFAVAEFWKNDLGAIENYLQKTNWNHSVFDVPLHYNLYNASKSGGNYDMRNIFNGTVVQRHPSHAVTFVDNHDSQPEEALESFVDEWFKPLAYALTLTREQGYPSVFYGDYYGIPTHGVPAMRSKIDPILEARQKYAYGPQHDYLDHPDVIGWTREGDSSHPKSGLATLITDGPGGSKRMYAGLKNAGETWYDITGNRSDTVKIGSDGWGEFHVNDQSVSIYVQK

SEQ ID NO: 28305 - protein, 485 aa, Bacillus sp.
HHNGTNGTMMQYFEWYLPNDGNHWNRLNSDASNLKSKGITAVWIPPAWKGASQNDVGYGAYDLYDLGEFNQKGTVRTKYGTRSQLQAAVTSLKNNGIQVYGDVVMNHKGGADATEMVRAVEVNPNNRNQEVTGEYTIEAWTRFDFPGRGNTHSSFKWRWYHFDGVDWDQSRRLNNRIYKFRGHGKAWDWEVDTEFGNYDYLMYADYDMDHPEVVNELRNWGVWYTNTLGLDGFRIDAVKHIKYSFTRDWINHVRSATGKNMFAVAEFWKNDLGAIENYLQKTNWNHSVFDVPLHYNLYNASKSGGNYDMRNIFNGTVVQRHPSHAVTFVDNHDSQPEEALESFVEEWFKPLAYALTLTREQGYPSVFYGDYYGIPTHGVPAMRSKIDPILEARQKYAYGPQHDYLDHPDVIGWKREGDSSHPKSGLATLITDGPGGSKRMYAGLKNAGETWYDITGNRSDTVKIGSDGWGEFHVNDGSVSIYVQK

SEQ ID NO: 28306 - protein, 485 aa, Bacillus sp.
HHNGTNGTMMQYFEWYLPNDGNHWNRLNSDASNLKSKGITAVWIPPAWKGASQNDVGYGAYDLYDLGEFNQKGTVRTKYGTRSQLQAAVTSLKNNGIQVYGDVVMNHKGGADATEMVRAVEVNPNNRNQEVTGEYTIEAWTRFDFPGRGNTHSSFKWRWYHFDGVDWDQSRRLNNRIYKFRGHGKAWDWEVATEFGNYDYLMYADYDMDHPEVVNELRNWGVWYTNTLGLDGFRIDAVKHIKYSFTRDWINHVRSATGKNMFAVAEFWKNDLGAIENYLQKTNWNHSVFDVPLHYNLYNASKSGGNYDMRNIFNGTVVQRHPSHAVTFVDNHDSQPEEALESFVEEWFKPLAYALTLTREQGYPSVFYGDYYGIPTHGVPAMRSKIDPILEARQKYAYGPQHDYLDHPDVIGWTREGDSSHPKSGLATLITDGPGGSKRMYAGLKNAGETWYDITGNRSDTVKIGSDGWGEFHVNDGSVSIYVQK

SEQ ID NO: 28307 - protein, 483 aa, Bacillus sp.
HHNGTNLTMMQYFEWYLPNDGNHWNRLNSDASNLKSKGITAVWIPPAWKGASQNDVGYGAYDLYDLGEFNQKGTVRTKYGTRSQLQAAVTSLKNNGIQVYGDVVMNHKGGADATEMVRAVEVNPNNRNQEVTGEYTIEAWTRFDFPGRGNTHSSFKWRWYHFDGVDWDQSRRLNNRIYKFRGKAWDWEVDTEFGNYDYLMYADYDMDHPEVVNELRNWGVWYTNTLGLDGFRIDAVKHIKYSFTRDWINHVRSATGKNMFAVAEFWKNDLGAIENYLQKTNWNHSVFDVPLHYNLYNASKSGGNYDMRNIFNGTVVQRHPSHAVTFVDNHDSQPEEALESFVEEWFKPLAYALTLTREQGYPSVFYGDYYGIPTHGVPAMRSKIDPILEARQKYAYGPQHDYLDHPDVIGWTREGDSSHPKSGLATLITDGPGGSKRMYAGLKNAGETWYDITGNRSDTVKIGSDGWGEFHVNDGSVSIYVQK

SEQ ID NO: 28308 - protein, 483 aa, Bacillus sp.
HHNGTNGTMMQYFEWYLPNDGNHWNRLNSDASNLKSKGITAVWIPPAWKGVSQNDVGYGAYDLYDLGEFNQKGTVRTKYGTRSQLQAAVTSLKNNGIQVYGDVVMNHKGGADATEMVRAVEVNPNNRNQEVTGEYTIEAWTRFDFPGRGNTHSSFKWRWYHFDGVDWDQSRRLTNRIYKFRGKAWDWEVDTEFGNYDYLMYVDYDMDHPEVVNELRNWGVWYTNTLGLDGFRIDAVKHIKYSFTRDWINHVRSATGKNMFAVAEFWKNDLGAIENYLQKTNWNHSVFDVPLHYNLYNASKSGGNYDMRNIFNGTVVQRHPSHAVTFVDNHDSQPEEALESFVEEWFKPLAYALTLTREQGYPSVFYGDYYGIPTHGVPAMRSKIDPILEARQKYAYGPQHDYLDHPDVIGWTREGDSSHPKSGLATLITDGPGGSKRMYAGLKNAGETWYDITGNRSDTVKIGSDGWGEFHVNDGSVSIYVQK

SEQ ID NO: 28309 - protein, 483 aa, Bacillus sp.
HHNGTNGTMMQYFEWYLPNDGNHWNRLNSDASNLKSKGITAVWIPPAWKGASQNDVGYGAYDLYDLGEFNQKGTVRTKYGTRSQLQAAVTSLKNNGIQVYGDVVMNHKGGADATEMVRAVEVNPNNRNQEVTGEYTIEAWTRFDFPGRGNTHSSFKWRWYHFDGVDWDQSRRLNNRIYKFRGKAWDWEVDTEFGNYDYLMYADYDMDHPEVVSELRNWGVWYTNTLGLDGFRIDAVKHIKYSFTRDWINHVRSATGKNMFAVAEFWKNDLGAIENYLQKTNWNHSVFDVPLHYNLYNASKSGGNYDMRNIFNGTVVQRHPSHAVTFVDNHDSQPEEALESFVEEWFKPLAYALTLTREQGYPSVFYGDYYGIPTHGVPAMRSKIDPILEARQKYAYGPQHDYLDHPDVIGWTREGDSSHPKSGLATLITDGPGGSKRMYAGLKNAGETWYDITGNRSDTVKIGSDGWGEFHVNDGSVSIYVQK

SEQ ID NO: 28310 - protein, 485 aa, Bacillus sp.
HHNGTNGTMMQYFEWYLPNDGNHWNRLNSDASNLKSKGITAVWIPPAWKGVSQNDVGYGAYDLYDLGEFNQKGTVRTKYGTRSQLQAAVTSLKNNGIQVYGDVVMNHKGGADATEMVRAVEVNPNNRNQEVTGEYTIEAWTRFDFPGRGNTHSSFKWRWYHFDGVDWDQSRRVNNRIYKFRGHGKAWDWEVDTEFGNYDYLMYVDYDMDHPEVVNELRNWGVWYTNTLGLDGFRIDAVKHIKYSFTRDWINHVRSATGKNMFAVAEFWKNDLGAIENYLQKTNWNHSVFDVPLHYNLYNASKSGGNYDMRNIFNGTVVQRHPSHAVTFVDNHDSQPEEALESFVEEWFKPLAYALTLTREQGYPSVFYGDYYGIPTHGVPAMRSKIDPILEARQKYAYGPQHDYLDHPDVIGWTREGDSSHPKSGLATLITDGPGGSKRMYAGLKNAGETWYDITGNRSDTVKIGSDGWGEFHVNDGSVSIYVQK

SEQ ID NO: 28311 - protein, 485 aa, Bacillus sp.
HHNGTNGTMMQYFEWYLPNDGNHWNRLNSDASNLKSKGITAVWIPPAWKGASQNDVGYGAYDLYDLGEFNQKGTVRTKYGTRSQLQAAVTSLKNNGIQVYGDVVMNHKGGADATEMVRAVEVNPNNRNQEVTGEYTIEAWTRFDFPGRGNTHSSFKWRWYHFDGVDWDQSREINNRIYKFRGHGKAWDWEVDTEFGNYDYLMYTDYDMDHPEVVNELRNWGVWYTNTLGLDGFRIDAVKHIKYSFTRDWINHVRSATGKNMFAVAEFWKNDLGAIENYLQKTNWNHSVFDVPLHYNLYNASKSGGNYDMRNIFNGTVVQRHPSHAVTFVDNHDSQPEEALESFVEEWFKPLAYALTLTREQGYPSVFYGDYYGIPTHGVPAMRSKIDPILEARQKYAYGPQHDYLDHPDVIGWTREGDSSHPKSGLATLITDGPGGSKRMYAGLKNAGETWYDITGNRSDTVKIGSDGWGEFHVNDGSVSIYVQK

SEQ ID NO: 28312 - protein, 483 aa, Synthetic construct
HHNGTNGTMMQYFEWYLPNDGNHWNRLNSDASNLKSKGITAVWIPPAWKGASQNDVGYGAYDLYDLGEFNQKGTVRTKYGTRSQLQAAVTSLKNNGIQVYGDVVINHKGGADATEMVRAVEVNPNNRNQEVTGEYTIEAWTRFDFPGRGNTHSSFKWRWYHFDGVDWDQSRRLNNRIYKFRGKAWDWEVDTENGNYDYLMYADYDMDHPEVVNELRNWGVWYTNTLGLDGFRIDAVKHIKYSFIRDWINHVRSATGKNMFAVAEFWKNDLGAIENYLQKTNWNHSVFDVPLHYNLYNASKSGGNYDMRNIFNGTVVQRHPSHAVTFVDNHDSQPEEALESFVEEWFKPLAYALTLTREQGYPSVFYGDYYGIPTHGVPAMRSKIDPILEARQKYAYGPQHDYLDHPDVIGWTREGDSSHPKSGLATLITDGPGGSKRMYAGLKNAGETWYDITGNRSDTVKIGSDGWGEFHVNDGSVSIYVQK

SEQ ID NO: 28313 - protein, 483 aa, Bacillus sp.
HHNGTNGTMMQYFEWYLPNDGNHWNRLNSDASNLKSKGITAVWIPPAWKGASQNDVGYGAYDLYDLGEFNQKGTVRTKYGTRSQLQAAVTSLKNNGIQVYGDVVMNHKGGADATEMVRAVEVNPNNRNQEVTGEYTIEAWTRFDFPGRQNTHSSFKWRWYHFDGVDWDQSRRLNNRIYKFRGKAWDWEVDTEFGNYDYLMYADYDMDHPEVVNELRNWGVWYTNTLGLDGFRIDAVKHIKYSFTRDWINHVRSATGKNMFAVAEFWKNDLGAIENYLQKTNWNHSVFDVPLHYNLYNASKSGGNYDMRNIFNGTVVQRHPSHAVTFVDNHDSQPEEALESFVEEWFKPLAYALTLTREQGYPSVFYGDYYGIPTHGVPAMRSKIDPILEARQKYAYGPQHDYLDHPDVIGWTREGDSSHPKSGLATLITDGPGGSKRMYAGLKNAGETWYDITGNRSDTVKIGSDGWGEFHVNDGSVSIYVQK

SEQ ID NO: 28314 - protein, 483 aa, Bacillus sp.
HHNGTNGTMMQYFEWYLPNDGNHWNRLNSDASNLKSKGITAVWIPPAWKGASQNDVGYGAYDLYDLGEFNQKGTVRTKYGTRSQLQAAVTSLKNNGIQVYGDVVMNHKGGADATEMVRAVEVNPNNRNQEVTGEYTIEAWTRFDFPGRGNTHSSFKWRWYHFDGVDWDQSRNLTNRIYKFRGKAWDWEVDTEFGNYDYLMYADYDMDHPEVVNELRNWGVWYTNTLGLDGFRIDAVKHIKYSFTRDWINHVRSATGKNMFAVAEFWKNDLGAIENYLQKTNWNHSVFDVPLHYNLYNASKSGGNYDMRNIFNGTVVQRHPSNAVTFVDNHDSQPEEALESFVEEWFKPLAYALTLTREQGYPSVFYGDYYGIPTHGVPAMRSKIDPILEARQKYAYGPQHDYLDHPDVIGWTREGDSSHPKSGLATLITDGPGGSKRMYAGLKNAGETWYDITGNRSDTVKIGSDGWGEFHVNDGSVSIYVQK

SEQ ID NO: 28315 - protein, 485 aa, Bacillus sp.
HHNGTNGTMMQYFEWYLPNDGNHWNRLNSDASNLKSKGITAVWIPPAWKGASQNDVGYGAYDLYDLGEFNQKGTVRTKYGTRSQLQAAVTSLKNNGIQVYGDVVMNHKGGADATEMVRAVEVNPNNRNQEVTGEYTIEAWTRFDFPGRGNTHSSFKWRWRHFDGVDWDQSRRLNNRIYKFRGHGKAWDWEVDTEFGNYDYLMYADYDMDHPEVVNELRNWGVWYTNTLGLDGFRIDAVKHIKYSFTRDWINHVRSATGKNMFAVAEFWKNDLGAIENYLQKTNWNHSVFDVPLHYNLYNASKSGGNYDMRNIFNGTVVQRHPSHAVTFVDNHDSQPEEALESFVEEWFKPLAYALTLTREQGYPSVFYGDYYGIPTHGVPAMRSKIDPILEARQKYAYGPQHDYLDHPDVIGWTREGDSSHPKSGLATLITDGPGGSKRMYAGLKNAGETWYDITGNRSDTVKIGSDGWGEFHVNDGSVSIYVQK

SEQ ID NO: 28316 - protein, 485 aa, Bacillus sp.
HHNGTNGTMMQYFEWYLPNDGNHWNRLNSDASNLKSKGIIAVWIPPAWKGASQNDVGYGAYDLYDLGEFNQKGTVRTKYGTRSQLQAAVTSLKNNGIQVYGDVVMNHKGGADATEMVRAVEVNPNNRNQEVTGEYTIEAWTRFDFPGRGNTHSSFKWRWYHFDGVDWDQSRRLNNRIYKFRGHGKAWDWEVDTEFGNYDYLMYADYDMDHPEVVNELRNWGVWYTNTLGLDGFRIDAVKHIKYSFTRDWINHVRSATGKNMFAVAEFWKNDLGAIENYLQKTNWNHSVFDVPLHYNLYNASKSGGNYDMRNIFNGTVVQRHPSHAVTFVDNHDSQPEEALESFVEEWFKPLAYALTLTREQGYPSVFYGDYYGIPTHGVPAMRSKIDPILEARQKYAYGPQHDYLDHPDVIGWTREGDSSHPKSGLATLITDGPGGSKRMYAGLKNAGETWYDITGNRSDTVKIGSDGWGEFHVNDGSVSIYVQK

SEQ ID NO: 28317 - protein, 485 aa, Bacillus sp.
HHNGTNGTMMQYFEWYLPNDGNHWNRLNSDASNLKSKGITAVWIPPAWKATSQNDVGYGAYDLYDLGEFNQKGTVRTKYGTRSQLQAAVTSLKNNGIQVYGDVVMNHKGGADATEMVRAVEVNPNNRNQEVTGEYTIEAYTRFDFPGRGNTHSSFKWRWYHFDGVDWDQSRNVNNRIYKFRGHGKAWDWEVDTEFGNYDYLMYADYDMDHPEVVNELRNWGVWYTNTLGLDGFRIDAVKHIKYSFTRDWINHVRSATGKNMFAVAEFWKNDLGAIENYLQKTNWNHSVFDVPLHYNLYNASKSGGNYDMRNIFNGTVVQRHPSHAVTFVDNHDSQPEEALESFVEEWFKPLAYALTLTREQGYPSVFYGDYYGIPTHGVPAMRSKIDPILEARQKYAYGPQHDYLDHPDVIGWTREGDSSHPKSGLATLITDGPGGSKRMYAGLKNAGETWYDITGNRSDTVKIGSDGWGEFHVNDGSVSIYVQK

SEQ ID NO: 28318 - protein, 485 aa, Bacillus sp.
HHNGTNGTMMQYFEWYLPNDGNHWNRLNSDASNLKSKGITAVWIPPAWKAVSQNDVGYGAYDLYDLGEFNQKGTVRTKYGTRSQLQAAVTSLKNNGIQVYGDVVMNHKGGADATEMVRAVEVNPNNRNQEVTGEYTIEAWTRFDFPGRGNTHSSFKWRWYHFDGVDWDQSREFTNRIYKFRGHGKAWDWEVDTEFGNYDYLMYVDYDMDHPEVVNELRNWGVWYTNTLGLDGFRIDAVKHIKYSFTRDWINHVRSATGKNMFAVAEFWKNDLGAIENYLQKTNWNHSVFDVPLHYNLYNASKSGGNYDMRNIFNGTVVQRHPSHAVTFVDNHDSQPEEALESFVDPWFKPLAYALTLTREQGYPSVFYGDYYGIPTHGVPAMRSKIDPILEARQKYAYGPQHDYLDHPDVIGWTREGDSSHPKSGLATLITDGPGGSKRMYAGLKNAGETWYDITGNRSDTVKIGSDGWGEFHVNGGSVSIYVQK

SEQ ID NO: 28319 - protein, 485 aa, Bacillus sp.
HHNGTNGTMMQYFEWYLPNDGNHWNRLNSDASNLKSKGITAVWIPPAWKGASQNDVGYGAYDLYDLGEFNQKGTVRTKYGTRSQLQAAVTSLKNNGIQVYGDVVMNHKGGADATEMVRAVEVNPNNRNQEVTGEYTIEAWTRFDFPGRGNTHSSFKWRWYHFDGVDWDQSRRLNNRIYKFRGHGKAWDWEVDTEFGNYDYLMYADYDMDHPEVVNELRNWGVWYTNTLGLDGFRIDAVKHIKYSFTRDWINHVRSATGKNMFAVAEFWKNDLGAIENYLQKTNWNHSVFDVPLHYNLYNASKSGGNYDMRNIFNGTVVQRHPSHAVTFVDNHDSQPEEALESFVEEWFKPLAYALTLTREQGYPSVFYGDYYGIPTHGVPAMRSKIDPILEARQKYAYGPQHDYLDHPDVMGWTREGDSSHPKSGLATLITDGPGGSKRMYAGLKNAGETWYDITGNRSDTVKIGSDGWGEFHVNDGSVSIYVQK

SEQ ID NO: 28320 - protein, 485 aa, Bacillus sp.
HHNGTNGTMMQYFEWYLPNDGNHWNRLNSDASNLKSKGITAVWIPPAWKGASQNDVGYGAYDLYDLEEFNQKGTVRTKYGTRSQLQAAVTSLKNNGIQVYGDVVMNHKGGADATEMVRAVEVNPNNRNQEVTGEYTIEAWTRFDFPGRGNTHSSFKWRWYHFDGVDWDQSRRLNNRIYKFRGHGKAWDWEVDTEFGNYDYLMYADYDMDHPEVVNELRNWGVWYTNTLGLDGFRIDAVKHIKYSFTRDWINHVRSATGKNMFAVAEFWKNDLGAIENYLQKTNWNHSVFDVPLHYNLYNASKSGGNYDMRNIFNGTVVQRHPSHAVTFVDNHDSQPEEALESFVEEWFKPLAYALTLTREQGYPSVFYGDYYGIPTHGVPAMRSKIDPILEARQKYAYGPQHDYLDHPDVIGWTREGDSSHPKSGLATLITDGPGGSKRMYAGLKNAGETWYDITGNRSDTVKIGSDGWGEFHVNDGSVSIYVQK

SEQ ID NO: 28321 - protein, 485 aa, Bacillus sp.
HHNGTNGTMMQYFEWYLPNDGNHWNRLNSDASNLKSKGITAVWIPPAWKGASQNDVGYGAYDLYDLGEFNQKGTVRTKYGTRSQLQAAVTSLKNNGIQVYGDVVMNHKGGADSTEMVRAVEVNPNNRNQEVTGEYTIEAWTRFDFPGRGNTHSSFKWRWYHFDGVDWDQSRRLNNRIYKFRGHGKAWDWEVDTEFGNYDYLMYADYDMDHPEVVNELRNWGVWYTNTLGLDGFRIDAVKHIKYSFTRDWINHVRSATGKNMFAVAEFWKNDLGAIENYLQKTNWNHSVFDVPLHYNLYNASKSGGNYDMRNIFNGTVVQRHPSHAVTFVDNHDSQPEEALESFVEEWFKPLAYALTLTREQGYPSVFYGDYYGIPTHGVPAMRSKIDPILEARQKYAYGPQHDYLDHPDVIGWTREGDSSHPKSGLATLITDGPGGSKRMYAGLKNAGETWYDITGNRSDTVKIGSDGWGEFHVNDGSVSIYVQK

SEQ ID NO: 28322 - protein, 483 aa, Synthetic construct
HHNGTNGTMMQYFEWYLPNDGNHWNRLNSDASNLKSKGITAVWIPPAWKGASQNDVGYGAYDLYDLGEFNQKGTVRTKYGTRSQLQAAVTSLKNNGIQVYGDVVMNHKGGADATEMVRAVEVNPNNRNQEVTGEYTIEAWTRFDFPGRGNTHSSFKWRWYHFDGVDWDQSRRLNNRIYLFRGKAWDWPVDTENGNYDYLMYADIDMDHPEVVNELRNWGVWYTNTLGLDGFRIDAVKHIKYSFTRDWINHVRSATGKNMFAVAEFWKNDLGAIENYLQKTNWNHSVFDVPLHYNLYNASKSGGNYDMRNIFNGTVVQRHPSHAVTFVDNHDSQPEEALESFVEEWFKPLAYALTLTREQGYPSVFYGDYYGIPTHGVPAMRSKIDPILEARQKYAYGPQHDYLDHPDVIGWTREGDSSHPKSGLATLITDGPGGSKRMYAGLKNAGETWYDITGNRSDTVKIGSDGWGEFHVNDGSVSIYVQK

SEQ ID NO: 28323 - protein, 483 aa, Bacillus sp.
HHNGTNGTMMQYFEWYLPNDGNHWNRLNSDASNLKSKGITAVWIPPAWKGASQNDVGYGAYDLYDLGEFNQKGTVRTKYGTRSQLQAAVTSLKNNGIQVYGDVVMNHKGGADATEMVRAVEVNPNNRNQEVTGEYTIEAWTRFDFPGRGNTHSSFKWRWYHFDGVDWDQSRETSNRIYKFRGKAWDWEVDTEFGNYDYLMYTDYDMDHPEVVNELRNWGVWYTNTLGLDGFRIDAVKHIKYSFTRDWINHVRSATGKNMFAVAEFWKNDLGAIENYLQKTNWNHSVFDVPLHYNLYNASKSGGNYDMRNIFNGTVVQRHPSHAVTFVDNHDSQPEEALESFVEEWFKPLAYALTLTREQGYPSVFYGDYYGIPTHGVPAMRSKIDPILEARQKYAYGPQHDYLDHPDVIGWTREGDSSHPKSGLATLITDGPGGSKRMYAGLKNAGETWYDITGNRSDTVKIGSDGWGEFHVNDGSVSIYVQK

SEQ ID NO: 28324 - protein, 483 aa, Bacillus sp.
HHNGTNGTMMQYFEWYLPNDGNHWNRLNSDASNLKSKGITAVWIPPAWKGASQNDVGYGAYDLYDLGEFNQKGTVRTKYGTRSQLQAAVTSLKNNGIQVYGDVVMNHKGGADATEMVRAVEVNPNNRNQEVTGEYTIEAWTRFDFPGRGNTHSSFKWRWYHFDGVDWDQSRRLNNRIYKFRGKAWDWEVDTEFGNYDYLMYADYDMDHPEVVGELRNWGVWYTNTLGLDGFRIDAVKHIKYSFTRDWINHVRSATGKNMFAVAEFWKNDLGAIENYLQKTNWNHSVFDVPLHYNLYNASKSGGNYDMRNIFNGTVVQRHPSHAVTFVDNHDSQPEEALESFVEEWFKPLAYALTLTREQGYPSVFYGDYYGIPTHGVPAMRSKIDPILEARQKYAYGPQHDYLDHPDVIGWTREGDSSHPKSGLATLITDGPGGSKRMYAGLKNAGETWYDITGNRSDTVKIGSDGWGEFHVNDGSVSIYVQK

SEQ ID NO: 28325 - protein, 483 aa, Synthetic construct
HHNGTNGTMMQYFEWYLPNDGNHWNRLNSDASNLKSKGITAVWIPPAWKGASQNDVGYGAYDLYDLGEFNQKGTVRTKYGTRSQLQAAVTSLKNNGIQVYGDVVMNHKGGADATEMVRAVEVNPNNRNQEVTGEYTIEAWTRFDFPGRGNTHSSFKWRWYHFDGVDWDQSRRLNNRIYKFRGKAWDWEVDTENGNYDYLMYADYDMDYPEVVNEIRNWGVWYTNTLGLDGFRIDAVKHIKYSFTRDWINHVRSATGKNMFAVAEFWKNDLGAIENYLQKTNWNHSVFDVPLHYNLYNASKSGGNYDMRNIFNGTVVQRHPSHAVTFVDNHDSQPEEALESFVEEWFKPLAYALTLTREQGYPSVFYGDYYGIPTHGVPAMRSKIDPILEARQKYAYGPQHDYLDHPDVIGWTREGDSSHPKSGLATLITDGPGGSKRMYAGLKNAGETWYDITGNRSDTVKIGSDGWGEFHVNDGSVSIYVQK

SEQ ID NO: 28326 - protein, 485 aa, Bacillus sp.
HENGTNGTMMQYFEWYLPNDGNHWNRLNSDASNLKSKGITAVWIPPAWKGASQNDVGYGAYDLYDLGEFNQKGTVRTKYGTRSQLQAAVTSLKNNGIQVYGDVVMNHKGGADATEMVRAVEVNPNNRNQEVTGEYTIEAWTRFDFPGRGNTHSSFKWRWYHFDGVDWDQSRRLNNRIYKFRGHGKAWDWEVDTEFGNYDYLMYADYDMDHPEVVNELRNWGVWYTNTLGLDGFRIDAVKHIKYSFTRDWINHVRSATGKNMFAVAEFWKNDLGAIENYLQKTNWNHSVFDVPLHYNLYNASKSGGNYDMRNIFNGTVVQRHPSHAVTFVDNHDSQPEEALESFVEEWFKPLAYALTLTREQGYPSVFYGDYYGIPTHGVPAMRSKIDPILEARQKYAYGPQHDYLDHPDVIGWTREGDSSHPKSGLATLITDGPGGSKRMYAGLKNAGETWYDITGNRSDTVKIGSDGWGEFHVNDGSVSIYVQK

SEQ ID NO: 28327 - protein, 485 aa, Bacillus sp.
HHNGTNGTMMQYFEWYLPNDGNHWNRLNSDASNLKSKGITAVWIPPAWKGLSQNDVGYGAYDLYDLGEFNQKGTVRTKYGTRSQLQAAVTSLKNNGIQVYGDVVMNHKGGADATEMVRAVEVNPNNRNQEVTGEYTIEAWTRFDFPGRGNTHSSFKWRWYHFDGVDWDQSRNLSNRIYKFRGHGKAWDWEVDTEFGNYDYLMYTDYDMDHPEVVNELRNWGVWYTNTLGLDGFRIDAVKHIKYSFTRDWINHVRSATGKNMFAVAEFWKNDLGAIENYLQKTNWNHSVFDVPLHYNLYNASKSGGNYDMRNIFNGTVVQRHPSHAVTFVDNHDSQPEEALESFVEEWFKPLAYALTLTREQGYPSVFYGDYYGIPTHGVPAMRSKIDPILEARQKYAYGPQHDYLDHPDVIGWTREGDSSHPKSGLATLITDGPGGSKRMYAGLKNAGETWYDITGNRSDTVKIGSDGWGEFHVNDGSVSIYVQK

SEQ ID NO: 28328 - protein, 483 aa, Bacillus sp.
HHNGTNGTMMQYFEWYLPNDGNHWNRLNSDASNLKSKGITAVWIPPAWKGASQNDVGYGAYDLYDLGEFNQKGTVRTKYGTRSQLQAAVTSLKNNGIQVYGDVVMNHKGGADATEMVRAVEVNPNNRNQEVTGEYTIEAWTRFDFPGRGNTHSSFKWRWYHFDGVDWDQSRRLNNRIYKFRGKAWDWEVDTEFGNYDYLMYADYDMDHPEVVNELRNWGVWYTNTLGLDGFRIDAVKHIKYSFTRDWINHVRSATGKNMFAVAEFWKNDLGAIENYLQKTNWNHSVFDVPLHYNLYNASKSGGNYDMRNIFNGTVVQANPNHAVTFVDNHDSQPEEALESFVDPWFKPLAYALTLTREQGYPSVFYGDYYGIPTHGVPAMRSKIDPILEARQKYAYGPQHDYLDHPDVIGWTREGDSSHPKSGLATLITDGPGGSKRMYAGLKNAGETWYDITGNRSDTVKIGSDGWGEFHVNGGSVSIYVQK

SEQ ID NO: 28329 - protein, 483 aa, Bacillus sp.
HHNGTNGTMMQYFEWYLPNDGNHWNRLNSDASNLKSKGITAVWIPPAWKAASQNDVGYGAYDLYDLGEFNQKGTVRTKYGTRSQLQAAVTSLKNNGIQVYGDVVMNHKGGADATEMVRAVEVNPNNRNQEVTGEYTIEAWTRFDFPGRGNTHSSFKWRWYHFDGVDWDQSRDLQNRIYKFRGKAWDWEVDTEFGNYDYLMYADYDMDHPEVVNELRNWGVWYTNTLGLDGFRIDAVKHIKYSFTRDWINHVRSATGKNMFAVAEFWKNDLGAIENYLQKTNWNHSVFDVPLHYNLYNASKSGGNYDMRNIFNGTVVQANPNHAVTFVDNHDSQPEEALESFVEEWFKPLAYALTLTREQGYPSVFYGDYYGIPTHGVPAMRSKIDPILEARQKYAYGPQHDYLDHPDVIGWTREGDSSHPKSGLATLITDGPGGSKRMYAGLKNAGETWYDITGNRSDTVKIGSDGWGEFHVNDGSVSIYVQK

SEQ ID NO: 28330 - protein, 483 aa, Bacillus sp.
HHNGTNGTMMQYFEWYLPNDGNHWNRLNSDASNLKSKGITAVWIPPAWKGASQNDVGYGAYDLYDLGEFNQKGTVRTKYGTRSQLQAAVTSLKNNGIQVYGDVVMNHKGGADATEMVRAVEVNPNNRNQEVTGEYTIEAWTRFDFPGRGNTHSSFKWRWYHFDGVDWDQSRRLNNRIYKFRGKAWDWEVDTEFGNYDYLMYADYDMDHPEVVNELRNWGVWYTNTLGLDGFRIDAVKHIKYSFTRDWINHVRSATGKNMFAVAEFWKNDLGAIENYLQKTNWNHSVFDVPLHYNLYNASKSGGNYDMRNIFNGTVVQRHPSHAVTFVDNHDSQPEEALESFVEEWFKPLAAALTLTREQGYPSVFYGDYYGIPTHGVPAMRSKIDPILEARQKYAYGPQHDYLDHPDVIGWTREGDSSHPKSGLATLITDGPGGSKRMYAGLKNAGETWYDITGNRSDTVKIGSDGWGEFHVNDGSVSIYVQK

SEQ ID NO: 28331 - protein, 483 aa, Bacillus sp.
HHNGTNGTMMQYFEWYLPNDGNHWNRLNSDASNLKSKGITAVWIPPAWKGASQNDVGYGAYDLYDLGEFNQKGTVRTKYGTRSQLQAAVTSLKNNGIQVYGDVVMNHKGGADATEMVRAVEVNPNNRNQEVTGEYTIEAWTRFDFPGRGNTHSSFKWRWYHFDGVDWDQSRRLNNRIYKFRGKAWDWEVDTEFGNYDYLMYADYDMDHPEVVNELRNWGVWYTNTLGLDGFRIDAVKHIKYSFTRDWINHVRSATGKNMFAVAEFWKNDLGAIENYLQKTNWNHSVFDVPLHYNLYNASKSGGNYDMRNIFNGTVVQRHPSHAVTFVDNHDSQPEEALESFVDEWFKPLAYALTLTREQGYPSVFYGDYYGIPTHGVPAMRSKIDPILEARQKYAYGPQHDYLDHPDVIGWTREGDSSHPKSGLATLITDGPGGSKRMYAGLKNAGETWYDITGNRSDTVKIGSDGWGEFHVNKSSVSIYVQK

SEQ ID NO: 28332 - protein, 483 aa, Synthetic construct
HHNGTNGTMMQYFEWYLPNDGNHWNRLNSDASNLKSKGITAVWIPPAWKGASQNDVGYGAYDVYDLGEFNQKGTVRTKYGTRSQLQAAVTSLKNNGIQVYGDVVFNHKGGADATEMVRAVEVNPNNRNQEVTGEYTIEAWTRFDFPGRGNTHSSFKWRWYHFDGVDWDQSRRLNNRIYKFRGKAWDWEVDTENGNYDYLMYADYDMDHPEVVNELRNWGVWYTNTLGLDGFRIDAVKHIKYSFTRDWINHVRSATGKNMFAVAEFWKNDLGAIENYLQKTNWNHSVFDVPLHYNLYNASKSGGNYDMRNIFNGTVVQRHPSHAVTFVDNHDSQPEEALESFVEEWFKPLAYALTLTREQGYPSVFYGDYYGIPTHGVPAMRSKIDPILEARQKYAYGPQHDYLDHPDVIGWTREGDSSHPKSGLATLITDGPGGSKRMYAGLKNAGETWYDITGNRSDTVKIGSDGWGEFHVNDGSVSIYVQK

SEQ ID NO: 28333 - protein, 483 aa, Bacillus sp.
HHNGTNGTMMQYFEWYLPNDGNHWNRLNSDASNLKSKGITAVWIPPAWKGASQNDVGYGAYDLYDLGEFNQKGTVRTKYGTRSQLQAAVTSLKNNGIQVYGDVVMNHKGGADATEMVRAVEVNPNNRNQEVTGEYTIEAWTRFDFPGRGNTHSSFKWRWYHFDGVDWDQSRRLNNRIYAFRGKAWDWEVDTEFGNYDYLMYADYDMDHPEVVNELRNWGVWYTNTLGLDGFRIDAVKHIKYSFTRDWINHVRSATGKNMFAVAEFWKNDLGAIENYLQKTNWNHSVFDVPLHYNLYNASKSGGNYDMRNIFNGTVVQRHPSHAVTFVDNHDSQPEEALESFVEEWFKPLAYALTLTREQGYPSVFYGDYYGIPTHGVPAMRSKIDPILEARQKYAYGPQHDYLDHPDVIGWTREGDSSHPKSGLATLITDGPGGSKRMYAGLKNAGETWYDITGNRSDTVKIGSDGWGEFHVNDGSVSIYVQK

SEQ ID NO: 28334 - protein, 483 aa, Bacillus sp.
HHNGTNGTMMQYFEWYLPNDGNHWNRLNSDASNLKSKGITAVWIPPAWKGASQNDVGYGAYDLYDLGEFNQKGTVRTKYGTRSQLQAAVTSLKNNGIQVYGDVVMNHKGGADATEMVRAVEVNPNNRNQEVTGEYTIEAWTRFDFPGRGNTHSSFKWRWYHFDGVDWDQSRRLNNRIYKFRGKAWDWEVDTEFGNYDYLMYADYDMDHPEVVNELRNWGVWYTNTLGLDGFRIDAVKHIKYSFTRDWINHVRSATGKNMFAVAEFWKNDLGAIENYLQKTNWNHSVFDVPLHYNLYNASQSGGNYDMRNIFNGTVVQRHPSHAVTFVDNHDSQPEEALESFVEEWFKPLAYALTLTREQGYPSVFYGDYYGIPTHGVPAMRSKIDPILEARQKYAYGPQHDYLDHPDVIGWTREGDSSHPKSGLATLITDGPGGSKRMYAGLKNAGETWYDITGNRSDTVKIGSDGWGEFHVNQSSVSIYVQK

SEQ ID NO: 28335 - protein, 485 aa, Bacillus sp.
HHNGTNGTMMQYFEWYLPNDGNHWNRLNSDASNLKSKGITAVWIPPAWKGASQNDVGYGAYDLYDLGEFNQKGTVRTKYGTRSQLQAAVTSLKNNGIQVYGDVVMNHKGGADATEMVRAVEVNPNNRNQEVTGEYTIEAWTRFDFPGRGNTHSSFKWRWYHFDGVDWDQSRRLNNRIYKFRGHGKAWDWEVDTEFGNYDYLMYADYDMDHPEVVNELRNWGVWYTNTLGLDGFRIDAVKHIKYSFTRDWINHVRSATGKNMFAVAEFWKNDLGAINNYLQKTNWNHSVFDVPLHYNLYNASKSGGNYDMRNIFNGTVVQRHPSHAVTFVDNHDSQPEEALESFVEEWFKPLAYALTLTREQGYPSVFYGDYYGIPTHGVPAMRSKIDPILEARQKYAYGPQHDYLDHPDVIGWTREGDSSHPKSGLATLITDGPGGSKRMYAGLKNAGETWYDITGNRSDTVKIGSDGWGEFHVNDGSVSIYVQK

SEQ ID NO: 28336 - protein, 483 aa, Bacillus sp.
HHNGTNGTMMQYFEWYLPNDGNHWNRLNSDASNLKSKGITAVWIPPAWKGASQNDVGYGAYDLYDLGEFNQKGTVRTKYGTRSQLQAAVTSLKNNGIQVYGDVVMNHKGGADATEMVRAVEVNPNNRNQEVTGEYTIEAWTRFDFPGRGNTHSSFKWRWYHFDGVDWDQSGRLNNRIYKFRGKAWDWEVDTEFGNYDYLMYADYDMDHPEVVNELRNWGVWYTNTLGLDGFRIDAVKHIKYSFTRDWINHVRSATGKNMFAVAEFWKNDLGAIENYLQKTNWNHSVFDVPLHYNLYNASKSGGNYDMRNIFNGTVVQRHPSHAVTFVDNHDSQPEEALESFVEEWFKPLAYALTLTREQGYPSVFYGDYYGIPTHGVPAMRSKIDPILEARQKYAYGPQHDYLDHPDVIGWTREGDSSHPKSGLATLITDGPGGSKRMYAGLKNAGETWYDITGNRSDTVKIGSDGWGEFHVNDGSVSIYVQK

SEQ ID NO: 28337 - protein, 483 aa, Bacillus sp.
HHNGTNGTMMQYFEWYLPNDGNHWNRLNSDASNLKSKGITAVWIPPAWKAASQNDVGYGAYDLYDLGEFNQKGTVRTKYGTRSQLQAAVTSLKNNGIQVYGDVVMNHKGGADATEMVRAVEVNPNNRNQEVTGEYTIEAWTRFDFPGRGNTHSSFKWRWYHFDGVDWDQSRDTSNRIYKFRGKAWDWEVDTEFGNYDYLMYADYDMDHPEVVNELRNWGVWYTNTLGLDGFRIDAVKHIKYSFTRDWINHVRSATGKNMFAVAEFWKNDLGAIENYLQKTNWNHSVFDVPLHYNLYNASKSGGNYDMRNIFNGTVVQRHPSHAVTFVDNHDSQPEEALESFVEEWFKPLAYALTLTREQGYPSVFYGDYYGIPTHGVPAMRSKIDPILEARQKYAYGPQHDYLDHPDVIGWTREGDSSHPKSGLATLITDGPGGSKRMYAGLKNAGETWYDITGNRSDTVKIGSDGWGEFHVNDGSVSIYVQK

SEQ ID NO: 28338 - protein, 485 aa, Bacillus sp.
HHNGTNGTMMQYFEWYLPNDGNHWNRLNSDASNLKSKGITAVWIPPAWKAVSQNDVGYGAYDLYDLGEFNQKGTVRTKYGTRSQLQAAVTSLKNNGIQVYGDVVMNHKGGADATEMVRAVEVNPNNRNQEVTGEYTIEAWTRFDFPGRGNTHSSFKWRWYHFDGVDWDQSRDLENRIYKFRGHGKAWDWEVDTEFGNYDYLMYADYDMDHPEVVNELRNWGVWYTNTLGLDGFRIDAVKHIKYSFTRDWINHVRSATGKNMFAVAEFWKNDLGAIENYLQKTNWNHSVFDVPLHYNLYNASKSGGNYDMRNIFNGTVVQSHPNHAVTFVDNHDSQPEEALESFVEEWFKPLAYALTLTREQGYPSVFYGDYYGIPTHGVPAMRSKIDPILEARQKYAYGPQHDYLDHPDVIGWTREGDSSHPKSGLATLITDGPGGSKRMYAGLKNAGETWYDITGNRSDTVKIGSDGWGEFHVNYGSVSIYVQK

SEQ ID NO: 28339 - protein, 485 aa, Bacillus sp.
HHNGTNGTMMQYFEWYLPNDGNHWNRLNSDASNLKSKGITAVWIPPAWKGASQNDVGYGAYDLYDLGEFNQKGTVRTKYGTRSQLQAAVTSLKNNGIQVYGDVVMNHKGGADATEMVRAVEVNPNNRNQEVTGEYTIEAWTRFDFPGRGNTHSSFKWRWYHFDGVDWDQSRRLNNRIYKFRGHGKAWDWEVDTEFGNYDYLMYADYDMDHPEVVNELRNWGVWYTNTLGLDGFRIDAVKHIKYSFTRDWINHVRSATGKNMFAVAEFWKNDLGAIENYLQKTNWNHSVFDVPLHYNLYNASKSGNNYDMRNIFNGTVVQRHPSHAVTFVDNHDSQPEEALESFVEEWFKPLAYALTLTREQGYPSVFYGDYYGIPTHGVPAMRSKIDPILEARQKYAYGPQHDYLDHPDVIGWTREGDSSHPKSGLATLITDGPGGSKRMYAGLKNAGETWYDITGNRSDTVKIGSDGWGEFHVNDGSVSIYVQK

SEQ ID NO: 28340 - protein, 485 aa, Bacillus sp.
HHNGTNGTMMQYFEWYLPNDGNHWNRLNSDASNLKSKGITAVWIPPAWKGASQNDVGYGAYDLYDLGEFNQKGTVRTKYGTRSQLQAAVTSLKNNGIQVYGDVVMNHKGGADATEMVRAVEVNPNNRNQEVTGEYTIEAWTRFDFPGRGNTHSSFKWRWYHFDGVDWDQSRRLNNRIYKFRGHGKAWDWEVDTEFGNYDYLMYADYDMDHPEVVNELRNWGVWYTNTLGLDGFRIDAVKHIKYSFTRDWINHVRSATGKNMFAVAEFWINDLGAIENYLQKTNWNHSVFDVPLHYNLYNASKSGGNYDMRNIFNGTVVQRHPSHAVTFVDNHDSQPEEALESFVEEWFKPLAYALTLTREQGYPSVFYGDYYGIPTHGVPAMRSKIDPILEARQKYAYGPQHDYLDHPDVIGWTREGDSSHPKSGLATLITDGPGGSKRMYAGLKNAGETWYDITGNRSDTVKIGSDGWGEFHVNDGSVSIYVQK

SEQ ID NO: 28341 - protein, 485 aa, Bacillus sp.
HHNGTNGTMMQYFEWYLPNDGNHWNRLNSDASNLKSKGITAVWIPPAWKGASQNDVGYGAYDLYDLGEFNQKGTVRTKYGTRSQLQAAVTSLKNNGIQVYGDVVMNHKGGADATEMVRAVEVNPNNRNQEVTGEYTIEAWTRFDFPGRGNTHSSFKWRWYHFDGVDWDQSRRLNNRIYKFRGHGKAWDWEVDTEFGNYDYLMYADYDMDHPEVVNELRNWGVWYTNTLGLDGFRIDAVKHIKYSFTRDWINHVRSATGKNMFAVAEFWKNDLGAIENYLQKTNWNHSVFDVPLHYNLYNASKSGGNYDMRNIFNGTVVQRHPSHAVTFVDNHDSQPEEALESFVEEWFKPLAYALTLTREQGLPSVFYGDYYGIPTHGVPAMRSKIDPILEARQKYAYGPQHDYLDHPDVIGWTREGDSSHPKSGLATLITDGPGGSKRMYAGLKNAGETWYDITGNRSDTVKIGSDGWGEFHVNDGSVSIYVQK

SEQ ID NO: 28342 - protein, 483 aa, Bacillus sp.
HHNGTNGTMMQYFEWYLPNDGNHWNRLNSDASNLKSKGITAVWIPPAWKGASQNDVGYGAYDLYDLGEFNQKGTVRTKYGTRSQLQAAVTSLKNNGIQVYGDVVMNHKGGADATEMVRAVEVNPNNRNQEVTGEYTIEAWTRFDFPGRGNTHSSFKWRWYHFDGVDWDQSRRLNNRIYKFRQKAWDWEVDTEFGNYDYLMYADYDMDHPEVVNELRNWGVWYTNTLGLDGFRIDAVKHIKYSFTRDWINHVRSATGKNMFAVAEFWKNDLGAIENYLQKTNWNHSVFDVPLHYNLYNASKSGGNYDMRNIFNGTVVQRHPSHAVTFVDNHDSQPEEALESFVEEWFKPLAYALTLTREQGYPSVFYGDYYGIPTHGVPAMRSKIDPILEARQKYAYGPQHDYLDHPDVIGWTREGDSSHPKSGLATLITDGPGGSKRMYAGLKNAGETWYDITGNRSDTVKIGSDGWGEFHVNDGSVSIYVQK

SEQ ID NO: 28343 - protein, 485 aa, Bacillus sp.
HHNGTNKTMMQYFEWYLPNDGNHWNRLNSDASNLKSKGITAVWIPPAWKGASQNDVGYGAYDLYDLGEFNQKGTVRTKYGTRSQLQAAVTSLKNNGIQVYGDVVMNHKGGADATEMVRAVEVNPNNRNQEVTGEYTIEAWTRFDFPGRGNTHSSFKWRWYHFDGVDWDQSRRLNNRIYKFRGHGKAWDWEVDTEFGNYDYLMYADYDMDHPEVVNELRNWGVWYTNTLGLDGFRIDAVKHIKYSFTRDWINHVRSATGKNMFAVAEFWKNDLGAIENYLQKTNWNHSVFDVPLHYNLYNASKSGGNYDMRNIFNGTVVQAHPSHAVTFVDNHDSQPEEALESFVEEWFKPLAYALTLTREQGYPSVFYGDYYGIPTHGVPAMRSKIDPILEARQKYAYGPQHDYLDHPDVIGWTREGDSSHPKSGLATLITDGPGGSKRMYAGLKNAGETWYDITGNRSDTVKIGSDGWGEFHVNDGSVSIYVQK

SEQ ID NO: 28344 - protein, 485 aa, Bacillus sp.
HHNGTNGTMMQYFEWYLPNDGNHWNRLNSDASNLKSKGITAVWIPPAWKATSQNDVGYGAYDLYDLGEFNQKGTVRTKYGTRSQLQAAVTSLKNNGIQVYGDVVMNHKGGADATEMVRAVEVNPNNRNQEVTGEYTIEAWTRFDFPGRGNTHSSFKWRWYHFDGVDFDQSRNVNNRIYKFRGHGKAWDWEVDTEFGNYDYLMYADYDMDHPEVVNELRNWGVWYTNTLGLDGFRIDAVKHIKYSFTRDWINHVRSATGKNMFAVAEFWKNDLGAIENYLQKTNWNHSVFDVPLHYNLYNASKSGGNYDMRNIFNGTVVQRHPSHAVTFVDNHDSQPEEALESFVEEWFKPLAYALTLTREQGYPSVFYGDYYGIPTHGVPAMRSKIDPILEARQKYAYGPQHDYLDHPDVIGWTREGDSSHPKSGLATLITDGPGGSKRMYAGLKNAGETWYDITGNRSDTVKIGSDGWGEFHVNDGSVSIYVQK

SEQ ID NO: 28345 - protein, 485 aa, Synthetic construct
HHNGTNGTMMQYFEWYLPNDGNHWNRLNSDASNLKSKGITAVWIPPAWKGASQNDVGYGAYDLYDLGEFNQKGTVRTKYGTRSQLQAAVTSLKNNGIQVYGDVVMNHKGGADATEMVRAVEVNPNNRNQEVTGEYTIEAWTRFDFPGRGNTHSSFKWRWYHFDGVDWDQSRRLNNRIYKFRGHGKAWDWEVDTEFGNYDYLMYADIDMDHPEPVNELRNWGVWYTNTLGLDGFRIDAVKHIKYSFTRDWINHVRSATGKNMFAVAEFWKNDLGAIENYLQKTNWNHSVFDVPLHYNLYNASKSGGNYDMRNIFNGTVVQRHPSHAVTFVDNHDSQPEEALESFVEEWFKPLAYALTLTREQGYPSVFYGDYYGIPTHGVPAMRSKIDPILEARQKYAYGPQHDYLDHPDVIGWTREGDSSHPKSGLATLITDGPGGSKRMYAGLKNAGETWYDITGNRSDTVKIGSDGWGEFHVNDGSVSIYVQK

SEQ ID NO: 28346 - protein, 485 aa, Bacillus sp.
HHNGTNGTMMQYFEWYLPNDGNHWNRLNSDASNLKSKGITAVWIPPAWKGASQNDVGYGAYDLYDLGEFNQKGTVRTKYGTRSQLQAAVTSLKNNGIQVYGDVVMNHKGGADATEMVRAVEVNPNNRLQEVTGEYTIEAWTRFDFPGRGNTHSSFKWRWYHFDGVDWDQSRRLNNRIYKFRGHGKAWDWEVDTEFGNYDYLMYADYDMDHPEVVNELRNWGVWYTNTLGLDGFRIDAVKHIKYSFTRDWINHVRSATGKNMFAVAEFWKNDLGAIENYLQKTNWNHSVFDVPLHYNLYNASKSGGNYDMRNIFNGTVVQRHPSHAVTFVDNHDSQPEEALESFVEEWFKPLAYALTLTREQGYPSVFYGDYYGIPTHGVPAMRSKIDPILEARQKYAYGPQHDYLDHPDVIGWTREGDSSHPKSGLATLITDGPGGSKRMYAGLKNAGETWYDITGNRSDTVKIGSDGWGEFHVNDGSVSIYVQK

SEQ ID NO: 28347 - protein, 485 aa, Bacillus sp.
HHNGTNGTMMQYFEWYLPNDGNHWNRLNSDASNLKSKGITAVWIPPAWKGASQNDVGYGAYDLYDLGEFNQKGTVRTKYGTRSQLQAAVTSLKNNGIQVYGDVVMNHKGGADATEMVRAVEVNPNNRNQEVTGEYTIEAWTRFDFPGRGNTHSSFKWRWYHFDGVDWDQSRNLTNRIYKFRGHGKAWDWEVDTEFGNYDYLMYADYDMDHPEVVNELRNWGVWYTNTLGLDGFRIDAVKHIKYSFTRDWINHVRSATGKNMFAVAEFWKNDLGAIENYLQKTNWNHSVFDVPLHYNLYNASKSGGNYDMRNIFNGTVVQRHPSNAVTFVDNHDSQPEEALESFVEEWFKPLAYALTLTREQGYPSVFYGDYYGIPTHGVPAMRSKIDPILEARQKYAYGPQHDYLDHPDVIGWTREGDSSHPKSGLATLITDGPGGSKRMYAGLKNAGETWYDITGNRSDTVKIGSDGWGEFHVNDGSVSIYVQK

SEQ ID NO: 28348 - protein, 485 aa, Synthetic construct
HHNGTNGTMMQYFEWYLPNDGNHWNRLNSDASNLKSKGITAVWIPPAWKGASQNDVGYGAYDLYDLGEFNQKGTVRTKYGTRSQLQAAVTSLKNNGIQVYGDVVMNHKGGADATEMVRAVEVNPNNRNQEVTGEYTIEAWTRFDFPGRGNTHSSFKWRWYHFDGVDWDQSRRLNNRIYKFRGHGKAWDWEVDTENGNYDYLMYADIDMDHPENQNELRNWGVWYTNTLGLDGFRIDAVKHIKYSFTRDWINHVRSATGKNMFAVAEFWKNDLGAIENYLQKTNWNHSVFDVPLHYNLYNASKSGGNYDMRNIFNGTVVQRHPSHAVTFVDNHDSQPEEALESFVEEWFKPLAYALTLTREQGYPSVFYGDYYGIPTHGVPAMRSKIDPILEARQKYAYGPQHDYLDHPDVIGWTREGDSSHPKSGLATLITDGPGGSKRMYAGLKNAGETWYDITGNRSDTVKIGSDGWGEFHVNDGSVSIYVQK

SEQ ID NO: 28349 - protein, 485 aa, Bacillus sp.
HHNGTNGTMMQYFEWYLPNDGNHWNRLNSDASNLKSKGITAVWIPPAWKGASQNDVGYGAYDLYDLEEFNQKGTVRTKYGTRSQLQAAVTSLKNNGIQVYGDVVMNHKGGANATEMVRAVEVNPNNRNQEVTGEYTIEAWTRFDFPGRGNTHSSFKWRWYHFDGVDWDQSRDFSNRIYKFRGHGKAWDWEVDTEFGNYDYLMYADYDMDHPEVVNELRNWGVWYTNTLGLDGFRIDAVKHIKYSFTRDWINHVRSATGKNMFAVAEFWKNDLGAIENYLQKTNWNHSVFDVPLHYNLYNASKSGGNYDMRNIFNGTVVQRHPSHAVTFVDNHDSQPEEALESFVEEWFKPLAYALTLTREQGYPSVFYGDYYGIPTHGVPAMRSKIDPILEARQKYAYGPQHDYLDHPDVIGWTREGDSSHPKSGLATLITDGPGGSKRMYAGLKNAGETWYDITGNRSDTVKIGFDGWGEFHVNDGSVSIYVQK

SEQ ID NO: 28350 - protein, 483 aa, Bacillus sp.
HHNGTNGTMMQYFEWYLPNDGNHWNRLNSDASNLKSKGITAVWIPPAWKAASQNDVGYGAYDLYDLGEFNQKGTVRTKYGTRSQLQAAVTSLKNNGIQVYGDVVMNHKGGADATEMVRAVEVNPNNRNQEVTGEYTIEAWTRFDFPGRGNTHSSFKWRWYHFDGVDWDQSRETSNRIYKFRGKAWDWEVDTEFGNYDYLMYADYDMDHPEVVNELRNWGVWYTNTLGLDGFRIDAVKHIKYSFTRDWINHVRSATGKNMFAVAEFWKNDLGAIENYLQKTNWNHSVFDVPLHYNLYNASKSGGNYDMRNIFNGTVVQRHPSHAVTFVDNHDSQPEEALESFVEEWFKPLAYALTLTREQGYPSVFYGDYYGIPTHGVPAMRSKIDPILEARQKYAYGPQHDYLDHPDVIGWTREGDSSHPKSGLATLITDGPGGSKRMYAGLKNAGETWYDITGNRSDTVKIGSDGWGEFHVNDGSVSIYVQK

SEQ ID NO: 28351 - protein, 483 aa, Bacillus sp.
HHNGTNGTMMQYFEWYLPNDGNHWNRLNSDASNLKSKGITAVWIPPAWKGASQNDVGYGAYDLYDLGEFNQKGTVRTKYGTRSQLQAAVTSLKNNGIQVYGDVVMNHKGGADATEMVRAVEVNPNNRNQEVTGEYTIEAWTRFDFPGRGNTHSSFKWRWYHFDGVDWDRSRRLNNRIYKFRGKAWDWEVDTEFGNYDYLMYADYDMDHPEVVNELRNWGVWYTNTLGLDGFRIDAVKHIKYSFTRDWINHVRSATGKNMFAVAEFWKNDLGAIENYLQKTNWNHSVFDVPLHYNLYNASKSGGNYDMRNIFNGTVVQRHPSHAVTFVDNHDSQPEEALESFVEEWFKPLAYALTLTREQGYPSVFYGDYYGIPTHGVPAMRSKIDPILEARQKYAYGPQHDYLDHPDVIGWTREGDSSHPKSGLATLITDGPGGSKRMYAGLKNAGETWYDITGNRSDTVKIGSDGWGEFHVNDGSVSIYVQK

SEQ ID NO: 28352 - protein, 485 aa, Bacillus sp.
HHNGTNGTMMQYFEWYLPNDGNHWNRLNSDASNLKSKGITAVWIPPAWKGASQNDVGYGAYDLYDLGEFNQKGTVRTKYGTRSQLQAAVTSLKNNGIQVYGDVVMNHKGGADATEMVRAVEVNPNNRNQEVTGEYTIEAWTRFDFPGRKNTHSSFKWRWYHFDGVDWDQSRRLNNRIYKFRGHGKAWDWEVDTEFGNYDYLMYADYDMDHPEVVNELRNWGVWYTNTLGLDGFRIDAVKHIKYSFTRDWINHVRSATGKNMFAVAEFWKNDLGAIENYLQKTNWNHSVFDVPLHYNLYNASKSGGNYDMRNIFNGTVVQRHPSHAVTFVDNHDSQPEEALESFVEEWFKPLAYALTLTREQGYPSVFYGDYYGIPTHGVPAMRSKIDPILEARQKYAYGPQHDYLDHPDVIGWTREGDSSHPKSGLATLITDGPGGSKRMYAGLKNAGETWYDITGNRSDTVKIGSDGWGEFHVNDGSVSIYVQK

SEQ ID NO: 28353 - protein, 483 aa, Bacillus sp.
HHNGTNGTMMQYFEWYLPNDGNHWNRLNSDASNLKSKGITAVWIPPAWKGASQNDVGYGAYDLYDLGEFNQKGTVRTKYGTRSQLQAAVTSLKNNGIQVYGDVVMNHKGGADATEMVRAVEVNPNNRNQEVTGEYTIEAWTRFDFPGRGNTHSSFKWRWYHFDGVDWDQSRRLNNRIYKFRGKAWDWEVDTEFGNYDYLMYADYDMDHPEVVNELRNWGVWYTNTLGLDGFRIDAVKHIKYSFTRDWINHVRSATGKNMFAVAEFWKNDLGAIENYLQKTVWNHSVFDVPLHYNLYNASKSGGNYDMRNIFNGTVVQRHPSHAVTFVDNHDSQPEEALESFVEEWFKPLAYALTLTREQGYPSVFYGDYYGIPTHGVPAMRSKIDPILEARQKYAYGPQHDYLDHPDVIGWTREGDSSHPKSGLATLITDGPGGSKRMYAGLKNAGETWYDITGNRSDTVKIGSDGWGEFHVNDGSVSIYVQK

SEQ ID NO: 28354 - protein, 485 aa, Bacillus sp.
HHNGTNGTMMQYFEWYLPNDGNHWNRLNSDASNLKSKGITAVWIPPAWKATSQNDVGYGAYDLYDLGEFNQKGTVRTKYGTRSQLQSAVTSLKNNGIQVYGDVVMNHKGGADATEMVRAVEVNPNNRNQEVTGEYTIEAWTRFDFPGRGNTHSSFKWRWYHFDGVDWDQSRNTDNRIYKFRGHGKAWDWEVDTEFGNYDYLMYADYDMDHPEVVNELRNWGVWYTNTLGLDGFRIDAVKHIKYSFTRDWINHVRSATGKNMFAVAEFWKNDLGAIENYLQKTNWNHSVFDVPLHYNLYNASKSQGNYDMRNIFNGTVVQRHPSHAVTFVDNHDSQPEEALESFVDTWFKPLAYALTLTREQGYPSVFYGDYYGIPTHGVPAMRSKIDPILEARQKYAYGPQHDYLDHPDVIGWTREGDSSHPKSGLATLITDGPGGSKRMYAGLKNAGETWYDITGNRSDTVKIGSDGWGEFHVNGSSVSIYVQK

SEQ ID NO: 28355 - protein, 485 aa, Bacillus sp.
HHNGTNGTMMQYFEWYLPNDGNHWNRLNSDASNLKSKGITAVWIPPAWKGASQNDVGYGAYDLYDLGEFNQKGTVRTKYGTRSQLQAAVTSLKNNGIQVYGDVVMNHKGGADATEMVRAVEVNPNNRNQEVTGEYNIEAWTRFDFPGRGNTHSSFKWRWYHFDGVDWDQSRRLNNRIYKFRGHGKAWDWEVDTEFGNYDYLMYADYDMDHPEVVNELRNWGVWYTNTLGLDGFRIDAVKHIKYSFTRDWINHVRSATGKNMFAVAEFWKNDLGAIENYLQKTNWNHSVFDVPLHYNLYNASKSGGNYDMRNIFNGTVVQRHPSHAVTFVDNHDSQPEEALESFVEEWFKPLAYALTLTREQGYPSVFYGDYYGIPTHGVPAMRSKIDPILEARQKYAYGPQHDYLDHPDVIGWTREGDSSHPKSGLATLITDGPGGSKRMYAGLKNAGETWYDITGNRSDTVKIGSDGWGEFHVNDGSVSIYVQK

SEQ ID NO: 28356 - protein, 485 aa, Bacillus sp.
HHNGTNGTMMQYFEWYLPNDGNHWNRLNSDASNLKSKGITAVWIPPAWKAASQNDVGYGAYDLYDLGEFNQKGTVRTKYGTRSQLQAAVTSLKNNGIQVYGDVVMNHKGGADATEMVRAVEVNPNNRNQEVTGEYTIEAWTRFDFPGRGNTHSSFKWRWYHFDGVDWDQSRRFDNRIYKFRGHGKAWDWEVDTEFGNYDYLMYTDYDMDHPEVVNELRNWGVWYTNTLGLDGFRIDAVKHIKYSFTRDWINHVRSATGKNMFAVAEFWKNDLGAIENYLQKTNWNHSVFDVPLHYNLYNASKSGGNYDMRNIFNGTVVQRHPSHAVTFVDNHDSQPEEALESFVEEWFKPLAYALTLTREQGYPSVFYGDYYGIPTHGVPAMRSKIDPILEARQKYAYGPQHDYLDHPDVIGWTREGDSSHPKSGLATLITDGPGGSKRMYAGLKNAGETWYDITGNRSDTVKIGSDGWGEFHVNDGSVSIYVQK

SEQ ID NO: 28357 - protein, 485 aa, Bacillus sp.
HHNGTNGTMMQYFEWYLPNDGNHWNRLNSDASNLKSKGITAVWIPPAWKGASQNDVGYGAYDLYDLGEFNQKGTVRTKYGTRSQLQAAVTSLKNNGIQVYGDVVMNHKGGADATEMVRAVEVNPNNRNQEVTGEYTIEAWTRFDFPGRGNTHSSFKWRWYHFDGVDWDQSRRLNNRIYKFRGHGKAWDWEVDTEFGNYDYLMYADYDMDHPEVVNELRNWGVWYTNTLGLDGFRIDAVKHIKYSFTRDWINHVRSATGKNMFAVAEFWKNDLGAIENYLQKTNWNHSVFDVPLHYNLYNASKSGGNYDMRNIFNGTVVQAWPMQAVTFVDNHDSQPEEALESFVEEWFKPLAYALTLTREQGYPSVFYGDYYGIPTHGVPAMRSKIDPILEARQKYAYGPQHDYLDHPDVIGWTREGDSSHPKSGLATLITDGPGGSKRMYAGLKNAGETWYDITGNRSDTVKIGSDGWGEFHVNDGSVSIYVQK

SEQ ID NO: 28358 - protein, 483 aa, Bacillus sp.
HHNGTNGTMMQYFEWYLPNDGNHWNRLNSDASNLKSKGITAVWIPPAWKGASQNDVGYGAYDLYDLGEFNQKGTVRTKYGTRSQLQAAVTSLKNNGIQVYGDVVMNHKGGADATEMVRAVEVNPNNRNQEVTGEYTIEAWTRFDFPGRGNTHSSFKWRWYHFDGVDWDQSRRLNNRIYKFRGKAWDWEVDTEFGNYDYLMYADYDMDHPEVVNELRNWGVWYTNTLGLDGFRIDAVKHIKYSFTRDWINHVRSATGKNMFAVAEFWKNDLGAIENYLQKTNWNHSVFDVPLHYNLYNASKSGGNYDMRNIFNGTVVQRHPSHAVTFVDNHDSQPEEALESFVEEWFKPLAYALTLTREQGYPSVFYGDYYGIPTHGVPAMRSKIDPILSARQKYAYGPQHDYLDHPDVIGWTREGDSSHPKSGLATLITDGPGGSKRMYAGLKNAGETWYDITGNRSDTVKIGSDGWGEFHVNDGSVSIYVQK

SEQ ID NO: 28359 - protein, 483 aa, Bacillus sp.
HHNGTNGTMMQYFEWYLPNDGNHWNRLNSDASNLKSKGITAVWIPPAWKGASQNDVGYGAYDLYDLGEFNQKGTVRTKYGTRSQLQAAVTSLKNNGIQVYGDVVMNHKGGADATEMVRAVEVNPNNRNQEVTGEYTIEAWTRFDFPGRGNTHSSFKWRWYHFDGVDWDQSRRLNNRIYKFRGKAWDWEVDTEFGNYDLLMYADYDMDHPEVVNELRNWGVWYTNTLGLDGFRIDAVKHIKYSFTRDWINHVRSATGKNMFAVAEFWKNDLGAIENYLQKTNWNHSVFDVPLHYNLYNASKSGGNYDMRNIFNGTVVQRHPSHAVTFVDNHDSQPEEALESFVEEWFKPLAYALTLTREQGYPSVFYGDYYGIPTHGVPAMRSKIDPILEARQKYAYGPQHDYLDHPDVIGWTREGDSSHPKSGLATLITDGPGGSKRMYAGLKNAGETWYDITGNRSDTVKIGSDGWGEFHVNDGSVSIYVQK

SEQ ID NO: 28360 - protein, 485 aa, Bacillus sp.
HHNGTNGTMMQYFEWYLPNDGNHWNRLNSDASNLKSKGITAVWIPPAWKGASQNDVGYGAYDLYDLGEFNQKGTVRTKYGTRSQLQAAVTSLKNNGIQVYGDVVMNHKGGADATEMVRAVEVNPNNRNQEVTGEYTIEAWTRFDFPGRGNTHSSFKWRWYHFDGVDWDQSRETSNRIYKFRGHGKAWDWEVDTEFGNYDYLMYTDYDMDHPEVVNELRNWGVWYTNTLGLDGFRIDAVKHIKYSFTRDWINHVRSATGKNMFAVAEFWKNDLGAIENYLQKTNWNHSVFDVPLHYNLYNASKSGGNYDMRNIFNGTVVQRHPSHAVTFVDNHDSQPEEALESFVEEWFKPLAYALTLTREQGYPSVFYGDYYGIPTHGVPAMRSKIDPILEARQKYAYGPQHDYLDHPDVIGWTREGDSSHPKSGLATLITDGPGGSKRMYAGLKNAGETWYDITGNRSDTVKIGSDGWGEFHVNDGSVSIYVQK

SEQ ID NO: 28361 - protein, 485 aa, Bacillus sp.
HHNGTNGTMMQYFEWYLPNDGNHWNRLNSDASNLKSKGITAVWIPPAWKAASQNDVGYGAYDLYDLGEFNQKGTVRTKYGTRSQLQAAVTSLKNNGIQVYGDVVMNHKGGADATEMVRAVEVNPNNRNQEVTGEYTIEAWTRFDFPGRGNTHSSFKWRWYHFDGVDWDQSRNLSNRIYKFRGHGKAWDWEVDTEFGNYDYLMYADYDMDHPEVVNELRNWGVWYTNTLGLDGFRIDAVKHIKYSFTRDWINHVRSATGKNMFAVAEFWKNDLGAIENYLQKTNWNHSVFDVPLHYNLYNASKSGGNYDMRNIFNGTVVQRHPSHAVTFVDNHDSQPEEALESFVEEWFKPLAYALTLTREQGYPSVFYGDYYGIPTHGVPAMRSKIDPILEARQKYAYGPQHDYLDHPDVIGWTREGDSSHPKSGLATLITDGPGGSKRMYAGLKNAGETWYDITGNRSDTVKIGSDGWGEFHVNDGSVSIYVQK

SEQ ID NO: 28362 - protein, 485 aa, Bacillus sp.
HHNGTNGTMMQYFEWYLPNDGNHWNRLNSDASNLKSKGITAVWIPPAWKGASQNDVGYGAYDLYDLGEFNQKGTVRTKYGTRSQLQAAVTSLKNNGIQVYGDVVMNHKGGADATEMVRAVEVNPNNRNQEVTGEYTIEAWTRFDFPGRGNTHSSFKWRWYHFDGVDWDQSRRLNNRIYKFRGHGKAWDWEVDTEFGNYDYLMYADYDMDHPEVVNELRNWGVWYTNTLGLDGFRIDAVKHIKYSFTRDWINHVRSATGKNMFAVAEFWKNDLGAIENYLQKTNWNHSVFDVPLHYNLYNASKSGGNYDMRNIFNGTVVQRHPSHAVTFVDNHDSQPEEALESFVEGWFKPLAYALTLTREQGYPSVFYGDYYGIPTHGVPAMRSKIDPILEARQKYAYGPQHDYLDHPDVIGWTREGDSSHPKSGLATLITDGPGGSKRMYAGLKNAGETWYDITGNRSDTVKIGSDGWGEFHVNDGSVSIYVQK

SEQ ID NO: 28363 - protein, 483 aa, Synthetic construct
HHNGTNGTMMQYFEWYLPNDGNHWNRLNSDASNLKSKGITAVWIPPAWKGASQNDVGYGAYDLYDLGEFNQKGTVRTKYGTRSQLQAAVTSLKNNGIQVYGDVVMNHKGGADATEMVRAVEVNPNNRNQEVTGEYTIEAWTRFDFPGRGNTHSSFKWRWYHFDGVDWDQSRRLNNRIYKFRGKAWDWEVDTEFGNYDYLMYADIDMDHPEPVNELRNWGVWYTNTLGLDGFRIDAVKHIKYSFTRDWINHVRSATGKNMFAVAEFWKNDLGAIENYLQKTNWNHSVFDVPLHYNLYNASKSGGNYDMRNIFNGTVVQRHPSHAVTFVDNHDSQPEEALESFVEEWFKPLAYALTLTREQGYPSVFYGDYYGIPTHGVPAMRSKIDPILEARQKYAYGPQHDYLDHPDVIGWTREGDSSHPKSGLATLITDGPGGSKRMYAGLKNAGETWYDITGNRSDTVKIGSDGWGEFHVNDGSVSIYVQK

SEQ ID NO: 28364 - protein, 483 aa, Bacillus sp.
HHNGTNGTMMQYFEWYLPNDGNHWNRLNSDASNLKSKGITAVWIPPAWKGASQNDVGYGAYDLYDLGEFNQKGTVRTKYGTRSQLQAAVTSLKNNGIQVYGDVVMNHKGGADATEMVRAVEVNPNNRNQEVTGEYTIEAWTRFDFPGRGNTHSSFKWGWYHFDGVDWDQSRRLENRIYKFRGKAWDWEVDTEFGNYDYLMYADYDMDHPEVVNELRNWGVWYTNTLGLDGFRIDAVKHIKYSFTRDWINHVRSATGKNMFAVAEFWKNDLGAIENYLQKTNWNHSVFDVPLHYNLYNASKSGGNYDMRNIFNGTVVQRHPSHAVTFVDNHDSQPEEALESFVEEWFKPLAYALTLTREQGYPSVFYGDYYGIPTHGVPAMRSKIDPILEARQKYAYGPQHDYLDHPDVIGWTREGDSSHPKSGLATLITDGPGGSKRMYAGLKNAGETWYDITGNRSDTVKIGSDGWGEFHVNDGSVSIYVQK

SEQ ID NO: 28365 - protein, 485 aa, Bacillus sp.
HHNGTNGTMMQYFEWYLPNDGNHWNRLNSDASNLKSKGITAVWIPPAWKAVSQNDVGYGAYDLYDLGEFNQKGTVRTKYGTRSQLQAAVTSLKNNGIQVYGDVVMNHKGGADATEMVRAVEVNPNNRNQEVTGEYTIEAWTRFDFPGRGNTHSSFKWRWYHFDGVDWDQSRDLENRIYKFRGHGKAWDWEVDTEFGNYDYLMYADYDMDHPEVVNELRNWGVWYTNTLGLDGFRIDAVKHIKYSFTRDWINHVRSATGKNMFAVAEFWKNDLGAIENYLQKTNWNHSVFDVPLHYNLYNASKSGGNYDMRNIFNGTVVQAHPNHAVTFVDNHDSQPEEALESFVEEWFKPLAYALTLTREQGYPSVFYGDYYGIPTHGVPAMRSKIDPILEARQKYAYGPQHDYLDHPDVIGWTREGDSSHPKSGLATLITDGPGGSKRMYAGLKNAGETWYDITGNRSDTVKIGSDGWGEFHVNDGSVSIYVQK

SEQ ID NO: 28366 - protein, 485 aa, Bacillus sp.
HHNGTNGTMMQYFEWYLPNDGNHWNRLNSDASNLKSKGITAVWIPPAWKAVSQNDVGYGAYDLYDLGEFNQKGTVRTKYGTRSQLQAAVTSLKNNGIQVYGDVVMNHKGGADATEMVPAVEVNPNNRNQEVTGEYTIEAWTRFDFPGRGNTHSSFKWRWYHFDGVDWDQSRDLENRIYKFRGHSKAWDWEVDTEFGNYDYLMYADYDMDHPEVVNELRNWGVWYTNTLGLDGFRIDAVKHIKYSFTRDWINHVRSATGKNMFAVAEFWKNDLGAIENYLQKTNWNHSVFDVPLHYNLYNASKSGGNYDMRNIFNGTVVQRHPSHAVTFVDNHDSQPEEALESFVEEWFKPLAYALTLTREQGYPSVFYGDYYGIPTHGVPAMRSKIDPILEARQKYAYGPQHDYLDHPDVIGWTREGDSSHPKSGLATLITDGPGGSKRMYAGLKNAGETWYDITGNRSDTVKIGSDGWGEFHVNDGSVSIYVQK

SEQ ID NO: 28367 - protein, 485 aa, Bacillus sp.
HHNGTNGTMMQYFEWYLPNDGNHWNRLNSDASNLKSKGITAVWIPPAWKGASQNDVGYGAYDLYDLGEFNQKGTVRTKYGTRSQLQAAVTSLKNNGIQVYGDVVMNHKGGADATEMVRAVEVNPNNRNQEVTGEYTIEAWTRFDFPGRGNTHSSFKWRWYHFDGVDWDQSRRLNNRIYLFRGHGKAWDWEVDTEFGNYDYLMYADYDMDHPEVVNELRNWGVWYTNTLGLDGFRIDAVKHIKYSFTRDWINHVRSATGKNMFAVAEFWKNDLGAIENYLQKTNWNHSVFDVPLHYNLYNASKSGGNYDMRNIFNGTVVQRHPSHAVTFVDNHDSQPEEALESFVEEWFKPLAYALTLTREQGYPSVFYGDYYGIPTHGVPAMRSKIDPILEARQKYAYGPQHDYLDHPDVIGWTREGDSSHPKSGLATLITDGPGGSKRMYAGLKNAGETWYDITGNRSDTVKIGSDGWGEFHVNDGSVSIYVQK

SEQ ID NO: 28368 - protein, 485 aa, Bacillus sp.
HHNGTNGTMMQYFEWYLPNDGNHWNRLNSDASNLKSKGITAVWIPPAWKGASQNDVGYGAYDLYDLGEFNQKGTVRTKYGTRSQLQAAVTSLKNNGIQVYGDVVMNHKGGADATEMVRAVEVNPNNRNQEVTGEYTIEAYTRFDFPGRGNTHSSFKWRWYHFDGVDWDQSRRLNNRIYKFRGHGKAWDWEVDTEFGNYDYLMYADYDMDHPEVVNELRNWGVWYTNTLGLDGFRIDAVKHIKYSFTRDWINHVRSATGKNMFAVAEFWKNDLGAIENYLQKTNWNHSVFDVPLHYNLYNASKSGGNYDMRNIFNGTVVQRHPSHAVTFVDNHDSQPEEALESFVEEWFKPLAYALTLTREQGYPSVFYGDYYGIPTHGVPAMRSKIDPILEARQKYAYGPQHDYLDHPDVIGWTREGDSSHPKSGLATLITDGPGGSKRMYAGLKNAGETWYDITGNRSDTVKIGSDGWGEFHVNDGSVSIYVQK

SEQ ID NO: 28369 - protein, 483 aa, Bacillus sp.
HHNGTNGTMMQYFEWYLPNDGNHWNRLNSDASNLKSKGITAVWIPPAWKGASQNDVGYGAYDLYDLGEFNQKGTVRTKYGTRSQLQAAVTSLKNNGIQVYGDVVMNHKGGADATEMVRAVEVNPNNRNQEVTGEYTIEAWTRFDFPGRGNTHSSFKWRWYHFDGVDWDQSRNLTNRIYKFRGKAWDWEVDTEFGNYDYLMYVDYDMDHPEVVNELRNWGVWYTNTLGLDGFRIDAVKHIKYSFTRDWINHVRSATGKNMFAVAEFWKNDLGAIENYLQKTNWNHSVFDVPLHYNLYNASKSGGNYDMRNIFNGTVVQRHPSHAVTFVDNHDSQPEEALESFVEEWFKPLAYALTLTREQGYPSVFYGDYYGIPTHGVPAMRSKIDPILEARQKYAYGPQHDYLDHPDVIGWTREGDSSHPKSGLATLITDGPGGSKRMYAGLKNAGETWYDITGNRSDTVKIGSDGWGEFHVNDGSVSIYVQK

SEQ ID NO: 28370 - protein, 485 aa, Bacillus sp.
HHNGTNGTMMQYFEWYLPNDGNHWNRLNSDASNLKSKGITAVWIPPAWKGASQNDVGYGAYDLYDLGEFNQKGTVRTKYGTRSQLQAAVTSLKNNGIQVYGDVVMNHKGGADATEMVRAVEVNPNNRNQEVTGEYTIEAWTRFDFPGRLNTHSSFKWRWYHFDGVDWDQSRRLNNRIYKFRGHGKAWDWEVDTEFGNYDYLMYADYDMDHPEVVNELRNWGVWYTNTLGLDGFRIDAVKHIKYSFTRDWINHVRSATGKNMFAVAEFWKNDLGAIENYLQKTNWNHSVFDVPLHYNLYNASKSGGNYDMRNIFNGTVVQRHPSHAVTFVDNHDSQPEEALESFVEEWFKPLAYALTLTREQGYPSVFYGDYYGIPTHGVPAMRSKIDPILEARQKYAYGPQHDYLDHPDVIGWTREGDSSHPKSGLATLITDGPGGSKRMYAGLKNAGETWYDITGNRSDTVKIGSDGWGEFHVNDGSVSIYVQK

SEQ ID NO: 28371 - protein, 483 aa, Bacillus sp.
HHNGTNGTMMQYFEWYLPNDGNHWNRLNSDASNLKSKGITAVWIPPAWKGASQNDVGYGAYDLYDLGEFNQKGTVRTKYGTRSQLQAAVTSLKNNGIQVYGDVVMNHKGGADATEMVSAVEVNPNNRNQEVTGEYTIEAWTRFDFPGRGNTHSSFKWRWYHFDGVDWDQSRRLNNRIYKFRAKAWDWEVDTEFGNYDYLMYADYDMDHPEVVNELRNWGVWYTNTLGLDGFRIDAVKHIKYSFTRDWINHVRSATGKNMFAVAEFWKNDLGAIENYLQKTNWNHSVFDVPLHYNLYNASKSGGNYDMRNIFNGTVVQRHPSHAVTFVDNHDSQPEEALESFVEEWFKPLAYALTLTREQGYPSVFYGDYYGIPTHGVPAMRSKIDPILEARQKYAYGPQHDYLDHPDVIGWTREGDSSHPKSGLATLITDGPGGSKRMYAGLKNAGETWYDITGNRSDTVKIGSDGWGEFHVNDGSVSIYVQK

SEQ ID NO: 28372 - protein, 485 aa, Bacillus sp.
HHNGTNGTMMQYFEWYLPNDGNHWNRLNSDASNLKSKGITAVWIPPAWKGASQNDVGYGAYDLYDLGEFNQKGTVRTKYGTRSQLQAAVTSLKNNGIQVYGDVVMNHKGGADATEMVRAVEVNPNNRNQEVTGEYTIEAWTRFDFPGRGNTHSSFKWRWYHFDGVDWDQSRRTSNRIYKFRGHGKAWDWEVDTEFGNYDYLMYVDYDMDHPEVVNELRNWGVWYTNTLGLDGFRIDAVKHIKYSFTRDWINHVRSATGKNMFAVAEFWKNDLGAIENYLQKTNWNHSVFDVPLHYNLYNASKSGGNYDMRNIFNGTVVQRHPSHAVTFVDNHDSQPEEALESFVEEWFKPLAYALTLTREQGYPSVFYGDYYGIPTHGVPAMRSKIDPILEARQKYAYGPQHDYLDHPDVIGWTREGDSSHPKSGLATLITDGPGGSKRMYAGLKNAGETWYDITGNRSDTVKIGSDGWGEFHVNDGSVSIYVQK

SEQ ID NO: 28373 - protein, 483 aa, Bacillus sp.
HHNGTNGTMMQYFEWYLPNDGNHWNRLNSDASNLKSKGITAVWIPPAWKGASQNDVGYGAYDLYDLGEFNQKGTVRTKYGTRSQLQAAVTSLKNNGIQVYGDVVMNHKGGADATEMVRAVEVNPNNRNQEVTGEYTIEAWTRFDFPGRGNTHSSFKWRWYHFDGVDWDQSRRTNNRIYKFRGKAWDWEVDTEFGNYDYLMYTDYDMDHPEVVNELRNWGVWYTNTLGLDGFRIDAVKHIKYSFTRDWINHVRSATGKNMFAVAEFWKNDLGAIENYLQKTNWNHSVFDVPLHYNLYNASKSGGNYDMRNIFNGTVVQRHPSHAVTFVDNHDSQPEEALESFVEEWFKPLAYALTLTREQGYPSVFYGDYYGIPTHGVPAMRSKIDPILEARQKYAYGPQHDYLDHPDVIGWTREGDSSHPKSGLATLITDGPGGSKRMYAGLKNAGETWYDITGNRSDTVKIGSDGWGEFHVNDGSVSIYVQK

SEQ ID NO: 28374 - protein, 483 aa, Bacillus sp.
HHNGTNGTMMQYFEWYLPNDGNHWNRLNSDASNLKSKGIMAVWIPPAWKGASQNDVGYGAYDLYDLGEFNQKGTVRTKYGTRSQLQAAVTSLKNNGIQVYGDVVMNHKGGADATEMVRAVEVNPNNRNQEVTGEYTIEAWTRFDFPGRGNTHSSFKWRWYHFDGVDWDQSRRLNNRIYKFRGKAWDWEVDTEFGNYDYLMYADYDMDHPEVVNELRNWGVWYTNTLGLDGFRIDAVKHIKYSFTRDWINHVRSATGKNMFAVAEFWKNDLGAIENYLQKTNWNHSVFDVPLHYNLYNASKSGGNYDMRNIFNGTVVQRHPSHAVTFVDNHDSQPEEALESFVEEWFKPLAYALTLTREQGYPSVFYGDYYGIPTHGVPAMRSKIDPILEARQKYAYGPQHDYLDHPDVIGWTREGDSSHPKSGLATLITDGPGGSKRMYAGLKNAGETWYDITGNRSDTVKIGSDGWGEFHVNDGSVSIYVQK

SEQ ID NO: 28375 - protein, 485 aa, Bacillus sp.
HHNGKNGTMMQYFEWYLPNDGNHWNRLNSDASNLKSKGITAVWIPPAWKGASQNDVGYGAYDLYDLGEFNQKGTVRTKYGTRSQLQAAVTSLKNNGIQVYGDVVMNHKGGADATEMVRAVEVNPNNRNQEVTGEYTIEAWTRFDFPGRGNTHSSFKWRWYHFDGVDWDQSREFNNRIYKFRGHGKAWDWEVDTEFGNYDYLMYADYDMDHPEVVNELRNWGVWYTNTLGLDGFRIDAVKHIKYSFTRDWINHVRSATGKNMFAVAEFWKNDLGAIENYLQKTNWNHSVFDVPLHYNLYNASQSGGNYDMRNIFNGTVVQRHPSHAVTFVDNHDSQPEEALESFVEPWFKPLAYALTLTREQGYPSVFYGDYYGIPTHGVPAMRSKIDPILEARQKYAYGPQHDYLDHPDVIGWTREGDSSHPKSGLATLITDGPGGSKRMYAGLKNAGETWYDITGNRSDTVKIGSDGWGEFHVNDGSVSIYVQK

SEQ ID NO: 28376 - protein, 483 aa, Bacillus sp.
HHNGTNGTMMQYFEWYLPNDGNHWNRLNSDASNLKSKGITAVWIPPAWKGASQNDVGYGAYDLYDLGEFNQKGTVRTKYGTRSQLQAAVTSLKNNGIQVYGDVVMNHKGGADATEMVRAVEVNPNNRNQEVTGEYTIEAWTRFDFPGRGNTHSSFKWRWYHFDGVDWDQSRRLNNRIYKFRGKAWDWEVDTEFGNYDYLMYADYDMDHPEVVNELRNWGVWYTNTLGLDGFRIDAVKHIKYSFTRDWINHVRSATGKNMFAVAEFWKNDLGAIENYLQKTNWNHSVFDVPLHNNLYNASKSGGNYDMRNIFNGTVVQRHPSHAVTFVDNHDSQPEEALESFVEEWFKPLAYALTLTREQGYPSVFYGDYYGIPTHGVPAMRSKIDPILEARQKYAYGPQHDYLDHPDVIGWTREGDSSHPKSGLATLITDGPGGSKRMYAGLKNAGETWYDITGNRSDTVKIGSDGWGEFHVNDGSVSIYVQK

SEQ ID NO: 28377 - protein, 485 aa, Synthetic construct
HHNGTNGTMMQYFEWYLPNDGNHWNRLNSDASNLKSKGITAVWIPPAWKGASQNDVGYGAYDLYDLGEFNQKGTVRTKYGTRSQLQAAVTSLKNNGIQVYGDVVMNHKGGADATEMVRAVEVNPNNRNQEVTGEYTIEAWTRFDFPGRGNTHSSFKWRWYHFDGVDWDQSRRLNNRIYKFRGHGKAWDWEVDTENGNYDYLMYADYDYDHPEVVNEIRNWGVWYTNTLGLDGFRIDAVKHIKYSFTRDWINHVRSATGKNMFAVAEFWKNDLGAIENYLQKTNWNHSVFDVPLHYNLYNASKSGGNYDMRNIFNGTVVQRHPSHAVTFVDNHDSQPEEALESFVEEWFKPLAYALTLTREQGYPSVFYGDYYGIPTHGVPAMRSKIDPILEARQKYAYGPQHDYLDHPDVIGWTREGDSSHPKSGLATLITDGPGGSKRMYAGLKNAGETWYDITGNRSDTVKIGSDGWGEFHVNDGSVSIYVQK

SEQ ID NO: 28378 - protein, 483 aa, Bacillus sp.
HHNGTNGTMMQYFEWYLPNDGNHWNRLNSDASNLKSKGITAVWIPPAWKGASQNDVGYGAYDLYDLGEFNQKGTVRTKYGTRSQLQAAVTSLKNNGIQVYGDVVMNHKGGADATEMVRAVEVNPNNRNQEVTGEYTIEAWTRFDFPGRGNTHSSFKWRWYHFDGVDWDQSRRLNNRIYKFRGKAWDWEVDTEFGNYDYLMYADYDMDHPEVVNELRNWGVWYTNTLGLDGFRIDAVKHIKYSFTRDWINHVRSATGKNMFAVAEFWKNDLGSIENYLQKTNWNHSVFDVPLHYNLYNASKSGGNYDMRNIFNGTVVQRHPSHAVTFVDNHDSQPEEALESFVEEWFKPLAYALTLTREQGYPSVFYGDYYGIPTHGVPAMRSKIDPILEARQKYAYGPQHDYLDHPDVIGWTREGDSSHPKSGLATLITDGPGGSKRMYAGLKNAGETWYDITGNRSDTVKIGSDGWGEFHVNDGSVSIYVQK

SEQ ID NO: 28379 - protein, 485 aa, Bacillus sp.
HHNGTNGTMMQYFEWYLPNDGNHWNRLNSDASNLKSKGITAVWIPPAWKAASQNDVGYGAYDLYDLGEFNQKGTVRTKYGTRSQLQAAVTSLKNNGIQVYGDVVMNHKGGADATEMVDAVEVNPNNRNQEVTGEYTIEAWTRFDFPGRGNTHSSFKWRWYHFDGVDFDQSRDLQNRIYKFRGHGKAWDWEVDTEFGNYDYLMYADYDMDHPEVVNELRNWGVWYTNTLGLDGFRIDAVKHIKYSFTRDWINHVRSATGKNMFAVAEFWKNDLGAIENYLQKTNWNHSVFDVPLHYNLYNASKSGGNYDMRNIFNGTVVQRHPSHAVTFVDNHDSQPEEALESFVEEWFKPLAYALTLTREQGYPSVFYGDYYGIPTHGVPAMRSKIDPILEARQKYAYGPQHDYLDHPDVIGWTREGDSSHPKSGLATLITDGPGGSKRMYAGLKNAGETWYDITGNRSDTVKIGSDGWGEFHVNDGSVSIYVQK

SEQ ID NO: 28380 - protein, 483 aa, Bacillus sp.
HHNGTNQTMMQYFEWYLPNDGNHWNRLNSDASNLKSKGITAVWIPPAWKGASQNDVGYGAYDLYDLGEFNQKGTVRTKYGTRSQLQAAVTSLKNNGIAVYGDVVMNHKGGADATEMVRAVEVNPNNRNQEVTGEYTIEAWTRFDFPGRGNTHSSFKWRWYHFDGVDWDQSRRLNNRIYKFRGKAWDWEVDTEFGNYDYLMYADYDMDHPEVVNELRNWGVWYTNTLGLDGFRIDAVKHIKYSFTRDWINHVRSATGKNMFAVAEFWKNDLGAIENYLQKTNWNHSVFDVPLHYNLYNASKSGGNYDMRNIFNGTVVQMHPMHAVTFVDNHDSQPEEALESFVEEWFKPLAYALTLTREQGYPSVFYGDYYGIPTHGVPAMRSKIDPILEARQKYAYGPQHDYLDHPDVIGWTREGDSSHPKSGLATLITDGPGGSKRMYAGLKNAGETWYDITGNRSDTVKIGSDGWGEFHVNDGSVSIYVQK

SEQ ID NO: 28381 - protein, 485 aa, Bacillus sp.
HHNGTNGTMMQYFEWYLPNDGNHWNRLNSDASNLKSKGITAVWIPPAWKAASQNDVGYGAYDLYDLGEFNQKGTVRTKYGTRSQLQAAVTSLKNNGIQVYGDVVMNHKGGADATEMVRAVEVNPNNRNQEVTGEYTIEAWTRFDFPGRGNTHSSFKWRWYHFDGVDWDQSRRLSNRIYKFRGHGKAWDWEVDTEFGNYDYLMYADYDMDHPEVVNELRNWGVWYTNTLGLDGFRIDAVKHIKYSFTRDWINHVRSATGKNMFAVAEFWKNDLGAIENYLQKTNWNHSVFDVPLHYNLYNASKSGGNYDMRNIFNGTVVQRHPSHAVTFVDNHDSQPEEALESFVEEWFKPLAYALTLTREQGYPSVFYGDYYGIPTHGVPAMRSKIDPILEARQKYAYGPQHDYLDHPDVIGWTREGDSSHPKSGLATLITDGPGGSKRMYAGLKNAGETWYDITGNRSDTVKIGSDGWGEFHVNDGSVSIYVQK

SEQ ID NO: 28382 - protein, 483 aa, Bacillus sp.
HHNGTNGTMMQYFEWYLPNDGNHWNRLNSDASNLKSKGITAVWIPPAWKGASQNDVGYGAYDLYDLGEFNQKGTVRTKYGTRSQLQAAVTSLKNNGIQVYGDVVMNHKGGADATEMVRAVEVNPNNRNQEVTGEYTIEAWTRFDFPGRGNTHSSFKWRWYHFDGVDWDQSRRLNNRIYKFRGKAWDWEVDTEFGNYDYLMYADYDMDHPEVVNELRNWGVWYTNTLGLDGFRIDAVKHIKYSFTRDWINHVRSATGKNMFAVAEFWKNDLGAIENYLQKTNWNHSVFDVPLHYNLYNASKSGGNYDMRNIFNGTVVQRHPSHAVTFVDNHDSQPEEALESFVDPWFKPLAYALTLTREQGYPSVFYGDYYGIPTHGVPAMRSKIDPILEARQKYAYGPQHDYLDHPDVIGWTREGDSSHPKSGLATLITDGPGGSKRMYAGLKNAGETWYDITGNRSDTVKIGSDGWGEFHVNGKSVSIYVQK

SEQ ID NO: 28383 - protein, 483 aa, Bacillus sp.
HHNGTNGTMMQYFEWYLPNDGNHWNRLNSDASNLKSKGITAVWIPPAWKAASQNDVGYGAYDLYDLGEFNQKGTVRTKYGTRSQLQAAVTSLKNNGIQVYGDVVMNHKGGADATEMVPAVEVNPNNRNQEVTGEYTIEAWTRFDFPGRGNTHSSFKWRWYHFDGVDWDQSRDLTNRIYKFRGKAWDWEVDTEFGNYDYLMYADYDMDHPEVVNELRNWGVWYTNTLGLDGFRIDAVKHIKYSFTRDWINHVRSATGKNMFAVAEFWKNDLGAIENYLQKTNWNHSVFDVPLHYNLYNASKSGGNYDMRNIFNGTVVQRHPSHAVTFVDNHDSQPEEALESFVDPWFKPLAYALTLTREQGYPSVFYGDYYGIPTHGVPAMRSKIDPILEARQKYAYGPQHDYLDHPDVIGWTREGDSSHPKSGLATLITDGPGGSKRMYAGLKNAGETWYDITGNRSDTVKIGSDGWGEFHVNGGSVSIYVQK

SEQ ID NO: 28384 - protein, 483 aa, Bacillus sp.
HHNGTNGTMMQYFEWYLPNDGNHWNRLNSDASNLKSKGITAVWIPPAWKGASQNDVGYGAYDLYDLGEFNQKGTVRTKYGTRSQLQAAVTSLKNNGIQVYGDVVMNHKGGADATEMVRAVEVNPNNRNQEVTGEYTIEAWTRFDFPGRGNTHSSFKWRWYHFDGVDWDQSRRLNNRIYKFRSKAWDWEVDTEFGNYDYLMYADYDMDHPEVVNELRNWGVWYTNTLGLDGFRIDAVKHIKYSFTRDWINHVRSATGKNMFAVAEFWKNDLGAIENYLQKTNWNHSVFDVPLHYNLYNASKSGGNYDMRNIFNGTVVQRHPSHAVTFVDNHDSQPEEALESFVEEWFKPLAYALTLTREQGYPSVFYGDYYGIPTHGVPAMRSKIDPILEARQKYAYGPQHDYLDHPDVIGWTREGDSSHPKSGLATLITDGPGGSKRMYAGLKNAGETWYDITGNRSDTVKIGSDGWGEFHVNDGSVSIYVQK

SEQ ID NO: 28385 - protein, 485 aa, Bacillus sp.
HHNGTNGTMMQYFEWYLPNDGNHWNRLNSDASNLKSKGITAVWIPPAWKGASQNDVGYGAYDLYDLGEFNQKGTVRTKYGTRSQLQAAVTSLKNNGIQVYGDVVMNHKGGADATEMVRAVEVNPNNRNQEVTGEYTIEAWTRFDFSGRGNTHSSFKWRWYHFDGVDWDQSRRLNNRIYKFRGHGKAWDWEVDTEFGNYDYLMYADYDMDHPEVVNELRNWGVWYTNTLGLDGFRIDAVKHIKYSFTRDWINHVRSATGKNMFAVAEFWKNDLGAIENYLQKTNWNHSVFDVPLHYNLYNASKSGGNYDMRNIFNGTVVQRHPSHAVTFVDNHDSQPEEALESFVEEWFKPLAYALTLTREQGYPSVFYGDYYGIPTHGVPAMRSKIDPILEARQKYAYGPQHDYLDHPDVIGWTREGDSSHPKSGLATLITDGPGGSKRMYAGLKNAGETWYDITGNRSDTVKIGSDGWGEFHVNDGSVSIYVQK

SEQ ID NO: 28386 - protein, 483 aa, Bacillus sp.
HHNGTNGTMMQYFEWYLPNDGNHWNRLNSDASNLKSKGITAVWIPPAWKGASQNDVGYGAYDLYDLGEFNQKGTVRTKYGTRSQLQAAVTSLKNNGIQVYGDVVLNHKGGADATEMVRAVEVNPNNRNQEVTGEYTIEAWTRFDFPGRGNTHSSFKWRWYHFDGVDWDQSRRLNNRIYKFRGKAWDWEVDTENGNYDYLMYADIDYDHPEVVNELRNWGVWYTNTLGLDGFRIDAVKHIKYSFTRDWINHVRSATGKNMFAVAEFWKNDLGAIENYLQKTNWNHSVFDVPLHYNLYNASKSGGNYDMRNIFNGTVVQRHPSHAVTFVDNHDSQPEEALESFVEEWFKPLAYALTLTREQGYPSVFYGDYYGIPTHGVPAMRSKIDPILEARQKYAYGPQHDYLDHPDVIGWTREGDSSHPKSGLATLITDGPGGSKRMYAGLKNAGETWYDITGNRSDTVKIGSDGWGEFHVNDGSVSIYVQK

SEQ ID NO: 28387 - protein, 485 aa, Bacillus sp.
HHNGTNGTMMQYFEWYLPNDGNHWNRLNSDASNLKSKGITAVWIPPAWKAASQNDVGYGAYDLYDLGEFNQKGTVRTKYGTRSQLQAAVTSLKNNGIQVYGDVVMNHKGGADATEMVRAVEVNPNNRNQEVTGEYTIEAWTRFDFPGRGNTHSSFKWRWYHFDGVDWDQSRELNNRIYKFRGHGKAWDWEVDTEFGNYDYLMYADYDMDHPEVVNELRNWGVWYTNTLGLDGFRIDAVKHIKYSFTRDWINHVRSATGKNMFAVAEFWKNDLGAIENYLQKTNWNHSVFDVPLHYNLYNASKSGGNYDMRNIFNGTVVQRHPSHAVTFVDNHDSQPEEALESFVEEWFKPLAYALTLTREQGYPSVFYGDYYGIPTHGVPAMRSKIDPILEARQKYAYGPQHDYLDHPDVIGWTREGDSSHPKSGLATLITDGPGGSKRMYAGLKNAGETWYDITGNRSDTVKIGSDGWGEFHVNDGSVSIYVQK

SEQ ID NO: 28388 - protein, 485 aa, Bacillus sp.
HHNGTNGTMMQYFEWYLPNDGNHWNRLNSDASNLKSKGITAVWIPPGWKGASQNDVGYGAYDLYDLGEFNQKGTVRTKYGTRSQLQAAVTSLKNNGIQVYGDVVMNHKGGADATEMVRAVEVNPNNRNQEVTGEYTIEAWTRFDFPGRGNTHSSFKWRWYHFDGVDWDQSRRLNNRIYKFRGHGKAWDWEVDTEFGNYDYLMYADYDMDHPEVVNELRNWGVWYTNTLGLDGFRIDAVKHIKYSFTRDWINHVRSATGKNMFAVAEFWKNDLGAIENYLQKTNWNHSVFDVPLHYNLYNASKSGGNYDMRNIFNGTVVQRHPSHAVTFVDNHDSQPEEALESFVEEWFKPLAYALTLTREQGYPSVFYGDYYGIPTHGVPAMRSKIDPILEARQKYAYGPQHDYLDHPDVIGWTREGDSSHPKSGLATLITDGPGGSKRMYAGLKNAGETWYDITGNRSDTVKIGSDGWGEFHVNDGSVSIYVQK

SEQ ID NO: 28389 - protein, 485 aa, Bacillus sp.
HHNGTNGTMMQYFEWYLPNDGNHWNRLNSDASNLKSKGITAVWIPPAWKATSQNDVGYGAYDLYDLGEFNQKGTVRTKYGTRSQLQAAVTSLKNNGIQVYGDVVMNHKGGADATEMVRAVEVNPNNRNQEVTGEYTIEAWTRFDFPGRGNTHSSFKWRWYHFDGVDWDQSRDLNNRIYKFRGHGKAWDWEVDTEFGNYDYLMYADYDMDHPEVVNELRNWGVWYTNTLGLDGFRIDAVKHIKYSFTRDWINHVRSATGKNMFAVAEFWKNDLGAIENYLQKTNWNHSVFDVPLHYNLYNASKSGGNYDMRNIFNGTVVQRHPSHAVTFVDNHDSQPEEALESFVDEWFKPLAYALTLTREQGYPSVFYGDYYGIPTHGVPAMRSKIDPILEARQKYAYGPQHDYLDHPDVIGWTREGDSSHPKSGLATLITDGPGGSKRMYAGLKNAGETWYDITGNRSDTVKIGSDGWGEFHVNKSSVSIYVQK

SEQ ID NO: 28390 - protein, 485 aa, Bacillus sp.
HHNGTNGTMMQYFEWYLPNDGNHWNRLNSDASNLKSKGITAVWIPPAWKAVSQNDVGYGAYDLYDLGEFNQKGTVRTKYGTRSQLQAAVTSLKNNGIQVYGDVVMNHKGGADATEMVRAVEVNPNNRNQEVTGEYTIEAWTRFDFPGRGNTHSSFKWRWYHFDGVDWDQSRDLENRIYKFRGHGKAWDWEVDTEFGNYDYLMYADYDMDHPEVVNELRNWGVWYTNTLGLDGFRIDAVKHIKYSFTRDWINHVRSATGKNMFAVAEFWKNDLGAIENYLQKTNWNHSVFDVPLHYNLYNASKSGGNYDMRNIFNGTVVQVHPSHAVTFVDNHDSQPEEALESFVEEWFKPLAYALTLTREQGYPSVFYGDYYGIPTHGVPAMRSKIDPILEARQKYAYGPQHDYLDHPDVIGWTREGDSSHPKSGLATLITDGPGGSKRMYAGLKNAGETWYDITGNRSDTVKIGSDGWGEFHVNYGSVSIYVQK

SEQ ID NO: 28391 - protein, 485 aa, Bacillus sp.
HHNGTNGTMMQYFEWYLPNDGNHWNRLNSDASNLKSKGITAVWIPPAWKGASQNDVGYGAYDLYDLGEFNQKGTVRTKYGTRSQLQAAVTSLKNNGIQVYGDVVMNHKGGADATEMVRAVEVNPNNRNQEVTGEYTIEAYTRFDFPGRGNTHSSFKWRWYHFDGVDWDQSRDLTNRIYKFRGHGKAWDWEVDTEFGNYDYLMYADYDMDHPEVVNELRNWGVWYTNTLGLDGFRIDAVKHIKYSFTRDWINHVRSATGKNMFAVAEFWKNDLGAIENYLQKTNWNHSVFDVPLHYNLYNASKSGGNYDMRNIFNGTVVQRHPSHAVTFVDNHDSQPEEALESFVEEWFKPLAYALTLTREQGYPSVFYGDYYGIPTHGVPAMRSKIDPILEARQKYAYGPQHDYLDHPDVIGWTREGDSSHPKSGLATLITDGPGGSKRMYAGLKNAGETWYDITGNRSDTVKIGSDGWGEFHVNDGSVSIYVQK

SEQ ID NO: 28392 - protein, 485 aa, Bacillus sp.
HHNGTNGTMMQYFEWYLPNDGNHWNRLNSDASNLKSKGITAVWIPPAWKGASQNDVGYGAYDLYDLGEFNQKGTVRTKYGTRSQLQAAVTSLKNNGIQVYGDVVMNHKGGADATEMVRAVEVNPNNRNQEVTGEYTIEAWTRFDFPGRGNTHSSFKWRWYHFDGVDWDQSRRLNNRIYKFRGHGKAWDWEVDTEFGNYDYLMYADYDMDHPEVVNELRNWGVWYTNTLGLDGFRIDAVKHIKYSFTRDWINHVRSATGKNMFAVAEFWKNDLGAIENYLQKTNWNHSVFDVPLHYNLYNASKSGGNYDMRNIFNGTVVQRHPSWAVTFVDNHDSQPEEALESFVEEWFKPLAYALTLTREQGYPSVFYGDYYGIPTHGVPAMRSKIDPILEARQKYAYGPQHDYLDHPDVIGWTREGDSSHPKSGLATLITDGPGGSKRMYAGLKNAGETWYDITGNRSDTVKIGSDGWGEFHVNDGSVSIYVQK

SEQ ID NO: 28393 - protein, 485 aa, Bacillus sp.
HHNGTNGTMMQYFEWYLPNDGNHWNRLNSDASNLKSKGITAVWIPPAWKGASQNDVGYGAYDLYDLGEFNQKGTVRTKYGTRSQLQAAVTSLKNNGIQVYGDVVMNHKGGADATEMVRAVEVNPNNRNQEVTGEYTIEAWTRFDFPGRGNTHSSFKWRWYHFDGVDWDQSRRLNNRIYKFRGHGKAWDWEVDTEFGNYDYLMYADYDMDHPEVVNELRNWGVWYTNTLGLDGFRIDAVKHIKYSFTRDWINHVRSATGKNMFAVAEFWKNDLGAIENYLQKTNWNHSVFDVPLHYNLYNASKSGGNYDMRNIFNGTVVQRHPSHAVTFVDNHDSQPEEALESFVEEWFKPLAYALTLTREQGYPSVFYGDYYGIPTHGVPAMRSKIDPILTARQKYAYGPQHDYLDHPDVIGWTREGDSSHPKSGLATLITDGPGGSKRMYAGLKNAGETWYDITGNRSDTVKIGSDGWGEFHVNDGSVSIYVQK

SEQ ID NO: 28394 - protein, 485 aa, Bacillus sp.
HHNGTNGTMMQYFEWYLPNDGNHWNRLNSDASNLKSKGITAVWIPPAWKGASQNDVGYGAYDLYDLGEFNQKGTVRTKYGTRSQLQAAVTSLKNNGIAVYGDVVMNHKGGADATEMVRAVEVNPNNRNQEVTGEYTIEAWTRFDFPGRGNTHSSFKWRWYHFDGVDWDQSRRLNNRIYKFRGHGKAWDWEVDTEFGNYDYLMYADYDMDHPEVVNELRNWGVWYTNTLGLDGFRIDAVKHIKYSFTRDWINHVRSATGKNMFAVAEFWKNDLGAIENYLQKTNWNHSVFDVPLHYNLYNASKSGGNYDMRNIFNGTVVQRHPSHAVTFVDNHDSQPEEALESFVEEWFKPLAYALTLTREQGYPSVFYGDYYGIPTHGVPAMRSKIDPILEARQKYAYGPQHDYLDHPDVIGWTREGDSSHPKSGLATLITDGPGGSKRMYAGLKNAGETWYDITGNRSDTVKIGSDGWGEFHVNDGSVSIYVQK

SEQ ID NO: 28395 - protein, 483 aa, Bacillus sp.
HHNGTNGTMMQYFEWYLPNDGNHWNRLNSDASNLKSKGITAVWIPPAWKGASQNDVGYGAYDLYDLGEFNQKGTVRTKYGTRSQLQAAVTSLKNNGIQVYGDVVMNHKGGADATEMVRAVEVNPNNRNQEVTGEYTIEAWTRFDFPGRGNTHSSFKWRWYHFDGVDWDQSRRLNNRIYKFRGKAWDWEVDTEFGNYDYLMYADYDMDHPEVVNELRNWGVWYTNTLGLDGFRIDAVKHIKYSFTRDWINHVRSATGKNMFAVAEFWKNDLGAIENYLQKTNWNHSVFDVPLHYNLYNASKSGGNYDMRNIFNGTVVQAHPSLAVTFVDNHDSQPEEALESFVEEWFKPLAYALTLTREQGYPSVFYGDYYGIPTHGVPAMRSKIDPILEARQKYAYGPQHDYLDHPDVIGWTREGDSSHPKSGLATLITDGPGGSKRMYAGLKNAGETWYDITGNRSDTVKIGSDGWGEFHVNDGSVSIYVQK

SEQ ID NO: 28396 - protein, 483 aa, Bacillus sp.
HHNGTNGTMMQYFEWYLPNDGNHWNRLNSDASNLKSKGITAVWIPPAWKAVSQNDVGYGAYDLYDLGEFNQKGTVRTKYGTRSQLQAAVTSLKNNGIQVYGDVVMNHKGGADATEMVRAVEVNPNNRNQEVTGEYTIEAWTRFDFPGRGNTHSSFKWRWYHFDGVDWDQSRDLTNRIYKFRGKAWDWEVDTEFGNYDYLMYADYDMDHPEVVNELRNWGVWYTNTLGLDGFRIDAVKHIKYSFTRDWINHVRSATGKNMFAVAEFWKNDLGAIENYLQKTNWNHSVFDVPLHYNLYNASKSGGNYDMRNIFNGTVVQRHPSHAVTFVDNHDSQPEEALESFVEEWFKPLAYALTLTREQGYPSVFYGDYYGIPTHGVPAMRSKIDPILEARQKYAYGPQHDYLDHPDVIGWTREGDSSHPKSGLATLITDGPGGSKRMYAGLKNAGETWYDITGNRSDTVKIGSDGWGEFHVNDGSVSIYVQK

SEQ ID NO: 28397 - protein, 483 aa, Bacillus sp.
HHNGTNGTMMQYFEWYLPNDGNHWNQLNSDASNLKSKGITAVWIPPAWKGASQNDVGYGAYDLYDLGEFNQKGTVRTKYGTRSQLQAAVTSLKNNGIQVYGDVVMNHKGGADATEMVRAVEVNPNNRNQEVTGEYTIEAWTRFDFPGRGNTHSSFKWRWYHFDGVDWDQSRRTNNRIYKFRGKAWDWEVDTEFGNYDYLMYADYDMDHPEVVNELRNWGVWYTNTLGLDGFRIDAVKHIKYSFTRDWINHVRSATGKNMFAVAEFWKNDLGAIENYLQKTNWNHSVFDVPLHYNLYNASKSGGNYDMRNIFNGTVVQRHPSHAVTFVDNHDSQPEEALESFVEEWFKPLAYALTLTREQGYPSVFYGDYYGIPTHGVPAMRSKIDPILEARQKYAYGPQHDYLDHPDVIGWTREGDSSHPKSGLATLITDGPGGSKRMYAGLKNAGETWYDITGNRSDTVKIGSDGWGEFHVNDGSVSIYVQK

SEQ ID NO: 28398 - protein, 483 aa, Bacillus sp.
HHNGTNGTMMQYFEWYLPNDGNHWNRLNSDASNLKSKGITAVWIPPAWKGASQNDVGYGAYDLYDLGEFNQKGTVRTKYGTRSQLQAAVTSLKNNGIQVYGDVVMNHKGGADATEMVRAVEVNPNNRNQEVTGEYTIEAWTRFDFPGRGNTHSSFKWRWYHFDGVDFDQSRRLNNRIYKFRGKAWDWEVDTEFGNYDYLMYADYDMDHPEVVNELRNWGVWYTNTLGLDGFRIDAVKHIKYSFTRDWINHVRSATGKNMFAVAEFWKNDLGAIENYLQKTNWNHSVFDVPLHYNLYNASKSGGNYDMRNIFNGTVVQRHPSHAVTFVDNHDSQPEEALESFVEEWFKPLAYALTLTREQGYPSVFYGDYYGIPTHGVPAMRSKIDPILEARQKYAYGPQHDYLDHPDVIGWTREGDSSHPKSGLATLITDGPGGSKRMYAGLKNAGETWYDITGNRSDTVKIGSDGWGEFHVNDGSVSIYVQK

SEQ ID NO: 28399 - protein, 483 aa, Bacillus sp.
HHNGTNGTMMQYFEWYLPNDGNHWNRLNSDASNLKSKGITAVWIPPAWKGASQNDVGYGAYDLYDLGEFNQKGTVRTKYGTRSQLQAAVTSLKNNGIQVYGDVVMNHKGGADATEMVRAVEVNPNNRNQEVTGEYTIEAWTRFDFPGRGNTHSSFKWRWYHFDGVDWDQSRRLNNRIYKFRGKAWDWEVDTEFGNYDYLMYADYDMDHPEVVNELRNWGVWYTNTLGLDGFRIDAVKHIKYSFTRDWINHVRSATGKNMFAVAEFWKNDLGAIENYLQKTNWNHSVFDVPLHYNLYNASKSGGNYDMRNIFNGTVVQSHPSQAVTFVDNHDSQPEEALESFVEEWFKPLAYALTLTREQGYPSVFYGDYYGIPTHGVPAMRSKIDPILEARQKYAYGPQHDYLDHPDVIGWTREGDSSHPKSGLATLITDGPGGSKRMYAGLKNAGETWYDITGNRSDTVKIGSDGWGEFHVNDGSVSIYVQK

SEQ ID NO: 28400 - protein, 485 aa, Bacillus sp.
HHNGTNGTMMQYFEWYLPNDGNHWNRLNSDASNLKSKGITAVWIPPAWKGASQNDVGYGAYDLYDLGEFNQKGTVRTKYGTRSQLQAAVTSLKNNGIQVYGDVVMNHKGGADTTEMVRAVEVNPNNRNQEVTGEYTIEAWTRFDFPGRGNTHSSFKWRWYHFDGVDWDQSRDLQNRIYKFRGHGKAWDWEVDTEFGNYDYLMYADYDMDHPEVVNELRNWGVWYTNTLGLDGFRIDAVKHIKYSFTRDWINHVRSATGKNMFAVAEFWKNDLGAIENYLQKTNWNHSVFDVPLHYNLYNASKSGGNYDMRNIFNGTVVQRHPSHAVTFVDNHDSQPEEALESFVETWFKPLAYALTLTREQGYPSVFYGDYYGIPTHGVPAMRSKIDPILEARQKYAYGPQHDYLDHPDVIGWTREGDSSHPKSGLATLITDGPGGSKRMYAGLKNAGETWYDITGNRSDTVKIGSDGWGEFHVNKGSVSIYVQK

SEQ ID NO: 28401 - protein, 485 aa, Bacillus sp.
HHNGTNGTMMQYFEWYLPNDGNHWNRLNSDASNLKSKGITAVWIPPAWKGASQNDVGYGAYDLYDLGEFNQKGTVRTKYGTRSQLQAAVTSLKNNGIQVYGDVVMNHKGGADATEMVRAVEVNPNNRNQEVTGEYTIEAWTRFDFPGRGNTHSSFKWRWYHFDGVDWDQSRRLNNRIYKFRGHGKAWDWEVDTEFGNYDYLMYADYDMDHPEVVNELRNWGVWYTNTLGLDGFRIDAVKHIKYSFTRDWINHVRSATGKNMFAVAEFWKNDLGAIENYLQKTNWNHSVFDVPLHYNLYNASKSGGNYDMRNIFNGTVVQRHPSHAVTFVDNHDSQPEEALESFVDEWFKPLAYALTLTREQGYPSVFYGDYYGIPTHGVPAMRSKIDPILEARQKYAYGPQHDYLDHPDVIGWTREGDSSHPKSGLATLITDGPGGSKRMYAGLKNAGETWYDITGNRSDTVKIGSDGWGEFHVNQASVSIYVQK

SEQ ID NO: 28402 - protein, 485 aa, Synthetic construct
HHNGTNGTMMQYFEWYLPNDGNHWNRLNSDASNLKSKGITAVWIPPAWKGASQNDVGYGAYDLYDLGEFNQKGTVRTKYGTRSQLQAAVTSLKNNGIQVYGDVVMNHKGGADATEMVRAVEVNPNNRNQEVTGEYTIEAWTRFDFPGRGNTHSSFKWRWYHFDGVDWDQSRRLNNRIYKFRGHGKAWDWEVDTENGNYDYLMYADYDLDHPESVNELRNWGVWYTNTLGLDGFRIDAVKHIKYSFTRDWINHVRSATGKNMFAVAEFWKNDLGAIENYLQKTNWNHSVFDVPLHYNLYNASKSGGNYDMRNIFNGTVVQRHPSHAVTFVDNHDSQPEEALESFVEEWFKPLAYALTLTREQGYPSVFYGDYYGIPTHGVPAMRSKIDPILEARQKYAYGPQHDYLDHPDVIGWTREGDSSHPKSGLATLITDGPGGSKRMYAGLKNAGETWYDITGNRSDTVKIGSDGWGEFHVNDGSVSIYVQK

SEQ ID NO: 28403 - protein, 483 aa, Bacillus sp.
HHNGTNGTMMQYFEWYLPNDGNHWNRLNSDASNLKSKGITAVWIPPAWKGASQNDAGYGAYDLYDLGEFNQKGTVRTKYGTRSQLQAAVTSLKNNGIQVYGDVVMNHKGGADATEMVRAVEVNPNNRNQEVTGEYTIEAWTRFDFPGRGNTHSSFKWRWYHFDGVDWDQSRRLNNRIYKFRGKAWDWEVDTEFGNYDYLMYADYDMDHPEVVNELRNWGVWYTNTLGLDGFRIDAVKHIKYSFTRDWINHVRSATGKNMFAVAEFWKNDLGAIENYLQKTNWNHSVFDVPLHYNLYNASKSGGNYDMRNIFNGTVVQRHPSHAVTFVDNHDSQPEEALESFVEEWFKPLAYALTLTREQGYPSVFYGDYYGIPTHGVPAMRSKIDPILEARQKYAYGPQHDYLDHPDVIGWTREGDSSHPKSGLATLITDGPGGSKRMYAGLKNAGETWYDITGNRSDTVKIGSDGWGEFHVNDGSVSIYVQK

SEQ ID NO: 28404 - protein, 483 aa, Bacillus sp.
HHNGTNGTMMQYFEWYLPNDGNHWNRLNSDASNLKSKGITAVWIPPAWKGASQNDVGYGAYDLYDLGEFNQKGTVRTKYGTRSQLQAAVTSLKNNGISVYGDVVMNHKGGADATEMVRAVEVNPNNRNQEVTGEYTIEAWTRFDFPGRGNTHSSFKWRWYHFDGVDWDQSRRLNNRIYKFRGKAWDWEVDTEFGNYDYLMYADYDMDHPEVVNELRNWGVWYTNTLGLDGFRIDAVKHIKYSFTRDWINHVRSATGKNMFAVAEFWKNDLGAIENYLQKTNWNHSVFDVPLHYNLYNASKSGGNYDMRNIFNGTVVQSHPSHAVTFVDNHDSQPEEALESFVEEWFKPLAYALTLTREQGYPSVFYGDYYGIPTHGVPAMRSKIDPILEARQKYAYGPQHDYLDHPDVIGWTREGDSSHPKSGLATLITDGPGGSKRMYAGLKNAGETWYDITGNRSDTVKIGSDGWGEFHVNDGSVSIYVQK

SEQ ID NO: 28405 - protein, 483 aa, Bacillus sp.
HHNGTNGTMMQYFEWYLPNDGNHWNRLNSDASNLKSKGITAVWIPPAWKGASQNDVGYGAYDLYDLGEFNQKGTVRTKYGTRSQLQAAVTSLKNNGIQVYGDVVMNHKGGADATEMVRAVEVNPNNRNQEVTGEYTIEAWTRFDFPGRGNTHSSFKWRWYHFDGVDWDQSRRLNNRIYKFRGKAWDWEVDTEFGNYDYLMYADYDMDHPEVVAELRNWGVWYTNTLGLDGFRIDAVKHIKYSFTRDWINHVRSATGKNMFAVAEFWKNDLGAIENYLQKTNWNHSVFDVPLHYNLYNASKSGGNYDMRNIFNGTVVQRHPSHAVTFVDNHDSQPEEALESFVEEWFKPLAYALTLTREQGYPSVFYGDYYGIPTHGVPAMRSKIDPILEARQKYAYGPQHDYLDHPDVIGWTREGDSSHPKSGLATLITDGPGGSKRMYAGLKNAGETWYDITGNRSDTVKIGSDGWGEFHVNDGSVSIYVQK

SEQ ID NO: 28406 - protein, 485 aa, Bacillus sp.
HHNGTNGTMMQYFEWYLPNDGNHWNRLNSDASNLKSKGITAVWIPPAWKGASQNDVGYGAYDLYDLGEFNQKGTVRTKYGTRSQLQAAVTSLKNNGIQVYGDVVMNHKGGADATEMVRAVEVNPNNRTQEVTGEYTIEAWTRFDFPGRGNTHSSFKWRWYHFDGVDWDQSRRLNNRIYKFRGHGKAWDWEVDTEFGNYDYLMYADYDMDHPEVVNELRNWGVWYTNTLGLDGFRIDAVKHIKYSFTRDWINHVRSATGKNMFAVAEFWKNDLGAIENYLQKTNWNHSVFDVPLHYNLYNASKSGGNYDMRNIFNGTVVQRHPSHAVTFVDNHDSQPEEALESFVEEWFKPLAYALTLTREQGYPSVFYGDYYGIPTHGVPAMRSKIDPILEARQKYAYGPQHDYLDHPDVIGWTREGDSSHPKSGLATLITDGPGGSKRMYAGLKNAGETWYDITGNRSDTVKIGSDGWGEFHVNDGSVSIYVQK

SEQ ID NO: 28407 - protein, 483 aa, Bacillus sp.
HHNGTNGTMMQYFEWYLPNDGNHWNRLNSDASNLKSKGITAVWIPPAWKGASQNDVGYGAYDLYDLGEFNQKGTVRTKYGTRSQLQAAVTSLKNNGIQVYGDVVMNHKGGADATEMVRAVEVNPNNRNQEVTGEYTIEAWTRFDFPGRGNTHSSFKWRWYHFDGVDWDQSRRLNNRIYKFRGKAWDWEVDTEFGNYDYLMYADYDMDHPESVNELRNWGVWYTNTLGLDGFRIDAVKHIKYSFTRDWINHVRSATGKNMFAVAEFWKNDLGAIENYLQKTNWNHSVFDVPLHYNLYNASKSGGNYDMRNIFNGTVVQRHPSHAVTFVDNHDSQPEEALESFVEEWFKPLAYALTLTREQGYPSVFYGDYYGIPTHGVPAMRSKIDPILEARQKYAYGPQHDYLDHPDVIGWTREGDSSHPKSGLATLITDGPGGSKRMYAGLKNAGETWYDITGNRSDTVKIGSDGWGEFHVNDGSVSIYVQK

SEQ ID NO: 28408 - protein, 483 aa, Bacillus sp.
HHNGTNGTMMQYFEWYLPNDGNHWNRLNSDASNLKSKGIKAVWIPPAWKGASQNDVGYGAYDLYDLGEFNQKGTVRTKYGTRSQLQAAVTSLKNNGIQVYGDVVMNHKGGADATEMVRAVEVNPNNRNQEVTGEYTIEAWTRFDFPGRGNTHSSFKWRWYHFDGVDWDQSRRLNNRIYKFRGKAWDWEVDTEFGNYDYLMYADYDMDHPEVVNELRNWGVWYTNTLGLDGFRIDAVKHIKYSFTRDWINHVRSATGKNMFAVAEFWKNDLGAIENYLQKTNWNHSVFDVPLHYNLYNASKSGGNYDMRNIFNGTVVQRHPSHAVTFVDNHDSQPEEALESFVEEWFKPLAYALTLTREQGYPSVFYGDYYGIPTHGVPAMRSKIDPILEARQKYAYGPQHDYLDHPDVIGWTREGDSSHPKSGLATLITDGPGGSKRMYAGLKNAGETWYDITGNRSDTVKIGSDGWGEFHVNDGSVSIYVQK

SEQ ID NO: 28409 - protein, 485 aa, Bacillus sp.
HHNGTNGTMMQYFEWYLPNDGNHWNRLNSDASNLKSKGITAVWIPPAWKGASQNDVGYGAYDLYDLGEFNQKGTVRTKYGTRSQLQAAVTSLKNNGIQVYGDVVMNHKGGADATEMVRAVEVNPNNRNQEVTGEYTIEAWTRFDFPGRGNTHSSFKWRWYHFDGVDWDQSRRLNNRIYKFRGHGKAWDWEVDTEFGNYDYLMYADYDMDHPEVVNELRNWGVWYTNTLGLDGFRIDAVKHIKYSFTRDWINHVRSATGKNMFAVAEFWKNDLGAIENYLQKTNWNHSVFDVPLHNNLYNASKSGGNYDMRNIFNGTVVQRHPSHAVTFVDNHDSQPEEALESFVEEWFKPLAYALTLTREQGYPSVFYGDYYGIPTHGVPAMRSKIDPILEARQKYAYGPQHDYLDHPDVIGWTREGDSSHPKSGLATLITDGPGGSKRMYAGLKNAGETWYDITGNRSDTVKIGSDGWGEFHVNDGSVSIYVQK

SEQ ID NO: 28410 - protein, 483 aa, Synthetic construct
HHNGTNGTMMQYFEWYLPNDGNHWNRLNSDASNLKSKGITAVWIPPAWKGASQNDVGYGAYDLYDLGEFNQKGTVRTKYGTRSQLQAAVTSLKNNGIQVYGDVVMNHKGGADATEMVRAVEVNPNNRNQEVTGEYTIEAWTRFDFPGRGNTHSSFKWRWYHFDGVDWDQSRRLNNRIYKFRGKAWDWEVDTEFGNYDYLMYADYDMDHPEVVNEVRNWGVWYTNTLGLDGFRIDAVKHIKYSFTRDWINHVRSATGKNMFAVAEFWKNDLGAIENYLQKTNWNHSVFDVPLHYNLYNASKSGGNYDMRNIFNGTVVQRHPSHAVTFVDNHDSQPEEALESFVEEWFKPLAYALTLTREQGYPSVFYGDYYGIPTHGVPAMRSKIDPILEARQKYAYGPQHDYLDHPDVIGWTREGDSSHPKSGLATLITDGPGGSKRMYAGLKNAGETWYDITGNRSDTVKIGSDGWGEFHVNDGSVSIYVQK

SEQ ID NO: 28411 - protein, 483 aa, Bacillus sp.
HHNGTNGTMMQYFEWYLPNDGNHWNRLNSDASNLKSKGITAVWIPPAWKGASQNDVGYGAYDLYDLGEFNQKGTVRTKYGTRSQLQAAVTSLKNNGIQVYGDVVMNHKGGADATEMVRAVEVNPNNRHQEVTGEYTIEAWTRFDFPGRGNTHSSFKWRWYHFDGVDWDQSRRLNNRIYKFRGKAWDWEVDTEFGNYDYLMYADYDMDHPEVVNELRNWGVWYTNTLGLDGFRIDAVKHIKYSFTRDWINHVRSATGKNMFAVAEFWKNDLGAIENYLQKTNWNHSVFDVPLHYNLYNASKSGGNYDMRNIFNGTVVQRHPSHAVTFVDNHDSQPEEALESFVEEWFKPLAYALTLTREQGYPSVFYGDYYGIPTHGVPAMRSKIDPILEARQKYAYGPQHDYLDHPDVIGWTREGDSSHPKSGLATLITDGPGGSKRMYAGLKNAGETWYDITGNRSDTVKIGSDGWGEFHVNDGSVSIYVQK

SEQ ID NO: 28412 - protein, 483 aa, Bacillus sp.
HHNGTNGTMMQYFEWYLPNDGNHWNRLNSDASNLKSKGITAVWIPPAWKGASQNDVGYGAYDLYDLGEFNQKGTVRTKYGTRSQLQAAVTSLKNNGIQVYGDVVMNHKGGADATEMVRAVEVNPNNRNQEVTGEYTIEAWTRFDFPGRGNTHSSFKWRWYHFDGVDWDQSRNLNNRIYKFRGKAWDWEVDTEFGNYDYLMYVDYDMDHPEVVNELRNWGVWYTNTLGLDGFRIDAVKHIKYSFTRDWINHVRSATGKNMFAVAEFWKNDLGAIENYLQKTNWNHSVFDVPLHYNLYNASKSGGNYDMRNIFNGTVVQRHPSHAVTFVDNHDSQPEEALESFVEEWFKPLAYALTLTREQGYPSVFYGDYYGIPTHGVPAMRSKIDPILEARQKYAYGPQHDYLDHPDVIGWTREGDSSHPKSGLATLITDGPGGSKRMYAGLKNAGETWYDITGNRSDTVKIGSDGWGEFHVNDGSVSIYVQK

SEQ ID NO: 28413 - protein, 483 aa, Bacillus sp.
HHNGTNGTMMQYFEWYLPNDGNHWNRLNSDASNLKSKGITAVWIPPAWKGASQNDVGYGAYDLYDLGEFNQKGTVRTKYGTRSQLQAAVTSLKNNGIQVYGDVVMNHKGGADATEMVRAVEVNPNNRNQEVTGEYTIEAWTRFDFPGRGNTHSSFKWRWYHFDGVDWDQSRRLNNRIYKFRGKAWDWEVDTEFGNYDYLMYVDYDMDHPEVVNELRNWGVWYTNTLGLDGFRIDAVKHIKYSFTRDWINHVRSATGKNMFAVAEFWKNDLGAIENYLQKTNWNHSVFDVPLHYNLYNASKSGGNYDMRNIFNGTVVQRHPSHAVTFVDNHDSQPEEALESFVEEWFKPLAYALTLTREQGYPSVFYGDYYGIPTHGVPAMRSKIDPILEARQKYAYGPQHDYLDHPDVIGWTREGDSSHPKSGLATLITDGPGGSKRMYAGLKNAGETWYDITGNRSDTVKIGSDGWGEFHVNDGSVSIYVQK

SEQ ID NO: 28414 - protein, 483 aa, Bacillus sp.
HHNGTNGTMMQYFEWYLPNDGNHWNRLNSDASNLKSKGITAVWIPPAWKGASQNDVGYGAYDLYDLGEFNQKGTVRTKYGTRSQLQAAVTSLKNNGIQVYGDVVMNHKGGADATEMVRAVEVNPNNRNQEVTGEYTIEAYTRFDFPGRGNTHSSFKWRWYHFDGVDWDQSRRLNNRIYKFRGKAWDWEVDTEFGNYDYLMYADYDMDHPEVVNELRNWGVWYTNTLGLDGFRIDAVKHIKYSFTRDWINHVRSATGKNMFAVAEFWKNDLGAIENYLQKTNWNHSVFDVPLHYNLYNASKSGGNYDMRNIFNGTVVQRHPSHAVTFVDNHDSQPEEALESFVEEWFKPLAYALTLTREQGYPSVFYGDYYGIPTHGVPAMRSKIDPILEARQKYAYGPQHDYLDHPDVIGWTREGDSSHPKSGLATLITDGPGGSKRMYAGLKNAGETWYDITGNRSDTVKIGSDGWGEFHVNDGSVSIYVQK

SEQ ID NO: 28415 - protein, 483 aa, Bacillus sp.
HHNGTNGTMMQYFEWYLPNDGNHWNRLNSDASNLKSKGITAVWIPPAWKGASQNDVGYGAYDLYDLGEFNQKGTVRTKYGTRSQLQAAVTSLKNNGIQVYGDVVMNHKGGADATEMVRAVEVNPNNRNQEVTGEYTIEAWTRFDFPGRGNTHSSFKWRWYHFDGVDWDQSRRLNNRIYKFRGKAWDWEVDTEFGNYDYLMYADYDMDHPEVVNELRNWGVWYTNTLGLDGFRIDAVKHIKYSFTRDWINHVRSATGKNMFAVAEFWKNDLGAIENYLQKTNWNHSVFDVPLHYNLYNASKSGGNYDMRNIFNGTVVQRHPSHAVTFVDNHDSQPEEALESFVDPWFKPLAYALTLTREQGYPSVFYGDYYGIPTHGVPAMRSKIDPILEARQKYAYGPQHDYLDHPDVIGWTREGDSSHPKSGLATLITDGPGGSKRMYAGLKNAGETWYDITGNRSDTVKIGSDGWGEFHVNGTSVSIYVQK

SEQ ID NO: 28416 - protein, 483 aa, Bacillus sp.
HHNGTNGTMMQYFEWYLPNDGNHWNRLNSDASNLKSKGITAVWIPPAWKGASQNDVGYGAYDLYDLGEFNQKGTVRTKYGTRSQLQAAVTSLKNNGIQVYGDVVMNHKGGADATEMVPAVEVNPNNRNQEVTGEYTIEAWTRFDFPGRGNTHSSFKWRWYHFDGVDWDQSRRLNNRIYKFRSKAWDWEVDTEFGNYDYLMYADYDMDHPEVVNELRNWGVWYTNTLGLDGFRIDAVKHIKYSFTRDWINHVRSATGKNMFAVAEFWKNDLGAIENYLQKTNWNHSVFDVPLHYNLYNASKSGGNYDMRNIFNGTVVQRHPSHAVTFVDNHDSQPEEALESFVEEWFKPLAYALTLTREQGYPSVFYGDYYGIPTHGVPAMRSKIDPILEARQKYAYGPQHDYLDHPDVIGWTREGDSSHPKSGLATLITDGPGGSKRMYAGLKNAGETWYDITGNRSDTVKIGSDGWGEFHVNDGSVSIYVQK

SEQ ID NO: 28417 - protein, 485 aa, Bacillus sp.
HHNGTNGTMMQYFEWYLPNDGNHWNRLNSDASNLKSKGITAVWIPPAWKGASQNDVGYGAYDLYDLGEFNQKGTVRTKYGTRSQLQAAVTSLKNNGIQVYGDVVMNHKGGADATEMVRAVEVNPNNRNQEVTGEYTIEAWTRFDFPGRGNTHSSFKWRWYHFDGVDWDQSRRLNNRIYKFRGHGKAWDWEVETEFGNYDYLMYADYDMDHPEVVNELRNWGVWYTNTLGLDGFRIDAVKHIKYSFTRDWINHVRSATGKNMFAVAEFWKNDLGAIENYLQKTNWNHSVFDVPLHYNLYNASKSGGNYDMRNIFNGTVVQRHPSHAVTFVDNHDSQPEEALESFVEEWFKPLAYALTLTREQGYPSVFYGDYYGIPTHGVPAMRSKIDPILEARQKYAYGPQHDYLDHPDVIGWTREGDSSHPKSGLATLITDGPGGSKRMYAGLKNAGETWYDITGNRSDTVKIGSDGWGEFHVNDGSVSIYVQK

SEQ ID NO: 28418 - protein, 485 aa, Bacillus sp.
HHNGTNGTMMQYFEWYLPNDGNHWNRLNSDASNLKSKGITAVWIPPAWKGVSQNDVGYGAYDLYDLGEFNQKGTVRTKYGTRSQLQAAVTSLKNNGIQVYGDVVMNHKGGADATEMVRAVEVNPNNRNQEVTGEYTIEAWTRFDFPGRGNTHSSFKWRWYHFDGVDWDQSRRLTNRIYKFRGHGKAWDWEVDTEFGNYDYLMYVDYDMDHPEVVNELRNWGVWYTNTLGLDGFRIDAVKHIKYSFTRDWINHVRSATGKNMFAVAEFWKNDLGAIENYLQKTNWNHSVFDVPLHYNLYNASKSGGNYDMRNIFNGTVVQRHPSHAVTFVDNHDSQPEEALESFVEEWFKPLAYALTLTREQGYPSVFYGDYYGIPTHGVPAMRSKIDPILEARQKYAYGPQHDYLDHPDVIGWTREGDSSHPKSGLATLITDGPGGSKRMYAGLKNAGETWYDITGNRSDTVKIGSDGWGEFHVNDGSVSIYVQK

SEQ ID NO: 28419 - protein, 483 aa, Bacillus sp.
HHNGTNGTMMQYFEWYLPNDGNHWNRLNSDASNLKSKGITAVWIPPAWKGASQNDVGYGAYDLYDLGEFNQKGTVRTKYGTRSQLQAAVTSLKNNGINVYGDVVMNHKGGADATEMVRAVEVNPNNRNQEVTGEYTIEAWTRFDFPGRGNTHSSFKWRWYHFDGVDFDQSRRLNNRIYKFRGKAWDWEVDTEFGNYDYLMYADYDMDHPEVVNELRNWGVWYTNTLGLDGFRIDAVKHIKYSFTRDWINHVRSATGKNMFAVAEFWKNDLGAIENYLQKTNWNHSVFDVPLHYNLYNASKSGGNYDMRNIFNGTVVQAHPMHAVTFVDNHDSQPEEALESFVEEWFKPLAYALTLTREQGYPSVFYGDYYGIPTHGVPAMRSKIDPILEARQKYAYGPQHDYLDHPDVIGWTREGDSSHPKSGLATLITDGPGGSKRMYAGLKNAGETWYDITGNRSDTVKIGSDGWGEFHVNDGSVSIYVQK

SEQ ID NO: 28420 - protein, 485 aa, Bacillus sp.
HHNGTNGTMMQYFEWYLPNDGNHWNRLNSDASNLKSKGITAVWIPPAWKGASQNDVGYGAYDLYDLGEFNQKGTVRTKYGTRSQLQAAVTSLKNNGIQVYGDVVMNHKGGADATEMVRAVEVNPNNRNQEVTGEYTIEAWTRFDFPGRGNTHSSFKWRWYHFDGVDWDQSRRLNNRIYMFRGHGKAWDWEVDTEFGNYDYLMYADYDMDHPEVVNELRNWGVWYTNTLGLDGFRIDAVKHIKYSFTRDWINHVRSATGKNMFAVAEFWKNDLGAIENYLQKTNWNHSVFDVPLHYNLYNASKSGGNYDMRNIFNGTVVQRHPSHAVTFVDNHDSQPEEALESFVEEWFKPLAYALTLTREQGYPSVFYGDYYGIPTHGVPAMRSKIDPILEARQKYAYGPQHDYLDHPDVIGWTREGDSSHPKSGLATLITDGPGGSKRMYAGLKNAGETWYDITGNRSDTVKIGSDGWGEFHVNDGSVSIYVQK

SEQ ID NO: 28421 - protein, 483 aa, Bacillus sp.
HHNGTNQTMMQYFEWYLPNDGNHWNRLNSDASNLKSKGITAVWIPPAWKGASQNDVGYGAYDLYDLGEFNQKGTVRTKYGTRSQLQAAVTSLKNNGIQVYGDVVMNHKGGADATEMVRAVEVNPNNRNQEVTGEYTIEAWTRFDFPGRGNTHSSFKWRWYHFDGVDWDQSRRLNNRIYKFRGKAWDWEVDTEFGNYDYLMYADYDMDHPEVVNELRNWGVWYTNTLGLDGFRIDAVKHIKYSFTRDWINHVRSATGKNMFAVAEFWKNDLGAIENYLQKTNWNHSVFDVPLHYNLYNASKSGGNYDMRNIFNGTVVQAHPRHAVTFVDNHDSQPEEALESFVEEWFKPLAYALTLTREQGYPSVFYGDYYGIPTHGVPAMRSKIDPILEARQKYAYGPQHDYLDHPDVIGWTREGDSSHPKSGLATLITDGPGGSKRMYAGLKNAGETWYDITGNRSDTVKIGSDGWGEFHVNDGSVSIYVQK

SEQ ID NO: 28422 - protein, 483 aa, Bacillus sp.
HHNGKNGTMMQYFEWYLPNDGNHWNRLNSDASNLKSKGITAVWIPPAWKGASQNDVGYGAYDLYDLGEFNQKGTVRTKYGTRSQLQAAVTSLKNNGIQVYGDVVMNHKGGADATEMVRAVEVNPNNRNQEVTGEYTIEAWTRFDFPGRGNTHSSFKWRWYHFDGVDWDQSREFNNRIYKFRGKAWDWEVDTEFGNYDYLMYADYDMDHPEVVNELRNWGVWYTNTLGLDGFRIDAVKHIKYSFTRDWINHVRSATGKNMFAVAEFWKNDLGAIENYLQKTNWNHSVFDVPLHYNLYNASQSGGNYDMRNIFNGTVVQRHPSHAVTFVDNHDSQPEEALESFVEPWFKPLAYALTLTREQGYPSVFYGDYYGIPTHGVPAMRSKIDPILEARQKYAYGPQHDYLDHPDVIGWTREGDSSHPKSGLATLITDGPGGSKRMYAGLKNAGETWYDITGNRSDTVKIGSDGWGEFHVNDGSVSIYVQK

SEQ ID NO: 28423 - protein, 485 aa, Bacillus sp.
HHNGTNGTMMQYFEWYLPNDGNHWNRLNSDASNLKSKGITAVWIPPAWKGASQNDVGYGAYDLYDLGEFNQKGTVRTKYGTRSQLQAAVTSLKNNGIQVYGDVVMNHKGGADATEMVRAVEVNPNNRNQEVTGEYTIEAWTRFDFPGRGNTHSSFKWRWYHFDGVDWDQSRRLNNRIYKFRGHGKAWDWEVDTEFGNYDYLMYADYDMDHPEVVNELRNWGVWYTNTLGLDGFRIDAVKHIKYSFTRDWINHVRSATGKNMFAVAEFWKNDLGAIENYLQKTNWNHSVFDVPLHYNLYNASKSGGNYDMRNIFNGTVVQRHPSQAVTFVDNHDSQPEEALESFVEEWFKPLAYALTLTREQGYPSVFYGDYYGIPTHGVPAMRSKIDPILEARQKYAYGPQHDYLDHPDVIGWTREGDSSHPKSGLATLITDGPGGSKRMYAGLKNAGETWYDITGNRSDTVKIGSDGWGEFHVNDGSVSIYVQK

SEQ ID NO: 28424 - protein, 485 aa, Bacillus sp.
HHNGTNGTMMQYFEWYLPNDGNHWNRLNSDASNLKSKGITAVWIPPAWKGASQNDVGYGAYDLYDLGEFNQKGTVRTKYGTRSQLQAAVTSLKNNGIQVYGDVVMNHKGGADATEMVRAVEVNPNNRNQEVTGEYTIEAWTRFDFPGRGNTHSSFKWRWYHFDGVDWDQSRRLNNRIYKFRGHGKAWDWEVDTEFGNYDYLMYADYDMDHPEVVNELRNWGVWYTNTLGLDGFRIDAVKHIKYSFTRDWINHVRSATGKNMFAVAEFWKNDLGAIENYLQKTNWNHSVFDVPLHYNLYNASNSGGNYDMRNIFNGTVVQRHPSHAVTFVDNHDSQPEEALESFVDTWFKPLAYALTLTREQGYPSVFYGDYYGIPTHGVPAMRSKIDPILEARQKYAYGPQHDYLDHPDVIGWTREGDSSHPKSGLATLITDGPGGSKRMYAGLKNAGETWYDITGNRSDTVKIGSDGWGEFHVNKASVSIYVQK

SEQ ID NO: 28425 - protein, 485 aa, Bacillus sp.
HHNGTNQTMMQYFEWYLPNDGNHWNRLNSDASNLKSKGITAVWIPPAWKGASQNDVGYGAYDLYDLGEFNQKGTVRTKYGTRSQLQAAVTSLKNNGIQVYGDVVMNHKGGADATEMVRAVEVNPNNRNQEVTGEYTIEAWTRFDFPGRGNTHSSFKWRWYHFDGVDWDQSRRLNNRIYKFRGHGKAWDWEVDTEFGNYDYLMYADYDMDHPEVVNELRNWGVWYTNTLGLDGFRIDAVKHIKYSFTRDWINHVRSATGKNMFAVAEFWKNDLGAIENYLQKTNWNHSVFDVPLHYNLYNASKSGGNYDMRNIFNGTVVQSNPMHAVTFVDNHDSQPEEALESFVEEWFKPLAYALTLTREQGYPSVFYGDYYGIPTHGVPAMRSKIDPILEARQKYAYGPQHDYLDHPDVIGWTREGDSSHPKSGLATLITDGPGGSKRMYAGLKNAGETWYDITGNRSDTVKIGSDGWGEFHVNDGSVSIYVQK

SEQ ID NO: 28426 - protein, 483 aa, Bacillus sp.
HHNGTNGTMMQYFEWYLPNDGNHWNRLNSDASNLKSKGITAVWIPPAWKGASQNDVGYGAYDLYDLGEFNQKGTVRTKYGTRSQLQAAVTSLKNNGIQVYGDVVMNHKGGADATEMVRAVEVNPNNRNQEVTGEYTIEAWTRFDFPGRGNTHSSFKWRWYHFDGVDWDQSRRLNNRIYKFRGKAWDWEVDTEFGNYDYLMYADYDMDHPEVVNELRNWGVWYTNTLGLDGFRIDAVKHIKYSFTRDWINHVRSATGKNMFAVAEFWKNDLGAIENYLQKTNWNHSVFDVPLHYNLYNASKSGGNYDMRNIFNGTVVQRHPSHAVTFVDNHDSQPEEALESFVEEWFKPLAYALTLTREQGYPSVFYGDYYGIPTHGVPAMRSKIDPILIARQKYAYGPQHDYLDHPDVIGWTREGDSSHPKSGLATLITDGPGGSKRMYAGLKNAGETWYDITGNRSDTVKIGSDGWGEFHVNDGSVSIYVQK

SEQ ID NO: 28427 - protein, 483 aa, Bacillus sp.
HHNGTNGTMMQYFEWYLPNDGNHWNRLNSDASNLKSKGITAVWIPPAWKGASQNDVGYGAYDLYDLGEFNQKGTVRTKYGTRSQLQAAVTSLKNNGIQVYGDVVMNHKGGADATEMVRAVEVNPNNRNQEVTGEYTIEAWTRFDFPGRGNTHSSFKWRWYHFDGVDWDQSRRLNNRIYKFRGKAWDWEVDTEFGNYDYLMYADYDMDHPEVVNELRNWGVWYTNTLGLDGFRIDAVKHIKSSFTRDWINHVRSATGKNMFAVAEFWKNDLGAIENYLQKTNWNHSVFDVPLHYNLYNASKSGGNYDMRNIFNGTVVQRHPSHAVTFVDNHDSQPEEALESFVEEWFKPLAYALTLTREQGYPSVFYGDYYGIPTHGVPAMRSKIDPILEARQKYAYGPQHDYLDHPDVIGWTREGDSSHPKSGLATLITDGPGGSKRMYAGLKNAGETWYDITGNRSDTVKIGSDGWGEFHVNDGSVSIYVQK

SEQ ID NO: 28428 - protein, 485 aa, Bacillus sp.
HHNGTNGTMMQYFEWYLPNDGNHWNRLNSDASNLKSKGITAVWIPPAWKATSQNDVGYGAYDLYDLGEFNQKGTVRTKYGTRSQLQAAVTSLKNNGIQVYGDVVMNHKGGADATEMVDAVEVNPNNRNQEVTGEYTIEAWTRFDFPGRGNTHSSFKWRWYHFDGVDFDQSRNVNNRIYKFRGHGKAWDWEVDTEFGNYDYLMYADYDMDHPEVVNELRNWGVWYTNTLGLDGFRIDAVKHIKYSFTRDWINHVRSATGKNMFAVAEFWKNDLGAIENYLQKTNWNHSVFDVPLHYNLYNASKSGGNYDMRNIFNGTVVQRHPSHAVTFVDNHDSQPEEALESFVEEWFKPLAYALTLTREQGYPSVFYGDYYGIPTHGVPAMRSKIDPILEARQKYAYGPQHDYLDHPDVIGWTREGDSSHPKSGLATLITDGPGGSKRMYAGLKNAGETWYDITGNRSDTVKIGSDGWGEFHVNDGSVSIYVQK

SEQ ID NO: 28429 - protein, 483 aa, Synthetic construct
HHNGTNGTMMQYFEWYLPNDGNHWNRLNSDASNLKSKGITAVWIPPAWKGASQNDVGYGAYDVYDLGEFNQKGTVRTKYGTRSQLQAAVTSLKNNGIQVYGDVVMNHKGGADATEMVRAVEVNPNNRNQEVTGEYTIEAWTRFDFPGRGNTHSSFKWRWYHFDGVDWDQSRRLNNRIYKFRGKAWDWEVDTENGNYDYLMYADLDMDHPEVVNEVRNWGVWYTNTLGLDGFRIDAVKHIKYSFTRDWINHVRSATGKNMFAVAEFWKNDLGAIENYLQKTNWNHSVFDVPLHYNLYNASKSGGNYDMRNIFNGTVVQRHPSHAVTFVDNHDSQPEEALESFVEEWFKPLAYALTLTREQGYPSVFYGDYYGIPTHGVPAMRSKIDPILEARQKYAYGPQHDYLDHPDVIGWTREGDSSHPKSGLATLITDGPGGSKRMYAGLKNAGETWYDITGNRSDTVKIGSDGWGEFHVNDGSVSIYVQK

SEQ ID NO: 28430 - protein, 485 aa, Bacillus sp.
HHNGTNGTMMQYFEWYLPNDGNHWNRLNSDASNLKSKGITAVWIPPAWKGASQNDVGYGAYDLYDLGEFNQKGTVRTKYGTRSQLQAAVTSLKNNGIQVYGDVVMNHKGGADATEMVRAVEVNPNNRNQEVTGEYTIEAWTRFDFPGRGNTHSSFKWRWYHFDGVDWDQSRRLNNRIYKFRGHGKAWDWEVDTEFGNYDYLMYADYDMDHPEVVNELRNWGVWYTNTLGLDGFRIDAVKHIKYSFTRDWINHVRSATGKNMFAVAEFWKNDLGAIENYLQKTNWNHSVFDVPLHYNLYNASKSGGNYDMRNIFNGTVVQRHPSHAVTFVDNHDSQPEEALESFVEEWFKPLAYALTLTREQGYPSVFYGDYYGIPTHGVPAMRSKIDPILEARQKYAYGPQHDYLDHPDVIGWTREGDSSHPKSGLATLITDGPGGSKRMYAGLKNTGETWYDITGNRSDTVKIGSDGWGEFHVNDGSVSIYVQK

SEQ ID NO: 28431 - protein, 485 aa, Bacillus sp.
HHNGTNGTMMQYFEWYLPNDGNHWNRLNSDASNLKSKGITAVWIPPAWKGASQNDVGYGAYDLYDLGEFNQKGTVRTKYGTRSQLQAAVTSLKNNGIQVYGDVVMNHKGGADATEMVRAVEVNPNNRNQEVTGEYTIEAWTRFDFPGRGNTHSSFKWRWYHFDGVDWDQSRRLNNRIYKFRGHGKAWDWEVDTEFGNYDYLMYADYDMDHPEVVNELRNWGVWYTNTLGLDGFRIDAVKHIKYSFTRDWINHVRSATGKNMFAVAEFWKNDLGAIENYLQKTNWNHSVFDVPLHYNLYNASQSGGNYDMRNIFNGTVVQRHPSHAVTFVDNHDSQPEEALESFVDEWFKPLAYALTLTREQGYPSVFYGDYYGIPTHGVPAMRSKIDPILEARQKYAYGPQHDYLDHPDVIGWTREGDSSHPKSGLATLITDGPGGSKRMYAGLKNAGETWYDITGNRSDTVKIGSDGWGEFHVNKKSVSIYVQK

SEQ ID NO: 28432 - protein, 483 aa, Bacillus sp.
HHNGTNGTMMQYFEWYLPNDGNHWNRLNSDASNLKSKGITAVWIPPAWKGASQNDVGYGAYDLYDLGEFNQKGTVRTKYGTRSQLQAAVTSLKNNGIQVYGDVVMNHKGGADATEMVRAVEVNPNNRNQEVTGEYTIEAWTRFDFPGRGNTHSSFKWRWYHFDGVDWDQSRRLNNRIYKFRGKAWDWEVDTEFGNYDYLMYADYDMDHPEVVNELRNWGVWYTNTLGLDGFRIDAVKHIKDSFTRDWINHVRSATGKNMFAVAEFWKNDLGAIENYLQKTNWNHSVFDVPLHYNLYNASKSGGNYDMRNIFNGTVVQRHPSHAVTFVDNHDSQPEEALESFVEEWFKPLAYALTLTREQGYPSVFYGDYYGIPTHGVPAMRSKIDPILEARQKYAYGPQHDYLDHPDVIGWTREGDSSHPKSGLATLITDGPGGSKRMYAGLKNAGETWYDITGNRSDTVKIGSDGWGEFHVNDGSVSIYVQK

SEQ ID NO: 28433 - protein, 483 aa, Bacillus sp.
HHNGTNNTMMQYFEWYLPNDGNHWNRLNSDASNLKSKGITAVWIPPAWKGASQNDVGYGAYDLYDLGEFNQKGTVRTKYGTRSQLQAAVTSLKNNGIQVYGDVVMNHKGGADATEMVRAVEVNPNNRNQEVTGEYTIEAWTRFDFPGRGNTHSSFKWRWYHFDGVDWDQSRRLNNRIYKFRGKAWDWEVDTEFGNYDYLMYADYDMDHPEVVNELRNWGVWYTNTLGLDGFRIDAVKHIKYSFTRDWINHVRSATGKNMFAVAEFWKNDLGAIENYLQKTNWNHSVFDVPLHYNLYNASKSGGNYDMRNIFNGTVVQAHPSHAVTFVDNHDSQPEEALESFVEEWFKPLAYALTLTREQGYPSVFYGDYYGIPTHGVPAMRSKIDPILEARQKYAYGPQHDYLDHPDVIGWTREGDSSHPKSGLATLITDGPGGSKRMYAGLKNAGETWYDITGNRSDTVKIGSDGWGEFHVNDGSVSIYVQK

SEQ ID NO: 28434 - protein, 485 aa, Bacillus sp.
HHNGTNGTMMQYFEWYLPNDGNHWNRLNSDASNLKSKGITAVWIPPAWKAASQNDVGYGAYDLYDLGEFNQKGTVRTKYGTRSQLQAAVTSLKNNGIQVYGDVVMNHKGGADATEMVRAVEVNPNNRNQEVTGEYTIEAWTRFDFPGRGNTHSSFKWRWYHFDGVDWDQSRELSNRIYKFRGHGKAWDWEVDTEFGNYDYLMYADYDMDHPEVVNELRNWGVWYTNTLGLDGFRIDAVKHIKYSFTRDWINHVRSATGKNMFAVAEFWKNDLGAIENYLQKTNWNHSVFDVPLHYNLYNASKSGGNYDMRNIFNGTVVQRHPSHAVTFVDNHDSQPEEALESFVEEWFKPLAYALTLTREQGYPSVFYGDYYGIPTHGVPAMRSKIDPILEARQKYAYGPQHDYLDHPDVIGWTREGDSSHPKSGLATLITDGPGGSKRMYAGLKNAGETWYDITGNRSDTVKIGSDGWGEFHVNDGSVSIYVQK

SEQ ID NO: 28435 - protein, 485 aa, Bacillus sp.
HHDGTNGTMMQYFEWYLPNDGNHWNRLNSDASNLKSKGITAVWIPPAWKGASQNDVGYGAYDLYDLGEFNQKGTVRTKYGTRSQLQAAVTSLKNNGIQVYGDVVMNHKGGADATEMVRAVEVNPNNRNQEVTGEYTIEAWTRFDFPGRGNTHSSFKWRWYHFDGVDWDQSRRLNNRIYKFRGHGKAWDWEVDTEFGNYDYLMYADYDMDHPEVVNELRNWGVWYTNTLGLDGFRIDAVKHIKYSFTRDWINHVRSATGKNMFAVAEFWKNDLGAIENYLQKTNWNHSVFDVPLHYNLYNASKSGGNYDMRNIFNGTVVQRHPSHAVTFVDNHDSQPEEALESFVEEWFKPLAYALTLTREQGYPSVFYGDYYGIPTHGVPAMRSKIDPILEARQKYAYGPQHDYLDHPDVIGWTREGDSSHPKSGLATLITDGPGGSKRMYAGLKNAGETWYDITGNRSDTVKIGSDGWGEFHVNDGSVSIYVQK

SEQ ID NO: 28436 - protein, 485 aa, Bacillus sp.
HHNGTNGTMMQYFEWYLPNDGNHWNRLNSDASNLKSKGITAVWIPPAWKAVSQNDVGYGAYDLYDLGEFNQKGTVRTKYGTRSQLQAAVTSLKNNGIQVYGDVVMNHKGGADATEMVRAVEVNPNNRNQEVTGEYTIEAWTRFDFPGRGNTHSSFKWRWYHFDGVDWDQSRELSNRIYKFRGHGKAWDWEVDTEFGNYDYLMYADYDMDHPEVVNELRNWGVWYTNTLGLDGFRIDAVKHIKYSFTRDWINHVRSATGKNMFAVAEFWKNDLGAIENYLQKTNWNHSVFDVPLHYNLYNASKSGGNYDMRNIFNGTVVQRHPSHAVTFVDNHDSQPEEALESFVEEWFKPLAYALTLTREQGYPSVFYGDYYGIPTHGVPAMRSKIDPILEARQKYAYGPQHDYLDHPDVIGWTREGDSSHPKSGLATLITDGPGGSKRMYAGLKNAGETWYDITGNRSDTVKIGSDGWGEFHVNDGSVSIYVQK

SEQ ID NO: 28437 - protein, 485 aa, Bacillus sp.
HHNGTNGTMMQYFEWYLPNDGNHWNRLNSDASNLKSKGITAVWIPPAWKGASQNDVGYGAYDLYDLGEFNQKGTVRTKYGTRSQLQAAVTSLKNNGIQVYGDVVMNHKGGADATEMVRAVEVNPNNRNQEVTGEYTIEAWTRFDFPGRGNTHSSFKWRWYHFDGVDWDQSRRLNNRIYKFRGHGKAWDWEVDTEFGNYDYLMYADYDMDHPEVVNELRNWGVWYTNTLGLDGFRIDAVKHIKYSFTRDWINHVRSATGKNMFAVAEFWKNDLGRIENYLQKTNWNHSVFDVPLHYNLYNASKSGGNYDMRNIFNGTVVQRHPSHAVTFVDNHDSQPEEALESFVEEWFKPLAYALTLTREQGYPSVFYGDYYGIPTHGVPAMRSKIDPILEARQKYAYGPQHDYLDHPDVIGWTREGDSSHPKSGLATLITDGPGGSKRMYAGLKNAGETWYDITGNRSDTVKIGSDGWGEFHVNDGSVSIYVQK

SEQ ID NO: 28438 - protein, 483 aa, Bacillus sp.
HHNGTNGTMMQYFEWYLPNDGNHWNRLNSDASNLKSKGITAVWIPPAWKAASQNDVGYGAYDLYDLGEFNQKGTVRTKYGTRSQLQAAVTSLKNNGIQVYGDVVMNHKGGSDATEMVRAVEVNPNNRNQEVTGEYTIEAWTRFDFPGRGNTHSSFKWRWYHFDGVDWDQSRRFTNRIYKFRGKAWDWEVDTEFGNYDYLMYADYDMDHPEVVNELRNWGVWYTNTLGLDGFRIDAVKHIKYSFTRDWINHVRSATGKNMFAVAEFWKNDLGAIENYLQKTNWNHSVFDVPLHYNLYNASKSGGNYDMRNIFNGTVVQRHPSHAVTFVDNHDSQPEEALESFVEEWFKPLAYALTLTREQGYPSVFYGDYYGIPTHGVPAMRSKIDPILEARQKYAYGPQHDYLDHPDVIGWTREGDSSHPKSGLATLITDGPGGSKRMYAGLKNAGETWYDITGNRSDTVKIGSDGWGEFHVNDGSVSIYVQK

SEQ ID NO: 28439 - protein, 483 aa, Bacillus sp.
HHNGTNGTMMQYFEWYLPNDGNHWNRLNSDASNLKSKGITAVWIPPAWKGASQNDVGYGAYDLYDLGEFNQKGTVRTKYGTRSQLQAAVTSLKNNGIQVYGDVVMNHKGGADATEMVRAVEVNPNNRNQEVTGEYTIEAWTRFDFPGRGNTHSSFKWRWYHFDGVDWDQSRRLNNRIYKFRGKAWDWEVDTEFGNYDYLMYADYDMDHPEVVNELRNWGVWYTNTLGLDGFRIDAVKHIKYSFTRDWINHVRSATGKNMFAVAEFWANDLGAIENYLQKTNWNHSVFDVPLHYNLYNASKSGGNYDMRNIFNGTVVQRHPSHAVTFVDNHDSQPEEALESFVEEWFKPLAYALTLTREQGYPSVFYGDYYGIPTHGVPAMRSKIDPILEARQKYAYGPQHDYLDHPDVIGWTREGDSSHPKSGLATLITDGPGGSKRMYAGLKNAGETWYDITGNRSDTVKIGSDGWGEFHVNDGSVSIYVQK

SEQ ID NO: 28440 - protein, 485 aa, Bacillus sp.
HHNGTNGTMMQYFEWYLPNDGNHWNRLNSDASNLKSKGITAVWIPPAWKGASQNDVGYGAYDLYDLGEFNQKGTVRTKYGTRSQLQAAVTSLKNNGIQVYGDVVMNHKGGADATEMVRAVEVNPNNRNQEVTGEYTIEAWTRFDFPGRGNTHSSFKWRWYHFDGVDWDQSRRLNNRIYKFRGHGKAWDWEVDTEFGNYDYLMYADYDMDHPEVVNELRNWGVWYTNTLGLDGFRIDAVKHIKYSFTRDWINHVRSATGKNMFAVAEFWKNDLGWIENYLQKTNWNHSVFDVPLHYNLYNASKSGGNYDMRNIFNGTVVQRHPSHAVTFVDNHDSQPEEALESFVEEWFKPLAYALTLTREQGYPSVFYGDYYGIPTHGVPAMRSKIDPILEARQKYAYGPQHDYLDHPDVIGWTREGDSSHPKSGLATLITDGPGGSKRMYAGLKNAGETWYDITGNRSDTVKIGSDGWGEFHVNDGSVSIYVQK

SEQ ID NO: 28441 - protein, 483 aa, Bacillus sp.
HCNGTNGTMMQYFEWYLPNDGNHWNRLNSDASNLKSKGITAVWIPPAWKGASQNDVGYGAYDLYDLGEFNQKGTVRTKYGTRSQLQAAVTSLKNNGIQVYGDVVMNHKGGADATEMVRAVEVNPNNRNQEVTGEYTIEAWTRFDFPGRGNTHSSFKWRWYHFDGVDWDQSRRLNNRIYKFRGKAWDWEVDTEFGNYDYLMYADYDMDHPEVVNELRNWGVWYTNTLGLDGFRIDAVKHIKYSFTRDWINHVRSATGKNMFAVAEFWKNDLGAIENYLQKTNWNHSVFDVPLHYNLYNASKSGGNYDMRNIFNGTVVQRHPSHAVTFVDNHDSQPEEALESFVEEWFKPLAYALTLTREQGYPSVFYGDYYGIPTHGVPAMRSKIDPILEARQKYAYGPQHDYLDHPDVIGWTREGDSSHPKSGLATLITDGPGGSKRMYAGLKNAGETWYDITGNRSDTVKIGSDGWGEFHVNDGSVSIYVQK

SEQ ID NO: 28442 - protein, 483 aa, Bacillus sp.
HHNGTNATMMQYFEWYLPNDGNHWNRLNSDASNLKSKGITAVWIPPAWKGASQNDVGYGAYDLYDLGEFNQKGTVRTKYGTRSQLQAAVTSLKNNGIQVYGDVVMNHKGGADATEMVRAVEVNPNNRNQEVTGEYTIEAWTRFDFPGRGNTHSSFKWRWYHFDGVDWDQSRRLNNRIYKFRGKAWDWEVDTEFGNYDYLMYADYDMDHPEVVNELRNWGVWYTNTLGLDGFRIDAVKHIKYSFTRDWINHVRSATGKNMFAVAEFWKNDLGAIENYLQKTNWNHSVFDVPLHYNLYNASKSGGNYDMRNIFNGTVVQSWPMHAVTFVDNHDSQPEEALESFVEEWFKPLAYALTLTREQGYPSVFYGDYYGIPTHGVPAMRSKIDPILEARQKYAYGPQHDYLDHPDVIGWTREGDSSHPKSGLATLITDGPGGSKRMYAGLKNAGETWYDITGNRSDTVKIGSDGWGEFHVNDGSVSIYVQK

SEQ ID NO: 28443 - protein, 483 aa, Bacillus sp.
HHNGTNGTMMQYFEWYLPNDGNHWNRLNSDASNLKSKGITAVWIPPAWKGASQNDVGYGAYDLYDLGEFNQKGTVRTKYGTRSQLQAAVTSLKNNGIQVYGDVVMNHKGGADATEMVRAVEVNPNNRNQEVTGEYTIEAWTRFDFPGRGNTHSSFKWRWYHFDGVDWDQSRRLNNRIYKFRGKAWDWEVDTEFGNYDYLMYADYDMDHPEVVNELRNWGVWYTNTLGLDGFRIDAVKHIKYSFTRDWINHVRSATGKNMFAVAEFWKNDLGAIENYLQKTNWNHSVFDVPLHYNLYNASKSQGNYDMRNIFNGTVVQRHPSHAVTFVDNHDSQPEEALESFVEEWFKPLAYALTLTREQGYPSVFYGDYYGIPTHGVPAMRSKIDPILEARQKYAYGPQHDYLDHPDVIGWTREGDSSHPKSGLATLITDGPGGSKRMYAGLKNAGETWYDITGNRSDTVKIGSDGWGEFHVNGKSVSIYVQK

SEQ ID NO: 28444 - protein, 483 aa, Bacillus sp.
HHNGTNGTMMQYFEWYLPNDGNHWNRLNSDASNLKSKGITAVWIPPAWKAVSQNDVGYGAYDLYDLGEFNQKGTVRTKYGTRSQLQAAVTSLKNNGIQVYGDVVMNHKGGADLTEMVDAVEVNPNNRNQEVTGEYTIEAWTRFDFPGRGNTHSSFKWRWYHFDGVDWDQSRDFNNRIYKFRGKAWDWEVDTEFGNYDYLMYADYDMDHPEVVNELRNWGVWYTNTLGLDGFRIDAVKHIKYSFTRDWINHVRSATGKNMFAVAEFWKNDLGAIENYLQKTNWNHSVFDVPLHYNLYNASKSGGNYDMRNIFNGTVVQRHPSHAVTFVDNHDSQPEEALESFVEEWFKPLAYALTLTREQGYPSVFYGDYYGIPTHGVPAMRSKIDPILEARQKYAYGPQHDYLDHPDVIGWTREGDSSHPKSGLATLITDGPGGSKRMYAGLKNAGETWYDITGNRSDTVKIGSDGWGEFHVNDGSVSIYVQK

SEQ ID NO: 28445 - protein, 485 aa, Bacillus sp.
HHNGTNGTMMQYFEWYLPNDGNHWNRLNSDASNLKSKGITAVWIPPAWKGASQNDVGYGAYDLYDLGEFNQKGTVRTKYGTRSQLQAAVTSLKNNGIQVYGDVVMNHKGGADATEMVRAVEVNPNNRNQEVTGEYTIEAWTRFDFPGRGNTHSSFKWRWYHFDGVDWDQSRRLNNRIYKFRGHGKAWDWEVDTEFGNYDYLMYTDYDMDHPEVVNELRNWGVWYTNTLGLDGFRIDAVKHIKYSFTRDWINHVRSATGKNMFAVAEFWKNDLGAIENYLQKTNWNHSVFDVPLHYNLYNASKSGGNYDMRNIFNGTVVQRHPSHAVTFVDNHDSQPEEALESFVEEWFKPLAYALTLTREQGYPSVFYGDYYGIPTHGVPAMRSKIDPILEARQKYAYGPQHDYLDHPDVIGWTREGDSSHPKSGLATLITDGPGGSKRMYAGLKNAGETWYDITGNRSDTVKIGSDGWGEFHVNDGSVSIYVQK

SEQ ID NO: 28446 - protein, 485 aa, Bacillus sp.
HHNGTNGTMMQYFEWYLPNDGNHWNRLNSDASNLKSKGITAVWIPPAWKGASQNDVGYGAYDLYDLGEFNQKGTVRTKYGTRSQLQAAVTSLKNNGISVYGDVVMNHKGGADATEMVRAVEVNPNNRNQEVTGEYTIEAWTRFDFPGRGNTHSSFKWRWYHFDGVDWDQSRRLNNRIYKFRGHGKAWDWEVDTEFGNYDYLMYADYDMDHPEVVNELRNWGVWYTNTLGLDGFRIDAVKHIKYSFTRDWINHVRSATGKNMFAVAEFWKNDLGAIENYLQKTNWNHSVFDVPLHYNLYNASKSGGNYDMRNIFNGTVVQAHPNHAVTFVDNHDSQPEEALESFVEEWFKPLAYALTLTREQGYPSVFYGDYYGIPTHGVPAMRSKIDPILEARQKYAYGPQHDYLDHPDVIGWTREGDSSHPKSGLATLITDGPGGSKRMYAGLKNAGETWYDITGNRSDTVKIGSDGWGEFHVNDGSVSIYVQK

SEQ ID NO: 28447 - protein, 485 aa, Bacillus sp.
HHNGTNGTMMQYFEWYLPNDGNHWNRLNSDASNLKSKGITAVWIPPAWKGASQNDVGYGAYDLYDLGEFNQKGTVRTKYGTRSQLQAAVTSLKNNGIQVYGDVVMNHKGGADATEMVRAVEVNPNNRNQEVTGEYTIEAWTRFDFPGRGNTHSSFKWRWYHFDGVDWDQSRRLNNRIYKFRGHGKAWDWEVDTEFGNYDYLMYADYDMDHPEVVNELRNWGVWYTNTLGLDGFRIDAVKHIKYSFTRDWINHVRSATGKNMFAVAEFWKNDLGAIENYLQKTNWNHSVFDVPLHYNLYNASKSGGNYDMRNIFNGTVVQRHPSHAVTFVDNHDSQPEEALESFVEEWFKPLAYALTLTREQGYPSVFYGDYYGIPTHGVPAMRSKIDPILEARQKYAYGPQHDYLDHPDVIGWTREGDSSHPKSGLATLITDGPGGSKRMYAGLKNAGETWYDITGNRSDTVKIGSDGWGEFHVNDKSVSIYVQK

SEQ ID NO: 28448 - protein, 483 aa, Bacillus sp.
HHNGTNGTMMQYFEWYLPNDGNHWNRLNSDASNLKSKGITAVWIPPAWKGASQNDVGYGAYDLYDLGEFNQKGTVRTKYGTRSQLQAAVTSLKNNGIQVYGDVVMNHKGGADATEMVRAVEVNPNNRNQEVTGEYTIEAWTRFDFPGRGNTHSSFKWRWYHFDGVDWDQSRRLNNRIYKFRGKAWDWEVDTEFGNYDYLMYADYDMDHPEVVNELRNWGVWYTNTLGLDGFRIDAVKHIKYSFTRDWINHVRSATGKNMFAVAEFWKNDLGAIENYLQKTNWNHSVFDVPLHYNLYNASKSGGNYDMRNIFNGTVVQAHPSQAVTFVDNHDSQPEEALESFVEEWFKPLAYALTLTREQGYPSVFYGDYYGIPTHGVPAMRSKIDPILEARQKYAYGPQHDYLDHPDVIGWTREGDSSHPKSGLATLITDGPGGSKRMYAGLKNAGETWYDITGNRSDTVKIGSDGWGEFHVNDGSVSIYVQK

SEQ ID NO: 28449 - protein, 483 aa, Bacillus sp.
HHNGTNGTMMQYFEWYLPNDGNHWNRLNSDASNLKSKGITAVWIPPAWKGASQNDVGYGAYDLYDLGEFNQKGTVRTKYGTRSQLQAAVTSLKNNGIQVYGDVVMNHKGGADATEMVRAVEVNPNNRNQEVTGEYTIEAWTRFDFPGRGNTHSSFKWRWYHFDGVDWDQSRRLNNRIYKFRGKAWDWEVDTEFGNYDYLMYADYDMDHPEVVNELRNWGVWYTNTLGLDGFRIDAVKHIKYSFTRDWINHVRSATGKNMFAVAEFWKNDLGAIENYLQKTNWNHSVFDVPLHYNLYKASKSGGNYDMRNIFNGTVVQRHPSHAVTFVDNHDSQPEEALESFVEEWFKPLAYALTLTREQGYPSVFYGDYYGIPTHGVPAMRSKIDPILEARQKYAYGPQHDYLDHPDVIGWTREGDSSHPKSGLATLITDGPGGSKRMYAGLKNAGETWYDITGNRSDTVKIGSDGWGEFHVNDGSVSIYVQK

SEQ ID NO: 28450 - protein, 483 aa, Bacillus sp.
HHNGTNGTMMQYFEWYLPNDGNHWNRLNSDASNLKSKGITAVWIPPAWKGASQNDVGYGAYDLYDLGEFNQKGTVRTKYGTRSQLQAAVTSLKNNGIQVYGDVVMNHKGGADATEMVRAVEVNPNNRNQEVTGEYTIEAWTRFDFPGRGNTHSSFKWRWYHFDGVDWDQSRRTTNRIYKFRGKAWDWEVDTEFGNYDYLMYVDYDMDHPEVVNELRNWGVWYTNTLGLDGFRIDAVKHIKYSFTRDWINHVRSATGKNMFAVAEFWKNDLGAIENYLQKTNWNHSVFDVPLHYNLYNASKSGGNYDMRNIFNGTVVQRHPSHAVTFVDNHDSQPEEALESFVEEWFKPLAYALTLTREQGYPSVFYGDYYGIPTHGVPAMRSKIDPILEARQKYAYGPQHDYLDHPDVIGWTREGDSSHPKSGLATLITDGPGGSKRMYAGLKNAGETWYDITGNRSDTVKIGSDGWGEFHVNDGSVSIYVQK

SEQ ID NO: 28451 - protein, 485 aa, Bacillus sp.
HHNGTNGTMMQYFEWYLPNDGNHWNRLNSDASNLKSKGITAVWIPPAWKGASQNDVGYGAYDLYDLGEFNQKGTVRTKYGTRSQLQAAVTSLKNNGIQVYGDVVMNHKGGADATEMVRAVEVNPNNRNQEVTGEYTIEAWTRFDFPGRGNTHSSFKWRWYHFDGVDWDQSRRLNNRIYKFRGHGKAWDWEVDTEFGNYDYLMYADYDMDHPEVVNELRNWGVWYTNTLGLDGFRIDAVKHIKYSFTRDWINHVRSATGKNMFAVAEFWKNDLGAIENYLQKTNWNHSVFDVPLHYNLYNASKSSGNYDMRNIFNGTVVQRHPSHAVTFVDNHDSQPEEALESFVEEWFKPLAYALTLTREQGYPSVFYGDYYGIPTHGVPAMRSKIDPILEARQKYAYGPQHDYLDHPDVIGWTREGDSSHPKSGLATLITDGPGGSKRMYAGLKNAGETWYDITGNRSDTVKIGSDGWGEFHVNDGSVSIYVQK

SEQ ID NO: 28452 - protein, 485 aa, Bacillus sp.
HHNGTNGTMMQYFEWYLPNDGNHWNRLNSDASNLKSKGITAVWIPPAWKGASQNDVGYGAYDLYDLGEFNQKGTVRTKYGTRSQLQAAVTSLKNNGIQVYGDVVMNHKGGADATEMVRAVEVNPNNRNQEVTGEYTIEAWTRFDFPGRGNTHSSFKWRWYHFDGVDWDQSRRLNNRIYKFRGHGKAWDWEVDTEFGNYDYLMYADYDMDHPEVVNELRNWGVWYTNTLGLDGFRIDAVKHIKYSFTRDWINHVRSATGKNMFAVAEFWKNDLGAIENYLQKTNWNHSVFDVPLHYNLYNASKSGGNYDMRNIFNGTVVQRHPSHAVTFVDNHDSQPEEALESFVEEWFKPSAYALTLTREQGYPSVFYGDYYGIPTHGVPAMRSKIDPILEARQKYAYGPQHDYLDHPDVIGWTREGDSSHPKSGLATLITDGPGGSKRMYAGLKNAGETWYDITGNRSDTVKIGSDGWGEFHVNDGSVSIYVQK

SEQ ID NO: 28453 - protein, 485 aa, Bacillus sp.
HHNGTNGTMMQYFEWYLPNDGNHWNRLNSDASNLKSKGITAVWIPPAWKGASQNDVGYGAYDLYDLGEFNQKGTVRTKYGTRSQLQAAVTSLKNNGIQVYGDVVMNHKGGADATEMVRAVEVNPNNRNQEVTGEYTIEAWTRFDFPGRGNTHSSFKWRWYHFDGVDWDQSRRLNNRIYKFRGHGKAWDWEVDTEFGNYDYLMYADYDMDHPEVVNELRNWGVWYTNTLGLDGFRIDAVKHIKYSFTRDWINHVRSATGKNMFAVAEFWKNDLGAIENYLQKTNWNHSVFDVPLHYNLYNASKSGGNYDMRNIFNGTVVQRHPSHAVTFVDNHDSQPEEALESFVEEWFKPLAYALTLTREQGYPSVFYGDYYGIPTHGVPAMRSKIDPILEARQKYAYGPQHDYLDHPDVIGWTREGDSSHPKSGLATLITDGPGGSKRMYAGLKNAGETWYDITGNRSDTVKIGSDGWGEFHVNDSSVSIYVQK

SEQ ID NO: 28454 - protein, 485 aa, Bacillus sp.
HHNGTNGTMMQYFEWYLPNDGNHWNRLNSDASNLKSKGITAVWIPPAWKGASQNDVGYGAYDLYDLGEFNQKGTVRTKYGTRSQLQAAVTSLKNNGIVVYGDVVMNHKGGADATEMVRAVEVNPNNRNQEVTGEYTIEAWTRFDFPGRGNTHSSFKWRWYHFDGVDWDQSRRLNNRIYKFRGHGKAWDWEVDTEFGNYDYLMYADYDMDHPEVVNELRNWGVWYTNTLGLDGFRIDAVKHIKYSFTRDWINHVRSATGKNMFAVAEFWKNDLGAIENYLQKTNWNHSVFDVPLHYNLYNASKSGGNYDMRNIFNGTVVQRHPSHAVTFVDNHDSQPEEALESFVEEWFKPLAYALTLTREQGYPSVFYGDYYGIPTHGVPAMRSKIDPILEARQKYAYGPQHDYLDHPDVIGWTREGDSSHPKSGLATLITDGPGGSKRMYAGLKNAGETWYDITGNRSDTVKIGSDGWGEFHVNDGSVSIYVQK

SEQ ID NO: 28455 - protein, 485 aa, Bacillus sp.
HHNGTNGTMMQYFEWYLPNDGNHWNRLNSDASNLKSKGITAVWIPPAWKGASQNDVGYGAYDLYDLGEFNQKGTVRTKYGTRSQLQAAVTSLKNNGIQVYGDVVMNHKGGADATEMVRAVEVNPNNRNQEVTGEYTIEAWTRFDFPGRGNTHSSFKWRWYHFDGVDWDQSRRLNNRIYKFRGHGKAWDWEVDTEFGNYDYLMYADYDMDHPEVVNELRNWGVWYTNTLGLDGFRIDAVKHIKYSFTRDWINHVRSATGKNMFAVAEFWKNDLGAIENYLQKTNWNHSVFDVPLHYNLYNASKSAGNYDMRNIFNGTVVQRHPSHAVTFVDNHDSQPEEALESFVDEWFKPLAYALTLTREQGYPSVFYGDYYGIPTHGVPAMRSKIDPILEARQKYAYGPQHDYLDHPDVIGWTREGDSSHPKSGLATLITDGPGGSKRMYAGLKNAGETWYDITGNRSDTVKIGSDGWGEFHVNQGSVSIYVQK

SEQ ID NO: 28456 - protein, 485 aa, Bacillus sp.
HHNGTNGTMMQYFEWYLPNDGNHWNRLNSDASNLKSKGITAVWIPPAWKGASQNDVGYGAYDLYDLGEFNQKGTVRTKYGTRSQLQAAVTSLKNNGIQVYGDVVMNHKGGADATEMVRAVEVNPNNRNQEVTGEYTIEAWTRFDFPGRRNTHSSFKWRWYHFDGVDWDQSRRLNNRIYKFRGHGKAWDWEVDTEFGNYDYLMYADYDMDHPEVVNELRNWGVWYTNTLGLDGFRIDAVKHIKYSFTRDWINHVRSATGKNMFAVAEFWKNDLGAIENYLQKTNWNHSVFDVPLHYNLYNASKSGGNYDMRNIFNGTVVQRHPSHAVTFVDNHDSQPEEALESFVEEWFKPLAYALTLTREQGYPSVFYGDYYGIPTHGVPAMRSKIDPILEARQKYAYGPQHDYLDHPDVIGWTREGDSSHPKSGLATLITDGPGGSKRMYAGLKNAGETWYDITGNRSDTVKIGSDGWGEFHVNDGSVSIYVQK

SEQ ID NO: 28457 - protein, 483 aa, Bacillus sp.
HHNGTNNTMMQYFEWYLPNDGNHWNRLNSDASNLKSKGITAVWIPPAWKGASQNDVGYGAYDLYDLGEFNQKGTVRTKYGTRSQLQAAVTSLKNNGIQVYGDVVMNHKGGADATEMVRAVEVNPNNRNQEVTGEYTIEAWTRFDFPGRGNTHSSFKWRWYHFDGVDWDQSRRLNNRIYKFRGKAWDWEVDTEFGNYDYLMYADYDMDHPEVVNELRNWGVWYTNTLGLDGFRIDAVKHIKYSFTRDWINHVRSATGKNMFAVAEFWKNDLGAIENYLQKTNWNHSVFDVPLHYNLYNASKSGGNYDMRNIFNGTVVQSHPSHAVTFVDNHDSQPEEALESFVEEWFKPLAYALTLTREQGYPSVFYGDYYGIPTHGVPAMRSKIDPILEARQKYAYGPQHDYLDHPDVIGWTREGDSSHPKSGLATLITDGPGGSKRMYAGLKNAGETWYDITGNRSDTVKIGSDGWGEFHVNDGSVSIYVQK

SEQ ID NO: 28458 - protein, 485 aa, Bacillus sp.
HHNGTNQTMMQYFEWYLPNDGNHWNRLNSDASNLKSKGITAVWIPPAWKGASQNDVGYGAYDLYDLGEFNQKGTVRTKYGTRSQLQAAVTSLKNNGIQVYGDVVMNHKGGADATEMVRAVEVNPNNRNQEVTGEYTIEAWTRFDFPGRGNTHSSFKWRWYHFDGVDWDQSRRLNNRIYKFRGHGKAWDWEVDTEFGNYDYLMYADYDMDHPEVVNELRNWGVWYTNTLGLDGFRIDAVKHIKYSFTRDWINHVRSATGKNMFAVAEFWKNDLGAIENYLQKTNWNHSVFDVPLHYNLYNASKSGGNYDMRNIFNGTVVQAHPNHAVTFVDNHDSQPEEALESFVEEWFKPLAYALTLTREQGYPSVFYGDYYGIPTHGVPAMRSKIDPILEARQKYAYGPQHDYLDHPDVIGWTREGDSSHPKSGLATLITDGPGGSKRMYAGLKNAGETWYDITGNRSDTVKIGSDGWGEFHVNDGSVSIYVQK

SEQ ID NO: 28459 - protein, 485 aa, Bacillus sp.
HHNGTNGTMMQYFEWYLPNDGNHWNRLNSDASNLKSKGITAVWIPPAWKATSQNDVGYGAYDLYDLGEFNQKGTVRTKYGTRSQLQAAVTSLKNNGIQVYGDVVMNHKGGADATEMVRAVEVNPNNRNQEVTGEYTIEAWTRFDFPGRGNTHSSFKWRWYHFDGVDWDQSRRVNNRIYKFRGHGKAWDWEVDTEFGNYDYLMYVDYDMDHPEVVNELRNWGVWYTNTLGLDGFRIDAVKHIKYSFTRDWINHVRSATGKNMFAVAEFWKNDLGAIENYLQKTNWNHSVFDVPLHYNLYNASKSGGNYDMRNIFNGTVVQRHPSHAVTFVDNHDSQPEEALESFVEEWFKPLAYALTLTREQGYPSVFYGDYYGIPTHGVPAMRSKIDPILEARQKYAYGPQHDYLDHPDVIGWTREGDSSHPKSGLATLITDGPGGSKRMYAGLKNAGETWYDITGNRSDTVKIGSDGWGEFHVNDGSVSIYVQK

SEQ ID NO: 28460 - protein, 485 aa, Bacillus sp.
HHNGTNGTMMQYFEWYLPNDGNHWNRLNSDASNLKSKGITAVWIPPAWKGASQNDTGYGAYDLYDLGEFNQKGTVRTKYGTRSQLQAAVTSLKNNGIQVYGDVVMNHKGGADATEMVRAVEVNPNNRNQEVTGEYTIEAWTRFDFPGRGNTHSSFKWRWYHFDGVDWDQSRRLNNRIYKFRGHGKAWDWEVDTEFGNYDYLMYADYDMDHPEVVNELRNWGVWYTNTLGLDGFRIDAVKHIKYSFTRDWINHVRSATGKNMFAVAEFWKNDLGAIENYLQKTNWNHSVFDVPLHYNLYNASKSGGNYDMRNIFNGTVVQRHPSHAVTFVDNHDSQPEEALESFVEEWFKPLAYALTLTREQGYPSVFYGDYYGIPTHGVPAMRSKIDPILEARQKYAYGPQHDYLDHPDVIGWTREGDSSHPKSGLATLITDGPGGSKRMYAGLKNAGETWYDITGNRSDTVKIGSDGWGEFHVNDGSVSIYVQK

SEQ ID NO: 28461 - protein, 483 aa, Bacillus sp.
HHNGTNGTMMQYFEWYLPNDGNHWNRLNSDASNLKSKGITAVWIPPAWKGASQNDVGYGAYDLYDLGEFNQKGTVRTKYGTRSQLQAAVTSLKNNGIQVYGDVVMNHKGGADATEMVRAVEVNPNNRNQEVTGEYTIEAWTRFDFPGRLNTHSSFKWRWYHFDGVDWDQSRRLNNRIYKFRGKAWDWEVDTEFGNYDYLMYADYDMDHPEVVNELRNWGVWYTNTLGLDGFRIDAVKHIKYSFTRDWINHVRSATGKNMFAVAEFWKNDLGAIENYLQKTNWNHSVFDVPLHYNLYNASKSGGNYDMRNIFNGTVVQRHPSHAVTFVDNHDSQPEEALESFVEEWFKPLAYALTLTREQGYPSVFYGDYYGIPTHGVPAMRSKIDPILEARQKYAYGPQHDYLDHPDVIGWTREGDSSHPKSGLATLITDGPGGSKRMYAGLKNAGETWYDITGNRSDTVKIGSDGWGEFHVNDGSVSIYVQK

SEQ ID NO: 28462 - protein, 483 aa, Bacillus sp.
HHNGTNLTMMQYFEWYLPNDGNHWNRLNSDASNLKSKGITAVWIPPAWKGASQNDVGYGAYDLYDLGEFNQKGTVRTKYGTRSQLQAAVTSLKNNGIQVYGDVVMNHKGGADATEMVRAVEVNPNNRNQEVTGEYTIEAWTRFDFPGRGNTHSSFKWRWYHFDGVDWDQSRRLNNRIYKFRGKAWDWEVDTEFGNYDYLMYADYDMDHPEVVNELRNWGVWYTNTLGLDGFRIDAVKHIKYSFTRDWINHVRSATGKNMFAVAEFWKNDLGAIENYLQKTNWNHSVFDVPLHYNLYNASKSGGNYDMRNIFNGTVVQMHPNHAVTFVDNHDSQPEEALESFVEEWFKPLAYALTLTREQGYPSVFYGDYYGIPTHGVPAMRSKIDPILEARQKYAYGPQHDYLDHPDVIGWTREGDSSHPKSGLATLITDGPGGSKRMYAGLKNAGETWYDITGNRSDTVKIGSDGWGEFHVNDGSVSIYVQK

SEQ ID NO: 28463 - protein, 483 aa, Bacillus sp.
HHNGTNGTMMQYFEWYLPNDGNHWNRLNSDASNLKSKGITAVWIPPAWKATSQNDVGYGAYDLYDLGEFNQKGTVRTKYGTRSQLQAAVTSLKNNGIQVYGDVVMNHKGGADATEMVRAVEVNPNNRNQEVTGEYTIEAWTRFDFPGRGNTHSSFKWRWYHFDGVDWDQSRELNNRIYKFRGKAWDWEVDTEFGNYDYLMYTDYDMDHPEVVNELRNWGVWYTNTLGLDGFRIDAVKHIKYSFTRDWINHVRSATGKNMFAVAEFWKNDLGAIENYLQKTNWNHSVFDVPLHYNLYNASKSGGNYDMRNIFNGTVVQVHPSHAVTFVDNHDSQPEEALESFVEEWFKPLAYALTLTREQGYPSVFYGDYYGIPTHGVPAMRSKIDPILEARQKYAYGPQHDYLDHPDVIGWTREGDSSHPKSGLATLITDGPGGSKRMYAGLKNAGETWYDITGNRSDTVKIGSDGWGEFHVNYGSVSIYVQK

SEQ ID NO: 28464 - protein, 483 aa, Bacillus sp.
HHNGTNGTMMQYFEWYLPNDGNHWNRLNSDASNLKSKGITAVWIPPAWKAASQNDVGYGAYDLYDLGEFNQKGTVRTKYGTRSQLQAAVTSLKNNGIQVYGDVVMNHKGGADATEMVRAVEVNPNNRNQEVTGEYTIEAWTRFDFPGRGNTHSSFKWRWYHFDGVDWDQSRDLDNRIYKFRGKAWDWEVDTEFGNYDYLMYADYDMDHPEVVNELRNWGVWYTNTLGLDGFRIDAVKHIKYSFTRDWINHVRSATGKNMFAVAEFWKNDLGAIENYLQKTNWNHSVFDVPLHYNLYNASKSGGNYDMRNIFNGTVVQRHPSHAVTFVDNHDSQPEEALESFVDPWFKPLAYALTLTREQGYPSVFYGDYYGIPTHGVPAMRSKIDPILEARQKYAYGPQHDYLDHPDVIGWTREGDSSHPKSGLATLITDGPGGSKRMYAGLKNAGETWYDITGNRSDTVKIGSDGWGEFHVNGGSVSIYVQK

SEQ ID NO: 28465 - protein, 483 aa, Bacillus sp.
HHNGTNGTMMQYFEWYLPNDGNHWNRLNSDASNLKSKGITAVWIPPAWKGASQNDVGYGAYDLYDLGEFNQKGTVRTKYGTRSQLQAAVTSLKNNGIQVYGDVVMNHKGGADATEMVRAVEVNPNNRNQEVTGEYTIEAWTRFDFPGRGNTHSSFKWRWYHFDGVDWDQSRRLNNRIYKFRGKAWDWEVDTEFGNYDYLMYADYDMDHPEVVNELRNWGVWYTNTLGLDGFRIDAVKHIKYSFTRDWINHVRSATGKNMFAVAEFWKNDLGAIENYLQKTNWNHSVFDVPLHYNLYNASKSAGNYDMRNIFNGTVVQRHPSHAVTFVDNHDSQPEEALESFVEEWFKPLAYALTLTREQGYPSVFYGDYYGIPTHGVPAMRSKIDPILEARQKYAYGPQHDYLDHPDVIGWTREGDSSHPKSGLATLITDGPGGSKRMYAGLKNAGETWYDITGNRSDTVKIGSDGWGEFHVNDGSVSIYVQK

SEQ ID NO: 28466 - protein, 485 aa, Bacillus sp.
HHNGTNGTMMQYFEWYLPNDGNHWNRLNSDASNLKSKGITAVWIPPAWKGASQNDVGYGAYDLYDLGEFNQKGTVRTKYGTRSQLQAAVTSLKNNGIQVYGDVVMNHKGGADATEMVRAVEVNPNNRNQEVTGEYTIEAWTRFDFPGRGNTHSSFKWRWYHFDGVDWDQSRRLNNRIYKFRGHGKAWDWEVDTEFGNYDYLMYADYDMDHPEVVNELRNWGVWYTNTLGLDGFRIDAVKHIKYSFTRDWINHVRSATGKNMFAVAEFWKNDLGAIENYLQKTNWNHSVFDVPLHYNLYNASKSGGNYDMRNIFNGTVVQRHPSHAVTFVANHDSQPEEALESFVEEWFKPLAYALTLTREQGYPSVFYGDYYGIPTHGVPAMRSKIDPILEARQKYAYGPQHDYLDHPDVIGWTREGDSSHPKSGLATLITDGPGGSKRMYAGLKNAGETWYDITGNRSDTVKIGSDGWGEFHVNDGSVSIYVQK

SEQ ID NO: 28467 - protein, 485 aa, Bacillus sp.
HHNGTNGTMMQYFEWYLPNDGNHWNRLNSDASNLKSKGITAVWIPPAWKGASQNDVGYGAYDLYDLGEFNQKGTVRTKYGTRSQLQAAVTSLKNNGIQVYGDVVMNHKGGADATEMVRAVEVNPNNRNQEVTGEYTIEAWTRFDFPGRGNTHSSFKWRWYHFDGVDWDQSRRLNNRIYKFRGHGKAWDWEVDTEFGNYDYLMYADYDMDHPEVVNELRNWGVWYTNTLGLDGFRIDAVKHIKYSFTRDWINHVRSATGKNMFAVAEFWKNDLGSIENYLQKTNWNHSVFDVPLHYNLYNASKSGGNYDMRNIFNGTVVQRHPSHAVTFVDNHDSQPEEALESFVEEWFKPLAYALTLTREQGYPSVFYGDYYGIPTHGVPAMRSKIDPILEARQKYAYGPQHDYLDHPDVIGWTREGDSSHPKSGLATLITDGPGGSKRMYAGLKNAGETWYDITGNRSDTVKIGSDGWGEFHVNDGSVSIYVQK

SEQ ID NO: 28468 - protein, 483 aa, Bacillus sp.
HHNGTNGTMMQYFEWYLPNDGNHWNRLNSDASNLKSKGITAVWIPPAWKGASQNDVGYGAYDLYDLGEFNQKGTVRTKYGTRSQLQAAVTSLKNNGIQVYGDVVMNHKGGADATEMVRAVEVNPNNRNQEVTGEYTIEAWTRFDFPGRGNTHSSFKWRWYHFDGVDLDQSRRLNNRIYKFRGKAWDWEVDTEFGNYDYLMYADYDMDHPEVVNELRNWGVWYTNTLGLDGFRIDAVKHIKYSFTRDWINHVRSATGKNMFAVAEFWKNDLGAIENYLQKTNWNHSVFDVPLHYNLYNASKSGGNYDMRNIFNGTVVQRHPSHAVTFVDNHDSQPEEALESFVEEWFKPLAYALTLTREQGYPSVFYGDYYGIPTHGVPAMRSKIDPILEARQKYAYGPQHDYLDHPDVIGWTREGDSSHPKSGLATLITDGPGGSKRMYAGLKNAGETWYDITGNRSDTVKIGSDGWGEFHVNDGSVSIYVQK

SEQ ID NO: 28469 - protein, 483 aa, Bacillus sp.
HHNGTNGTMMQYFEWYLPNDGNHWNRLNSDASNLKSKGITAVWIPPAWKGASQNDVGYGAYDLYDLGEFNQKGTVRTKYGTRSQLQAAVTSLKNNGIQVYGDVVMNHKGGADATEMVRAVEVNPNNRNQEVTGEYTIEAWTRFDFPGRGNTHSSFKWRWYHFDGVDWDQSRRLNNRIYKFRGKAWDWEVDTENGNYDYLMYADIDYDFPEVVNELRVWGVWYTNTLGLDGFRIDAVKHIKYSFTRDWINHVRSATGKNMFAVAEFWKNDLGAIENYLQKTNWNHSVFDVPLHYNLYNASKSGGNYDMRNIFNGTVVQRHPSHAVTFVDNHDSQPEEALESFVEEWFKPLAYALTLTREQGYPSVFYGDYYGIPTHGVPAMRSKIDPILEARQKYAYGPQHDYLDHPDVIGWTREGDSSHPKSGLATLITDGPGGSKRMYAGLKNAGETWYDITGNRSDTVKIGSDGWGEFHVNDGSVSIYVQK

SEQ ID NO: 28470 - protein, 485 aa, Bacillus sp.
HHNGTNGTMMQYFEWYLPNDGNHWNRLNSDASNLKSKGITAVWIPPAWKGASQNDVGYGAYDLYDLGEFNQKGTVRTKYGTRSQLQAAVTSLKNNGIQVYGDVVMNHKGGADATEMVRAVEVNPNNRNQEVTGEYTIEAWTRFDFPGRGNTHSSFKWRWYHFDGVDWDQSRRLNNRIYKFRGHGKAWDWEVDTSFGNYDYLMYADYDMDHPEVVNELRNWGVWYTNTLGLDGFRIDAVKHIKYSFTRDWINHVRSATGKNMFAVAEFWKNDLGAIENYLQKTNWNHSVFDVPLHYNLYNASKSGGNYDMRNIFNGTVVQRHPSHAVTFVDNHDSQPEEALESFVEEWFKPLAYALTLTREQGYPSVFYGDYYGIPTHGVPAMRSKIDPILEARQKYAYGPQHDYLDHPDVIGWTREGDSSHPKSGLATLITDGPGGSKRMYAGLKNAGETWYDITGNRSDTVKIGSDGWGEFHVNDGSVSIYVQK

SEQ ID NO: 28471 - protein, 483 aa, Bacillus sp.
HHNGTNGTMMQYFEWYLPNDGNHWNRLNSDASNLKSKGITAVWIPPAWKGASQNDVGYGAYDLYDLGEFNQKGTVRTKYGTRSQLQAAVTSLKNNGIQVYGDVVMNHKGGADATEMVRAVEVNPNNRNQEVTGEYTIEAWTRFDFPGRGNTHSSFKWRWYHFDGVDWDQSRRLNNRIYKFRGKAWDWEVDTENGFYDYLMYADIDHDHPEVVNELRNWGVWYTNTLGLDGFRIDAVKHIKYSFTRDWINHVRSATGKNMFAVAEFWKNDLGAIENYLQKTNWNHSVFDVPLHYNLYNASKSGGNYDMRNIFNGTVVQRHPSHAVTFVDNHDSQPEEALESFVEEWFKPLAYALTLTREQGYPSVFYGDYYGIPTHGVPAMRSKIDPILEARQKYAYGPQHDYLDHPDVIGWTREGDSSHPKSGLATLITDGPGGSKRMYAGLKNAGETWYDITGNRSDTVKIGSDGWGEFHVNDGSVSIYVQK

SEQ ID NO: 28472 - protein, 483 aa, Bacillus sp.
HHNGTNGTMMQYFEWYLPNDGNHWNRLNSDASNLKSKGITAVWIPPAWKATSQNDVGYGAYDLYDLGEFNQKGTVRTKYGTRSQLQAAVTSLKNNGIQVYGDVVMNHKGGADATEMVRAVEVNPNNRNQEVTGEYTIEAWTRFDFPGRGNTHSSFKWRWYHFDGVDWDQSRELNNRIYKFRGKAWDWEVDTEFGNYDYLMYTDYDMDHPEVVNELRNWGVWYTNTLGLDGFRIDAVKHIKYSFTRDWINHVRSATGKNMFAVAEFWKNDLGAIENYLQKTNWNHSVFDVPLHYNLYNASKSGGNYDMRNIFNGTVVQRHPSHAVTFVDNHDSQPEEALESFVEEWFKPLAYALTLTREQGYPSVFYGDYYGIPTHGVPAMRSKIDPILEARQKYAYGPQHDYLDHPDVIGWTREGDSSHPKSGLATLITDGPGGSKRMYAGLKNAGETWYDITGNRSDTVKIGSDGWGEFHVNDGSVSIYVQK

SEQ ID NO: 28473 - protein, 483 aa, Bacillus sp.
HHNGTNGTMMQYFEWYLPNDGNHWNRLNSDASNLKSKGITAVWIPPAWKGASQNDVGYGAYDLYDLGEFNQKGTVRTKYGTRSQLQAAVTSLKNNGIQVYGDVVMNHKGGADATEMVRAVEVNPNNRNQEVTGEYTIEAWTRFDFPGRGNTHSSFKWRWYHFDGVDWDQSRRTSNRIYKFRGKAWDWEVDTEFGNYDYLMYVDYDMDHPEVVNELRNWGVWYTNTLGLDGFRIDAVKHIKYSFTRDWINHVRKATGKNMFAVAEFWKNDLGAIENYLQKTNWNHSVFDVPLHYNLYNASKSGGNYDMRNIFNGTVVQRHPSHAVTFVDNHDSQPEEALESFVEEWFKPLAYALTLTREQGYPSVFYGDYYGIPTHGVPAMRSKIDPILEARQKYAYGPQHDYLDHPDVIGWTREGDSSHPKSGLATLITDGPGGSKRMYAGLKNAGETWYDITGNRSDTVKIGSDGWGEFHVNDGSVSIYVQK

SEQ ID NO: 28474 - protein, 485 aa, Bacillus sp.
HHNGTNGTMMQYFEWYLPNDGNHWNRLNSDASNLKSKGITAVWIPPAWKGASQNDVGYGAYDLYDLGEFNQKGTVRTKYGTRSQLQAAVTSLKNNGIQVYGDVVMNHKGGADATEMVRAVEVNPNNRNQEVTGEYTIEAWTRFDFPGRGNTHSSFKWRWYHFDGLDWDQSRRLNNRIYKFRGHGKAWDWEVDTEFGNYDYLMYADYDMDHPEVVNELRNWGVWYTNTLGLDGFRIDAVKHIKYSFTRDWINHVRSATGKNMFAVAEFWKNDLGAIENYLQKTNWNHSVFDVPLHYNLYNASKSGGNYDMRNIFNGTVVQRHPSHAVTFVDNHDSQPEEALESFVEEWFKPLAYALTLTREQGYPSVFYGDYYGIPTHGVPAMRSKIDPILEARQKYAYGPQHDYLDHPDVIGWTREGDSSHPKSGLATLITDGPGGSKRMYAGLKNAGETWYDITGNRSDTVKIGSDGWGEFHVNDGSVSIYVQK

SEQ ID NO: 28475 - protein, 485 aa, Bacillus sp.
HHNGTNGTMMQYFEWYLPNDGNHWNRLNSDASNLKSKGITAVWIPPAWKGASQNDVGYGAYDLYDLGEFNQKGTVRTKYGTRSQLQAAVTSLKNNGIQVYGDVVMNHKGGADATEMVRAVEVNPNNRNQEVTGEYTIEAWTRFDFPGRGNTHSSFKWRWYHFDGVDWDQSRRLDNRIYKFRGHGKAWDWEVDTEFGNYDYLMYADYDMDHPEVVNELRNWGVWYTNTLGLDGFRIDAVKHIKYSFTRDWINHVRSATGKNMFAVAEFWKNDLGAIENYLQKTNWNHSVFDVPLHYNLYNASKSGGNYDMRNIFNGTVVQRHPSHAVTFVDNHDSQPEEALESFVDPWFKPLAYALTLTREQGYPSVFYGDYYGIPTHGVPAMRSKIDPILEARQKYAYGPQHDYLDHPDVIGWTREGDSSHPKSGLATLITDGPGGSKRMYAGLKNAGETWYDITGNRSDTVKIGSDGWGEFHVNKGSVSIYVQK

SEQ ID NO: 28476 - protein, 483 aa, Bacillus sp.
HHNGTNGTMMQYFEWYLPNDGNHWNRLNSDASNLKSKGITAVWIPPAWKAASQNDVGYGAYDLYDLGEFNQKGTVRTKYGTRSQLQAAVTSLKNNGIQVYGDVVMNHKGGADATEMVRAVEVNPNNRNQEVTGEYTIEAWTRFDFPGRGNTHSSFKWRWYHFDGVDWDQSRNLTNRIYKFRGKAWDWEVDTEFGNYDYLMYADYDMDHPEVVNELRNWGVWYTNTLGLDGFRIDAVKHIKYSFTRDWINHVRSATGKNMFAVAEFWKNDLGAIENYLQKTNWNHSVFDVPLHYNLYNASKSGGNYDMRNIFNGTVVQRHPSHAVTFVDNHDSQPEEALESFVDPWFKPLAYALTLTREQGYPSVFYGDYYGIPTHGVPAMRSKIDPILEARQKYAYGPQHDYLDHPDVIGWTREGDSSHPKSGLATLITDGPGGSKRMYAGLKNAGETWYDITGNRSDTVKIGSDGWGEFHVNGGSVSIYVQK

SEQ ID NO: 28477 - protein, 485 aa, Bacillus sp.
HHNGTNGTMMQYFEWYLPNDGNHWNRLNSDASNLKSKGITAVWIPPAWKGASQNDVGYGAYDLYDLGEFNQKGTVRTKYGTRSQLQAAVTSLKNNGIQVYGDVVMNHKGGADATEMVRAVEVNPNNRNQEVTGEYTIEAWTRFDFPGRGNTHSSFKWRWYHFDGVDWDQSRRLNNRIYKFRGHGKAWDWEVDTEFGNYDYLMYADYDMDHEEVVNELRNWGVWYTNTLGLDGFRIDAVKHIKYSFTRDWINHVRSATGKNMFAVAEFWKNDLGAIENYLQKTNWNHSVFDVPLHYNLYNASKSGGNYDMRNIFNGTVVQRHPSHAVTFVDNHDSQPEEALESFVEEWFKPLAYALTLTREQGYPSVFYGDYYGIPTHGVPAMRSKIDPILEARQKYAYGPQHDYLDHPDVIGWTREGDSSHPKSGLATLITDGPGGSKRMYAGLKNAGETWYDITGNRSDTVKIGSDGWGEFHVNDGSVSIYVQK

SEQ ID NO: 28478 - protein, 483 aa, Bacillus sp.
HHNGTNGTMMQYFEWYLPNDGNHWNRLNSDASNLKSKGITAVWIPPAWKGASQNDVGYGAYDLYDLGEFNQKGTVRTKYGTRSQLQAAVTSLKNNGIQVYGDVVMNHKGGADATEMVRAVEVNPNNRNQEVTGEYTIEAWTRFDFPGRGNTHSSFKWRWYHFDGVDWDQSRRLNNRIYKFGGKAWDWEVDTEFGNYDYLMYADYDMDHPEVVNELRNWGVWYTNTLGLDGFRIDAVKHIKYSFTRDWINHVRSATGKNMFAVAEFWKNDLGAIENYLQKTNWNHSVFDVPLHYNLYNASKSGGNYDMRNIFNGTVVQRHPSHAVTFVDNHDSQPEEALESFVEEWFKPLAYALTLTREQGYPSVFYGDYYGIPTHGVPAMRSKIDPILEARQKYAYGPQHDYLDHPDVIGWTREGDSSHPKSGLATLITDGPGGSKRMYAGLKNAGETWYDITGNRSDTVKIGSDGWGEFHVNDGSVSIYVQK

SEQ ID NO: 28479 - protein, 485 aa, Bacillus sp.
HHNGTNATMMQYFEWYLPNDGNHWNRLNSDASNLKSKGITAVWIPPAWKGASQNDVGYGAYDLYDLGEFNQKGTVRTKYGTRSQLQAAVTSLKNNGIQVYGDVVMNHKGGADATEMVRAVEVNPNNRNQEVTGEYTIEAWTRFDFPGRGNTHSSFKWRWYHFDGVDWDQSRRLNNRIYKFRGHGKAWDWEVDTEFGNYDYLMYADYDMDHPEVVNELRNWGVWYTNTLGLDGFRIDAVKHIKYSFTRDWINHVRSATGKNMFAVAEFWKNDLGAIENYLQKTNWNHSVFDVPLHYNLYNASKSGGNYDMRNIFNGTVVQSWPMHAVTFVDNHDSQPEEALESFVEEWFKPLAYALTLTREQGYPSVFYGDYYGIPTHGVPAMRSKIDPILEARQKYAYGPQHDYLDHPDVIGWTREGDSSHPKSGLATLITDGPGGSKRMYAGLKNAGETWYDITGNRSDTVKIGSDGWGEFHVNDGSVSIYVQK

SEQ ID NO: 28480 - protein, 483 aa, Bacillus sp.
HHNGTNGTMMQYFEWYLPNDGNHWNRLNSDASNLKSKGITAVWIPPAWKAASQNDVGYGAYDLYDLGEFNQKGTVRTKYGTRSQLQAAVTSLKNNGIQVYGDVVMNHKGGADATEMVRAVEVNPNNRNQEVTGEYTIEAWTRFDFPGRGNTHSSFKWRWYHFDGVDWDQSRDLDNRIYKFRGKAWDWEVDTEFGNYDYLMYADYDMDHPEVVNELRNWGVWYTNTLGLDGFRIDAVKHIKYSFTRDWINHVRSATGKNMFAVAEFWKNDLGAIENYLQKTNWNHSVFDVPLHYNLYNASKSGGNYDMRNIFNGTVVQVHPSHAVTFVDNHDSQPEEALESFVEEWFKPLAYALTLTREQGYPSVFYGDYYGIPTHGVPAMRSKIDPILEARQKYAYGPQHDYLDHPDVIGWTREGDSSHPKSGLATLITDGPGGSKRMYAGLKNAGETWYDITGNRSDTVKIGSDGWGEFHVNYGSVSIYVQK

SEQ ID NO: 28481 - protein, 483 aa, Bacillus sp.
HHNGTNGTMMQYFEWYLPNDGNHWNRLNSDASNLKSKGITAVWIPPAWKGASQNDVGYGAYDLYDLGEFNQKGTVRTKYGTRSQLQAAVTSLKNNGIQVYGDVVMNHKGGADATEMVRAVEVNPNNRNQEVTGEYTIEAWTRFDFPGRGNTHSSFKWRWYHFDGVDWDQSRRLNNRIYKFRGKAWDWEVDTEFGNYDYLMYADYDMDHPEVVNELRNWGVWYTNTLGLDGFRIDAVKHIKYSFTRDWINHVRSATGKNMFAVAEFWKNDLGAIENYLQKTNWNHSVFDVPLHYNLYNASNSGGNYDMRNIFNGTVVQRHPSHAVTFVDNHDSQPEEALESFVEPWFKPLAYALTLTREQGYPSVFYGDYYGIPTHGVPAMRSKIDPILEARQKYAYGPQHDYLDHPDVIGWTREGDSSHPKSGLATLITDGPGGSKRMYAGLKNAGETWYDITGNRSDTVKIGSDGWGEFHVNQKSVSIYVQK

SEQ ID NO: 28482 - protein, 483 aa, Bacillus sp.
HHNGTNGTMMQYFEWYLPNDGNHWNRLNSDASNLKSKGITAVWIPPAWKGASQNDVGYGAYDLYDLGEFNQKGTVRTKYGTRSQLQAAVTSLKNNGIQVYGDVVMNHKGGADATEMVRAVEVNPNNRYQEVTGEYTIEAWTRFDFPGRGNTHSSFKWRWYHFDGVDWDQSRRLNNRIYKFRGKAWDWEVDTEFGNYDYLMYADYDMDHPEVVNELRNWGVWYTNTLGLDGFRIDAVKHIKYSFTRDWINHVRSATGKNMFAVAEFWKNDLGAIENYLQKTNWNHSVFDVPLHYNLYNASKSGGNYDMRNIFNGTVVQRHPSHAVTFVDNHDSQPEEALESFVEEWFKPLAYALTLTREQGYPSVFYGDYYGIPTHGVPAMRSKIDPILEARQKYAYGPQHDYLDHPDVIGWTREGDSSHPKSGLATLITDGPGGSKRMYAGLKNAGETWYDITGNRSDTVKIGSDGWGEFHVNDGSVSIYVQK

SEQ ID NO: 28483 - protein, 483 aa, Bacillus sp.
HHNGTNGTMMQYFEWYLPNDGNHWNRLNSDASNLKSKGITAVWIPPAWKAASQNDVGYGAYDLYDLGEFNQKGTVRTKYGTRSQLQAAVTSLKNNGIQVYGDVVMNHKGGADATEMVRAVEVNPNNRNQEVTGEYTIEAWTRFDFPGRGNTHSSFKWRWYHFDGVDWDQSRRVNNRIYKFRGKAWDWEVDTEFGNYDYLMYADYDMDHPEVVNELRNWGVWYTNTLGLDGFRIDAVKHIKYSFTRDWINHVRSATGKNMFAVAEFWKNDLGAIENYLQKTNWNHSVFDVPLHYNLYNASKSGGNYDMRNIFNGTVVQRHPSHAVTFVDNHDSQPEEALESFVEEWFKPLAYALTLTREQGYPSVFYGDYYGIPTHGVPAMRSKIDPILEARQKYAYGPQHDYLDHPDVIGWTREGDSSHPKSGLATLITDGPGGSKRMYAGLKNAGETWYDITGNRSDTVKIGSDGWGEFHVNDGSVSIYVQK

SEQ ID NO: 28484 - protein, 483 aa, Bacillus sp.
HHNGTNGTMMQYFEWYLPNDGNHWNRLNSDASNLKSKGITAVWIPPAWKGASQNDVGYGAYDLYDLGEFNQKGTVRTKYGTRSQLQAAVTSLKNNGIQVYGDVVMNHKGGADATEMVRAVEVNPNNRNQEVTGEYTIEAWTRFDFPGRGNTHSSFKWRWYHFDGVDWDQSRRLNNRIYKFRGKAWDWEVDTEFGNYDYLMYADYDMDHPEVVNELRNWGVWYTNTLGLDGFRIDAVKHFKYSFTRDWINHVRSATGKNMFAVAEFWKNDLGAIENYLQKTNWNHSVFDVPLHYNLYNASKSGGNYDMRNIFNGTVVQRHPSHAVTFVDNHDSQPEEALESFVEEWFKPLAYALTLTREQGYPSVFYGDYYGIPTHGVPAMRSKIDPILEARQKYAYGPQHDYLDHPDVIGWTREGDSSHPKSGLATLITDGPGGSKRMYAGLKNAGETWYDITGNRSDTVKIGSDGWGEFHVNDGSVSIYVQK

SEQ ID NO: 28485 - protein, 485 aa, Bacillus sp.
HHNGTNGTMMQYFEWYLPNDGNHWNRLNSDASNLKSKGITAVWIPPAWKATSQNDVGYGAYDLYDLGEFNQKGTVRTKYGTRSQLQAAVTSLKNNGIQVYGDVVMNHKGGADATEMVRAVEVNPNNRNQEVTGEYTIEAWTRFDFPGRGNTHSSFKWRWYHFDGVDWDQSRELNNRIYKFRGHGKAWDWEVDTEFGNYDYLMYTDYDMDHPEVVNELRNWGVWYTNTLGLDGFRIDAVKHIKYSFTRDWINHVRSATGKNMFAVAEFWKNDLGAIENYLQKTNWNHSVFDVPLHYNLYNASKSGGNYDMRNIFNGTVVQRHPSHAVTFVDNHDSQPEEALESFVEEWFKPLAYALTLTREQGYPSVFYGDYYGIPTHGVPAMRSKIDPILEARQKYAYGPQHDYLDHPDVIGWTREGDSSHPKSGLATLITDGPGGSKRMYAGLKNAGETWYDITGNRSDTVKIGSDGWGEFHVNDGSVSIYVQK

SEQ ID NO: 28486 - protein, 483 aa, Bacillus sp.
HHNGTNGTMMQYFEWYLPNDGNHWNRLNSDASNLKSKGITAVWIPPAWKAVSQNDVGYGAYDLYDLGEFNQKGTVRTKYGTRSQLQAAVTSLKNNGIQVYGDVVMNHKGGADATEMVRAVEVNPNNRNQEVTGEYTIEAWTRFDFPGRGNTHSSFKWRWYHFDGVDWDQSRRFDNRIYKFRGKAWDWEVDTEFGNYDYLMYADYDMDHPEVVNELRNWGVWYTNTLGLDGFRIDAVKHIKYSFTRDWINHVRIATGKNMFAVAEFWKNDLGAIENYLQKTNWNHSVFDVPLHYNLYNASKSGGNYDMRNIFNGTVVQRHPSHAVTFVDNHDSQPEEALESFVDEWFKPLAYALTLTREQGYPSVFYGDYYGIPTHGVPAMRSKIDPILEARQKYAYGPQHDYLDHPDVIGWTREGDSSHPKSGLATLITDGPGGSKRMYAGLKNAGETWYDITGNRSDTVKIGSDGWGEFHVNDQSVSIYVQK

SEQ ID NO: 28487 - protein, 483 aa, Bacillus sp.
HHNGTNGTMMQYFEWYLPNDGNHWNRLNSDASNLKSKGITAVWIPPAWKGASQNDVGYGAYDLYDLGEFNQKGTVRTKYGTRSQLQAAVTSLKNNGIQVYGDVVMNHKGGADATEMVRAVEVNPNNRNQEVTGEYTIEAWTRFDFPGRGNTHSSFKWRWYHFDGVDWDQSRRLNNRIYKFRGKAWDWEVDTEFGNYDYLMYADYDMDHDEVVNELRNWGVWYTNTLGLDGFRIDAVKHIKYSFTRDWINHVRSATGKNMFAVAEFWKNDLGAIENYLQKTNWNHSVFDVPLHYNLYNASKSGGNYDMRNIFNGTVVQRHPSHAVTFVDNHDSQPEEALESFVEEWFKPLAYALTLTREQGYPSVFYGDYYGIPTHGVPAMRSKIDPILEARQKYAYGPQHDYLDHPDVIGWTREGDSSHPKSGLATLITDGPGGSKRMYAGLKNAGETWYDITGNRSDTVKIGSDGWGEFHVNDGSVSIYVQK

SEQ ID NO: 28488 - protein, 483 aa, Bacillus sp.
HHNGTNGTMMQYFEWYLPNDGNHWNRLNSDASNLKSKGITAVWIPPAWKGASQNDVGYGAYDLYDLGEFNQKGTVRTKYGTRSQLQAAVTSLKNNGIQVYGDVVMNHKGGADATEMVRAVEVNPNNRNQEVTGEYTIEAWTRFDFPGRGNTHSSFKWRWYHFDGVDWDQSRRLNNRIYKFRGKAWDWEVDTEFGNYDYLMYADYDMDHPEVVNELRNWGVWYTNTLGLDGFRIDAVKHIKYSFTRDWINHVRSATGKNMFAVAEFWKNDLGAIENYLQKTNWNHSVFDVPLHYQLYNASKSGGNYDMRNIFNGTVVQRHPSHAVTFVDNHDSQPEEALESFVEEWFKPLAYALTLTREQGYPSVFYGDYYGIPTHGVPAMRSKIDPILEARQKYAYGPQHDYLDHPDVIGWTREGDSSHPKSGLATLITDGPGGSKRMYAGLKNAGETWYDITGNRSDTVKIGSDGWGEFHVNDGSVSIYVQK

SEQ ID NO: 28489 - protein, 483 aa, Bacillus sp.
HHNGTNGTMMQYFEWYLPNDGNHWNRLNSDASNLKSKGITAVWIPPAWKAASQNDVGYGAYDLYDLGEFNQKGTVRTKYGTRSQLQAAVTSLKNNGIQVYGDVVMNHKGGADATEMVRAVEVNPNNRNQEVTGEYTIEAWTRFDFPGRGNTHSSFKWRWYHFDGVDWDQSRRVSNRIYKFRGKAWDWEVDTEFGNYDYLMYADYDMDHPEVVNELRNWGVWYTNTLGLDGFRIDAVKHIKYSFTRDWINHVRSATGKNMFAVAEFWKNDLGAIENYLQKTNWNHSVFDVPLHYNLYNASKSGGNYDMRNIFNGTVVQRHPSHAVTFVDNHDSQPEEALESFVEEWFKPLAYALTLTREQGYPSVFYGDYYGIPTHGVPAMRSKIDPILEARQKYAYGPQHDYLDHPDVIGWTREGDSSHPKSGLATLITDGPGGSKRMYAGLKNAGETWYDITGNRSDTVKIGSDGWGEFHVNDGSVSIYVQK

SEQ ID NO: 28490 - protein, 483 aa, Bacillus sp.
HHNGTNGTMMQYFEWYLPNDGNHWNRLNSDASNLKSKGITAVWIPPAWKAASQNDVGYGAYDLYDLGEFNQKGTVRTKYGTRSQLQAAVTSLKNNGIQVYGDVVMNHKGGADLTEMVRAVEVNPNNRNQEVTGEYTIEAWTRFDFPGRGNTHSSFKWRWYHFDGVDWDQSRDLQNRIYKFRGKAWDWEVDTEFGNYDYLMYADYDMDHPEVVNELRNWGVWYTNTLGLDGFRIDAVKHIKYSFTRDWINHVRSATGKNMFAVAEFWKNDLGAIENYLQKTNWNHSVFDVPLHYNLYNASKSGGNYDMRNIFNGTVVQRHPSHAVTFVDNHDSQPEEALESFVEEWFKPLAYALTLTREQGYPSVFYGDYYGIPTHGVPAMRSKIDPILEARQKYAYGPQHDYLDHPDVIGWTREGDSSHPKSGLATLITDGPGGSKRMYAGLKNAGETWYDITGNRSDTVKIGSDGWGEFHVNDGSVSIYVQK

SEQ ID NO: 28491 - protein, 485 aa, Bacillus sp.
HHNGTNGTMMQYFEWYLPNDGNHWNRLNSDASNLKSKGITAVWIPPAWKGASQNDVGYGAYDLYDLGEFNQKGTVRTKYGTRSQLQAAVTSLKNNGIQVYGDVVMNHKGGADATEMVRAVEVNPNNRNQEVTGEYTIEAWTRFDFPGRGNTHSSFKWRWYHFDGVDWDQSRRLNNRIYKFRGHGKAWDWEVDTEFGNYDYLMYADYDMDHPEVVNELRNWGVWYTNTLGLDGFRIDAVKHIKYSFTRDWINHVRSATGKNMFAVAEFWKNDLGAIENYLQKTNWNHSVFDVPLHYNLYNASKSQGNYDMRNIFNGTVVQRHPSHAVTFVDNHDSQPEEALESFVDEWFKPLAYALTLTREQGYPSVFYGDYYGIPTHGVPAMRSKIDPILEARQKYAYGPQHDYLDHPDVIGWTREGDSSHPKSGLATLITDGPGGSKRMYAGLKNAGETWYDITGNRSDTVKIGSDGWGEFHVNGQSVSIYVQK

SEQ ID NO: 28492 - protein, 483 aa, Bacillus sp.
HHNGTNGTMMQYFEWYLPNDGNHWNRLNSDASNLKSKGITAVWIPPAWKGASQNDTGYGAYDLYDLGEFNQKGTVRTKYGTRSQLQAAVTSLKNNGIQVYGDVVMNHKGGADATEMVRAVEVNPNNRNQEVTGEYTIEAWTRFDFPGRGNTHSSFKWRWYHFDGVDWDQSRRLNNRIYKFRGKAWDWEVDTEFGNYDYLMYADYDMDHPEVVNELRNWGVWYTNTLGLDGFRIDAVKHIKYSFTRDWINHVRSATGKNMFAVAEFWKNDLGAIENYLQKTNWNHSVFDVPLHYNLYNASKSGGNYDMRNIFNGTVVQRHPSHAVTFVDNHDSQPEEALESFVEEWFKPLAYALTLTREQGYPSVFYGDYYGIPTHGVPAMRSKIDPILEARQKYAYGPQHDYLDHPDVIGWTREGDSSHPKSGLATLITDGPGGSKRMYAGLKNAGETWYDITGNRSDTVKIGSDGWGEFHVNDGSVSIYVQK

SEQ ID NO: 28493 - protein, 483 aa, Bacillus sp.
HHNGTNGTMMQYFEWYLPNDGNHWNRLNSDASNLKSKGITAVWIPPAWKGASQNDVGYGAYDLYDLGEFNQKGTVRTKYGTRSQLQAAVTSLKNNGIQVYGDVVMNHKGGADATEMVRAVEVNPNNRQQEVTGDYTIEAWTRFDFPGRGNTHSSFKWRWYHFDGVDWDQSRRLNNRIYLFRGKAWDWEVDTEFGNYDYLMYADYDMDHPEVVNELRNWGVWYTNTLGLDGFRIDAVKHIKYSFTRDWINHVRSATGKNMFAVAEFWKNDLGAIENYLQKTNWNHSVFDVPLHYNLYNASKSGGNYDMRNIFNGTVVQRHPSHAVTFVDNHDSQPEEALESFVEEWFKPLAYALTLTREQGYPSVFYGDYYGIPTHGVPAMRSKIDPILEARQKYAYGPQHDYLDHPDVIGWTREGDSSHPKSGLATLITDGPGGSKRMYAGLKNAGETWYDITGNRSDTVKIGSDGWGEFHVNDGSVSIYVQK

SEQ ID NO: 28494 - protein, 483 aa, Bacillus sp.
HHNGTNGTMMQYFEWYLPNDGNHWNRLNSDASNLKSKGITAVWIPPAWKGASQNDVGYGAYDLYDLGEFNQKGTVRTKYGTRSQLQAAVTSLKNNGIQVYGDVVFNHKGGADATEMVRAVEVNPNNRNQEVTGEYTIEAWTRFDFPGRGNTHSSFKWRWYHFDGVDWDQSRRLNNRIYKFRGKAWDWEVDTENGNYDYLMYADIDYDHPEVVNELRNWGVWYTNTLGLDGFRIDAVKHIKYSFTRDWINHVRSATGKNMFAVAEFWKNDLGAIENYLQKTNWNHSVFDVPLHYNLYNASKSGGNYDMRNIFNGTVVQRHPSHAVTFVDNHDSQPEEALESFVEEWFKPLAYALTLTREQGYPSVFYGDYYGIPTHGVPAMRSKIDPILEARQKYAYGPQHDYLDHPDVIGWTREGDSSHPKSGLATLITDGPGGSKRMYAGLKNAGETWYDITGNRSDTVKIGSDGWGEFHVNDGSVSIYVQK

SEQ ID NO: 28495 - protein, 485 aa, Bacillus sp.
HHNGTNGTMMQYFEWYLPNDGNHWNRLNSDASNLKSKGITAVWIPPAWKGASQNDVGYGAYDLYDLGEFNQKGTVRTKYGTRSQLQAAVTSLKNNGIQVYGDVVMNHKGGADATEMVRAVEVNPNNRNQEVTGEYTIEAWTRFDFPGRGNTHSSFKWRWYHFDGVDWDQSRRLNNRIYKFRGHGKAWDWEVDTEFGNYDYLMYADYDMDHPEVVNELRNWGVWYTNTLGLDGFRIDAVKHIKYSFTRDWINHVRSATGKNMFAVAEFWKNDLGAIENYLQKTNWNHSVFDVPLHYNLYNASKSGGNYDMRNIFNGTVVQRHPSHAVTFVDNHDSQPEEALESFVDPWFKPLAYALTLTREQGYPSVFYGDYYGIPTHGVPAMRSKIDPILEARQKYAYGPQHDYLDHPDVIGWTREGDSSHPKSGLATLITDGPGGSKRMYAGLKNAGETWYDITGNRSDTVKIGSDGWGEFHVNQGSVSIYVQK

SEQ ID NO: 28496 - protein, 483 aa, Bacillus sp.
HHNGTNKTMMQYFEWYLPNDGNHWNRLNSDASNLKSKGITAVWIPPAWKGASQNDVGYGAYDLYDLGEFNQKGTVRTKYGTRSQLQAAVTSLKNNGIQVYGDVVMNHKGGADATEMVRAVEVNPNNRNQEVTGEYTIEAWTRFDFPGRGNTHSSFKWRWYHFDGVDWDQSRRLNNRIYKFRGKAWDWEVDTEFGNYDYLMYADYDMDHPEVVNELRNWGVWYTNTLGLDGFRIDAVKHIKYSFTRDWINHVRSATGKNMFAVAEFWKNDLGAIENYLQKTNWNHSVFDVPLHYNLYNASKSGGNYDMRNIFNGTVVQAHPNHAVTFVDNHDSQPEEALESFVEEWFKPLAYALTLTREQGYPSVFYGDYYGIPTHGVPAMRSKIDPILEARQKYAYGPQHDYLDHPDVIGWTREGDSSHPKSGLATLITDGPGGSKRMYAGLKNAGETWYDITGNRSDTVKIGSDGWGEFHVNDGSVSIYVQK

SEQ ID NO: 28497 - protein, 483 aa, Bacillus sp.
HHNGTNGTMMQYFEWYLPNDGNHWNRLNSDASNLKSKGITAVWIPPAWKAASQNDVGYGAYDLYDLGEFNQKGTVRTKYGTRSQLQAAVTSLKNNGIQVYGDVVMNHKGGADATEMVRAVEVNPNNRNQEVTGEYTIEAWTRFDFPGRGNTHSSFKWRWYHFDGVDWDQSRKTTNRIYKFRGKAWDWEVDTEFGNYDYLMYADYDMDHPEVVNELRNWGVWYTNTLGLDGFRIDAVKHIKYSFTRDWINHVRSATGKNMFAVAEFWKNDLGAIENYLQKTNWNHSVFDVPLHYNLYNASKSGGNYDMRNIFNGTVVQRHPSHAVTFVDNHDSQPEEALESFVEEWFKPLAYALTLTREQGYPSVFYGDYYGIPTHGVPAMRSKIDPILEARQKYAYGPQHDYLDHPDVIGWTREGDSSHPKSGLATLITDGPGGSKRMYAGLKNAGETWYDITGNRSDTVKIGSDGWGEFHVNDGSVSIYVQK

SEQ ID NO: 28498 - protein, 483 aa, Bacillus sp.
HHNGTNGTMMQYFEWYLPNDGNHWNRLNSDASNLKSKGITAVWIPPAWKGASQNDVGYGAYDLYDLGEFNQKGTVRTKYGTRSQLQAAVTSLKNNGIQVYGDVVMNHKGGADATEMVRAVEVNPNNRNQEVTGEYTIEAWTRFDFPGRGNTHSSFKWRWYHFDGVDWDQSRRLNNRIYTFRGKAWDWEVDTEFGNYDYLMYADYDMDHPEVVNELRNWGVWYTNTLGLDGFRIDAVKHIKYSFTRDWINHVRSATGKNMFAVAEFWKNDLGAIENYLQKTNWNHSVFDVPLHYNLYNASKSGGNYDMRNIFNGTVVQRHPSHAVTFVDNHDSQPEEALESFVEEWFKPLAYALTLTREQGYPSVFYGDYYGIPTHGVPAMRSKIDPILEARQKYAYGPQHDYLDHPDVIGWTREGDSSHPKSGLATLITDGPGGSKRMYAGLKNAGETWYDITGNRSDTVKIGSDGWGEFHVNDGSVSIYVQK

SEQ ID NO: 28499 - protein, 483 aa, Bacillus sp.
HHNGTNGTMMQYFEWYLPNDGNHWNRLNSDASNLKSKGITAVWIPPAWKGASQNDVGYGAYDLYDLGEFNQKGTVRTKYGTRSQLQAAVTSLKNNGIQVYGDVVMNHKGGADATEMVRAVEVNPNNRNQEVTQEYTIEAWTRFDFPGRGNTHSSFKWRWYHFDGVDWDQSRRLNNRIYKFRGKAWDWEVDTEFGNYDYLMYADYDMDHPEVVNELRNWGVWYTNTLGLDGFRIDAVKHIKYSFTRDWINHVRSATGKNMFAVAEFWKNDLGAIENYLQKTNWNHSVFDVPLHYNLYNASKSGGNYDMRNIFNGTVVQRHPSHAVTFVDNHDSQPEEALESFVEEWFKPLAYALTLTREQGYPSVFYGDYYGIPTHGVPAMRSKIDPILEARQKYAYGPQHDYLDHPDVIGWTREGDSSHPKSGLATLITDGPGGSKRMYAGLKNAGETWYDITGNRSDTVKIGSDGWGEFHVNDGSVSIYVQK

SEQ ID NO: 28500 - protein, 483 aa, Bacillus sp.
HHNGTNGTMMQYFEWYLPNDGNHWNRLNSDASNLKSKGITAVWIPPAWKGASQNDVGYGAYDLYDLGEFNQKGTVRTKYGTRSQLQAAVTSLKNNGIQVYGDVVMNHKGGADATEMVRAVEVNPNNRNQEVTGEYTIEAWTRFDFPGRGNTHSSFKWRWYHFDGVDWDQSRDFNNRIYKFRGKAWDWEVDTEFGNYDYLMYADYDMDHPEVVNELRNWGVWYTNTLGLDGFRIDAVKHIKYSFTRDWINHVRSATGKNMFAVAEFWKNDLGAIENYLQKTNWNHSVFDVPLHYNLYNASKSGGNYDMRNIFNGTVVQRHPSHAVTFVDNHDSQPEEALESFVEEWFKPLAYALTLTREQGYPSVFYGDYYGIPTHGVPAMRSKIDPILEARQKYAYGPQHDYLDHPDVIGWTREGDSSHPKSGLATLITDGPGGSKRMYAGLKNTGETWYNITGNRSDTVKIGSDGWGEFHVNDGSVSIYVQK

SEQ ID NO: 28501 - protein, 485 aa, Bacillus sp.
HHNGTNGTMMQYFEWYLPNDGNHWNRLNSDASNLKSKGITAVWIPPAWKGASQNDVGYGAYDLYDLGEFNQKGTVRTKYGTRSQLQAAVTSLKNNGIQVYGDVVMNHKGGADATEMVRAVEVNPNNRFQEVTGEYTIEAWTRFDFPGRGNTHSSFKWRWYHFDGVDWDQSRRLNNRIYKFRGHGKAWDWEVDTEFGNYDYLMYADYDMDHPEVVNELRNWGVWYTNTLGLDGFRIDAVKHIKYSFTRDWINHVRSATGKNMFAVAEFWKNDLGAIENYLQKTNWNHSVFDVPLHYNLYNASKSGGNYDMRNIFNGTVVQRHPSHAVTFVDNHDSQPEEALESFVEEWFKPLAYALTLTREQGYPSVFYGDYYGIPTHGVPAMRSKIDPILEARQKYAYGPQHDYLDHPDVIGWTREGDSSHPKSGLATLITDGPGGSKRMYAGLKNAGETWYDITGNRSDTVKIGSDGWGEFHVNDGSVSIYVQK

SEQ ID NO: 28502 - protein, 485 aa, Bacillus sp.
HHNGTNGTMMQYFEWYLPNDGNHWNRLNSDASNLKSKGITAVWIPPAWKGASQNDVGYGAYDLYDLGEFNQKGTVRTKYGTRSQLQAAVTSLKNNGIQVYGDVVMNHKGGADATEMVRAVEVNPNNRNQEVTGEYTIEAWTRFDFPGRGNTHSSFKWRWYHFDGVDWDQSRRLNNRIYKFRGHGKAWDWEVDTEFGNYDYLMYADYDMDDPEVVNELRNWGVWYTNTLGLDGFRIDAVKHIKYSFTRDWINHVRSATGKNMFAVAEFWKNDLGAIENYLQKTNWNHSVFDVPLHYNLYNASKSGGNYDMRNIFNGTVVQRHPSHAVTFVDNHDSQPEEALESFVEEWFKPLAYALTLTREQGYPSVFYGDYYGIPTHGVPAMRSKIDPILEARQKYAYGPQHDYLDHPDVIGWTREGDSSHPKSGLATLITDGPGGSKRMYAGLKNAGETWYDITGNRSDTVKIGSDGWGEFHVNDGSVSIYVQK

SEQ ID NO: 28503 - protein, 483 aa, Synthetic construct
HHNGTNGTMMQYFEWYLPNDGNHWNRLNSDASNLKSKGITAVWIPPAWKGASQNDVGYGAYDIYDLGEFNQKGTVRTKYGTRSQLQAAVTSLKNNGIQVYGDVVMNHKGGADATEMVRAVEVNPNNRNQEVTGEYTIEAWTRFDFPGRGNTHSSFKWRWYHFDGVDWDQSRRLNNRIYKFRGKAWDWEVDTENGNYDYLMYADYDMDHPEVVNELRNWGVWYTNTLGLDGFRIDAVKHIKVSFTRDWINHVRSATGKNMFAVAEFWKNDLGAIENYLQKTNWNHSVFDVPLHYNLYNASKSGGNYDMRNIFNGTVVQRHPSHAVTFVDNHDSQPEEALESFVEEWFKPLAYALTLTREQGYPSVFYGDYYGIPTHGVPAMRSKIDPILEARQKYAYGPQHDYLDHPDVIGWTREGDSSHPKSGLATLITDGPGGSKRMYAGLKNAGETWYDITGNRSDTVKIGSDGWGEFHVNDGSVSIYVQK

SEQ ID NO: 28504 - protein, 483 aa, Bacillus sp.
HHNGTNGTMMQYFEWYLPNDGNHWNRLNSDASNLKSKGITAVWIPPAWKAASQNDVGYGAYDLYDLGEFNQKGTVRTKYGTRSQLQAAVTSLKNNGIQVYGDVVMNHKGGADATEMVRAVEVNPNNRNQEVTGEYTIEAWTRFDFPGRGNTHSSFKWRWYHFDGVDWDQSRDLNNRIYKFRGKAWDWEVDTEFGNYDYLMYADYDMDHPEVVNELRNWGVWYTNTLGLDGFRIDAVKHIKYSFTRDWINHVRSATGKNMFAVAEFWKNDLGAIENYLQKTNWNHSVFDVPLHYNLYNASKSGGNYDMRNIFNGTVVQRHPSHAVTFVDNHDSQPEEALESFVEEWFKPLAYALTLTREQGYPSVFYGDYYGIPTHGVPAMRSKIDPILEARQKYAYGPQHDYLDHPDVIGWTREGDSSHPKSGLATLITDGPGGSKRMYAGLKNAGETWYDITGNRSDTVKIGSDGWGEFHVNDGSVSIYVQK

SEQ ID NO: 28505 - protein, 483 aa, Bacillus sp.
HHNGTNGTMMQYFEWYLPNDGNHWNRLNSDASNLKSKGITAVWIPPAWKGASQNDVGYGAYDLYDLGEFNQKGTVRTKYGTRSQLQAAVTSLKNNGIQVYGDVVMNHKGGADATEMVRAVEVNPNNRNQEVTGEYTIEAWTRFDFPGRGNTHSSFKWRWYHFDGVDWDQSRRLNNRIYKFRGKAWDWEVDTEFGNYDYLMYADYDMDHPEVVNELRNWGVWYTNTLGLDGFRIDAVKHIKYSFTRDWINHVRSATGKNMFAVAEFWKNDLGAIENYLQKTNWNHSVFDVPLHYNLYNASKSQGNYDMRNIFNGTVVQRHPSHAVTFVDNHDSQPEEALESFVDPWFKPLAYALTLTREQGYPSVFYGDYYGIPTHGVPAMRSKIDPILEARQKYAYGPQHDYLDHPDVIGWTREGDSSHPKSGLATLITDGPGGSKRMYAGLKNAGETWYDITGNRSDTVKIGSDGWGEFHVNGGSVSIYVQK

SEQ ID NO: 28506 - protein, 485 aa, Bacillus sp.
HHNGTNGTMMQYFEWYLPNDGNHWNRLNSDASNLKSKGITAVWIPPAWKGASQNDVGYGAYDLYDLGEFNQKGTVRTKYGTRSQLQAAVTSLKNNGIQVYGDVVMNHKGGADATEMVRAVEVNPNNRNQEVTGEYTIEAWTRFDFPGRGNTHSSFKWRWYHFDGVDWDQSRRLNNRIYKFRGHGKAWDWEVDTEFGNYDYLMYADYDMDHPEVVNELRNWGVWYTNTLGLDGFRIDAVKHIKYSFTRDWINHVRSATGKNMFAVAEFWKNDLGAIENYLQKGNWNHSVFDVPLHYNLYNASKSGGNYDMRNIFNGTVVQRHPSHAVTFVDNHDSQPEEALESFVEEWFKPLAYALTLTREQGYPSVFYGDYYGIPTHGVPAMRSKIDPILEARQKYAYGPQHDYLDHPDVIGWTREGDSSHPKSGLATLITDGPGGSKRMYAGLKNAGETWYDITGNRSDTVKIGSDGWGEFHVNDGSVSIYVQK

SEQ ID NO: 28507 - protein, 485 aa, Bacillus sp.
HHNGTNGTMMQYFEWYLPNDGNHWNRLNSDASNLKSKGITAVWIPPAWKGASQNDVGYGAYDLYDLGEFNQKGTVRTKYGTRSQLQAAVTSLKNNGIQVYGDVVMNHKGGADATEMVRAVEVNPNNRNQEVTGEYTIEAWTRFDFPGRGNTHSSFKWRWYHFDGVDWDQSRKLNNRIYKFRGHGKAWDWEVDTEFGNYDYLMYVDYDMDHPEVVNELRNWGVWYTNTLGLDGFRIDAVKHIKYSFTRDWINHVRSATGKNMFAVAEFWKNDLGAIENYLQKTNWNHSVFDVPLHYNLYNASKSGGNYDMRNIFNGTVVQRHPSHAVTFVDNHDSQPEEALESFVEEWFKPLAYALTLTREQGYPSVFYGDYYGIPTHGVPAMRSKIDPILEARQKYAYGPQHDYLDHPDVIGWTREGDSSHPKSGLATLITDGPGGSKRMYAGLKNAGETWYDITGNRSDTVKIGSDGWGEFHVNDGSVSIYVQK

SEQ ID NO: 28508 - protein, 485 aa, Bacillus sp.
HHNGTNGTMMQYFEWYLPNDGNHWNRLNSDASNLKSKGITAVWIPPAWKGASQNDVGYGAYDLYDLGEFNQKGTVRTKYGTRSQLQAAVTSLKNNGIQVYGDVVMNHKGGADATEMVRAVEVNPNNRNQEVTGEYTIEAWTRFDFPGRGNTHSSFKWRWYHFDGVDWDQSRNVNNRIYKFRGHGKAWDWEVDTEFGNYDYLMYADYDMDHPEVVNELRNWGVWYTNTLGLDGFRIDAVKHIKYSFTRDWINHVRIATGKNMFAVAEFWKNDLGAIENYLQKTNWNHSVFDVPLHYNLYNASKSGGNYDMRNIFNGTVVQRHPSHAVTFVDNHDSQPEEALESFVDEWFKPLAYALTLTREQGYPSVFYGDYYGIPTHGVPAMRSKIDPILEARQKYAYGPQHDYLDHPDVIGWTREGDSSHPKSGLATLITDGPGGSKRMYAGLKNAGETWYDITGNRSDTVKIGSDGWGEFHVNDQSVSIYVQK

SEQ ID NO: 28509 - protein, 485 aa, Bacillus sp.
HHNGTNGTMMQYFEWYLPNDGNHWNRLNSDASNLKSKGITAVWIPPAWKAVSQNDVGYGAYDLYDLGEFNQKGTVRTKYGTRSQLQAAVTSLKNNGIQVYGDVVMNHKGGADATEMVRAVEVNPNNRNQEVTGEYTIEAWTRFDFPGRGNTHSSFKWRWYHFDGVDWDQSREFTNRIYKFRGHGKAWDWEVDTEFGNYDYLMYVDYDMDHPEVVNELRNWGVWYTNTLGLDGFRIDAVKHIKYSFTRDWINHVRSATGKNMFAVAEFWKNDLGAIENYLQKTNWNHSVFDVPLHYNLYNASKSGGNYDMRNIFNGTVVQRHPSHAVTFVDNHDSQPEEALESFVEEWFKPLAYALTLTREQGYPSVFYGDYYGIPTHGVPAMRSKIDPILEARQKYAYGPQHDYLDHPDVIGWTREGDSSHPKSGLATLITDGPGGSKRMYAGLKNAGETWYDITGNRSDTVKIGSDGWGEFHVNDGSVSIYVQK

SEQ ID NO: 28510 - protein, 485 aa, Bacillus sp.
HHNGTNGTMMQYFEWYLPNDGNHWNRLNSDASNLKSKGITAVWIPPAWKGASQNDVGYGAYDLYDLGEFNQKGTVRTKYGTRSQLQAAVTSLKNNGIQVYGDVVMNHKGGADATEMVRAVEVNPNNRNQEVTGEYTIEAWTRFDFPGRGNTHSSFKWRWYHFDGVDWDQSRRLNNRIYKFRGHGKAWDWEVDTEFGNYDYLMYADYDMDHPEVVNELRNWGVWYTNTLGLDGFRIDAVKHIKTSFTRDWINHVRSATGKNMFAVAEFWKNDLGAIENYLQKTNWNHSVFDVPLHYNLYNASKSGGNYDMRNIFNGTVVQRHPSHAVTFVDNHDSQPEEALESFVEEWFKPLAYALTLTREQGYPSVFYGDYYGIPTHGVPAMRSKIDPILEARQKYAYGPQHDYLDHPDVIGWTREGDSSHPKSGLATLITDGPGGSKRMYAGLKNAGETWYDITGNRSDTVKIGSDGWGEFHVNDGSVSIYVQK

SEQ ID NO: 28511 - protein, 485 aa, Bacillus sp.
HHNGTNGTMMQYFEWYLPNDGNHWNRLNSDASNLKSKGITAVWIPPAWKGASQNDVGYGAYDLYDLGEFNQKGTVRTKYGTRSQLQAAVTSLKNNGIQVYGDVVMNHKGGADATEMVRAVEVNPNNRNQEVTGEYTIEAWTRFDFPGRGNTHSSFKWRWYHFDGVDWDQSRRLNNRIYKFRGHGKAWDWEVDTEFGNYDYLMYADYDMDMPEVVNELRNWGVWYTNTLGLDGFRIDAVKHIKYSFTRDWINHVRSATGKNMFAVAEFWKNDLGAIENYLQKTNWNHSVFDVPLHYNLYNASKSGGNYDMRNIFNGTVVQRHPSHAVTFVDNHDSQPEEALESFVEEWFKPLAYALTLTREQGYPSVFYGDYYGIPTHGVPAMRSKIDPILEARQKYAYGPQHDYLDHPDVIGWTREGDSSHPKSGLATLITDGPGGSKRMYAGLKNAGETWYDITGNRSDTVKIGSDGWGEFHVNDGSVSIYVQK

SEQ ID NO: 28512 - protein, 485 aa, Bacillus sp.
HHNGTNDTMMQYFEWYLPNDGNHWNRLNSDASNLKSKGITAVWIPPAWKGASQNDVGYGAYDLYDLGEFNQKGTVRTKYGTRSQLQAAVTSLKNNGIQVYGDVVMNHKGGADATEMVRAVEVNPNNRNQEVTGEYTIEAWTRFDFPGRGNTHSSFKWRWYHFDGVDWDQSRRLNNRIYKFRGHGKAWDWEVDTEFGNYDYLMYADYDMDHPEVVNELRNWGVWYTNTLGLDGFRIDAVKHIKYSFTRDWINHVRSATGKNMFAVAEFWKNDLGAIENYLQKTNWNHSVFDVPLHYNLYNASKSGGNYDMRNIFNGTVVQRHPSHAVTFVDNHDSQPEEALESFVEEWFKPLAYALTLTREQGYPSVFYGDYYGIPTHGVPAMRSKIDPILEARQKYAYGPQHDYLDHPDVIGWTREGDSSHPKSGLATLITDGPGGSKRMYAGLKNAGETWYDITGNRSDTVKIGSDGWGEFHVNDGSVSIYVQK

SEQ ID NO: 28513 - protein, 483 aa, Bacillus sp.
HHNGTNGTMMQYFEWYLPNDGNHWNRLNSDASNLKSKGITAVWIPPAWKGASQNDVGYGAYDLYDLGEFNQKGTVRTKYGTRSQLQAAVTSLKNNGIQVYGDVVMNHKGGADATEMVRAVEVNPNNRNQEVTGEYTIEAWTRFDFPGRGNTHSSFKWRWYHFDGVDWDQSREFDNRIYKFRGKAWDWEVDTEFGNYDYLMYADYDMDHPEVVNELRNWGVWYTNTLGLDGFRIDAVKHIKYSFMRDWINHVRIATGKNMFAVAEFWKNDLGAIENYLQKTNWNHSVFDVPLHYNLYNASKSGGNYDMRNIFNGTVVQRHPSHAVTFVDNHDSQPEEALESFVDEWFKPLAYALTLTREQGYPSVFYGDYYGIPTHGVPAMRSKIDPILEARQKYAYGPQHDYLDHPDVIGWTREGDSSHPKSGLATLITDGPGGSKRMYAGLKNAGETWYDITGNRSDTVKIGSDGWGEFHVNDQSVSIYVQK

SEQ ID NO: 28514 - protein, 483 aa, Bacillus sp.
HHNGTNGTMMQYFEWYLPNDGNHWNRLNSDASNLKSKGITAVWIPPAWKGASQNDVGYGAYDLYDLGEFNQKGTVRTKYGTRSQLQAAVTSLKNNGIQVYGDVVMNHKGGADATEMVRAVEVNPNNRNQEVTGEYTIEAWTRFDFPGRGNTHSSFKWRWYHFDGVDWDQSRRLNNRIYKFRGKAWDWEVDTEFGNYDYLMYADYDMDHPEVVNELRNWGVWYTNTLGLDGFRIDAVKHIKYSFTRDWINHVRSATGKNMFAVAEFWKNDLGAIENYLQKTNWNHSVFDVPLHYNLYNASKSGGNYDMRNIFNGTVVQRHPSLAVTFVDNHDSQPEEALESFVEEWFKPLAYALTLTREQGYPSVFYGDYYGIPTHGVPAMRSKIDPILEARQKYAYGPQHDYLDHPDVIGWTREGDSSHPKSGLATLITDGPGGSKRMYAGLKNAGETWYDITGNRSDTVKIGSDGWGEFHVNDGSVSIYVQK

SEQ ID NO: 28515 - protein, 483 aa, Bacillus sp.
HHNGTNGTMMQYFEWYLPNDGNHWNRLNSDASNLKSKGITAVWIPPAWKGASQNDVGYGAYDLYDLGEFNQKGTVRTKYGTRSQLQAAVTSLKNNGIQVYGDVVMNHKGGADATEMVRAVEVNPNNRNQEVTGEYTIEAWTRFDFPGRGNTHSSFKWRWYHFDGVDWDQSRRLNNRIYKFRGKAWDWEVDTEFGNYDYLMYADYDMDHPEVVNELRNWGVWYTNTLGLDGFRIDAVKHIKISFTRDWINHVRSATGKNMFAVAEFWKNDLGAIENYLQKTNWNHSVFDVPLHYNLYNASKSGGNYDMRNIFNGTVVQRHPSHAVTFVDNHDSQPEEALESFVEEWFKPLAYALTLTREQGYPSVFYGDYYGIPTHGVPAMRSKIDPILEARQKYAYGPQHDYLDHPDVIGWTREGDSSHPKSGLATLITDGPGGSKRMYAGLKNAGETWYDITGNRSDTVKIGSDGWGEFHVNDGSVSIYVQK

SEQ ID NO: 28516 - protein, 483 aa, Bacillus sp.
HHNGTNGTMMQYFEWYLPNDGNHWNRLNSDASNLKSKGITAVWIPPAWKGASQNDVGYGAYDLYDLGEFNQKGTVRTKYGTRSQLQAAVTSLKNNGIQVYGDVVMNHKGGADATEMVRAVEVNPNNRNQEVTGEYTIEAWTRFDFPGRGNTHSSFKWRWYHFDGVDWDQSREFDNRIYKFRGKAWDWEVDTEFGNYDYLMYADYDMDHPEVVNELRNWGVWYTNTLGLDGFRIDAVKHIKYSFTRDWINHVRSATGKNMFAVAEFWKNDLGAIENYLQKTNWNHSVFDVPLHYNLYNASKSGGNYDMRNIFNGTVVQRHPSHAVTFVDNHDSQPEEALESFVETWFKPLAYALTLTREQGYPSVFYGDYYGIPTHGVPAMRSKIDPILEARQKYAYGPQHDYLDHPDVIGWTREGDSSHPKSGLATLITDGPGGSKRMYAGLKNAGETWYDITGNRSDTVKIGSDGWGEFHVNKASVSIYVQK

SEQ ID NO: 28517 - protein, 483 aa, Bacillus sp.
HHNVTNGTMMQYFEWYLPNDGNHWNRLNSDASNLKSKGITAVWIPPAWKGASQNDVGYGAYDLYDLGEFNQKGTVRTKYGTRSQLQAAVTSLKNNGIQVYGDVVMNHKGGADATEMVRAVEVNPNNRNQEVTGDYTIEAWTRFDFPGRGNTHSSFKWRWYHFDGVDWDQSRRLNNRIYLFRGKAWDWEVDTEFGNYDYLMYADYDMDHPEVVNELRNWGVWYTNTLGLDGFRIDAVKHIKYSFTRDWINHVRSATGKNMFAVAEFWKNDLGAIENYLQKTNWNHSVFDVPLHYNLYNASKSGGNYDMRNIFNGTVVQRHPSHAVTFVDNHDSQPEEALESFVEEWFKPLAYALTLTREQGYPSVFYGDYYGIPTHGVPAMRSKIDPILEARQKYAYGPQHDYLDHPDVIGWTREGDSSHPKSGLATLITDGPGGSKRMYAGLKNAGETWYDITGNRSDTVKIGSDGWGEFHVNDGSVSIYVQK

SEQ ID NO: 28518 - protein, 483 aa, Bacillus sp.
HHNGTNGTMMQYFEWYLPNDGNHWNRLNSDASNLKSKGITAVWIPPAWKAASQNDVGYGAYDLYDLGEFNQKGTVRTKYGTRSQLQAAVTSLKNNGIQVYGDVVMNHKGGADATEMVRAVEVNPNNRNQEVTGEYTIEAWTRFDFPGRGNTHSSFKWRWYHFDGVDWDQSRDTNNRIYKFRGKAWDWEVDTEFGNYDYLMYADYDMDHPEVVNELRNWGVWYTNTLGLDGFRIDAVKHIKYSFTRDWINHVRSATGKNMFAVAEFWKNDLGAIENYLQKTNWNHSVFDVPLHYNLYNASKSGGNYDMRNIFNGTVVQRHPSHAVTFVDNHDSQPEEALESFVEEWFKPLAYALTLTREQGYPSVFYGDYYGIPTHGVPAMRSKIDPILEARQKYAYGPQHDYLDHPDVIGWTREGDSSHPKSGLATLITDGPGGSKRMYAGLKNAGETWYDITGNRSDTVKIGSDGWGEFHVNDGSVSIYVQK

SEQ ID NO: 28519 - protein, 483 aa, Bacillus sp.
HHNGTNGTMMQYFEWYLPNDGNHWNRLNSDASNLKSKGITAVWIPPAWKGASQNDVGYGAYDLYDLGEFNQKGTVRTKYGTRSQLQAAVTSLKNNGIQVYGDVVMNHKGGADATEMVRAVEVNPNNRNQEVTGEYTIEAWTRFDFPGRGNTHSSFKWRWYHFDGVDWDQSRRLNNRIYKFRGKAWDWEVDTEFGNYDYLMYADYDMDHPEVVDELRNWGVWYTNTLGLDGFRIDAVKHIKYSFTRDWINHVRSATGKNMFAVAEFWKNDLGAIENYLQKTNWNHSVFDVPLHYNLYNASKSGGNYDMRNIFNGTVVQRHPSHAVTFVDNHDSQPEEALESFVEEWFKPLAYALTLTREQGYPSVFYGDYYGIPTHGVPAMRSKIDPILEARQKYAYGPQHDYLDHPDVIGWTREGDSSHPKSGLATLITDGPGGSKRMYAGLKNAGETWYDITGNRSDTVKIGSDGWGEFHVNDGSVSIYVQK

SEQ ID NO: 28520 - protein, 483 aa, Bacillus sp.
HHNGTNGTMMQYFEWYLPNDGNHWNRLNSDASNLKSKGITAVWIPPAWKGASQNDVGYGAYDLYDLGEFNQKGTVRTKYGTRSQLQAAVTSLKNNGIQVYGDVVMNHKGGADATEMVRAVEVNPNNRNQEVTGEYTIEAWTRFDFPGRGNTHSSFKWRWYHFDGVDWDQSRRTTNRIYKFRGKAWDWEVDTEFGNYDYLMYTDYDMDHPEVVNELRNWGVWYTNTLGLDGFRIDAVKHIKYSFTRDWINHVRSATGKNMFAVAEFWKNDLGAIENYLQKTNWNHSVFDVPLHYNLYNASKSGGNYDMRNIFNGTVVQRHPSHAVTFVDNHDSQPEEALESFVEEWFKPLAYALTLTREQGYPSVFYGDYYGIPTHGVPAMRSKIDPILEARQKYAYGPQHDYLDHPDVIGWTREGDSSHPKSGLATLITDGPGGSKRMYAGLKNAGETWYDITGNRSDTVKIGSDGWGEFHVNDGSVSIYVQK

SEQ ID NO: 28521 - protein, 485 aa, Bacillus sp.
HHNGTNGTMMQYFEWYLPNDGNHWNRLNSDASNLKSKGITAVWIPPAWKGASQNDVGYGAYDLYDLGEFNQKGTVRTKYGTRSQLQAAVTSLKNNGIQVYGDVVMNHKGGADATEMVRAVEVNPNNRNQEVTGEYTIEAWTRFDFPGRGNTHSSFKWRWYHFDGVDWDQSRRLNNRIYKFRGHGKAWDWEVDTEFGNYDYLMYADYDMDHHEVVNELRNWGVWYTNTLGLDGFRIDAVKHIKYSFTRDWINHVRSATGKNMFAVAEFWKNDLGAIENYLQKTNWNHSVFDVPLHYNLYNASKSGGNYDMRNIFNGTVVQRHPSHAVTFVDNHDSQPEEALESFVEEWFKPLAYALTLTREQGYPSVFYGDYYGIPTHGVPAMRSKIDPILEARQKYAYGPQHDYLDHPDVIGWTREGDSSHPKSGLATLITDGPGGSKRMYAGLKNAGETWYDITGNRSDTVKIGSDGWGEFHVNDGSVSIYVQK

SEQ ID NO: 28522 - protein, 485 aa, Synthetic construct
HHNGTNGTMMQYFEWYLPNDGNHWNRLNSDASNLKSKGITAVWIPPAWKGASQNDVGYGAYDLYDLGEFNQKGTVRTKYGTRSQLQAAVTSLKNNGIQVYGDVVMNHKGGADATEMVRAVEVNPNNRNQEVTGEYTIEAWTRFDFPGRGNTHSSFKWRWYHFDGVDWDQSRRLNNRIYKFRGHGKAWDWEVDTENGNYDYLMYADYDYDHPEVVNEQRNWGVWYTNTLGLDGFRIDAVKHIKYSFTRDWINHVRSATGKNMFAVAEFWKNDLGAIENYLQKTNWNHSVFDVPLHYNLYNASKSGGNYDMRNIFNGTVVQRHPSHAVTFVDNHDSQPEEALESFVEEWFKPLAYALTLTREQGYPSVFYGDYYGIPTHGVPAMRSKIDPILEARQKYAYGPQHDYLDHPDVIGWTREGDSSHPKSGLATLITDGPGGSKRMYAGLKNAGETWYDITGNRSDTVKIGSDGWGEFHVNDGSVSIYVQK

SEQ ID NO: 28523 - protein, 483 aa, Bacillus sp.
HHNGTNGTMMQYFEWYLPNDGNHWNRLNSDASNLKSKGITAVWIPPAWKGASQNDVGYGAYDLYDLGEFNQKGTVRTKYGTRSQLQAAVTSLKNNGIQVYGDVVMNHKGGADATEMVRAVEVNPNNRNQEVTGEYTIEAWTRFDFPGRGNTHSSFKWRWYHFDGVDWDQSRELNNRIYKFRGKAWDWEVDTEFGNYDYLMYVDYDMDHPEVVNELRNWGVWYTNTLGLDGFRIDAVKHIKYSFTRDWINHVRSATGKNMFAVAEFWKNDLGAIENYLQKTNWNHSVFDVPLHYNLYNASKSGGNYDMRNIFNGTVVQRHPSHAVTFVDNHDSQPEEALESFVEEWFKPLAYALTLTREQGYPSVFYGDYYGIPTHGVPAMRSKIDPILEARQKYAYGPQHDYLDHPDVIGWTREGDSSHPKSGLATLITDGPGGSKRMYAGLKNAGETWYDITGNRSDTVKIGSDGWGEFHVNDGSVSIYVQK

SEQ ID NO: 28524 - protein, 483 aa, Bacillus sp.
HHNGTNGTMMQYFEWYLPNDGNHWNRLNSDASNLKSKGITAVWIPPAWKATSQNDVGYGAYDLYDLGEFNQKGTVRTKYGTRSQLQAAVTSLKNNGIQVYGDVVMNHKGGADATEMVRAVEVNPNNRNQEVTGEYTIEAWTRFDFPGRGNTHSSFKWRWYHFDGVDWDQSRDLNNRIYKFRGKAWDWEVDTEFGNYDYLMYADYDMDHPEVVNELRNWGVWYTNTLGLDGFRIDAVKHIKYSFTRDWINHVRSATGKNMFAVAEFWKNDLGAIENYLQKTNWNHSVFDVPLHYNLYNASKSGGNYDMRNIFNGTVVQRHPSHAVTFVDNHDSQPEEALESFVDEWFKPLAYALTLTREQGYPSVFYGDYYGIPTHGVPAMRSKIDPILEARQKYAYGPQHDYLDHPDVIGWTREGDSSHPKSGLATLITDGPGGSKRMYAGLKNAGETWYDITGNRSDTVKIGSDGWGEFHVNKSSVSIYVQK

SEQ ID NO: 28525 - protein, 483 aa, Bacillus sp.
HHNGTNGTMMQYFEWYLPNDGNHWNRLNSDASNLKSKGITAVWIPPAWKAVSQNDVGYGAYDLYDLGEFNQKGTVRTKYGTRSQLQAAVTSLKNNGIQVYGDVVMNHKGGADATEMVRAVEVNPNNRNQEVTGEYTIEAWTRFDFPGRGNTHSSFKWRWYHFDGVDWDQSRDLENRIYKFRGKAWDWEVDTEFGNYDYLMYADYDMDHPEVVNELRNWGVWYTNTLGLDGFRIDAVKHIKYSFTRDWINHVRSATGKNMFAVAEFWKNDLGAIENYLQKTNWNHSVFDVPLHYNLYNASKSGGNYDMRNIFNGTVVQRHPSHAVTFVDNHDSQPEEALESFVDPWFKPLAYALTLTREQGYPSVFYGDYYGIPTHGVPAMRSKIDPILEARQKYAYGPQHDYLDHPDVIGWTREGDSSHPKSGLATLITDGPGGSKRMYAGLKNAGETWYDITGNRSDTVKIGSDGWGEFHVNGGSVSIYVQK

SEQ ID NO: 28526 - protein, 483 aa, Bacillus sp.
HHNGTNGTMMQYFEWYLPNDGNHWNRLNSDASNLKSKGITAVWIPPAWKGASQNDVGYGAYDLYDLGEFNQKGTVRTKYGTRSQLQAAVTSLKNNGIQVYGDVVMNHKGGADATEMVRAVEVNPNNRNQEVTGEYTIEAWTRFDFPGRGNTHSSFKWRWYHFDGVDWDQSRRLNNRIYKFRGKAWDWEVDTEFGNYDYLMYADYDMDHPEVVNELRNWGVWYTNTLGLDGFRIDAVKHIKYSFTRDWINHVRSATGKNMFAVAEFWKGDLGAIENYLQKTNWNHSVFDVPLHYNLYNASKSGGNYDMRNIFNGTVVQRHPSHAVTFVDNHDSQPEEALESFVEEWFKPLAYALTLTREQGYPSVFYGDYYGIPTHGVPAMRSKIDPILEARQKYAYGPQHDYLDHPDVIGWTREGDSSHPKSGLATLITDGPGGSKRMYAGLKNAGETWYDITGNRSDTVKIGSDGWGEFHVNDGSVSIYVQK

SEQ ID NO: 28527 - protein, 485 aa, Bacillus sp.
HHNGTNGTMMQYFEWYLPNDGNHWNRLNSDASNLKSKGITAVWIPPAWKGASQNDVGYGAYDLYDLGEFNQKGTVRTKYGTRSQLQAAVTSLKNNGIQVYGDVVMNHKGGADATEMVRAVEVNPNNRNQEVTGEYTIEAWTRFDFPGRGNTHSSFKWRWYHFDGVDWDQSRRLNNRIYKFRGHGKVWDWEVDTEFGNYDYLMYADYDMDHPEVVNELRNWGVWYTNTLGLDGFRIDAVKHIKYSFTRDWINHVRSATGKNMFAVAEFWKNDLGAIENYLQKTNWNHSVFDVPLHYNLYNASKSGGNYDMRNIFNGTVVQRHPSHAVTFVDNHDSQPEEALESFVEEWFKPLAYALTLTREQGYPSVFYGDYYGIPTHGVPAMRSKIDPILEARQKYAYGPQHDYLDHPDVIGWTREGDSSHPKSGLATLITDGPGGSKRMYAGLKNAGETWYDITGNRSDTVKIGSDGWGEFHVNDGSVSIYVQK

SEQ ID NO: 28528 - protein, 483 aa, Bacillus sp.
HHNGTNGTMMQYFEWYLPNDGNHWNRLNSDASNLKSKGITAVWIPPAWKGASQNDVGYGAYDLYDLGEFNQKGTVRTKYGTRSQLQAAVTSLKNNGIQVYGDVVMNHKGGADATEMVRAVEVNPNNRNQEVTGEYTIEAWTRFDFPGRGNTHSSFKWRWYHFDGVDWDQSRRLNNRIYKFRGKAWDWEVDTEFGNYDYLMYADYDGDHPEVVNELRNWGVWYTNTLGLDGFRIDAVKHIKYSFTRDWINHVRSATGKNMFAVAEFWKNDLGAIENYLQKTNWNHSVFDVPLHYNLYNASKSGGNYDMRNIFNGTVVQRHPSHAVTFVDNHDSQPEEALESFVEEWFKPLAYALTLTREQGYPSVFYGDYYGIPTHGVPAMRSKIDPILEARQKYAYGPQHDYLDHPDVIGWTREGDSSHPKSGLATLITDGPGGSKRMYAGLKNAGETWYDITGNRSDTVKIGSDGWGEFHVNDGSVSIYVQK

SEQ ID NO: 28529 - protein, 483 aa, Bacillus sp.
HHNGTNGTMMQYFEWYLPNDGNHWNRLNSDASNLKSKGITAVWIPPAWKAASQNDVGYGAYDLYDLGEFNQKGTVRTKYGTRSQLQAAVTSLKNNGIQVYGDVVMNHKGGADATEMVRAVEVNPNNRNQEVTGEYTIEAWTRFDFPGRGNTHSSFKWRWYHFDGVDWDQSRNLTNRIYKFRGKAWDWEVDTEFGNYDYLMYADYDMDHPEVVNELRNWGVWYTNTLGLDGFRIDAVKHIKYSFTRDWINHVRSATGKNMFAVAEFWKNDLGAIENYLQKTNWNHSVFDVPLHYNLYNASKSGGNYDMRNIFNGTVVQRHPSHAVTFVDNHDSQPEEALESFVEEWFKPLAYALTLTREQGYPSVFYGDYYGIPTHGVPAMRSKIDPILEARQKYAYGPQHDYLDHPDVIGWTREGDSSHPKSGLATLITDGPGGSKRMYAGLKNAGETWYDITGNRSDTVKIGSDGWGEFHVNDGSVSIYVQK

SEQ ID NO: 28530 - protein, 483 aa, Bacillus sp.
HHNGTNGTMMQYFEWYLPNDGNHWNRLNSDASNLKSKGITAVWIPPAWKGASQNDVGYGAYDLYDLGEFNQKGTVRTKYGTRSQLQAAVTSLKNNGIQVYGDVVMNHKGGADATEMVRAVEVNPNNRNQEVTGEYTIEAWTRFDFPGRGNTHSSFKWRWYHFDGVDWDQSRRLNNRIYKFRGKAWDWEVDTEFGNYDYLMYADYDMDHPEVVNELRNWGVWYTNTLGLDGFRIDAVKHIKYSFTRDWINHVRSATGKNMFAVAEFWKNDLGAIENYLQKTNWNHSVFDVPLHYNLYNASKSGGNYDMRNIFNGTVVQRHPSHAVTFVDNHDSQPEEALESFVDPWFKPLAYALTLTREQGYPSVFYGDYYGIPTHGVPAMRSKIDPILEARQKYAYGPQHDYLDHPDVIGWTREGDSSHPKSGLATLITDGPGGSKRMYAGLKNAGETWYDITGNRSDTVKIGSDGWGEFHVNDGSVSIYVQK

SEQ ID NO: 28531 - protein, 483 aa, Bacillus sp.
HHNGTNGTMMQYFEWYLPNDGNHWNRLNSDASNLKSKGITAVWIPPAWKGASQNDVGYGAYDLYDLGEFNQKGTVRTKYGTRSQLQAAVTSLKNNGIQVYGDVVMNHKGGADNTEMVRAVEVNPNNRNQEVTGEYTIEAWTRFDFPGRGNTHSSFKWRWYHFDGVDWDQSRRLNNRIYKFRGKAWDWEVDTEFGNYDYLMYADYDMDHPEVVNELRNWGVWYTNTLGLDGFRIDAVKHIKYSFTRDWINHVRSATGKNMFAVAEFWKNDLGAIENYLQKTNWNHSVFDVPLHYNLYNASKSGGNYDMRNIFNGTVVQRHPSHAVTFVDNHDSQPEEALESFVEEWFKPLAYALTLTREQGYPSVFYGDYYGIPTHGVPAMRSKIDPILEARQKYAYGPQHDYLDHPDVIGWTREGDSSHPKSGLATLITDGPGGSKRMYAGLKNAGETWYDITGNRSDTVKIGSDGWGEFHVNDGSVSIYVQK

SEQ ID NO: 28532 - protein, 483 aa, Bacillus sp.
HHNGTNGTMMQYFEWYLPNDGNHWNRLNSDASNLKSKGITAVWIPPAWKAASQNDVGYGAYDLYDLGEFNQKGTVRTKYGTRSQLQAAVTSLKNNGIQVYGDVVMNHKGGADATEMVRAVEVNPNNRNQEVTGEYTIEAWTRFDFPGRGNTHSSFKWRWYHFDGVDWDQSRSLHNRIYKFRGKAWDWEVDTEFGNYDYLMYADYDMDHPEVVNELRNWGVWYTNTLGLDGFRIDAVKHIKYSFTRDWINHVRSATGKNMFAVAEFWKNDLGAIENYLQKTNWNHSVFDVPLHYNLYNASKSGGNYDMRNIFNGTVVQRHPSHAVTFVDNHDSQPEEALESFVEEWFKPLAYALTLTREQGYPSVFYGDYYGIPTHGVPAMRSKIDPILEARQKYAYGPQHDYLDHPDVIGWTREGDSSHPKSGLATLITDGPGGSKRMYAGLKNAGETWYDITGNRSDTVKIGSDGWGEFHVNDGSVSIYVQK

SEQ ID NO: 28533 - protein, 485 aa, Bacillus sp.
HHNGTNGTMMQYFEWYLPNDGNHWNRLNSDASNLKSKGITAVWIPPAWKGASQNDVGYGAYDLYDLGEFNQKGTVRTKYGTRSQLQAAVTSLKNNGIQVYGDVVMNHKGGADATEMVRAVEVNPNNRNQEVTGEYTIEAWTRFDFPGRGNTHSSFKWRWYHFDGVDWDQSRRLNNRIYKFRGHGKAWDWEVDTEFGNYDYLMYADYDMDHPEVVNELRNWGVWYTNTLGLDGFRIDAVKHIKYSFTRDWINHVRSATGKNMFAVAEFWKNDLGAIENYLQKTNWNHSVFDVPLHYNLYNASKSGGNYDMRNIFNGTVVQRHPSHAVTFVDNHDSQPEEALESFVEEWFKPLAYALTLTREQGYPSVFYGDYYGIPTHGVPAMRSKIDPILNARQKYAYGPQHDYLDHPDVIGWTREGDSSHPKSGLATLITDGPGGSKRMYAGLKNAGETWYDITGNRSDTVKIGSDGWGEFHVNDGSVSIYVQK

SEQ ID NO: 28534 - protein, 483 aa, Bacillus sp.
HHNGTNGTMMQYFEWYLPNDGNHWNRLNSDASNLKSKGITAVWIPPAWKGASQNDVGYGAYDLYDLGEFNQKGTVRTKYGTRSQLQAAVTSLKNNGIQVYGDVVMNHKGGADATEMVRAVEVNPNNRNQEVTGEYTIEAWTRFDFPGRGNTHSSFKWRWYHFDGVDWDQSRRLNNRIYKFRGKFWDWEVDTEFGNYDYLMYADYDMDHPEVVNELRNWGVWYTNTLGLDGFRIDAVKHIKYSFTRDWINHVRSATGKNMFAVAEFWKNDLGAIENYLQKTNWNHSVFDVPLHYNLYNASKSGGNYDMRNIFNGTVVQRHPSHAVTFVDNHDSQPEEALESFVEEWFKPLAYALTLTREQGYPSVFYGDYYGIPTHGVPAMRSKIDPILEARQKYAYGPQHDYLDHPDVIGWTREGDSSHPKSGLATLITDGPGGSKRMYAGLKNAGETWYDITGNRSDTVKIGSDGWGEFHVNDGSVSIYVQK

SEQ ID NO: 28535 - protein, 485 aa, Bacillus sp.
HHNGTNGTMMQYFEWYLPNDGNHWNRLNSDASNLKSKGITAVWIPPAWKATSQNDVGYGAYDLYDLGEFNQKGTVRTKYGTRSQLQAAVTSLKNNGIQVYGDVVMNHKGGADATEMVRAVEVNPNNRNQEVTGEYTIEAWTRFDFPGRGNTHSSFKWRWYHFDGVDWDQSRELNNRIYKFRGHGKAWDWEVDTEFGNYDYLMYVDYDMDHPEVVNELRNWGVWYTNTLGLDGFRIDAVKHIKYSFTRDWINHVRSATGKNMFAVAEFWKNDLGAIENYLQKTNWNHSVFDVPLHYNLYNASKSGGNYDMRNIFNGTVVQRHPSHAVTFVDNHDSQPEEALESFVEEWFKPLAYALTLTREQGYPSVFYGDYYGIPTHGVPAMRSKIDPILEARQKYAYGPQHDYLDHPDVIGWTREGDSSHPKSGLATLITDGPGGSKRMYAGLKNAGETWYDITGNRSDTVKIGSDGWGEFHVNDGSVSIYVQK

SEQ ID NO: 28536 - protein, 483 aa, Bacillus sp.
HHNGTNGTMMQYFEWYLPNDGNHWNRLNSDASNLKSKGITAVWIPPAWKAASQNDVGYGAYDLYDLGEFNQKGTVRTKYGTRSQLQAAVTSLKNNGIQVYGDVVMNHKGGADATEMVRAVEVNPNNRNQEVTGEYTIEAWTRFDFPGRGNTHSSFKWRWYHFDGVDWDQSRDLTNRIYKFRGKAWDWEVDTEFGNYDYLMYADYDMDHPEVVNELRNWGVWYTNTLGLDGFRIDAVKHIKYSFTRDWINHVRSATGKNMFAVAEFWKNDLGAIENYLQKTNWNHSVFDVPLHYNLYNASKSGGNYDMRNIFNGTVVQRHPSHAVTFVDNHDSQPEEALESFVDPWFKPLAYALTLTREQGYPSVFYGDYYGIPTHGVPAMRSKIDPILEARQKYAYGPQHDYLDHPDVIGWTREGDSSHPKSGLATLITDGPGGSKRMYAGLKNAGETWYDITGNRSDTVKIGSDGWGEFHVNGGSVSIYVQK

SEQ ID NO: 28537 - protein, 485 aa, Bacillus sp.
HHNGTNGTMMQYFEWYLPNDGNHWNRLNSDASNLKSKGITAVWIPPAWKGASQNDVGYGAYDLYDLGEFNQKGTVRTKYGTRSQLQAAVTSLKNNGIQVYGDVVMNHKGGADATEMVRAVEVNPNNRNQEVTGEYTIEAWTRFDFPGRGNTHSSFKWRWYHFDGVDWDQSRRLNNRIYKFRGHGKAWDWEVDTEFGNYDYLMYADYDMDHPEVVNELRNWGVWYTNTLGLDGFRIDAVKHIKYSFTRDWINHVRSATGKNMFAVAEFWKNDLGAIENYLQKTLWNHSVFDVPLHYNLYNASKSGGNYDMRNIFNGTVVQRHPSHAVTFVDNHDSQPEEALESFVEEWFKPLAYALTLTREQGYPSVFYGDYYGIPTHGVPAMRSKIDPILEARQKYAYGPQHDYLDHPDVIGWTREGDSSHPKSGLATLITDGPGGSKRMYAGLKNAGETWYDITGNRSDTVKIGSDGWGEFHVNDGSVSIYVQK

SEQ ID NO: 28538 - protein, 485 aa, Synthetic construct
HHNGTNGTMMQYFEWYLPNDGNHWNRLNSDASNLKSKGITAVWIPPAWKGASQNDVGYGAYDVYDLGEFNQKGTVRTKYGTRSQLQAAVTSLKNNGIQVYGDVVMNHKGGADATEMVRAVEVNPNNRNQEVTGEYTIEAWTRFDFPGRGNTHSSFKWRWYHFDGVDWDQSRRLNNRIYKFRGHGKAWDWEVDTENGNYDYLMYADYDMDHPEVVNELRNWGVWYTNTLGLDGFRIDAVKHIKYSFVRDWINHVRSATGKNMFAVAEFWKNDLGAIENYLQKTNWNHSVFDVPLHYNLYNASKSGGNYDMRNIFNGTVVQRHPSHAVTFVDNHDSQPEEALESFVEEWFKPLAYALTLTREQGYPSVFYGDYYGIPTHGVPAMRSKIDPILEARQKYAYGPQHDYLDHPDVIGWTREGDSSHPKSGLATLITDGPGGSKRMYAGLKNAGETWYDITGNRSDTVKIGSDGWGEFHVNDGSVSIYVQK

SEQ ID NO: 28539 - protein, 485 aa, Bacillus sp.
HHNGTNGTMMQYFEWYLPNDGNHWNRLNSDASNLKSKGITAVWIPPAWKGASQNDVGYGAYDLYDLGEFNQKGTVRTKYGTRSQLQAAVTSLKNNGIQVYGDVVMNHKGGADATEMVRAVEVNPNNRNQEVTGEYTIEAWTRFTFPGRGNTHSSFKWRWYHFDGVDWDQSRRLNNRIYKFRGHGKAWDWEVDTEFGNYDYLMYADYDMDHPEVVNELRNWGVWYTNTLGLDGFRIDAVKHIKYSFTRDWINHVRSATGKNMFAVAEFWKNDLGAIENYLQKTNWNHSVFDVPLHYNLYNASKSGGNYDMRNIFNGTVVQRHPSHAVTFVDNHDSQPEEALESFVEEWFKPLAYALTLTREQGYPSVFYGDYYGIPTHGVPAMRSKIDPILEARQKYAYGPQHDYLDHPDVIGWTREGDSSHPKSGLATLITDGPGGSKRMYAGLKNAGETWYDITGNRSDTVKIGSDGWGEFHVNDGSVSIYVQK

SEQ ID NO: 28540 - protein, 483 aa, Bacillus sp.
HHNGTNGTMMQYFEWYLPNDGNHWNRLNSDASNLKSKGITAVWIPPAWKGASQNDVGYGAYDLYDLGEFNQKGTVRTKYGTRSQLQAAVTSLKNNGIQVYGDVVMNHKGGADATEMVRAVEVNPNNRNQEVTGEYTIEAWTRFDFPGRGNTHSSFKWRWYHFDGVDWDQSRRLNNRIYKFRGKAWDWEVDTENGNYDYLMYADIDMDHPEVVAQLRNWGVWYTNTLGLDGFRIDAVKHIKYSFTRDWINHVRSATGKNMFAVAEFWKNDLGAIENYLQKTNWNHSVFDVPLHYNLYNASKSGGNYDMRNIFNGTVVQRHPSHAVTFVDNHDSQPEEALESFVEEWFKPLAYALTLTREQGYPSVFYGDYYGIPTHGVPAMRSKIDPILEARQKYAYGPQHDYLDHPDVIGWTREGDSSHPKSGLATLITDGPGGSKRMYAGLKNAGETWYDITGNRSDTVKIGSDGWGEFHVNDGSVSIYVQK

SEQ ID NO: 28541 - protein, 483 aa, Synthetic construct
HHNGTNGTMMQYFEWYLPNDGNHWNRLNSDASNLKSKGITAVWIPPAWKGASQNDVGYGAYDLYDLGEFNQKGTVRTKYGTRSQLQAAVTSLKNNGIQVYGDVVMNHKGGADATEMVRAVEVNPNNRNQEVTGEYTIEAWTRFDFPGRGNTHSSFKWRWYHFDGVDWDQSRRLNNRIYKFRGKAWDWEVDTENGNYDYLMYADIDMDHPENQNELRNWGVWYTNTLGLDGFRIDAVKHIKYSFTRDWINHVRSATGKNMFAVAEFWKNDLGAIENYLQKTNWNHSVFDVPLHYNLYNASKSGGNYDMRNIFNGTVVQRHPSHAVTFVDNHDSQPEEALESFVEEWFKPLAYALTLTREQGYPSVFYGDYYGIPTHGVPAMRSKIDPILEARQKYAYGPQHDYLDHPDVIGWTREGDSSHPKSGLATLITDGPGGSKRMYAGLKNAGETWYDITGNRSDTVKIGSDGWGEFHVNDGSVSIYVQK

SEQ ID NO: 28542 - protein, 485 aa, Bacillus sp.
HHNGTNGTMMQYFEWYLPNDGNHWNRLNSDASNLKSKGITAVWIPPAWKGASQNDVGYGAYDLYDLGEFNQKGTVRTKYGTRSQLQAAVTSLKNNGIQVYGDVVMNHKGGADATEMVRAVEVNPNNRNQEVTGEYTIEAWTRFDFPGRGNTHSSFKWGWYHFDGVDWDQSRRLNNRIYKFRGHGKAWDWEVDTEFGNYDYLMYADYDMDHPEVVNELRNWGVWYTNTLGLDGFRIDAVKHIKYSFTRDWINHVRSATGKNMFAVAEFWKNDLGAIENYLQKTNWNHSVFDVPLHYNLYNASKSGGNYDMRNIFNGTVVQRHPSHAVTFVDNHDSQPEEALESFVEEWFKPLAYALTLTREQGYPSVFYGDYYGIPTHGVPAMRSKIDPILEARQKYAYGPQHDYLDHPDVIGWTREGDSSHPKSGLATLITDGPGGSKRMYAGLKNAGETWYDITGNRSDTVKIGSDGWGEFHVNDGSVSIYVQK

SEQ ID NO: 28543 - protein, 483 aa, Bacillus sp.
HHNGTNGTMMQYFEWYLPNDGNHWNRLNSDASNLKSKGITAVWIPPAWKAASQNDVGYGAYDLYDLGEFNQKGTVRTKYGTRSQLQAAVTSLKNNGIQVYGDVVMNHKGGADATEMVRAVEVNPNNRNQEVTGEYTIEAWTRFDFPGRGNTHSSFKWRWYHFDGVDWDQSRDLQNRIYKFRGKAWDWEVDTEFGNYDYLMYADYDMDHPEVVNELRNWGVWYTNTLGLDGFRIDAVKHIKYSFTRDWINHVRSATGKNMFAVAEFWKNDLGAIENYLQKTNWNHSVFDVPLHYNLYNASKSGGNYDMRNIFNGTVVQRHPSHAVTFVDNHDSQPEEALESFVDEWFKPLAYALTLTREQGYPSVFYGDYYGIPTHGVPAMRSKIDPILEARQKYAYGPQHDYLDHPDVIGWTREGDSSHPKSGLATLITDGPGGSKRMYAGLKNAGETWYDITGNRSDTVKIGSDGWGEFHVNKSSVSIYVQK

SEQ ID NO: 28544 - protein, 483 aa, Synthetic construct
HHNGTNGTMMQYFEWYLPNDGNHWNRLNSDASNLKSKGITAVWIPPAWKGASQNDVGYGAYDLYDLGEFNQKGTVRTKYGTRSQLQAAVTSLKNNGIQVYGDVVMNHKGGADATEMVRAVEVNPNNRNQEVTGEYTIEAWTRFDFPGRGNTHSSFKWRWYHFDGVDWDQSRRLNNRIYKFRGKAWDWEVDTENGNYDYLMYADLDMDFPEVVNEIRNWGVWYTNTLGLDGFRIDAVKHIKYSFTRDWINHVRSATGKNMFAVAEFWKNDLGAIENYLQKTNWNHSVFDVPLHYNLYNASKSGGNYDMRNIFNGTVVQRHPSHAVTFVDNHDSQPEEALESFVEEWFKPLAYALTLTREQGYPSVFYGDYYGIPTHGVPAMRSKIDPILEARQKYAYGPQHDYLDHPDVIGWTREGDSSHPKSGLATLITDGPGGSKRMYAGLKNAGETWYDITGNRSDTVKIGSDGWGEFHVNDGSVSIYVQK

SEQ ID NO: 28545 - protein, 485 aa, Bacillus sp.
HHNGTNGTMMQYFEWYLPNDGNHWNRLNSDASNLKSKGITAVWIPPAWKAASQNDVGYGAYDLYDLGEFNQKGTVRTKYGTRSQLQAAVTSLKNNGIQVYGDVVMNHKGGADATEMVRAVEVNPNNRNQEVTGEYTIEAWTRFDFPGRGNTHSSFKWRWYHFDGVDWDQSRDVNNRIYKFRGHGKAWDWEVDTEFGNYDYLMYADYDMDHPEVVNELRNWGVWYTNTLGLDGFRIDAVKHIKYSFTRDWINHVRSATGKNMFAVAEFWKNDLGAIENYLQKTNWNHSVFDVPLHYNLYNASKSGGNYDMRNIFNGTVVQRHPSHAVTFVDNHDSQPEEALESFVEEWFKPLAYALTLTREQGYPSVFYGDYYGIPTHGVPAMRSKIDPILEARQKYAYGPQHDYLDHPDVIGWTREGDSSHPKSGLATLITDGPGGSKRMYAGLKNAGETWYDITGNRSDTVKIGSDGWGEFHVNDGSVSIYVQK

SEQ ID NO: 28546 - protein, 485 aa, Bacillus sp.
HHNGTNGTMMQYFEWYLPNDGNHWNRLNSDASNLKSKGITAVWIPPAWKGASQNDVGYGAYDLYDLGEFNQKGTVRTKYGTRSQLQAAVTSLKNNGIQVYGDVVMNHKGGADATEMVRAVEVNPNNRNQEVTGEYTIEAWTRFDFPGRGNTHSSFKWRWYHFDGVDWDQSRRLNNRIYTFRGHGKAWDWEVDTEFGNYDYLMYADYDMDHPEVVNELRNWGVWYTNTLGLDGFRIDAVKHIKYSFTRDWINHVRSATGKNMFAVAEFWKNDLGAIENYLQKTNWNHSVFDVPLHYNLYNASKSGGNYDMRNIFNGTVVQRHPSHAVTFVDNHDSQPEEALESFVEEWFKPLAYALTLTREQGYPSVFYGDYYGIPTHGVPAMRSKIDPILEARQKYAYGPQHDYLDHPDVIGWTREGDSSHPKSGLATLITDGPGGSKRMYAGLKNAGETWYDITGNRSDTVKIGSDGWGEFHVNDGSVSIYVQK

SEQ ID NO: 28547 - protein, 483 aa, Bacillus sp.
HHNGTNGTMMQYFEWYLPNDGNHWNRLNSDASNLKSKGITAVWIPPAWKGASQNDVGYGAYDLYDLGEFNQKGTVRTKYGTRSQLQAAVTSLKNNGINVYGDVVMNHKGGADATEMVRAVEVNPNNRNQEVTGEYTIEAWTRFDFPGRGNTHSSFKWRWYHFDGVDWDMSRRLNNRIYKFRGKAWDWEVDTEFGNYDYLMYADYDMDHPEVVNELRNWGVWYTNTLGLDGFRIDAVKHIKYSFTRDWINHVRSATGKNMFAVAEFWKNDLGAIENYLQKTNWNHSVFDVPLHYNLYNASKSGGNYDMRNIFNGTVVQAHPMHAVTFVDNHDSQPEEALESFVEEWFKPLAYALTLTREQGYPSVFYGDYYGIPTHGVPAMRSKIDPILEARQKYAYGPQHDYLDHPDVIGWTREGDSSHPKSGLATLITDGPGGSKRMYAGLKNAGETWYDITGNRSDTVKIGSDGWGEFHVNDGSVSIYVQK

SEQ ID NO: 28548 - protein, 483 aa, Bacillus sp.
HHNGTNGTMMQYFEWYLPNDGNHWNRLNSDASNLKSKGITAVWIPPAWKAASQNDVGYGAYDLYDLGEFNQKGTVRTKYGTRSQLQAAVTSLKNNGIQVYGDVVMNHKGGADATEMVRAVEVNPNNRNQEVTGEYTIEAWTRFDFPGRGNTHSSFKWRWYHFDGVDWDQSRNVNNRIYKFRGKAWDWEVDTEFGNYDYLMYADYDMDHPEVVNELRNWGVWYTNTLGLDGFRIDAVKHIKYSFTRDWINHVRSATGKNMFAVAEFWKNDLGAIENYLQKTNWNHSVFDVPLHYNLYNASKSGGNYDMRNIFNGTVVQRHPSHAVTFVDNHDSQPEEALESFVEEWFKPLAYALTLTREQGYPSVFYGDYYGIPTHGVPAMRSKIDPILEARQKYAYGPQHDYLDHPDVIGWTREGDSSHPKSGLATLITDGPGGSKRMYAGLKNAGETWYDITGNRSDTVKIGSDGWGEFHVNDGSVSIYVQK

SEQ ID NO: 28549 - protein, 483 aa, Bacillus sp.
HHNGTNGTMMQYFEWYLPNDGNHWNRLNSDASNLKSKGITAVWIPPAWKGASQNDVGYGAYDLYDLGEFNQKGTVRTKYGTRSQLQAAVTSLKNNGINVYGDVVMNHKGGADATEMVRAVEVNPNNRNQEVTGEYTIEAWTRFDFPGRGNTHSSFKWRWYHFDGVDWDQSRRLNNRIYKFRGKAWDWEVDTEFGNYDYLMYADYDMDHPEVVNELRNWGVWYTNTLGLDGFRIDAVKHIKYSFTRDWINHVRSATGKNMFAVAEFWKNDLGAIENYLQKTNWNHSVFDVPLHYNLYNASKSGGNYDMRNIFNGTVVQAHPNHAVTFVDNHDSQPEEALESFVEEWFKPLAYALTLTREQGYPSVFYGDYYGIPTHGVPAMRSKIDPILEARQKYAYGPQHDYLDHPDVIGWTREGDSSHPKSGLATLITDGPGGSKRMYAGLKNAGETWYDITGNRSDTVKIGSDGWGEFHVNDGSVSIYVQK

SEQ ID NO: 28550 - protein, 483 aa, Bacillus sp.
HHNGTNGTMMQYFEWYLPNDGNHWNRLNSDASNLKSKGITAVWIPPAWKGASQNDVGYGAYDLYDLGEFNQKGTVRTKYGTRSQLQAAVTSLKNNGIQVYGDVVMNHKGGADATEMVRAVEVNPNNRLQEVTGEYTIEAWTRFDFPGRGNTHSSFKWRWYHFDGVDWDQSRRLNNRIYKFRGKAWDWEVDTEFGNYDYLMYADYDMDHPEVVNELRNWGVWYTNTLGLDGFRIDAVKHIKYSFTRDWINHVRSATGKNMFAVAEFWKNDLGAIENYLQKTNWNHSVFDVPLHYNLYNASKSGGNYDMRNIFNGTVVQRHPSHAVTFVDNHDSQPEEALESFVEEWFKPLAYALTLTREQGYPSVFYGDYYGIPTHGVPAMRSKIDPILEARQKYAYGPQHDYLDHPDVIGWTREGDSSHPKSGLATLITDGPGGSKRMYAGLKNAGETWYDITGNRSDTVKIGSDGWGEFHVNDGSVSIYVQK

SEQ ID NO: 28551 - protein, 483 aa, Bacillus sp.
HHNGTNGTMMQYFEWYLPNDGNHWNRLNSDASNLKSKGITAVWIPPAWKAASQNDVGYGAYDLYDLGEFNQKGTVRTKYGTRSQLQAAVTSLKNNGIQVYGDVVMNHKGGADATEMVRAVEVNPNNRNQEVTGEYTIEAWTRFDFPGRGNTHSSFKWRWYHFDGVDWDQSRDLQNRIYKFRGKAWDWEVDTEFGNYDYLMYADYDMDHPEVVNELRNWGVWYTNTLGLDGFRIDAVKHIKYSFTRDWINHVRSATGKNMFAVAEFWKNDLGAIENYLQKTNWNHSVFDVPLHYNLYNASKSGGNYDMRNIFNGTVVQRHPSHAVTFVDNHDSQPEEALESFVETWFKPLAYALTLTREQGYPSVFYGDYYGIPTHGVPAMRSKIDPILEARQKYAYGPQHDYLDHPDVIGWTREGDSSHPKSGLATLITDGPGGSKRMYAGLKNAGETWYDITGNRSDTVKIGSDGWGEFHVNDGSVSIYVQK

SEQ ID NO: 28552 - protein, 485 aa, Bacillus sp.
HHNGTNGTMMQYFEWYLPNDGNHWNRLNSDASNLKSKGITAVWIPPAWKGASQNDVGYGAYDLYDLGEFNQKGTVRTKYGTRSQLQAAVTSLKNNGINVYGDVVMNHKGGADATEMVRAVEVNPNNRNQEVTGEYTIEAWTRFDFPGRGNTHSSFKWRWYHFDGVDWDQSRRLNNRIYKFRGHGKAWDWEVDTEFGNYDYLMYADYDMDHPEVVNELRNWGVWYTNTLGLDGFRIDAVKHIKYSFTRDWINHVRSATGKNMFAVAEFWKNDLGAIENYLQKTNWNHSVFDVPLHYNLYNASKSGGNYDMRNIFNGTVVQSHPMLAVTFVDNHDSQPEEALESFVEEWFKPLAYALTLTREQGYPSVFYGDYYGIPTHGVPAMRSKIDPILEARQKYAYGPQHDYLDHPDVIGWTREGDSSHPKSGLATLITDGPGGSKRMYAGLKNAGETWYDITGNRSDTVKIGSDGWGEFHVNDGSVSIYVQK

SEQ ID NO: 28553 - protein, 483 aa, Bacillus sp.
HHNGTNGTMMQYFEWYLPNDGNHWNRLNSDASNLKSKGITAVWIPPAWKGASQNDVGYGAYDLYDLGEFNQKGTVRTKYGTRSQLQAAVTSLKNNGIQVYGDVVMNHKGGADATEMVRAVEVNPNNRNQEVTGEYTIEAWTRFDFPGRGNTHSSFKWRWYHFDGVDWDQSRRLNNRIYKFRGKAWDWEVDTEAGFYDYLMYADIDMDHPEVVNELRNWGVWYTNTLGLDGFRIDAVKHIKYSFTRDWINHVRSATGKNMFAVAEFWKNDLGAIENYLQKTNWNHSVFDVPLHYNLYNASKSGGNYDMRNIFNGTVVQRHPSHAVTFVDNHDSQPEEALESFVEEWFKPLAYALTLTREQGYPSVFYGDYYGIPTHGVPAMRSKIDPILEARQKYAYGPQHDYLDHPDVIGWTREGDSSHPKSGLATLITDGPGGSKRMYAGLKNAGETWYDITGNRSDTVKIGSDGWGEFHVNDGSVSIYVQK

SEQ ID NO: 28554 - protein, 483 aa, Bacillus sp.
HHNGTNGTMMQYFEWYLPNDGNHWNRLNSDASNLKSKGITAVWIPPAWKGASQNDVGYGAYDLYDLGEFNQKGTVRTKYGTRSQLQAAVTSLKNNGIQVYGDVVMNHKGGADATEMVRAVEVNPNNRNQEVTGEYTIEAWTRFDFPGRGNTHSSFKWRWYHFDGVDWDQSRRLNNRIYKFRGKAWDWEVDTEFGNYDYLMYADYDMDHPETVNELRNWGVWYTNTLGLDGFRIDAVKHIKYSFTRDWINHVRSATGKNMFAVAEFWKNDLGAIENYLQKTNWNHSVFDVPLHYNLYNASKSGGNYDMRNIFNGTVVQRHPSHAVTFVDNHDSQPEEALESFVEEWFKPLAYALTLTREQGYPSVFYGDYYGIPTHGVPAMRSKIDPILEARQKYAYGPQHDYLDHPDVIGWTREGDSSHPKSGLATLITDGPGGSKRMYAGLKNAGETWYDITGNRSDTVKIGSDGWGEFHVNDGSVSIYVQK

SEQ ID NO: 28555 - protein, 483 aa, Bacillus sp.
HHNGTNGTMMQYFEWYLPNDGNHWNRLNSDASNLKSKGITAVWIPPAWKGASQNDVGYGAYDLYDLGEFNQKGTVRTKYGTRSQLQAAVTSLKNNGIQVYGDVVINHKGGADATEMVRAVEVNPNNRNQEVTGEYTIEAWTRFDFPGRGNTHSSFKWRWYHFDGVDWDQSRRLNNRIYKFRGKAWDWEVDTENGNYDYLMYADIDYDHPEVVNELRNWGVWYTNTLGLDGFRIDAVKHIKYSFTRDWINHVRSATGKNMFAVAEFWKNDLGAIENYLQKTNWNHSVFDVPLHYNLYNASKSGGNYDMRNIFNGTVVQRHPSHAVTFVDNHDSQPEEALESFVEEWFKPLAYALTLTREQGYPSVFYGDYYGIPTHGVPAMRSKIDPILEARQKYAYGPQHDYLDHPDVIGWTREGDSSHPKSGLATLITDGPGGSKRMYAGLKNAGETWYDITGNRSDTVKIGSDGWGEFHVNDGSVSIYVQK

SEQ ID NO: 28556 - protein, 483 aa, Bacillus sp.
HHNGTNGTMMQYFEWYLPNDGNHWNRLNSDASNLKSKGITAVWIPPAWKGASQNDVGYGAYDLYDLGEFNQKGTVRTKYGTRSQLQAAVTSLKNNGIQVYGDVVMNHKGGADATEMVRAVEVNPNNRNQEVTGEYTIEAWTRFDFPGRGNTHSSFKWRWYHFDGVDWDQSRRLNNRIYKFRGKAWDWEVDTENGNYDYLMYADIDYDYPEVVNELRNWGVWYTNTLGLDGFRIDAVKHIKYSFTRDWINHVRSATGKNMFAVAEFWKNDLGAIENYLQKTNWNHSVFDVPLHYNLYNASKSGGNYDMRNIFNGTVVQRHPSHAVTFVDNHDSQPEEALESFVEEWFKPLAYALTLTREQGYPSVFYGDYYGIPTHGVPAMRSKIDPILEARQKYAYGPQHDYLDHPDVIGWTREGDSSHPKSGLATLITDGPGGSKRMYAGLKNAGETWYDITGNRSDTVKIGSDGWGEFHVNDGSVSIYVQK

SEQ ID NO: 28557 - protein, 483 aa, Synthetic construct
HHNGTNGTMMQYFEWYLPNDGNHWNRLNSDASNLKSKGITAVWIPPAWKGASQNDVGYGAYDLYDLGEFNQKGTVRTKYGTRSQLQAAVTSLKNNGIQVYGDVVMNHKGGADATEMVRAVEVNPNNRNQEVTGEYTIEAWTRFDFPGRGNTHSSFKWRWYHFDGVDWDQSRRLNNRIYKFRGKAWDWEVDTENGNYDYLMYADFDMDYPEVVNEVRNWGVWYTNTLGLDGFRIDAVKHIKYSFTRDWINHVRSATGKNMFAVAEFWKNDLGAIENYLQKTNWNHSVFDVPLHYNLYNASKSGGNYDMRNIFNGTVVQRHPSHAVTFVDNHDSQPEEALESFVEEWFKPLAYALTLTREQGYPSVFYGDYYGIPTHGVPAMRSKIDPILEARQKYAYGPQHDYLDHPDVIGWTREGDSSHPKSGLATLITDGPGGSKRMYAGLKNAGETWYDITGNRSDTVKIGSDGWGEFHVNDGSVSIYVQK

SEQ ID NO: 28558 - protein, 483 aa, Bacillus sp.
HHNGTNGTMMQYFEWYLPNDGNHWNRLNSDASNLKSKGITAVWIPPAWKGASQNDVGYGAYDLYDLGEFNQKGTVRTKYGTRSQLQAAVTSLKNNGIQVYGDVVMNHKGGADATEMVRAVEVNPNNRNQEVTGEYTIEAWTRFDFPGRGNTHSSFKWRWYHFDGVDWDQSRRLNNRIYKFRGKAWDWEVDTEDGFYDYLMYADIDMDHPEVVNELRNWGVWYTNTLGLDGFRIDAVKHIKYSFTRDWINHVRSATGKNMFAVAEFWKNDLGAIENYLQKTNWNHSVFDVPLHYNLYNASKSGGNYDMRNIFNGTVVQRHPSHAVTFVDNHDSQPEEALESFVEEWFKPLAYALTLTREQGYPSVFYGDYYGIPTHGVPAMRSKIDPILEARQKYAYGPQHDYLDHPDVIGWTREGDSSHPKSGLATLITDGPGGSKRMYAGLKNAGETWYDITGNRSDTVKIGSDGWGEFHVNDGSVSIYVQK

SEQ ID NO: 28559 - protein, 483 aa, Bacillus sp.
HHNGTNGTMMQYFEWYLPNDGNHWNRLNSDASNLKSKGITAVWIPPAWKGASQNDVGYGAYDLYDLGEFNQKGTVRTKYGTRSQLQAAVTSLKNNGIQVYGDVVMNHKGGADATEMVRAVEVNPNNRTQEVTGEYTIEAWTRFDFPGRGNTHSSFKWRWYHFDGVDWDQSRRLNNRIYKFRGKAWDWEVDTEFGNYDYLMYADYDMDHPEVVNELRNWGVWYTNTLGLDGFRIDAVKHIKYSFTRDWINHVRSATGKNMFAVAEFWKNDLGAIENYLQKTNWNHSVFDVPLHYNLYNASKSGGNYDMRNIFNGTVVQRHPSHAVTFVDNHDSQPEEALESFVEEWFKPLAYALTLTREQGYPSVFYGDYYGIPTHGVPAMRSKIDPILEARQKYAYGPQHDYLDHPDVIGWTREGDSSHPKSGLATLITDGPGGSKRMYAGLKNAGETWYDITGNRSDTVKIGSDGWGEFHVNDGSVSIYVQK

SEQ ID NO: 28560 - protein, 483 aa, Bacillus sp.
HHNGTNGTMMQYFEWYLPNDGNHWNRLNSDASNLKSKGITAVWIPPAWKGASQNDVGYGAYDLYDLGEFNQKGTVRTKYGTRSQLQAAVTSLKNNGIQVYGDVVMNHKGGADATEMVRAVEVNPNNRNQEVTGEYTIEAWTRFDFPGRGNTHSSFKWRWYHFDGVDWDQSRRLNNRIYKFRGKAWDWEVDTEFGNYDYLMYADYDMDHPEVVNELRNWGVWYTNTLGLDGFRIDAVKHIKYSFTRDWINHVRSATGKNMFAVAEFWKNDLGAIENYLQKTNWNHSVFDVPLHYNLYNASKSGGNYDMRNIFNGTVVQRHPSHAVTFVDNHDSQPEEALESFVDTWFKPLAYALTLTREQGYPSVFYGDYYGIPTHGVPAMRSKIDPILEARQKYAYGPQHDYLDHPDVIGWTREGDSSHPKSGLATLITDGPGGSKRMYAGLKNAGETWYDITGNRSDTVKIGSDGWGEFHVNGSSVSIYVQK

SEQ ID NO: 28561 - protein, 485 aa, Bacillus sp.
HHNGTNGTMMQYFEWYLPNDGNHWNRLNSDASNLKSKGITAVWIPPAWKGASQNDVGYGAYDLYDLGEFNQKGTVRTKYGTRSQLQAAVTSLKNNGIQVYGDVVMNHKGGADATEMVRAVEVNPNNRNQEVTGEYTIEAWTRFDFPGRGNTHSSFKWRWYHFDGVDWDQSRRLNNRIYKFRGHGKAWDWEVDTEFGNYDYLMYADYDMDHPEVVNELRNWGVWYTNTLGLDGFRIDAVKHIKYSFTRDWINHVRSATGKNMFAVAEFWKNDLGAIENYLQKTNWNHSVFDVPLHYNLYNASKSGGNYDMRNIFNGTVVQRHPSHAVTFVDNHDSQPEEALESFVDEWFKPLAYALTLTREQGYPSVFYGDYYGIPTHGVPAMRSKIDPILEARQKYAYGPQHDYLDHPDVIGWTREGDSSHPKSGLATLITDGPGGSKRMYAGLKNAGETWYDITGNRSDTVKIGSDGWGEFHVNQSSVSIYVQK

SEQ ID NO: 28562 - protein, 483 aa, Bacillus sp.
HHNGTNGTMMQYFEWYLPNDGNHWNRLNSDASNLKSKGITAVWIPPAWKGASQNDVGYGAYDLYDLGEFNQKGTVRTKYGTRSQLQAAVTSLKNNGIQVYGDVVMNHKGGADATEMVDAVEVNPNNRNQEVTGEYTIEAWTRFDFPGRGNTHSSFKWRWYHFDGVDWDQSRRLNNRIYKFRNKAWDWEVDTEFGNYDYLMYADYDMDHPEVVNELRNWGVWYTNTLGLDGFRIDAVKHIKYSFTRDWINHVRSATGKNMFAVAEFWKNDLGAIENYLQKTNWNHSVFDVPLHYNLYNASKSGGNYDMRNIFNGTVVQRHPSHAVTFVDNHDSQPEEALESFVEEWFKPLAYALTLTREQGYPSVFYGDYYGIPTHGVPAMRSKIDPILEARQKYAYGPQHDYLDHPDVIGWTREGDSSHPKSGLATLITDGPGGSKRMYAGLKNAGETWYDITGNRSDTVKIGSDGWGEFHVNDGSVSIYVQK

SEQ ID NO: 28563 - protein, 483 aa, Bacillus sp.
HHNGTNPTMMQYFEWYLPNDGNHWNRLNSDASNLKSKGITAVWIPPAWKGASQNDVGYGAYDLYDLGEFNQKGTVRTKYGTRSQLQAAVTSLKNNGIQVYGDVVMNHKGGADATEMVRAVEVNPNNRNQEVTGEYTIEAWTRFDFPGRGNTHSSFKWRWYHFDGVDWDQSRRLNNRIYKFRGKAWDWEVDTEFGNYDYLMYADYDMDHPEVVNELRNWGVWYTNTLGLDGFRIDAVKHIKYSFTRDWINHVRSATGKNMFAVAEFWKNDLGAIENYLQKTNWNHSVFDVPLHYNLYNASKSGGNYDMRNIFNGTVVQSHPKHAVTFVDNHDSQPEEALESFVEEWFKPLAYALTLTREQGYPSVFYGDYYGIPTHGVPAMRSKIDPILEARQKYAYGPQHDYLDHPDVIGWTREGDSSHPKSGLATLITDGPGGSKRMYAGLKNAGETWYDITGNRSDTVKIGSDGWGEFHVNDGSVSIYVQK

SEQ ID NO: 28564 - protein, 483 aa, Bacillus sp.
HHNGTNGTMMQYFEWYLPNDGNHWNRLNSDASNLKSKGITAVWIPPAWKGASQNDVGYGAYDLYDLGEFNQKGTVRTKYGTRSQLQAAVTSLKNNGIQVYGDVVMNHKGGADATEMVRAVEVNPNNRNQEVTGEYTIEAWTRFDFPGRGNTHSSFKWRWYHFDGVDWDQSRRLNNRIYKFRGKAWDWEVDTEFGNYDYLMYADYDMDHPEVVNELRNWGVWYTNTLGLDGFRIDAVKHIKYSFTRDWINHVRSATGKNMFAVAEFWKNDLGAIENYLQKTNWNHSVFDVPLHYNLYNASKSQGNYDMRNIFNGTVVQRHPSHAVTFVDNHDSQPEEALESFVDEWFKPLAYALTLTREQGYPSVFYGDYYGIPTHGVPAMRSKIDPILEARQKYAYGPQHDYLDHPDVIGWTREGDSSHPKSGLATLITDGPGGSKRMYAGLKNAGETWYDITGNRSDTVKIGSDGWGEFHVNGQSVSIYVQK

SEQ ID NO: 28565 - protein, 483 aa, Bacillus sp.
HHNGTNGTMMQYFEWYLPNDGNHWNRLNSDASNLKSKGITAVWIPPAWKGASQNDVGYGAYDVYDLGEFNQKGTVRTKYGTRSQLQAAVTSLKNNGIQVYGDVVMNHKGGADATEMVRAVEVNPNNRNQEVTGEYTIEAWTRFDFPGRGNTHSSFKWRWYHFDGVDWDQSRRLNNRIYKFRGKAWDWEVDTENGNYDYLMYADIDYDHPEVVNELRNWGVWYTNTLGLDGFRIDAVKHIKYSFTRDWINHVRSATGKNMFAVAEFWKNDLGAIENYLQKTNWNHSVFDVPLHYNLYNASKSGGNYDMRNIFNGTVVQRHPSHAVTFVDNHDSQPEEALESFVEEWFKPLAYALTLTREQGYPSVFYGDYYGIPTHGVPAMRSKIDPILEARQKYAYGPQHDYLDHPDVIGWTREGDSSHPKSGLATLITDGPGGSKRMYAGLKNAGETWYDITGNRSDTVKIGSDGWGEFHVNDGSVSIYVQK

SEQ ID NO: 28566 - protein, 485 aa, Bacillus sp.
HHNGTNGTMMQYFEWYLPNDGNHWNRLNSDASNLKSKGITAVWIPPAWKGASQNDVGYGAYDLYDLGEFNQKGTVRTKYGTRSQLQAAVTSLKNNGIQVYGDVVMNHKGGADATEMVRAVEVNPNNRNQEVTGEYTIEAWTRFDFPGRGNTHSSFKWRWYHFDGVDWDQSRRLNNRIYKFRGHGKAWDWEVDTEFGNYDYLMYADYDMDHPEVVNELRNWGVWYTNTLGLDGFRIDAVKHIKYSFTRDWINHVRSATGKNMFAVAEFWKNDLGAIENYLQKTNWNHSVFDVPLHYNLYNASKSRGNYDMRNIFNGTVVQRHPSHAVTFVDNHDSQPEEALESFVEEWFKPLAYALTLTREQGYPSVFYGDYYGIPTHGVPAMRSKIDPILEARQKYAYGPQHDYLDHPDVIGWTREGDSSHPKSGLATLITDGPGGSKRMYAGLKNAGETWYDITGNRSDTVKIGSDGWGEFHVNDGSVSIYVQK

SEQ ID NO: 28567 - protein, 483 aa, Bacillus sp.
HHNGTNGTMMQYFEWYLPNDGNHWNRLNSDASNLKSKGITAVWIPPAWKGASQNDVGYGAYDLYDLGEFNQKGTVRTKYGTRSQLQAAVTSLKNNGIQVYGDVVMNHKGGADATEMVRAVEVNPNNRNQEVTGEYTIEAWTRFDFPGRGNTHSSFKWRWYHFDGVDWDQSRRLNNRIYKFRGKAWDWEVDTEFGNYDYLMYADYDMDHAEVVNELRNWGVWYTNTLGLDGFRIDAVKHIKYSFTRDWINHVRSATGKNMFAVAEFWKNDLGAIENYLQKTNWNHSVFDVPLHYNLYNASKSGGNYDMRNIFNGTVVQRHPSHAVTFVDNHDSQPEEALESFVEEWFKPLAYALTLTREQGYPSVFYGDYYGIPTHGVPAMRSKIDPILEARQKYAYGPQHDYLDHPDVIGWTREGDSSHPKSGLATLITDGPGGSKRMYAGLKNAGETWYDITGNRSDTVKIGSDGWGEFHVNDGSVSIYVQK

SEQ ID NO: 28568 - protein, 483 aa, Bacillus sp.
HHNGTNGTMMQYFEWYLPNDGNHWNRLNSDASNLKSKGITAVWIPPAWKAASQNDVGYGAYDLYDLGEFNQKGTVRTKYGTRSQLQAAVTSLKNNGIQVYGDVVMNHKGGADATEMVRAVEVNPNNRNQEVTGEYTIEAWTRFDFPGRGNTHSSFKWRWYHFDGVDWDQSRDLSNRIYKFRGKAWDWEVDTEFGNYDYLMYADYDMDHPEVVNELRNWGVWYTNTLGLDGFRIDAVKHIKYSFTRDWINHVRSATGKNMFAVAEFWKNDLGAIENYLQKTNWNHSVFDVPLHYNLYNASKSGGNYDMRNIFNGTVVQRHPSHAVTFVDNHDSQPEEALESFVEEWFKPLAYALTLTREQGYPSVFYGDYYGIPTHGVPAMRSKIDPILEARQKYAYGPQHDYLDHPDVIGWTREGDSSHPKSGLATLITDGPGGSKRMYAGLKNAGETWYDITGNRSDTVKIGSDGWGEFHVNDGSVSIYVQK

SEQ ID NO: 28569 - protein, 485 aa, Bacillus sp.
HHNGTNGTMMQYFEWYLPNDGNHWNRLNSDASNLKSKGITAVWIPPAWKATSQNDVGYGAYDLYDLGEFNQKGTVRTKYGTRSQLQAAVTSLKNNGIQVYGDVVMNHKGGADATEMVRAVEVNPNNRNQEVTGEYTIEAWTRFDFPGRGNTHSSFKWRWYHFDGVDWDQSRNLNNRIYKFRGHGKAWDWEVDTEFGNYDYLMYTDYDMDHPEVVNELRNWGVWYTNTLGLDGFRIDAVKHIKYSFTRDWINHVRSATGKNMFAVAEFWKNDLGAIENYLQKTNWNHSVFDVPLHYNLYNASKSGGNYDMRNIFNGTVVQRHPSHAVTFVDNHDSQPEEALESFVEEWFKPLAYALTLTREQGYPSVFYGDYYGIPTHGVPAMRSKIDPILEARQKYAYGPQHDYLDHPDVIGWTREGDSSHPKSGLATLITDGPGGSKRMYAGLKNAGETWYDITGNRSDTVKIGSDGWGEFHVNDGSVSIYVQK

SEQ ID NO: 28570 - protein, 485 aa, Bacillus sp.
HHNGTNGTMMQYFEWYLPNDGNHWNRLNSDASNLKSKGITAVWIPPAWKGASQNDVGYGAYDLYDLGEFNQKGTVRTKYGTRSQLQAAVTSLKNNGIQVYGDVVMNHKGGADATEMVRAVEVNPNNRNQEVTGEYTIEAWTRFDFPGRGNTHSSFKWRWYHFDGVDWDQSRRLNNRIYKFRGHGKAWDWEVDTEFGNYDYLMYADYDMDHPEVVNELRNWGVWYTNTLGLDGFRIDAVKHIKYSFTRDWINHVRSATGKNMFAVAEFWKNDLGAIENYLQKTNWNHSVFDVPLHYNLYNASKSGGNYDMRNIFNGTVVQRNPSHAVTFVDNHDSQPEEALESFVEEWFKPLAYALTLTREQGYPSVFYGDYYGIPTHGVPAMRSKIDPILEARQKYAYGPQHDYLDHPDVIGWTREGDSSHPKSGLATLITDGPGGSKRMYAGLKNAGETWYDITGNRSDTVKIGSDGWGEFHVNDGSVSIYVQK

SEQ ID NO: 28571 - protein, 485 aa, Bacillus sp.
HHNGTNGTMMQYFEWYLPNDGNHWNRLNSDASNLKSKGITAVWIPPAWKAASQNDVGYGAYDLYDLGEFNQKGTVRTKYGTRSQLQAAVTSLKNNGIQVYGDVVMNHKGGADATEMVRAVEVNPNNRNQEVTGEYTIEAWTRFDFPGRGNTHSSFKWRWYHFDGVDWDQSRDLQNRIYKFRGHGKAWDWEVDTEFGNYDYLMYVDYDMDHPEVVNELRNWGVWYTNTLGLDGFRIDAVKHIKYSFTRDWINHVRSATGKNMFAVAEFWKNDLGAIENYLQKTNWNHSVFDVPLHYNLYNASKSGGNYDMRNIFNGTVVQAHPNHAVTFVDNHDSQPEEALESFVEEWFKPLAYALTLTREQGYPSVFYGDYYGIPTHGVPAMRSKIDPILEARQKYAYGPQHDYLDHPDVIGWTREGDSSHPKSGLATLITDGPGGSKRMYAGLKNAGETWYDITGNRSDTVKIGSDGWGEFHVNDGSVSIYVQK

SEQ ID NO: 28572 - protein, 485 aa, Bacillus sp.
HHNGTNGTMMQYFEWYLPNDGNHWNRLNSDASNLKSKGITAVWIPPAWKGASQNDVGYGAYDLYDLGEFNQKGTVRTKYGTRSQLQAAVTSLKNNGIQVYGDVVMNHKGGADATEMVRAVEVNPNNRNQEVTGEYTIEAWTRFDFPGRGNTHSSFKWRWYHFDGVDWDQSRRLNNRIYKFRGHGKAWDWEVDTEFGNYDYLMYADYDMDHPEVVNELRNWGVWYTNTLGLDGFRIDAVKHIKYSFTRDWINHVRSATGKNMFAVAEFWKNDLGAIENYLQKTNWNHSVFDVPLHYNLYNASKSGGNYDMRNIFNGTVVQRHPSHAVTFVDNHDSQPEEALESFVEAWFKPLAYALTLTREQGYPSVFYGDYYGIPTHGVPAMRSKIDPILEARQKYAYGPQHDYLDHPDVIGWTREGDSSHPKSGLATLITDGPGGSKRMYAGLKNAGETWYDITGNRSDTVKIGSDGWGEFHVNDGSVSIYVQK

SEQ ID NO: 28573 - protein, 483 aa, Bacillus sp.
HHNGTNGTMMQYFEWYLPNDGNHWNRLNSDASNLKSKGITAVWIPPAWKGASQNDVGYGAYDLYDLGEFNQKGTIRTKYGTRSQLQAAVTSLKNNGIQVYGDVVMNHKGGADATEMVRAVEVNPNNRNQEVTGEYTIEAWTRFDFPGRGNTHSSFKWRWYHFDGVDWDQSRRLNNRIYKFRGKAWDWEVDTEFGNYDYLMYADYDMDHPEVVNELRNWGVWYTNTLGLDGFRIDAVKHIKYSFTRDWINHVRSATGKNMFAVAEFWKNDLGAIENYLQKTNWNHSVFDVPLHYNLYNASKSGGNYDMRNIFNGTVVQAHPNHAVTFVDNHDSQPEEALESFVEEWFKPLAYALTLTREQGYPSVFYGDYYGIPTHGVPAMRSKIDPILEARQKYAYGPQHDYLDHPDVIGWTREGDSSHPKSGLATLITDGPGGSKRMYAGLKNAGETWYDITGNRSDTVKIGSDGWGEFHVNDGSVSIYVQK

SEQ ID NO: 28574 - protein, 483 aa, Synthetic construct
HHNGTNGTMMQYFEWYLPNDGNHWNRLNSDASNLKSKGITAVWIPPAVKGASQNDVGYGVYDLYDLGEFNQKGTVRTKYGTRSQLQAAVTSLKNNGIQVYGDVVMNHKGGADATEMVRAVEVNPNNRNQEVTGEYTIEAWTRFDFPGRGNTHSSFKWRWYHFDGVDWDQSRRLNNRIYKFRGKAWDWEVDTENGNYDYLMYADIDMDHPEVVNELRNWGVWYTNTLGLDGFRIDAVKHIKYSFTRDWINHVRSATGKNMFAVAEFWKNDLGAIENYLQKTNWNHSVFDVPLHYNLYNASKSGGNYDMRNIFNGTVVQRHPSHAVTFVDNHDSQPEEALESFVEEWFKPLAYALTLTREQGYPSVFYGDYYGIPTHGVPAMRSKIDPILEARQKYAYGPQHDYLDHPDVIGWTREGDSSHPKSGLATLITDGPGGSKRMYAGLKNAGETWYDITGNRSDTVKIGSDGWGEFHVNDGSVSIYVQK

SEQ ID NO: 28575 - protein, 483 aa, Bacillus sp.
HHNGTNGTMMQYFEWYLPNDGNHWNRLNSDASNLKSKGITAVWIPPAWKAASQNDVGYGAYDLYDLGEFNQKGTVRTKYGTRSQLQAAVTSLKNNGIQVYGDVVMNHKGGADATEMVDAVEVNPNNRNQEVTGEYTIEAWTRFDFPGRGNTHSSFKWRWYHFDGVDWDQSRQITNRIYKFRGKAWDWEVDTEFGNYDYLMYTDYDMDHPEVVNELRNWGVWYTNTLGLDGFRIDAVKHIKYSFTRDWINHVRSATGKNMFAVAEFWKNDLGAIENYLQKTNWNHSVFDVPLHYNLYNASKSGGNYDMRNIFNGTVVQRHPSHAVTFVDNHDSQPEEALESFVEEWFKPLAYALTLTREQGYPSVFYGDYYGIPTHGVPAMRSKIDPILEARQKYAYGPQHDYLDHPDVIGWTREGDSSHPKSGLATLITDGPGGSKRMYAGLKNAGETWYDITGNRSDTVKIGSDGWGEFHVNDGSVSIYVQK

SEQ ID NO: 28576 - protein, 485 aa, Bacillus sp.
HHNGTNGTMMQYFEWYLPNDGNHWNRLNSDASNLKSKGITAVWIPPAWKGASQNDVGYGAYDLYDLGEFNQKGTVRTKYGTRSQLQAAVTSLKNNGIQVYGDVVMNHKGGADATEMVRAVEVNPNNRNQEVTGEYTIEAWTRFDFPGRGNTHSSFKWRWYHFDGVDWDQSRRLNNRIYKFRGHGKAWDWEVDTEFGNYDYLAYADYDMDHPEVVNELRNWGVWYTNTLGLDGFRIDAVKHIKYSFTRDWINHVRSATGKNMFAVAEFWKNDLGAIENYLQKTNWNHSVFDVPLHYNLYNASKSGGNYDMRNIFNGTVVQRHPSHAVTFVDNHDSQPEEALESFVEEWFKPLAYALTLTREQGYPSVFYGDYYGIPTHGVPAMRSKIDPILEARQKYAYGPQHDYLDHPDVIGWTREGDSSHPKSGLATLITDGPGGSKRMYAGLKNAGETWYDITGNRSDTVKIGSDGWGEFHVNDGSVSIYVQK

SEQ ID NO: 28577 - protein, 485 aa, Bacillus sp.
HHNGTNGTMMQYFEWYLPNDGNHWNRLNSDASNLKSKGITAVWIPPAWKAASQNDVGYGAYDLYDLGEFNQKGTVRTKYGTRSQLQAAVTSLKNNGIQVYGDVVMNHKGGADATEMVDAVEVNPNNRNQEVTGEYTIEAWTRFDFPGRGNTHSSFKWRWYHFDGVDWDQSRQITNRIYKFRGHGKAWDWEVDTEFGNYDYLMYTDYDMDHPEVVNELRNWGVWYTNTLGLDGFRIDAVKHIKYSFTRDWINHVRSATGKNMFAVAEFWKNDLGAIENYLQKTNWNHSVFDVPLHYNLYNASKSGGNYDMRNIFNGTVVQRHPSHAVTFVDNHDSQPEEALESFVEEWFKPLAYALTLTREQGYPSVFYGDYYGIPTHGVPAMRSKIDPILEARQKYAYGPQHDYLDHPDVIGWTREGDSSHPKSGLATLITDGPGGSKRMYAGLKNAGETWYDITGNRSDTVKIGSDGWGEFHVNDGSVSIYVQK

SEQ ID NO: 28578 - protein, 483 aa, Bacillus sp.
HHNGTNQTMMQYFEWYLPNDGNHWNRLNSDASNLKSKGITAVWIPPAWKGASQNDVGYGAYDLYDLGEFNQKGTVRTKYGTRSQLQAAVTSLKNNGIQVYGDVVMNHKGGADATEMVRAVEVNPNNRNQEVTGEYTIEAWTRFDFPGRGNTHSSFKWRWYHFDGVDWDQSRRLNNRIYKFRGKAWDWEVDTEFGNYDYLMYADYDMDHPEVVNELRNWGVWYTNTLGLDGFRIDAVKHIKYSFTRDWINHVRSATGKNMFAVAEFWKNDLGAIENYLQKTNWNHSVFDVPLHYNLYNASKSGGNYDMRNIFNGTVVQSNPMHAVTFVDNHDSQPEEALESFVEEWFKPLAYALTLTREQGYPSVFYGDYYGIPTHGVPAMRSKIDPILEARQKYAYGPQHDYLDHPDVIGWTREGDSSHPKSGLATLITDGPGGSKRMYAGLKNAGETWYDITGNRSDTVKIGSDGWGEFHVNDGSVSIYVQK

SEQ ID NO: 28579 - protein, 483 aa, Bacillus sp.
HHNGTNGTMMQYFEWYLPNDGNHWNRLNSDASNLKSKGITAVWIPPAWKGASQNDVGYGAYDLYDLGEFNQKGTVRTKYGTRSQLQAAVTSLKNNGIQVYGDVVMNHKGGADATEMVRAVEVNPNNRNQEVTGEYTIEAWTRFDFPGRGNTHSSFKWRWYHFDGVDWDQSRRLNNRIYKFRGKAWDWEVDTEFGNYDYLMYADYDMDHPEVVNELRNWGVWYTNTLGLDGFRIDAVKHIKYSFTRDWINHVRSATGKNMFAVAEFWKNDLGAIENYLQKTNWNHSVFDVPLHYNLYNASKSGGNYDMRNIFNGTVVQRHPSHAVTFVDNHDSQPEEALESFVETWFKPLAYALTLTREQGYPSVFYGDYYGIPTHGVPAMRSKIDPILEARQKYAYGPQHDYLDHPDVIGWTREGDSSHPKSGLATLITDGPGGSKRMYAGLKNAGETWYDITGNRSDTVKIGSDGWGEFHVNKGSVSIYVQK

SEQ ID NO: 28580 - protein, 483 aa, Bacillus sp.
HHNGTNGTMMQYFEWYLPNDGNHWNRLNSDASNLKSKGITAVWIPPAWKGASQNDVGYGAYDLYDLGEFNQKGTVRTKYGTRSQLQAAVTSLKNNGIQVYGDVVMNHKGGADATEMVRAVEVNPNNRNQEVTGEYTIEAWTRFDFPGRGNTHSSFKWRWYHFDGVDWDQSRRLNNRIYKFRGKAWDWEVDTEFGNYDYLMYADYDMDHPEVVNELRNWGVWYTNTLGLDGFRIDAVKHIKYSFTRDWINHVRSATGKNMFAVAEFWKNDLGAIENYLQKTNWNHSVFDVPLHYNLYNASKSGGNYDMRNIFNGTVVQRHPSHAVTFVDNHDSQPEEALESFVEPWFKPLAYALTLTREQGYPSVFYGDYYGIPTHGVPAMRSKIDPILEARQKYAYGPQHDYLDHPDVIGWTREGDSSHPKSGLATLITDGPGGSKRMYAGLKNAGETWYDITGNRSDTVKIGSDGWGEFHVNQGSVSIYVQK

SEQ ID NO: 28581 - protein, 485 aa, Bacillus sp.
HHNGTNGTMMQYFEWYLPNDGNHWNRLNSDASNLKSKGITAVWIPPAWKGASQNDVGYGAYDLYDLGEFNQKGTVRTKYGTRSQLQAAVTSLKNNGIQVYGDVVMNHKGGADATEMVRAVEVNPNNRNQEVTGEYTIEAWTRFDFPGRGNTHSSFKWRWYHFDGVDWDQSRRLNNRIYKFRGHGKAWDWEVDTEFGNYDYLMYADYDMDHPEVVDELRNWGVWYTNTLGLDGFRIDAVKHIKYSFTRDWINHVRSATGKNMFAVAEFWKNDLGAIENYLQKTNWNHSVFDVPLHYNLYNASKSGGNYDMRNIFNGTVVQRHPSHAVTFVDNHDSQPEEALESFVEEWFKPLAYALTLTREQGYPSVFYGDYYGIPTHGVPAMRSKIDPILEARQKYAYGPQHDYLDHPDVIGWTREGDSSHPKSGLATLITDGPGGSKRMYAGLKNAGETWYDITGNRSDTVKIGSDGWGEFHVNDGSVSIYVQK

SEQ ID NO: 28582 - protein, 485 aa, Bacillus sp.
HHNGTNGTMMQYFEWYLPNDGNHWNRLNSDASNLKSKGITAVWIPPAWKGASQNDVGYGAYDLYDLGEFNQKGTVRTKYGTRSQLQAAVTSLKNNGIQVYGDVVMNHKGGADATEMVRAVEVNPNNRNQEVTGEYTIEAWTRFDFPGRGNTHSSFKWRWYHFDGVDWDQSRRLNNRIYKFRGHGKAWDWEVDTEFGNYDYLMYADYDMDHPEVVNELRNWGVWYTNTLGLDGFRIDAVKHIKYSFTRDWINHVRSATGKNMFAVAEFWKNDLGAIENYLQKTNWNHSVFDVPLHYNLYNASKSGGNYDMRNIFNGTVVQSHPSQAVTFVDNHDSQPEEALESFVEEWFKPLAYALTLTREQGYPSVFYGDYYGIPTHGVPAMRSKIDPILEARQKYAYGPQHDYLDHPDVIGWTREGDSSHPKSGLATLITDGPGGSKRMYAGLKNAGETWYDITGNRSDTVKIGSDGWGEFHVNDGSVSIYVQK

SEQ ID NO: 28583 - protein, 485 aa, Bacillus sp.
HHNGTNKTMMQYFEWYLPNDGNHWNRLNSDASNLKSKGITAVWIPPAWKGASQNDVGYGAYDLYDLGEFNQKGTVRTKYGTRSQLQAAVTSLKNNGIQVYGDVVMNHKGGADATEMVRAVEVNPNNRNQEVTGEYTIEAWTRFDFPGRGNTHSSFKWRWYHFDGVDWDQSRRLNNRIYKFRGHGKAWDWEVDTEFGNYDYLMYADYDMDHPEVVNELRNWGVWYTNTLGLDGFRIDAVKHIKYSFTRDWINHVRSATGKNMFAVAEFWKNDLGAIENYLQKTNWNHSVFDVPLHYNLYNASKSGGNYDMRNIFNGTVVQAHPMLAVTFVDNHDSQPEEALESFVEEWFKPLAYALTLTREQGYPSVFYGDYYGIPTHGVPAMRSKIDPILEARQKYAYGPQHDYLDHPDVIGWTREGDSSHPKSGLATLITDGPGGSKRMYAGLKNAGETWYDITGNRSDTVKIGSDGWGEFHVNDGSVSIYVQK

SEQ ID NO: 28584 - protein, 485 aa, Bacillus sp.
HHNGTNGTMMQYFEWYLPNDGNHWNRLNSDASNLKSKGITAVWIPPAWKGASQNDVGYGAYDLYDLGEFNQKGTVRTKYGTRSQLQAAVTSLKNNGIQVYGDVVMNHKGGADATEMVRAVEVNPNNRNQEVTGEYTIEAWTRFDFPGRGNTHSSFKWRWYHFDGVDFDQSRQLNNRIYKFRGHGKAWDWEVDTEFGNYDYLMYADYDMDHPEVVNELRNWGVWYTNTLGLDGFRIDAVKHIKYSFTRDWINHVRSATGKNMFAVAEFWKNDLGAIENYLQKTNWNHSVFDVPLHYNLYNASKSGGNYDMRNIFNGTVVQRHPSHAVTFVDNHDSQPEEALESFVETWFKPLAYALTLTREQGYPSVFYGDYYGIPTHGVPAMRSKIDPILEARQKYAYGPQHDYLDHPDVIGWTREGDSSHPKSGLATLITDGPGGSKRMYAGLKNAGETWYDITGNRSDTVKIGSDGWGEFHVNDGSVSIYVQK

SEQ ID NO: 28585 - protein, 485 aa, Bacillus sp.
HHNGTNGTMMQYFEWYLPNDGNHWNRLNSDASNLKSKGITAVWIPPAWKGASQNDVGYGAYDLYDLGEFNQKGTVRTKYGTRSQLQAAVTSLKNNGINVYGDVVMNHKGGADATEMVRAVEVNPNNRNQEVTGEYTIEAWTRFDFPGRGNTHSSFKWRWYHFDGVDFDQSRRLNNRIYKFRGHGKAWDWEVDTEFGNYDYLMYADYDMDHPEVVNELRNWGVWYTNTLGLDGFRIDAVKHIKYSFTRDWINHVRSATGKNMFAVAEFWKNDLGAIENYLQKTNWNHSVFDVPLHYNLYNASKSGGNYDMRNIFNGTVVQAHPMHAVTFVDNHDSQPEEALESFVEEWFKPLAYALTLTREQGYPSVFYGDYYGIPTHGVPAMRSKIDPILEARQKYAYGPQHDYLDHPDVIGWTREGDSSHPKSGLATLITDGPGGSKRMYAGLKNAGETWYDITGNRSDTVKIGSDGWGEFHVNDGSVSIYVQK

SEQ ID NO: 28586 - protein, 485 aa, Bacillus sp.
HHNGTNGTMMQYFEWYLPNDGNHWNRLNSDASNLKSKGITAVWIPPAWKAASQNDVGYGAYDLYDLGEFNQKGTVRTKYGTRSQLQAAVTSLKNNGIQVYGDVVMNHKGGADATEMVRAVEVNPNNRNQEVTGEYTIEAWTRFDFPGRGNTHSSFKWRWYHFDGVDWDQSRQLNNRIYKFRGHGKAWDWEVDTEFGNYDYLMYVDYDMDHPEVVNELRNWGVWYTNTLGLDGFRIDAVKHIKYSFTRDWINHVRSATGKNMFAVAEFWKNDLGAIENYLQKTNWNHSVFDVPLHYNLYNASKSGGNYDMRNIFNGTVVQRHPSHAVTFVDNHDSQPEEALESFVEEWFKPLAYALTLTREQGYPSVFYGDYYGIPTHGVPAMRSKIDPILEARQKYAYGPQHDYLDHPDVIGWTREGDSSHPKSGLATLITDGPGGSKRMYAGLKNAGETWYDITGNRSDTVKIGSDGWGEFHVNDGSVSIYVQK

SEQ ID NO: 28587 - protein, 483 aa, Synthetic construct
HHNGTNGTMMQYFEWYLPNDGNHWNRLNSDASNLKSKGITAVWIPPAWKGASQNDVGYGAYDLYDLGEFNQKGTVRTKYGTRSQLQAAVTSLKNNGIQVYGDVVMNHKGGADATEMVRAVEVNPNNRNQEVTGEYTIEAWTRFDFPGRGNTHSSFKWRWYHFDGVDWDQSRRLNNRIYKFRGKAWDWEVDTENGNYDYLMYADIDMDHPENINELRNWGVWYTNTLGLDGFRIDAVKHIKYSFTRDWINHVRSATGKNMFAVAEFWKNDLGAIENYLQKTNWNHSVFDVPLHYNLYNASKSGGNYDMRNIFNGTVVQRHPSHAVTFVDNHDSQPEEALESFVEEWFKPLAYALTLTREQGYPSVFYGDYYGIPTHGVPAMRSKIDPILEARQKYAYGPQHDYLDHPDVIGWTREGDSSHPKSGLATLITDGPGGSKRMYAGLKNAGETWYDITGNRSDTVKIGSDGWGEFHVNDGSVSIYVQK

SEQ ID NO: 28588 - protein, 483 aa, Bacillus sp.
HHNGTNGTMMQYFEWYLPNDGNHWNRLNSDASNLKSKGITAVWIPPAWKGASQNDVGYGAYDLYDLGEFNQKGTVRTKYGTRSQLQAAVTSLKNNGIQVYGDVVMNHKGGADATEMVRAVEVNPNNRNQEVTGEYTIEAWTRFDFPGRGNTHSSFKWRWYHFDGVDWDQSRRLNNRIYKFRGKAWDWEVDTEFGNYDYLMYADYDMDHPEVVNELRNWGVWYTNTLGLDGFRIDAVKHIKYSFTRDWINHVRSATGKNMFAVAEFWKNDLGAIENYLQKTNWNHSVFDVPLHYNLYNASKSGGNYDMRNIFNGTVVQRHPSHAVTFVDNHDSQPEEALESFVEEWFAPLAYALTLTREQGYPSVFYGDYYGIPTHGVPAMRSKIDPILEARQKYAYGPQHDYLDHPDVIGWTREGDSSHPKSGLATLITDGPGGSKRMYAGLKNAGETWYDITGNRSDTVKIGSDGWGEFHVNDGSVSIYVQK

SEQ ID NO: 28589 - protein, 483 aa, Synthetic construct
HHNGTNGTMMQYFEWYLPNDGNHWNRLNSDASNLKSKGITAVWIPPAWKGASQNDVGYGAYDLYDLGEFNQKGTVRTKYGTRSQLQAAVTSLKNNGIQVYGDVVMNHKGGADATEMVRAVEVNPNNRNQEVTGEYTIEAWTRFDFPGRGNTHSSFKWRWYHFDGVDWDQSRRLNNRIYKFRPKEWDWEVDTENGNYDYLMYADIDMDHPEVVNELRNWGVWYTNTLGLDGFRIDAVKHIKYSFTRDWINHVRSATGKNMFAVAEFWKNDLGAIENYLQKTNWNHSVFDVPLHYNLYNASKSGGNYDMRNIFNGTVVQRHPSHAVTFVDNHDSQPEEALESFVEEWFKPLAYALTLTREQGYPSVFYGDYYGIPTHGVPAMRSKIDPILEARQKYAYGPQHDYLDHPDVIGWTREGDSSHPKSGLATLITDGPGGSKRMYAGLKNAGETWYDITGNRSDTVKIGSDGWGEFHVNDGSVSIYVQK

SEQ ID NO: 28590 - protein, 485 aa, Bacillus sp.
HHNGTNGTMMQYFEWYLPNDGNHWNRLNSDASNLKSKGITAVWIPPAWKGASQNDVGYGAYDLYDLGEFNQKGTVRTKYGTRSQLQAAVTSLKNNGIQVYGDVVMNHKGGADATEMVRAVEVNPNNRNQEVTGEYTIEAWTRFDFPGRGNTHSSFKWRWYHFDGVDWDQSRRLNNRIYKFRGHGKAWDWEVDTEFGNYDYLMYADYDMDHPEVVNELRNWGVWYTNTLGLDGFRIDAVKHIKYSFTRDWINHVRSATGKNMFAVAEFWKNDLGMIENYLQKTNWNHSVFDVPLHYNLYNASKSGGNYDMRNIFNGTVVQRHPSHAVTFVDNHDSQPEEALESFVEEWFKPLAYALTLTREQGYPSVFYGDYYGIPTHGVPAMRSKIDPILEARQKYAYGPQHDYLDHPDVIGWTREGDSSHPKSGLATLITDGPGGSKRMYAGLKNAGETWYDITGNRSDTVKIGSDGWGEFHVNDGSVSIYVQK

SEQ ID NO: 28591 - protein, 485 aa, Bacillus sp.
HHNGTNGTMMQYFEWYLPNDGNHWNRLNSDASNLKSKGITAVWIPPAWKAVSQNDVGYGAYDLYDLGEFNQKGTVRTKYGTRSQLQAAVTSLKNNGIQVYGDVVMNHKGGADLTEMVDAVEVNPNNRNQEVTGEYTIEAWTRFDFPGRGNTHSSFKWRWYHFDGVDWDQSRDFNNRIYKFRGHGKAWDWEVDTEFGNYDYLMYADYDMDHPEVVNELRNWGVWYTNTLGLDGFRIDAVKHIKYSFTRDWINHVRSATGKNMFAVAEFWKNDLGAIENYLQKTNWNHSVFDVPLHYNLYNASKSGGNYDMRNIFNGTVVQRHPSHAVTFVDNHDSQPEEALESFVEEWFKPLAYALTLTREQGYPSVFYGDYYGIPTHGVPAMRSKIDPILEARQKYAYGPQHDYLDHPDVIGWTREGDSSHPKSGLATLITDGPGGSKRMYAGLKNAGETWYDITGNRSDTVKIGSDGWGEFHVNDGSVSIYVQK

SEQ ID NO: 28592 - protein, 483 aa, Bacillus sp.
HHNGTNGTMMQYFEWYLPNDGNHWNRLNSDASNLKSKGITAVWIPPAWKAASQNDVGYGAYDLYDLGEFNQKGTVRTKYGTRSQLQAAVTSLKNNGIQVYGDVVMNHKGGADATEMVRAVEVNPNNRNQEVTGEYTIEAWTRFDFPGRGNTHSSFKWRWYHFDGVDWDQSRRLENRIYKFRGKAWDWEVDTEFGNYDYLMYADYDMDHPEVVNELRNWGVWYTNTLGLDGFRIDAVKHIKYSFTRDWINHVRSATGKNMFAVAEFWKNDLGAIENYLQKTNWNHSVFDVPLHYNLYNASKSGGNYDMRNIFNGTVVQRHPSHAVTFVDNHDSQPEEALESFVEEWFKPLAYALTLTREQGYPSVFYGDYYGIPTHGVPAMRSKIDPILEARQKYAYGPQHDYLDHPDVIGWTREGDSSHPKSGLATLITDGPGGSKRMYAGLKNAGETWYDITGNRSDTVKIGSDGWGEFHVNDGSVSIYVQK

SEQ ID NO: 28593 - protein, 483 aa, Synthetic construct
HHNGTNGTMMQYFEWYLPNDGNHWNRLNSDASNLKSKGITAVWIPPAWKGASQNDVGYGAYDVYDLGEFNQKGTVRTKYGTRSQLQAAVTSLKNNGIQVYGDVVMNHKGGADATEMVRAVEVNPNNRNQEVTGEYTIEAWTRFDFPGRGNTHSSFKWRWYHFDGVDWDQSRRLNNRIYKFRGKAWDWEVDTENGNYDYLMYADYDMDHPEVVNELRNWGVWYTNTLGLDGFRIDAVKHIKYSFVRDWINHVRSATGKNMFAVAEFWKNDLGAIENYLQKTNWNHSVFDVPLHYNLYNASKSGGNYDMRNIFNGTVVQRHPSHAVTFVDNHDSQPEEALESFVEEWFKPLAYALTLTREQGYPSVFYGDYYGIPTHGVPAMRSKIDPILEARQKYAYGPQHDYLDHPDVIGWTREGDSSHPKSGLATLITDGPGGSKRMYAGLKNAGETWYDITGNRSDTVKIGSDGWGEFHVNDGSVSIYVQK

SEQ ID NO: 28594 - protein, 483 aa, Bacillus sp.
HHNGTNNTMMQYFEWYLPNDGNHWNRLNSDASNLKSKGITAVWIPPAWKGASQNDVGYGAYDLYDLGEFNQKGTVRTKYGTRSQLQAAVTSLKNNGILVYGDVVMNHKGGADATEMVRAVEVNPNNRNQEVTGEYTIEAWTRFDFPGRGNTHSSFKWRWYHFDGVDWDQSRRLNNRIYKFRGKAWDWEVDTEFGNYDYLMYADYDMDHPEVVNELRNWGVWYTNTLGLDGFRIDAVKHIKYSFTRDWINHVRSATGKNMFAVAEFWKNDLGAIENYLQKTNWNHSVFDVPLHYNLYNASKSGGNYDMRNIFNGTVVQAHPMHAVTFVDNHDSQPEEALESFVEEWFKPLAYALTLTREQGYPSVFYGDYYGIPTHGVPAMRSKIDPILEARQKYAYGPQHDYLDHPDVIGWTREGDSSHPKSGLATLITDGPGGSKRMYAGLKNAGETWYDITGNRSDTVKIGSDGWGEFHVNDGSVSIYVQK

SEQ ID NO: 28595 - protein, 483 aa, Synthetic construct
HHNGTNGTMMQYFEWYLPNDGNHWNRLNSDASNLKSKGITAVWIPPAWKGASQNDVGYGAYDLYDLGEFNQKGTVRTKYGTRSQLQAAVTSLKNNGIQVYGDVVMNHKGGADATEMVRAVEVNPNNRNQEVTGEYTIEAWTRFDFPGRGNTHSSFKWRWYHFDGVDWDQSRRLNNRIYKFRGKAWDWEVDTENGNYDYLMYADLDMDHPEVVNEVRNWGVWYTNTLGLDGFRIDAVKHIKYSFLRDWINHVRSATGKNMFAVAEFWKNDLGAIENYLQKTNWNHSVFDVPLHYNLYNASKSGGNYDMRNIFNGTVVQRHPSHAVTFVDNHDSQPEEALESFVEEWFKPLAYALTLTREQGYPSVFYGDYYGIPTHGVPAMRSKIDPILEARQKYAYGPQHDYLDHPDVIGWTREGDSSHPKSGLATLITDGPGGSKRMYAGLKNAGETWYDITGNRSDTVKIGSDGWGEFHVNDGSVSIYVQK

SEQ ID NO: 28596 - protein, 483 aa, Bacillus sp.
HHNGTNGTMMQYFEWYLPNDGNHWNRLNSDASNLKSKGITAVWIPPAWKGASQNDVGYGAYDLYDLGEFNQKGTVRTKYGTRSQLQAAVTSLKNNGINVYGDVVMNHKGGADATEMVRAVEVNPNNRNQEVTGEYTIEAWTRFDFPGRGNTHSSFKWRWYHFDGVDWDQSRRLNNRIYKFRGKAWDWEVDTEFGNYDYLMYADYDMDHPEVVNELRNWGVWYTNTLGLDGFRIDAVKHIKYSFTRDWINHVRSATGKNMFAVAEFWKNDLGAIENYLQKTNWNHSVFDVPLHYNLYNASKSGGNYDMRNIFNGTVVQSHPSHAVTFVDNHDSQPEEALESFVEEWFKPLAYALTLTREQGYPSVFYGDYYGIPTHGVPAMRSKIDPILEARQKYAYGPQHDYLDHPDVIGWTREGDSSHPKSGLATLITDGPGGSKRMYAGLKNAGETWYDITGNRSDTVKIGSDGWGEFHVNDGSVSIYVQK

SEQ ID NO: 28597 - protein, 483 aa, Bacillus sp.
HHNGTNGTMMQYFEWYLPNDGNHWNRLNSDASNLKSKGITAVWIPPAWKGASQNDVGYGAYDLYDLGEFNQKGTVRTKYGTRSQLQAAVTSLKNNGIQVYGDVVMNHKGGADATEMVRAVEVNPNNRNQEVTGEYTIEAWTRFDFPGRGNTHSSFKWRWYHFDGVDWDQSRKLNNRIYKFRGKAWDWEVDTEFGNYDYLMYVDYDMDHPEVVNELRNWGVWYTNTLGLDGFRIDAVKHIKYSFTRDWINHVRSATGKNMFAVAEFWKNDLGAIENYLQKTNWNHSVFDVPLHYNLYNASKSGGNYDMRNIFNGTVVQAHPNHAVTFVDNHDSQPEEALESFVEEWFKPLAYALTLTREQGYPSVFYGDYYGIPTHGVPAMRSKIDPILEARQKYAYGPQHDYLDHPDVIGWTREGDSSHPKSGLATLITDGPGGSKRMYAGLKNAGETWYDITGNRSDTVKIGSDGWGEFHVNDGSVSIYVQK

SEQ ID NO: 28598 - protein, 485 aa, Bacillus sp.
HHNGTNGTMMQYFEWYLPNDGNHWNRLNSDASNLKSKGITAVWIPPAWKAASQNDVGYGAYDLYDLGEFNQKGTVRTKYGTRSQLQAAVTSLKNNGIQVYGDVVMNHKGGADATEMVRAVEVNPNNRNQEVTGEYTIEAYTRFDFPGRGNTHSSFKWRWYHFDGVDWDQSRDLQNRIYKFRGHGKAWDWEVDTEFGNYDYLMYADYDMDHPEVVNELRNWGVWYTNTLGLDGFRIDAVKHIKYSFTRDWINHVRSATGKNMFAVAEFWKNDLGAIENYLQKTNWNHSVFDVPLHYNLYNASKSGGNYDMRNIFNGTVVQRHPSHAVTFVDNHDSQPEEALESFVEEWFKPLAYALTLTREQGYPSVFYGDYYGIPTHGVPAMRSKIDPILEARQKYAYGPQHDYLDHPDVIGWTREGDSSHPKSGLATLITDGPGGSKRMYAGLKNAGETWYDITGNRSDTVKIGSDGWGEFHVNDGSVSIYVQK

SEQ ID NO: 28599 - protein, 485 aa, Bacillus sp.
HHNGTNGTMMQYFEWYLPNDGNHWNRLNSDASNLKSKGITAVWIPPAWKGASQNDVGYGAYDLYDLGEFNQKGTVRTKYGTRSQLQAAVTSLKNNGIQVYGDVVMNHKGGADATEMVRAVEVNPNNRNQEVTGEYTIEAWTRFDFPGRGNTHSSFKWRWYHFDGVDWDQSRRLNNRIYKFRGHGKAWDWEVDTEFGNYDYLMYADYDMDHPEVVNELRNWGVWYTNTLGLDGFRIDAVKHIKYSFTRDWINHVRSATGKNMFAVAEFWGNDLGAIENYLQKTNWNHSVFDVPLHYNLYNASKSGGNYDMRNIFNGTVVQRHPSHAVTFVDNHDSQPEEALESFVEEWFKPLAYALTLTREQGYPSVFYGDYYGIPTHGVPAMRSKIDPILEARQKYAYGPQHDYLDHPDVIGWTREGDSSHPKSGLATLITDGPGGSKRMYAGLKNAGETWYDITGNRSDTVKIGSDGWGEFHVNDGSVSIYVQK

SEQ ID NO: 28600 - protein, 483 aa, Bacillus sp.
HHNGTNGTMMQYFEWYLPNDGNHWNRLNSDASNLKSKGITAVWIPPAWKGASQNDVGYGAYDLYDLGEFNQKGTVRTKYGTRSQLQAAVTSLKNNGIQVYGDVVMNHKGGADATEMVRAVEVNPNNRNQEVTGEYTIEAYTRFDFPGRGNTHSSFKWRWYHFDGVDWDQSRRLNNRIYKFRGKAWDWEVDTEFGNYDYLMYADYDMDHPEVVNELRNWGVWYTNTLGLDGFRIDAVKHIKYSFTRDWINHVRSATGKNMFAVAEFWKNDLGAIENYLQKTNWNHSVFDVPLHYNLYNASKSGGNYDMRNIFNGTVVQAHPSHAVTFVDNHDSQPEEALESFVEEWFKPLAYALTLTREQGYPSVFYGDYYGIPTHGVPAMRSKIDPILEARQKYAYGPQHDYLDHPDVIGWTREGDSSHPKSGLATLITDGPGGSKRMYAGLKNAGETWYDITGNRSDTVKIGSDGWGEFHVNDGSVSIYVQK

SEQ ID NO: 28601 - protein, 485 aa, Bacillus sp.
HHNGTNGTMMQYFEWYLPNDGNHWNRLNSDASNLKSKGITAVWIPPAWKGASQNDVGYGAYDLYDLGEFNQKGTVRTKYGTRSQLQAAVTSLKNNGIQVYGDVVMNHKGGADATEMVRAVEVNPNNRNQEVTGEYTIEAWTRFDFPGRGNTHSSFKWRWYHFDGVDWDGSRRLNNRIYKFRGHGKAWDWEVDTEFGNYDYLMYADYDMDHPEVVNELRNWGVWYTNTLGLDGFRIDAVKHIKYSFTRDWINHVRSATGKNMFAVAEFWKNDLGAIENYLQKTNWNHSVFDVPLHYNLYNASKSGGNYDMRNIFNGTVVQRHPSHAVTFVDNHDSQPEEALESFVEEWFKPLAYALTLTREQGYPSVFYGDYYGIPTHGVPAMRSKIDPILEARQKYAYGPQHDYLDHPDVIGWTREGDSSHPKSGLATLITDGPGGSKRMYAGLKNAGETWYDITGNRSDTVKIGSDGWGEFHVNDGSVSIYVQK

SEQ ID NO: 28602 - protein, 483 aa, Bacillus sp.
HHNGTNGTMMQYFEWYLPNDGNHWNRLNSDASNLKSKGITAVWIPPAWKAASQNDVGYGAYDLYDLGEFNQKGTVRTKYGTRSQLQAAVTSLKNNGIQVYGDVVMNHKGGADATEMVRAVEVNPNNRNQEVTGEYTIEAWTRFDFPGRGNTHSSFKWRWYHFDGVDWDQSRNLSNRIYKFRGKAWDWEVDTEFGNYDYLMYADYDMDHPEVVNELRNWGVWYTNTLGLDGFRIDAVKHIKYSFTRDWINHVRSATGKNMFAVAEFWKNDLGAIENYLQKTNWNHSVFDVPLHYNLYNASKSGGNYDMRNIFNGTVVQRHPSHAVTFVDNHDSQPEEALESFVEEWFKPLAYALTLTREQGYPSVFYGDYYGIPTHGVPAMRSKIDPILEARQKYAYGPQHDYLDHPDVIGWTREGDSSHPKSGLATLITDGPGGSKRMYAGLKNAGETWYDITGNRSDTVKIGSDGWGEFHVNDGSVSIYVQK

SEQ ID NO: 28603 - protein, 483 aa, Bacillus sp.
HHNGTNGTMMQYFEWYLPNDGNHWNRLNSDASNLKSKGITAVWIPPAWKGASQNDVGYGAYDLYDLGEFNQKGTVRTKYGTRSQLQAAVTSLKNNGIQVYGDVVMNHKGGADATEMVRAVEVNPNNRNQEVTGEYTIEAWTRFDFPGRGNTHSSFKWRWYHFDGVDWDQSRRLNNRIYKFRGKAWDWEVDTEFGNYDYLMYADYDMDHPEVVNELRNWGVWYTNTLGLDGFRIDAVKHIKYSFTRDWINHVRSATGKNMFAVAEFWKNDLGAIENYLQKTNWNHSVFDVPLHYNLYNASKSGGNYDMRNIFNGTVVQRHPSHAVTFVDNHDSQPEEALESFVEEWFKPQAYALTLTREQGYPSVFYGDYYGIPTHGVPAMRSKIDPILEARQKYAYGPQHDYLDHPDVIGWTREGDSSHPKSGLATLITDGPGGSKRMYAGLKNAGETWYDITGNRSDTVKIGSDGWGEFHVNDGSVSIYVQK

SEQ ID NO: 28604 - protein, 485 aa, Bacillus sp.
HHNGTNGTMMQYFEWYLPNDGNHWNRLNSDASNLKSKGITAVWIPPAWKAASQNDVGYGAYDLYDLGEFNQKGTVRTKYGTRSQLQAAVTSLKNNGIQVYGDVVMNHKGGADATEMVRAVEVNPNNRNQEVTGEYTIEAWTRFDFPGRGNTHSSFKWRWYHFDGVDWDQSREVTNRIYKFRGHGKAWDWEVDTEFGNYDYLMYADYDMDHPEVVNELRNWGVWYTNTLGLDGFRIDAVKHIKYSFTRDWINHVRSATGKNMFAVAEFWKNDLGAIENYLQKTNWNHSVFDVPLHYNLYNASKSGGNYDMRNIFNGTVVQRHPSHAVTFVDNHDSQPEEALESFVEEWFKPLAYALTLTREQGYPSVFYGDYYGIPTHGVPAMRSKIDPILEARQKYAYGPQHDYLDHPDVIGWTREGDSSHPKSGLATLITDGPGGSKRMYAGLKNAGETWYDITGNRSDTVKIGSDGWGEFHVNDGSVSIYVQK

SEQ ID NO: 28605 - protein, 483 aa, Bacillus sp.
HHNGTNGTMMQYFEWYLPNDGNHWNRLNSDASNLKSKGITAVWIPPAWKGASQNDVGYGAYDLYDLGEFNQKGTVRTKYGTRSQLQAAVTSLKNNGIQVYGDVVMNHKGGADATEMVRAVEVNPNNRNQEVTGEYTIEAWTRFDFPGRGNTHSSFKWRWYHFDGVDWDQSREFDNRIYKFRGKAWDWEVDTEFGNYDYLMYADYDMDHPEVVNELRNWGVWYTNTLGLDGFRIDAVKHIKYSFTRDWINHVRSATGKNMFAVAEFWKNDLGAIENYLQKTNWNHSVFDVPLHYNLYNASKSGGNYDMRNIFNGTVVQRHPSHAVTFVDNHDSQPEEALESFVETWFKPLAYALTLTREQGYPSVFYGDYYGIPTHGVPAMRSKIDPILEARQKYAYGPQHDYLDHPDVIGWTREGDSSHPKSGLATLITDGPGGSKRMYAGLKNAGETWYDITGNRSDTVKIGSDGWGEFHVNDASVSIYVQK

SEQ ID NO: 28606 - protein, 483 aa, Bacillus sp.
HHNGTNGTMMQYFEWYLPNDGNHWNRLNSDASNLKSKGITAVWIPPAWKGASQNDVGYGAYDLYDLGEFNQKGTVRTKYGTRSQLQAAVTSLKNNGIQVYGDVVMNHKGGADATEMVRAVEVNPNNRNQEVTGEYTIEAWTRFDFPGRGNTHSSFKWRWYHFDGVDWDQSRRLNNRIYKFRGKAWDWEVDTEFGNYDYLMYADYDMDHPEVVNELRNWGVWYTNTLGLDGFRIDAVKHIKYSFTRDWINHVRSATGKNMFAVAEFWKNDLGAIENYLQKTNWNHSVFDVPLHYNLYNASQSGANYDMRNIFNGTVVQRHPSHAVTFVDNHDSQPEEALESFVDEWFKPLAYALTLTREQGYPSVFYGDYYGIPTHGVPAMRSKIDPILEARQKYAYGPQHDYLDHPDVIGWTREGDSSHPKSGLATLITDGPGGSKRMYAGLKNAGETWYDITGNRSDTVKIGSDGWGEFHVNGKSVSIYVQK

SEQ ID NO: 28607 - protein, 483 aa, Bacillus sp.
HHNGTNGTMMQYFEWYLPNDGNHWNRLNSDASNLKSKGITAVWIPPAWKGASQNDVGYGAYDLYDLGEFNQKGTVRTKYGTRSQLQAAVTSLKNNGIQVYGDVVMNHKGGADATEMVRAVEVNPNNRNQEVTGEYTIEAWTRFDFPGRGNTHSSFKWRWYHFDGVDWDQSRRLSNRIYKFRGKAWDWEVDTEFGNYDYLMYTDYDMDHPEVVNELRNWGVWYTNTLGLDGFRIDAVKHIKYSFTRDWINHVRSATGKNMFAVAEFWKNDLGAIENYLQKTNWNHSVFDVPLHYNLYNASKSGGNYDMRNIFNGTVVQRHPSHAVTFVDNHDSQPEEALESFVEEWFKPLAYALTLTREQGYPSVFYGDYYGIPTHGVPAMRSKIDPILEARQKYAYGPQHDYLDHPDVIGWTREGDSSHPKSGLATLITDGPGGSKRMYAGLKNAGETWYDITGNRSDTVKIGSDGWGEFHVNDGSVSIYVQK

SEQ ID NO: 28608 - protein, 483 aa, Bacillus sp.
HHNGTNGTMMQYFEWYLPNDGNHWNRLNSDASNLKSKGITAVWIPPAWKGASQNDVGYGAYDLYDLGEFNQKGTVRTKYGTRSQLQAAVTSLKNNGIQVYGDVVMNHKGGADATEMVRAVEVNPNNRNQEVTGEYTIEAWTRFDFPGRGNTHSSFKWRWYHFDGVDWDQSRRLNNRIYKFRGKAWDWEVDTENGNYDYLMYADIDYDYPEVVNELRIWGVWYTNTLGLDGFRIDAVKHIKYSFTRDWINHVRSATGKNMFAVAEFWKNDLGAIENYLQKTNWNHSVFDVPLHYNLYNASKSGGNYDMRNIFNGTVVQRHPSHAVTFVDNHDSQPEEALESFVEEWFKPLAYALTLTREQGYPSVFYGDYYGIPTHGVPAMRSKIDPILEARQKYAYGPQHDYLDHPDVIGWTREGDSSHPKSGLATLITDGPGGSKRMYAGLKNAGETWYDITGNRSDTVKIGSDGWGEFHVNDGSVSIYVQK

SEQ ID NO: 28609 - protein, 483 aa, Bacillus sp.
HHNGTNGTMMQYFEWYLPNDGNHWNRLNSDASNLKSKGITAVWIPPAWKGASQNDVGYGAYDLYDLGEFNQKGTVRTKYGTRSQLQAAVTSLKNNGIQVYGDVVMNHKGGADATEMVRAVEVNPNNRNQEVTGEYTIEAWTRFDFPGRGNTHSSFKWRWYHFDGVDWDQSRRLNNRIYKFRGKAWDWEVDTEFGNYDYLMYADYDMDHPEVVNELRNWGVWYTNTLGLDGFRIDAVKHIKGSFTRDWINHVRSATGKNMFAVAEFWKNDLGAIENYLQKTNWNHSVFDVPLHYNLYNASKSGGNYDMRNIFNGTVVQRHPSHAVTFVDNHDSQPEEALESFVEEWFKPLAYALTLTREQGYPSVFYGDYYGIPTHGVPAMRSKIDPILEARQKYAYGPQHDYLDHPDVIGWTREGDSSHPKSGLATLITDGPGGSKRMYAGLKNAGETWYDITGNRSDTVKIGSDGWGEFHVNDGSVSIYVQK

SEQ ID NO: 28610 - protein, 483 aa, Bacillus sp.
HHNGTNGTMMQYFEWYLPNDGNHWNRLNSDASNLKSKGITAVWIPPAWKGASQNDVGYGAYDLYDLGEFNQKGTVRTKYGTRSQLQAAVTSLKNNGIQVYGDVVMNHKGGADATEMVRAVEVNPNNRNQEVTGEYTIEAWTRFDFPGRGNTHSSFKWRWYHFDGVDWDQSRRLNNRIYKFRGKAWDWEVDTEFGNYDYLMYADYDMDHPEVVNELRNWGVWYTNTLGLDGFRIDAVKHIKYSFTRDWINHVRSATGKNMFAVAEFWKNDLGAIENYLQKTNWNHSVFDVPLHYNLYNASKSGGNYDMRNIFNGTVVQRVPSHAVTFVDNHDSQPEEALESFVEEWFKPLAYALTLTREQGYPSVFYGDYYGIPTHGVPAMRSKIDPILEARQKYAYGPQHDYLDHPDVIGWTREGDSSHPKSGLATLITDGPGGSKRMYAGLKNAGETWYDITGNRSDTVKIGSDGWGEFHVNDGSVSIYVQK

SEQ ID NO: 28611 - protein, 485 aa, Bacillus sp.
HHNGTNGTMMQYFEWYLPNDGNHWNRLNSDASNLKSKGITAVWIPPAWKGASQNDVGYGAYDLYDLGEFNQKGTVRTKYGTRSQLQAAVTSLKNNGILVYGDVVMNHKGGADATEMVRAVEVNPNNRNQEVTGEYTIEAWTRFDFPGRGNTHSSFKWRWYHFDGVDWDQSRRLNNRIYKFRGHGKAWDWEVDTEFGNYDYLMYADYDMDHPEVVNELRNWGVWYTNTLGLDGFRIDAVKHIKYSFTRDWINHVRSATGKNMFAVAEFWKNDLGAIENYLQKTNWNHSVFDVPLHYNLYNASKSGGNYDMRNIFNGTVVQRHPSHAVTFVDNHDSQPEEALESFVEEWFKPLAYALTLTREQGYPSVFYGDYYGIPTHGVPAMRSKIDPILEARQKYAYGPQHDYLDHPDVIGWTREGDSSHPKSGLATLITDGPGGSKRMYAGLKNAGETWYDITGNRSDTVKIGSDGWGEFHVNDGSVSIYVQK

SEQ ID NO: 28612 - protein, 483 aa, Bacillus sp.
HHNGTNGTMMQYFEWYLPNDGNHWNRLNSDASNLKSKGITAVWIPPAWKGASQNDVGYGAYDVYDLGEFNQKGTVRTKYGTRSQLQAAVTSLKNNGIQVYGDVVMNHKGGADATEMVRAVEVNPNNRNQEVTGEYTIEAWTRFDFPGRGNTHSSFKWRWYHFDGVDWDQSRRLNNRIYKFRGKAWDWEVDTENGNYDYLMYADIDYDHPEVVNELRIWGVWYTNTLGLDGFRIDAVKHIKYSFTRDWINHVRSATGKNMFAVAEFWKNDLGAIENYLQKTNWNHSVFDVPLHYNLYNASKSGGNYDMRNIFNGTVVQRHPSHAVTFVDNHDSQPEEALESFVEEWFKPLAYALTLTREQGYPSVFYGDYYGIPTHGVPAMRSKIDPILEARQKYAYGPQHDYLDHPDVIGWTREGDSSHPKSGLATLITDGPGGSKRMYAGLKNAGETWYDITGNRSDTVKIGSDGWGEFHVNDGSVSIYVQK

SEQ ID NO: 28613 - protein, 485 aa, Bacillus sp.
HHNGTNGTMMQYFEWYLPNDGNHWNRLNSDASNLKSKGITAVWIPPAWKGASQNDVGYGAYDLYDLGEFNQKGTVRTKYGTRSQLQAAVTSLKNNGIQVYGDVVMNHKGGADATEMVRAVEVNPNNRNQEVTGEYTIEAWTRFDFPGRGNTHSSFKWRWYHFDGVDWDQSRRLNNRIYKFRGHGKAWDWEVDTEFGNYDYLMYADYDMDHPEVVNELRNWGVWYTNTLGLDGFRIDAVKHIKYSFTRDWINHVRSATGKNMFAVAEFWKNDLGAIENYLQKTNWNHSVFDVPLHYNLYNASKGGGNYDMRNIFNGTVVQRHPSHAVTFVDNHDSQPEEALESFVEEWFKPLAYALTLTREQGYPSVFYGDYYGIPTHGVPAMRSKIDPILEARQKYAYGPQHDYLDHPDVIGWTREGDSSHPKSGLATLITDGPGGSKRMYAGLKNAGETWYDITGNRSDTVKIGSDGWGEFHVNDGSVSIYVQK

SEQ ID NO: 28614 - protein, 483 aa, Bacillus sp.
HHNGTNGTMMQYFEWYLPNDGNHWNRLNSDASNLKSKGITAVWIPPAWKGASQNDVGYGAYDLYDLGEFNQKGTVRTKYGTRSQLQAAVTSLKNNGIQVYGDVVMNHKGGADATEMVRAVEVNPNNRNQEVTGEYTIEAWTRFDFPGRGNTHSSFKWRWYHFDGVDWDQSRRLNNRIYKFRGKAWDWEVDTEFGNYDYLMYADYDMDHPEVVNELRNWGVWYTNTLGLDGFRIDAVKHIKYSFTRDWINHVRSATGKNMFAVAEFWKNDLGAIENYLQKTNWNHSVFDVPLHYNLYNASKSGGNYDMRNIFNGTVVQRHPSHAVTFVDNHDSQPEEALESFVEEWFKPWAYALTLTREQGYPSVFYGDYYGIPTHGVPAMRSKIDPILEARQKYAYGPQHDYLDHPDVIGWTREGDSSHPKSGLATLITDGPGGSKRMYAGLKNAGETWYDITGNRSDTVKIGSDGWGEFHVNDGSVSIYVQK

SEQ ID NO: 28615 - protein, 485 aa, Bacillus sp.
HHNGTNGTMMQYFEWYLPNDGNHWNRLNSDASNLKSKGITAVWIPPAWKGASQNDVGYGAYDLYDLGEFNQKGTVRTKYGTRSQLQAAVTSLKNNGIQVYGDVVMNHKGGADATEMVRAVEVNPNNRNQEVTGEYTIEAWTRFDFPGRGNTHSSFKWRWYHFDGVDWDQSRRLNNRIYKFRGHGKAWDWEVDTEFGNYDYLMYADYDWDHPEVVNELRNWGVWYTNTLGLDGFRIDAVKHIKYSFTRDWINHVRSATGKNMFAVAEFWKNDLGAIENYLQKTNWNHSVFDVPLHYNLYNASKSGGNYDMRNIFNGTVVQRHPSHAVTFVDNHDSQPEEALESFVEEWFKPLAYALTLTREQGYPSVFYGDYYGIPTHGVPAMRSKIDPILEARQKYAYGPQHDYLDHPDVIGWTREGDSSHPKSGLATLITDGPGGSKRMYAGLKNAGETWYDITGNRSDTVKIGSDGWGEFHVNDGSVSIYVQK

SEQ ID NO: 28616 - protein, 483 aa, Bacillus sp.
HHNGTNGTMMQYFEWYLPNDGNHWNRLNSDASNLKSKGITAVWIPPAWKGASQNDVGYGAYDLYDLGEFNQKGTVRTKYGTRSQLQAAVTSLKNNGIQVYGDVVMNHKGGADATEMVRAVEVNPNNRNQEVTGEYTIEAWTRFDFPGRGNTHSSFKWRWYHFDGVDWDQSRRLNNRIYKFRGKAWDWEVETEFGNYDYLMYADYDMDHPEVVNELRNWGVWYTNTLGLDGFRIDAVKHIKYSFTRDWINHVRSATGKNMFAVAEFWKNDLGAIENYLSKTNWNHSVFDVPLHYNLYNASKSGGNYDMRNIFNGTVVQRHPSHAVTFVDNHDSQPEEALESFVEEWFKPLAYALTLTREQGYPSVFYGDYYGIPTHGVPAMRSKIDPILEARQKYAYGPQHDYLDHPDVIGWTREGDSSHPKSGLATLITDGPGGSKRMYAGLKNAGETWYDITGNRSDTVKIGSDGWGEFHVNDGSVSIYVQK

SEQ ID NO: 28617 - protein, 483 aa, Bacillus sp.
HHNGTNGTMMQYFEWYLPNDGNHWNRLNSDASNLKSKGITAVWIPPAWKGASQNDVGYGAYDLYDLGEFNQKGTVRTKYGTRSQLQAAVTSLKNNGIQVYGDVVMNHKGGADATEMVRAVEVNPNNRNQEVTGEYTIEAWTRFDFPGRGNTHSSFKWRWYHFDGVDWDQSRRLNNRIYKFRGKAWDWEVDTEFGNYDYLMYADYDMDHPEVVNEFRNWGVWYTNTLGLDGFRIDAVKHIKYSFTRDWINHVRSATGKNMFAVAEFWKNDLGAIENYLQKTNWNHSVFDVPLHYNLYNASKSGGNYDMRNIFNGTVVQRHPSHAVTFVDNHDSQPEEALESFVEEWFKPLAYALTLTREQGYPSVFYGDYYGIPTHGVPAMRSKIDPILEARQKYAYGPQHDYLDHPDVIGWTREGDSSHPKSGLATLITDGPGGSKRMYAGLKNAGETWYDITGNRSDTVKIGSDGWGEFHVNDGSVSIYVQK

SEQ ID NO: 28618 - protein, 485 aa, Bacillus sp.
HHNGTNGTMMQYFEWYLPNDGNHWNRLNSDASNLKSKGIKAVWIPPAWKAASQNDVGYGAYDLYDLGEFNQKGTVRTKYGTRSQLQAAVTSLKNNGIQVYGDVVMNHKGGADATEMVRAVEVNPNNRNQEVTGEYTIEAWTRFDFPGRGNTHSSFKWRWYHFDGVDWDQSRQLNNRIYKFRGHGKAWDWEVDTEFGNYDYLMYADYDMDHPEVVNELRNWGVWYTNTLGLDGFRIDAVKHIKYSFTRDWINHVRSATGKNMFAVAEFWKNDLGAIENYLQKTNWNHSVFDVPLHYNLYNASKSGGNYDMRNIFNGTVVQRHPSHAVTFVDNHDSQPEEALESFVEEWFKPLAYALTLTREQGYPSVFYGDYYGIPTHGVPAMRSKIDPILEARQKYAYGPQHDYLDHPDVIGWTREGDSSHPKSGLATLETDGPGGSKRMYAGLKNAGETWYDITGNRSDTVKIGSDGWGEFHVNDGSVSIYVQK

SEQ ID NO: 28619 - protein, 485 aa, Bacillus sp.
HHNGTNGTMMQYFEWYLPNDGNHWNRLNSDASNLKSKGITAVWIPPAWKGASQNDVGYGAYDLYDLGEFNQKGTVRTKYGTRSQLQAAVTSLKNNGIQVYGDVVMNHKGGADATEMVRAVEVNPNNRNQEVTGEYTIEAWTRFDFPGRGNTHSSFKWRWYHFDGVDWDQSRRLNNRIYKFRGHGKAWDWEVDTEFGNYDYLMYADYDMDHPEVVNELRNWGVWYTNTLGLDGFRIDAVKHIKYSFTRDWINHVRSATGKNMFAVAEFWKNDLGAIENYLQKTNWNHSVFDVPLHYNLYNASKSGGNYDMRNIFNGTVVQRHPSHAVTFVDNHDSQPEEALESFVEEWFKPLAYALTLTREQGYPSVFYGDYYGIPTHGVPAMRSKIDPILEARQKYAYGPQHDYLDHPDVIGWTREGDSSHPKSGLATLITDGPGGSKRMYAGLKNAGETWYDITGNRSDTVKTGSDGWGEFHVNDGSVSIYVQK

SEQ ID NO: 28620 - protein, 483 aa, Bacillus sp.
HHNGTNGTMMQYFEWYLPNDGNHWNRLNSDASNLKSKGITAVWIPPAWKAASQNDVGYGAYDLYDLGEFNQKGTVRTKYGTRSQLQAAVTSLKNNGIQVYGDVVMNHKGGADATEMVRAVEVNPNNRNQEVTGEYTIEAWTRFDFPGRGNTHSSFKWRWYHFDGVDWDQSRDLQNRIYKFRGKAWDWEVDTEFGNYDYLMYVDYDMDHPEVVNELRNWGVWYTNTLGLDGFRIDAVKHIKYSFTRDWINHVRSATGKNMFAVAEFWKNDLGAIENYLQKTNWNHSVFDVPLHYNLYNASKSGGNYDMRNIFNGTVVQRHPSHAVTFVDNHDSQPEEALESFVDPWFKPLAYALTLTREQGYPSVFYGDYYGIPTHGVPAMRSKIDPILEARQKYAYGPQHDYLDHPDVIGWTREGDSSHPKSGLATLITDGPGGSKRMYAGLKNAGETWYDITGNRSDTVKIGSDGWGEFHVNGGSVSIYVQK

SEQ ID NO: 28621 - protein, 483 aa, Bacillus sp.
HHNGTNGTMMQYFEWYLPNDGNHWNRLNSDASNLKSKGITAVWIPPAWKGASQNDVGYGAYDLYDLGEFNQKGTVRTKYGTRSQLQAAVTSLKNNGIQVYGDVVMNHKGGADATEMVRAVEVNPNNRNQEVTGEYTIEAWTRFDFPGRGNTHSSFKWRWYHFDGVDWDQSRNVNNRIYKFRGKAWDWEVDTEFGNYDYLMYADYDMDHPEVVNELRNWGVWYTNTLGLDGFRIDAVKHIKYSFTRDWINHVRIATGKNMFAVAEFWKNDLGAIENYLQKTNWNHSVFDVPLHYNLYNASKSGGNYDMRNIFNGTVVQRHPSHAVTFVDNHDSQPEEALESFVDEWFKPLAYALTLTREQGYPSVFYGDYYGIPTHGVPAMRSKIDPILEARQKYAYGPQHDYLDHPDVIGWTREGDSSHPKSGLATLITDGPGGSKRMYAGLKNAGETWYDITGNRSDTVKIGSDGWGEFHVNDQSVSIYVQK

SEQ ID NO: 28622 - protein, 485 aa, Bacillus sp.
HHNGTNGTMMQYFEWYLPNDGNHWNRLNSDASNLKSKGITAVWIPPAWKAASQNDVGYGAYDLYDLGEFNQKGTVRTKYGTRSQLQAAVTSLKNNGIQVYGDVVMNHKGGADATEMVRAVEVNPNNRNQEVTGEYTIEAWTRFDFPGRGNTHSSFKWRWYHFDGVDWDQSRRVSNRIYKFRGHGKAWDWEVDTEFGNYDYLMYADYDMDHPEVVNELRNWGVWYTNTLGLDGFRIDAVKHIKYSFTRDWINHVRSATGKNMFAVAEFWKNDLGAIENYLQKTNWNHSVFDVPLHYNLYNASKSGGNYDMRNIFNGTVVQRHPSHAVTFVDNHDSQPEEALESFVEEWFKPLAYALTLTREQGYPSVFYGDYYGIPTHGVPAMRSKIDPILEARQKYAYGPQHDYLDHPDVIGWTREGDSSHPKSGLATLITDGPGGSKRMYAGLKNAGETWYDITGNRSDTVKIGSDGWGEFHVNDGSVSIYVQK

SEQ ID NO: 28623 - protein, 483 aa, Bacillus sp.
HHNGTNGTMMQYFEWYLPNDGNHWNRLNSDASNLKSKGITAVWIPPAWKGASQNDVGYGAYDLYDLGEFNQKGTVRTKYGTRSQLQAAVTSLKNNGIQVYGDVVMNHKGGADATEMVRAVEVNPNNRNQEVTGEYTIEAWTRFDFPGRGNTHSSFKWRWYHFDGVDWDQSHRLNNRIYKFRGKAWDWEVDTEFGNYDYLMYADYDMDHPEVVNELRNWGVWYTNTLGLDGFRIDAVKHIKYSFTRDWINHVRSATGKNMFAVAEFWKNDLGAIENYLQKTNWNHSVFDVPLHYNLYNASKSGGNYDMRNIFNGTVVQRHPSHAVTFVDNHDSQPEEALESFVEEWFKPLAYALTLTREQGYPSVFYGDYYGIPTHGVPAMRSKIDPILEARQKYAYGPQHDYLDHPDVIGWTREGDSSHPKSGLATLITDGPGGSKRMYAGLKNAGETWYDITGNRSDTVKIGSDGWGEFHVNDGSVSIYVQK

SEQ ID NO: 28624 - protein, 483 aa, Bacillus sp.
HHNGTNGTMMQYFEWYLPNDGNHWNRLNSDASNLKSKGITAVWIPPAWKGASQNDVGYGAYDLYDLGEFNQKGTVRTKYGTRSQLQAAVTSLKNNGIQVYGDVVMNHKGGADATEMVRAVEVNPNNRNQEVTGEYTIEAWTRFDFPGRGNTHSSFKWRWYHFDGVDWDQSRRLNNRIYKFRGKAWDWEVDTEFGNYDYLMYADYDWDHPEVVNELRNWGVWYTNTLGLDGFRIDAVKHIKYSFTRDWINHVRSATGKNMFAVAEFWKNDLGAIENYLQKTNWNHSVFDVPLHYNLYNASKSGGNYDMRNIFNGTVVQRHPSHAVTFVDNHDSQPEEALESFVEEWFKPLAYALTLTREQGYPSVFYGDYYGIPTHGVPAMRSKIDPILEARQKYAYGPQHDYLDHPDVIGWTREGDSSHPKSGLATLITDGPGGSKRMYAGLKNAGETWYDITGNRSDTVKIGSDGWGEFHVNDGSVSIYVQK

SEQ ID NO: 28625 - protein, 483 aa, Bacillus sp.
HHNGTNGTMMQYFEWYLPNDGNHWNRLNSDASNLKSKGITAVWIPPAWKATSQNDVGYGAYDLYDLGEFNQKGTVRTKYGTRSQLQAAVTSLKNNGIQVYGDVVMNHKGGADATEMVRAVEVNPNNRNQEVTGEYTIEAWTRFDFPGRGNTHSSFKWRWYHFDGVDWDQSRNLNNRIYKFRGKAWDWEVDTEFGNYDYLMYTDYDMDHPEVVNELRNWGVWYTNTLGLDGFRIDAVKHIKYSFTRDWINHVRSATGKNMFAVAEFWKNDLGAIENYLQKTNWNHSVFDVPLHYNLYNASKSGGNYDMRNIFNGTVVQRHPSHAVTFVDNHDSQPEEALESFVEEWFKPLAYALTLTREQGYPSVFYGDYYGIPTHGVPAMRSKIDPILEARQKYAYGPQHDYLDHPDVIGWTREGDSSHPKSGLATLITDGPGGSKRMYAGLKNAGETWYDITGNRSDTVKIGSDGWGEFHVNDGSVSIYVQK

SEQ ID NO: 28626 - protein, 485 aa, Bacillus sp.
HHNGTNGTMMQYFEWYLPNDGNHWNRLNSDASNLKSKGITAVWIPPAWKGASQNDVGYGAYDLYDLGEFNQKGTVRTKYGTRSQLQAAVTSLKNNGIQVYGDVVMNHKGGADATEMVRAVEVNPNNRNQEVTGEYTIEAWTRFDFPGRGNTHSSFKWRWYHFDGVDWDQSRRLNNRIYKFRGHGKAWDWEVDTEFGNYDYLMYADYDMDHPEVVNELRNWGVWYTNTLGLDGFRIDAVKHIKYSFTRDWINHVRSATGKNMFAVAEFWKNDLGAIENYLQKTNWNHSVFDVPLHYNLYNASKSGGNYDMRNIFNGTVVQRHPSHAVTFVDNHDSQPEEALESFVEEWFKPLAYALTLTREQGYPSVFYGDYYGIPTHGVPAMRSKIDPILEARQKYAYGPQHDYLDHPDVIGWTREGDSSHPKSGLATLITDGPGGSKRMYAGLKNAGETWYDITGTRSDTVKIGSDGWGEFHVNDGSVSIYVQK

SEQ ID NO: 28627 - protein, 485 aa, Bacillus sp.
HHNGTNGTMMQYFEWYLPNDGNHWNRLNSDASNLKSKGITAVWIPPAWKAASQNDVGYGAYDLYDLGEFNQKGTVRTKYGTRSQLQAAVTSLKNNGIQVYGDVVMNHKGGADATEMVRAVEVNPNNRNQEVTGEYTIEAWTRFDFPGRGNTHSSFKWRWYHFDGVDWDQSRDLDNRIYKFRGHGKAWDWEVDTEFGNYDYLMYADYDMDHPEVVNELRNWGVWYTNTLGLDGFRIDAVKHIKYSFTRDWINHVRSATGKNMFAVAEFWKNDLGAIENYLQKTNWNHSVFDVPLHYNLYNASKSGGNYDMRNIFNGTVVQVHPSHAVTFVDNHDSQPEEALESFVEEWFKPLAYALTLTREQGYPSVFYGDYYGIPTHGVPAMRSKIDPILEARQKYAYGPQHDYLDHPDVIGWTREGDSSHPKSGLATLITDGPGGSKRMYAGLKNAGETWYDITGNRSDTVKIGSDGWGEFHVNYGSVSIYVQK

SEQ ID NO: 28628 - protein, 483 aa, Bacillus sp.
HHNGTNLTMMQYFEWYLPNDGNHWNRLNSDASNLKSKGITAVWIPPAWKGASQNDVGYGAYDLYDLGEFNQKGTVRTKYGTRSQLQAAVTSLKNNGIAVYGDVVMNHKGGADATEMVRAVEVNPNNRNQEVTGEYTIEAWTRFDFPGRGNTHSSFKWRWYHFDGVDWDQSRRLNNRIYKFRGKAWDWEVDTEFGNYDYLMYADYDMDHPEVVNELRNWGVWYTNTLGLDGFRIDAVKHIKYSFTRDWINHVRSATGKNMFAVAEFWKNDLGAIENYLQKTNWNHSVFDVPLHYNLYNASKSGGNYDMRNIFNGTVVQAHPMHAVTFVDNHDSQPEEALESFVEEWFKPLAYALTLTREQGYPSVFYGDYYGIPTHGVPAMRSKIDPILEARQKYAYGPQHDYLDHPDVIGWTREGDSSHPKSGLATLITDGPGGSKRMYAGLKNAGETWYDITGNRSDTVKIGSDGWGEFHVNDGSVSIYVQK

SEQ ID NO: 28629 - protein, 483 aa, Bacillus sp.
HHNGTNGTMMQYFEWYLPNDGNHWNRLNSDASNLKSKGITAVWIPPAWKGASQNDVGYGAYDLYDLGEFNQKGTVRTKYGTRSQLQAAVTSLKNNGIQVYGDVVMNHKGGADATEMVRAVEVNPNNRNQEVTGEYTIEAWTRFDFPGRGNTHSSFKWRWYHFDGVDWDQSRRLNNRIYKFRGKAWDWEVDTEFGNYDYLMYADYDMDHPEVVNELRNWGVWYTNTLGLDGFRIDAVKHIKYSFTRDWINHVRSATGKNMFAVAEFWKNDLGAIENYLQKTNWNHSVFDVPLHYNLYNASKSGGNYDMRNIFNGTVVQRHPSHAVTFVDNHDSQPEEALESFVDTWFKPLAYALTLTREQGYPSVFYGDYYGIPTHGVPAMRSKIDPILEARQKYAYGPQHDYLDHPDVIGWTREGDSSHPKSGLATLITDGPGGSKRMYAGLKNAGETWYDITGNRSDTVKIGSDGWGEFHVNGKSVSIYVQK

SEQ ID NO: 28630 - protein, 483 aa, Bacillus sp.
HHNGTNGTMMQYFEWYLPNDGNHWNRLNSDASNLKSKGITAVWIPPAWKATSQNDVGYGAYDLYDLGEFNQKGTVRTKYGTRSQLQAAVTSLKNNGIQVYGDVVMNHKGGADATEMVDAVEVNPNNRNQEVTGEYTIEAWTRFDFPGRGNTHSSFKWRWYHFDGVDFDQSRNVNNRIYKFRGKAWDWEVDTEFGNYDYLMYADYDMDHPEVVNELRNWGVWYTNTLGLDGFRIDAVKHIKYSFTRDWINHVRSATGKNMFAVAEFWKNDLGAIENYLQKTNWNHSVFDVPLHYNLYNASKSGGNYDMRNIFNGTVVQRHPSHAVTFVDNHDSQPEEALESFVEEWFKPLAYALTLTREQGYPSVFYGDYYGIPTHGVPAMRSKIDPILEARQKYAYGPQHDYLDHPDVIGWTREGDSSHPKSGLATLITDGPGGSKRMYAGLKNAGETWYDITGNRSDTVKIGSDGWGEFHVNDGSVSIYVQK

SEQ ID NO: 28631 - protein, 485 aa, Bacillus sp.
HHNGTNGTMMQYFEWYLPNDGNHWNRLNSDASNLKSKGITAVWIPPAWKGASQNDVGYGAYDLYDLGEFNQKGTVRTKYGTRSQLQAAVTSLKNNGIQVYGDVVMNHKGGADATEMVRAVEVNPNNRNQEVTGEYTIEAWTRFDFPGRGNTHSSFKWRWYHFDGVDWDQSRRLNNRIYKFRGHGKAWDWEVDTEFGNYDYLMYADYDMDHPEVVNELRNWGVWYTNTLGLDGFRIDAVKHIKYSFTRDWINHVRSATGKNMFAVAEFWKNDLGCIENYLQKTNWNHSVFDVPLHYNLYNASKSGGNYDMRNIFNGTVVQRHPSHAVTFVDNHDSQPEEALESFVEEWFKPLAYALTLTREQGYPSVFYGDYYGIPTHGVPAMRSKIDPILEARQKYAYGPQHDYLDHPDVIGWTREGDSSHPKSGLATLITDGPGGSKRMYAGLKNAGETWYDITGNRSDTVKIGSDGWGEFHVNDGSVSIYVQK

SEQ ID NO: 28632 - protein, 483 aa, Bacillus sp.
HHNGTNGTMMQYFEWYLPNDGNHWNRLNSDASNLKSKGITAVWIPPAWKGASQNDVGYGAYDLYDLGEFNQKGTVRTKYGTRSQLQAAVTSLKNNGIQVYGDVVMNHKGGADATEMVSAVEVNPNNRNQEVTGEYTIEAWTRFDFPGRGNTHSSFKWRWYHFDGVDWDQSRRLNNRIYKFRAKAWDWEVDKEFGNYDYLMYADYDMDHPEVVNELRNWGVWYTNTLGLDGFRIDAVKHIKYSFTRDWINHVRSATGKNMFAVAEFWKNDLGAIENYLQKTNWNHSVFDVPLHYNLYNASKSGGNYDMRNIFNGTVVQRHPSHAVTFVDNHDSQPEEALESFVEEWFKPLAYALTLTREQGYPSVFYGDYYGIPTHGVPAMRSKIDPILEARQKYAYGPQHDYLDHPDVIGWTREGDSSHPKSGLATLITDGPGGSKRMYAGLKNAGETWYDITGNRSDTVKIGSDGWGEFHVNDGSVSIYVQK

SEQ ID NO: 28633 - protein, 483 aa, Bacillus sp.
HHNGTNGTMMQYFEWYLPNDGNHWNRLNSDASNLKSKGIKAVWIPPAWKAASQNDVGYGAYDLYDLGEFNQKGTVRTKYGTRSQLQAAVTSLKNNGIQVYGDVVMNHKGGADATEMVRAVEVNPNNRNQEVTGEYTIEAWTRFDFPGRGNTHSSFKWRWYHFDGVDWDQSRQLNNRIYKFRGKAWDWEVDTEFGNYDYLMYADYDMDHPEVVNELRNWGVWYTNTLGLDGFRIDAVKHIKYSFTRDWINHVRSATGKNMFAVAEFWKNDLGAIENYLQKTNWNHSVFDVPLHYNLYNASKSGGNYDMRNIFNGTVVQRHPSHAVTFVDNHDSQPEEALESFVEEWFKPLAYALTLTREQGYPSVFYGDYYGIPTHGVPAMRSKIDPILEARQKYAYGPQHDYLDHPDVIGWTREGDSSHPKSGLATLETDGPGGSKRMYAGLKNAGETWYDITGNRSDTVKIGSDGWGEFHVNDGSVSIYVQK

SEQ ID NO: 28634 - protein, 485 aa, Bacillus sp.
HHNGTNGTMMQYFEWYLPNDGNHWNRLNSDASNLKSKGITAVWIPPAWKGASQNDVGYGAYDLYDLGEFNQKGTVRTKYGTRSQLQAAVTSLKNNGIQVYGDVVMNHKGGADATEMVRAVEVNPNNRNQEVTGEYTIEAWTRFDFPGRGNTHSSFKWRWYHFDGVDWDQSRRLNNRIYKFRGHGKAWDWEVDTEFGNYDYLMYADYDMDHPEVVNEMRNWGVWYTNTLGLDGFRIDAVKHIKYSFTRDWINHVRSATGKNMFAVAEFWKNDLGAIENYLQKTNWNHSVFDVPLHYNLYNASKSGGNYDMRNIFNGTVVQRHPSHAVTFVDNHDSQPEEALESFVEEWFKPLAYALTLTREQGYPSVFYGDYYGIPTHGVPAMRSKIDPILEARQKYAYGPQHDYLDHPDVIGWTREGDSSHPKSGLATLITDGPGGSKRMYAGLKNAGETWYDITGNRSDTVKIGSDGWGEFHVNDGSVSIYVQK

SEQ ID NO: 28635 - protein, 485 aa, Bacillus sp.
HHNGTNGTMMQYFEWYLPNDGNHWNRLNSDASNLKSKGITAVWIPPAWKGASQNDVGYGAYDLYDLGEFNQKGTVRTKYGTRSQLQAAVTSLKNNGIQVYGDVVMNHKGGADATEMVRAVEVNPNNRNQEVTGEYTIEAWTRFDFPGRGNTHSSFKWRWYHFDGVDWDQSRRTNNRIYKFRGHGKAWDWEVDTEFGNYDYLMYTDYDMDHPEVVNELRNWGVWYTNTLGLDGFRIDAVKHIKYSFTRDWINHVRSATGKNMFAVAEFWKNDLGAIENYLQKTNWNHSVFDVPLHYNLYNASKSGGNYDMRNIFNGTVVQVHPSHAVTFVDNHDSQPEEALESFVEEWFKPLAYALTLTREQGYPSVFYGDYYGIPTHGVPAMRSKIDPILEARQKYAYGPQHDYLDHPDVIGWTREGDSSHPKSGLATLITDGPGGSKRMYAGLKNAGETWYDITGNRSDTVKIGSDGWGEFHVNYGSVSIYVQK

SEQ ID NO: 28636 - protein, 485 aa, Bacillus sp.
HHNGTNGTMMQYFEWYLPNDGNHWNRLNSDASNLKSKGITAVWIPPAWKAVSQNDVGYGAYDLYDLGEFNQKGTVRTKYGTRSQLQAAVTSLKNNGIQVYGDVVMNHKGGADATEMVRAVEVNPNNRNQEVTGEYTIEAWTRFDFPGRGNTHSSFKWRWYHFDGVDWDQSRQLNNRIYKFRGHGKAWDWEVDTEFGNYDYLMYVDYDMDHPEVVNELRNWGVWYTNTLGLDGFRIDAVKHIKYSFTRDWINHVRSATGKNMFAVAEFWKNDLGAIENYLQKTNWNHSVFDVPLHYNLYNASKSGGNYDMRNIFNGTVVQRHPSHAVTFVDNHDSQPEEALESFVEEWFKPLAYALTLTREQGYPSVFYGDYYGIPTHGVPAMRSKIDPILEARQKYAYGPQHDYLDHPDVIGWTREGDSSHPKSGLATLITDGPGGSKRMYAGLKNAGETWYDITGNRSDTVKIGSDGWGEFHVNDGSVSIYVQK

SEQ ID NO: 28637 - protein, 485 aa, Bacillus sp.
HHNGTNGTMMQYFEWYLPNDGNHWNRLNSDASNLKSKGITAVWIPPAWKAVSQNDVGYGAYDLYDLGEFNQKGTVRTKYGTRSQLQAAVTSLKNNGIQVYGDVVMNHKGGADATEMVRAVEVNPNNRNQEVTGEYTIEAWTRFDFPGRGNTHSSFKWRWYHFDGVDWDQSRDLENRIYKFRGHGKAWDWEVDTEFGNYDYLMYADYDMDHPEVVNELRNWGVWYTNTLGLDGFRIDAVKHIKYSFTRDWINHVRSATGKNMFAVAEFWKNDLGAIENYLQKTNWNHSVFDVPLHYNLYNASKSGGNYDMRNIFNGTVVQRHPSHAVTFVDNHDSQPEEALESFVEEWFKPLAYALTLTREQGYPSVFYGDYYGIPTHGVPAMRSKIDPILEARQKYAYGPQHDYLDHPDVIGWTREGDSSHPKSGLATLITDGPGGSKRMYAGLKNAGETWYDITGNRSDTVKIGSDGWGEFHVNDGSVSIYVQK

SEQ ID NO: 28638 - protein, 483 aa, Bacillus sp.
HHNGTNGTMMQYFEWYLPNDGNHWNRLNSDASNLKSKGITAVWIPPAWKAVSQNDVGYGAYDLYDLGEFNQKGTVRTKYGTRSQLQAAVTSLKNNGIQVYGDVVMNHKGGADATEMVRAVEVNPNNRNQEVTGEYTIEAWTRFDFPGRGNTHSSFKWRWYHFDGVDWDQSRELSNRIYKFRGKAWDWEVDTEFGNYDYLMYADYDMDHPEVVNELRNWGVWYTNTLGLDGFRIDAVKHIKYSFTRDWINHVRSATGKNMFAVAEFWKNDLGAIENYLQKTNWNHSVFDVPLHYNLYNASKSGGNYDMRNIFNGTVVQRHPSHAVTFVDNHDSQPEEALESFVEEWFKPLAYALTLTREQGYPSVFYGDYYGIPTHGVPAMRSKIDPILEARQKYAYGPQHDYLDHPDVIGWTREGDSSHPKSGLATLITDGPGGSKRMYAGLKNAGETWYDITGNRSDTVKIGSDGWGEFHVNDGSVSIYVQK

SEQ ID NO: 28639 - protein, 485 aa, Synthetic construct
HHNGTNGTMMQYFEWYLPNDGNHWNRLNSDASNLKSKGITAVWIPPAWKGASQNDVGYGAYDLYDLGEFNQKGTVRTKYGTRSQLQAAVTSLKNNGIQVYGDVVMNHKGGADATEMVRAVEVNPNNRNQEVTGEYTIEAWTRFDFPGRGNTHSSFKWRWYHFDGVDWDQSRRLNNRIYKFRGHGKAWDWEVDTENGNYDYLMYADNDYDHPEVVNEMRNWGVWYTNTLGLDGFRIDAVKHIKYSFTRDWINHVRSATGKNMFAVAEFWKNDLGAIENYLQKTNWNHSVFDVPLHYNLYNASKSGGNYDMRNIFNGTVVQRHPSHAVTFVDNHDSQPEEALESFVEEWFKPLAYALTLTREQGYPSVFYGDYYGIPTHGVPAMRSKIDPILEARQKYAYGPQHDYLDHPDVIGWTREGDSSHPKSGLATLITDGPGGSKRMYAGLKNAGETWYDITGNRSDTVKIGSDGWGEFHVNDGSVSIYVQK

SEQ ID NO: 28640 - protein, 485 aa, Bacillus sp.
HHNGTNLTMMQYFEWYLPNDGNHWNRLNSDASNLKSKGITAVWIPPAWKGASQNDVGYGAYDLYDLGEFNQKGTVRTKYGTRSQLQAAVTSLKNNGIAVYGDVVMNHKGGADATEMVRAVEVNPNNRNQEVTGEYTIEAWTRFDFPGRGNTHSSFKWRWYHFDGVDWDQSRRLNNRIYKFRGHGKAWDWEVDTEFGNYDYLMYADYDMDHPEVVNELRNWGVWYTNTLGLDGFRIDAVKHIKYSFTRDWINHVRSATGKNMFAVAEFWKNDLGAIENYLQKTNWNHSVFDVPLHYNLYNASKSGGNYDMRNIFNGTVVQAHPMHAVTFVDNHDSQPEEALESFVEEWFKPLAYALTLTREQGYPSVFYGDYYGIPTHGVPAMRSKIDPILEARQKYAYGPQHDYLDHPDVIGWTREGDSSHPKSGLATLITDGPGGSKRMYAGLKNAGETWYDITGNRSDTVKIGSDGWGEFHVNDGSVSIYVQK

SEQ ID NO: 28641 - protein, 483 aa, Bacillus sp.
HHNGTNGTMMQYFEWYLPNDGNHWNRLNSDASNLKSKGITAVWIPPAWKGASQNDVGYGAYDLYDLGEFNQKGTVRTKYGTRSQLQAAVTSLKNNGIQVYGDVVMNHKGGADATEMVRAVEVNPNNRNQEVTGEYTIEAWTRFDFPGRGNTHSSFKWRWYHFDGVDWDQSRNVNNRIYKFRGKAWDWEVDTEFGNYDYLMYADYDMDHPEVVNELRNWGVWYTNTLGLDGFRIDAVKHIKYSFTRDWINHVRSATGKNMFAVAEFWKNDLGAIENYLQKTNWNHSVFDVPLHYNLYNASKSGGNYDMRNIFNGTVVQRHPSHAVTFVDNHDSQPEEALESFVDEWFKPLAYALTLTREQGYPSVFYGDYYGIPTHGVPAMRSKIDPILEARQKYAYGPQHDYLDHPDVIGWTREGDSSHPKSGLATLITDGPGGSKRMYAGLKNAGETWYDITGNRSDTVKIGSDGWGEFHVNKSSVSIYVQK

SEQ ID NO: 28642 - protein, 483 aa, Bacillus sp.
HHNGTNGTMMQYFEWYLPNDGNHWNRLNSDASNLKSKGITAVWIPPAWKGASQNDVGYGAYDLYDLGEFNQKGTVRTKYGTRSQLQAAVTSLKNNGIQVYGDVVMNHKGGADYTEMVRAVEVNPNNRNQEVTGEYTIEAWTRFDFPGRGNTHSSFKWRWYHFDGVDWDQSRRLNNRIYKFRGKAWDWEVDTEFGNYDYLMYADYDMDHPEVVNELRNWGVWYTNTLGLDGFRIDAVKHIKYSFTRDWINHVRSATGKNMFAVAEFWKNDLGAIENYLQKTNWNHSVFDVPLHYNLYNASKSGGNYDMRNIFNGTVVQRHPSHAVTFVDNHDSQPEEALESFVEEWFKPLAYALTLTREQGYPSVFYGDYYGIPTHGVPAMRSKIDPILEARQKYAYGPQHDYLDHPDVIGWTREGDSSHPKSGLATLITDGPGGSKRMYAGLKNAGETWYDITGNRSDTVKIGSDGWGEFHVNDGSVSIYVQK

SEQ ID NO: 28643 - protein, 485 aa, Bacillus sp.
HHNGTNGTMMQYFEWYLPNDGNHWNRLNSDASNLKSKGITAVWIPPAWKGASQNDVGYGAYDLYDLGEFNQKGTVRTKYGTRSQLQAAVTSLKNNGIQVYGDVVMNHKGGADATEMVRAVEVNPNNRNQEVTGEYTIEAWTRFDFPGRGNTHSSFKWRWYHFDGVDWDQSRRLNNRIYKFRGHGKEWDWEVDTEFGNYDYLMYADYDMDHPEVVNELRNWGVWYTNTLGLDGFRIDAVKHIKYSFTRDWINHVRSATGKNMFAVAEFWKNDLGAIENYLQKTNWNHSVFDVPLHYNLYNASKSGGNYDMRNIFNGTVVQRHPSHAVTFVDNHDSQPEEALESFVEEWFKPLAYALTLTREQGYPSVFYGDYYGIPTHGVPAMRSKIDPILEARQKYAYGPQHDYLDHPDVIGWTREGDSSHPKSGLATLITDGPGGSKRMYAGLKNAGETWYDITGNRSDTVKIGSDGWGEFHVNDGSVSIYVQK

SEQ ID NO: 28644 - protein, 485 aa, Bacillus sp.
HHNGTNGTMMQYFEWYLPNDGNHWNRLNSDASNLKSKGITAVWIPPAWKGASQNDVGYGAYDLYDLGEFNQKGTVRTKYGTRSQLQAAVTSLKNNGIQVYGDVVMNHKGGADATEMVRAVEVNPNNRNQEVTGEYTIEAWTRFDFPGRGNTHSSFKWRWYHFDGVDWDQSREFDNRIYKFRGHGKAWDWEVDTEFGNYDYLMYADYDMDHPEVVNELRNWGVWYTNTLGLDGFRIDAVKHIKYSFTRDWINHVRSATGKNMFAVAEFWKNDLGAIENYLQKTNWNHSVFDVPLHYNLYNASKSGGNYDMRNIFNGTVVQRHPSHAVTFVDNHDSQPEEALESFVETWFKPLAYALTLTREQGYPSVFYGDYYGIPTHGVPAMRSKIDPILEARQKYAYGPQHDYLDHPDVIGWTREGDSSHPKSGLATLITDGPGGSKRMYAGLKNAGETWYDITGNRSDTVKIGSDGWGEFHVNKASVSIYVQK

SEQ ID NO: 28645 - protein, 485 aa, Bacillus sp.
HHNGTNGTMMQYFEWYLPNDGNHWNRLNSDASNLKSKGITAVWIPPAWKGASQNDVGYGAYDLYDLGEFNQKGTVRTKYGTRSQLQAAVTSLKNNGIQVYGDVVMNHKGGADATEMVRAVEVNPNNRNQEVTGEYNIEAWTRFDFPGRGNTHSSFKWRWYHFDGVDWDQSRQLDNRIYKFRGHGKAWDWEVDTEFGNYDYLMYTDYDMDHPEVVNELRNWGVWYTNTLGLDGFRIDAVKHIKYSFTRDWINHVRSATGKNMFAVAEFWKNDLGAIENYLQKTNWNHSVFDVPLHYNLYNASKSGGNYDMRNIFNGTVVQRHPSHAVTFVDNHDSQPEEALESFVEEWFKPLAYALTLTREQGYPSVFYGDYYGIPTHGVPAMRSKIDPILEARQKYAYGPQHDYLDHPDVIGWTREGDSSHPKSGLATLITDGPGGSKRMYAGLKNAGETWYDITGNRSDTVKIGSDGWGEFHVNDGSVSIYVQK

SEQ ID NO: 28646 - protein, 485 aa, Bacillus sp.
HHNGTNGTMMQYFEWYLPNDGNHWNRLNSDASNLKSKGITAVWIPPAWKAASQNDVGYGAYDLYDLGEFNQKGTVRTKYGTRSQLQAAVTSLKNNGIQVYGDVVMNHKGGADATEMVRAVEVNPNNRNQEVTGEYTIEAWTRFDFPGRGNTHSSFKWRWYHFDGVDWDQSRRLQNRIYKFRGHGKAWDWEVDTEFGNYDYLMYTDYDMDHPEVVNELRNWGVWYTNTLGLDGFRIDAVKHIKYSFTRDWINHVRSATGKNMFAVAEFWKNDLGAIENYLQKTNWNHSVFDVPLHYNLYNASKSGGNYDMRNIFNGTVVQRHPSHAVTFVDNHDSQPEEALESFVEEWFKPLAYALTLTREQGYPSVFYGDYYGIPTHGVPAMRSKIDPILEARQKYAYGPQHDYLDHPDVIGWTREGDSSHPKSGLATLITDGPGGSKRMYAGLKNAGETWYDITGNRSDTVKIGSDGWGEFHVNDGSVSIYVQK

SEQ ID NO: 28647 - protein, 483 aa, Bacillus sp.
HHNGTNGTMMQYFEWYLPNDGNHWNRLNSDASNLKSKGITAVWIPPAWKGASQNDVGYGAYDLYDLGEFNQKGTVRTKYGTRSQLQAAVTSLKNNGIQVYGDVVMNHKGGADATEMVRAVEVNPNNRNQEVTGEYTIEAWTRFDFPGRGNTHSSFKWRWYHFDGVDWDQSRRLNNRIYKFRGKAWDWEVDTEFGNYDYLMYADYDMDHPEVVNELRNWGVWYTNTLGLDGFRIDAVKHIKYSFTRDWINHVRSATGKNMFAVAEFWKNDLGAIENYLQKTNWNHSVFDVPLHYNLYNASKSGGNYDMRNIFNGTVVQRHPSHAVTFVDNHDSQPEEALESFVEEWFKPLAYAVTLTREQGYPSVFYGDYYGIPTHGVPAMRSKIDPILEARQKYAYGPQHDYLDHPDVIGWTREGDSSHPKSGLATLITDGPGGSKRMYAGLKNAGETWYDITGNRSDTVKIGSDGWGEFHVNDGSVSIYVQK

SEQ ID NO: 28648 - protein, 483 aa, Bacillus sp.
HHNGTNGTMMQYFEWYLPNDGNHWNRLNSDASNLKSKGITAVWIPPAWKGASQNDVGYGAYDLYDLEEFNQKGTVRTKYGTRSQLQAAVTSLKNNGIQVYGDVVMNHKGGANATEMVRAVEVNPNNRNQEVTGEYTIEAWTRFDFPGRGNTHSSFKWRWYHFDGVDWDQSRDFSNRIYKFRGKAWDWEVDTEFGNYDYLMYADYDMDHPEVVNELRNWGVWYTNTLGLDGFRIDAVKHIKYSFTRDWINHVRSATGKNMFAVAEFWKNDLGAIENYLQKTNWNHSVFDVPLHYNLYNASKSGGNYDMRNIFNGTVVQRHPSHAVTFVDNHDSQPEEALESFVEEWFKPLAYALTLTREQGYPSVFYGDYYGIPTHGVPAMRSKIDPILEARQKYAYGPQHDYLDHPDVIGWTREGDSSHPKSGLATLITDGPGGSKRMYAGLKNAGETWYDITGNRSDTVKIGFDGWGEFHVNDGSVSIYVQK

SEQ ID NO: 28649 - protein, 485 aa, Bacillus sp.
HHNGTNGTMMQYFEWYLPNDGNHWNRLNSDASNLKSKGITAVWIPPAWKGASQNDVGYGAYDLYDLGEFNQKGTVRTKYGTRSQLQAAVTSLKNNGIQVYGDVVMNHKGGADATEMVRAVEVNPNNRNQEVTGEYTIEAWTRFDFPGRGNTHSSFKWRWYHFDGVDWDQSRRLNNRIYKFRGHGKAWDWEVDTEFGNYDYLMYADYDMDHPEVVNELRNWGVWYTNTLGLDGFRIDAVKHIKYSFTRDWINHVRSATGKNMFAVAEFWKNDLGAIENYLQKTNWNHSVFDVPLHYNLYNASKSGGNYDMRNIFNGTVVQRHPSHAVTFVDNHDSQPEEALESFVEEWFKPLAYALTLTRESGYPSVFYGDYYGIPTHGVPAMRSKIDPILEARQKYAYGPQHDYLDHPDVIGWTREGDSSHPKSGLATLITDGPGGSKRMYAGLKNAGETWYDITGNRSDTVKIGSDGWGEFHVNDGSVSIYVQK

SEQ ID NO: 28650 - protein, 485 aa, Bacillus sp.
HHNGTNGTMMQYFEWYLPNDGNHWNRLNSDASNLKSKGITAVWIPPAWKGASQNDVGYGAYDLYDLGEFNQKGTVRTKYGTRSQLQAAVTSLKNNGIQVYGDVVMNHKGGADATEMVRAVEVNPNNRNQEVTGEYTIEAWTRFDFPGRGNTHSSFKWRWYHFDGVDWDQSRRLNNRIYKFRGHGKAWDWEVDTEFGNYDYLMYADYDMDHPEVVNELRNWGVWYTNTLGLDGFRIDAVKHIKYSFTRDWINHVRSATGKNMFAVAEFWKNDLGAIENYLQKTNWNHSVFDVPLHYNLYNASKSGGNYDMRNIFNGTVVQRHPSHAVTFVDNHDSQPEEALESFVEEWFKPLAYALTLTREQGYPSVFYGDYYGIPTHGVQAMRSKIDPILEARQKYAYGPQHDYLDHPDVIGWTREGDSSHPKSGLATLITDGPGGSKRMYAGLKNAGETWYDITGNRSDTVKIGSDGWGEFHVNDGSVSIYVQK

SEQ ID NO: 28651 - protein, 485 aa, Bacillus sp.
HHNGTNGTMMQYFEWYLPNDGNHWNRLNSDASNLKSKGITAVWIPPAWKGASQNDVGYGAYDLYDLGEFNQKGTVRTKYGTRSQLQAAVTSLKNNGIQVYGDVVMNHKGGADATEMVRAVEVNPNNRNQEVTGEYTIEAWTRFDFPGRGNTHSSFKWRWYHFDGVDWDQSRRLNNRIYKFRGHGKAWDWEVDTEFGNYDYLMYADYDMDHPEVVNELRNWGVWYTNTLGLDGFRIDAVKHIKYSFTRDWINHVRSATGKNMFAVAEFWKNDLGAIENYLQKTNWNHSVFDVPLHYNLYNASKSGGNYDMRNIFNGTVVQRHPSHAVTFVDNHDSQPEEALESFVDPWFKPLAYALTLTREQGYPSVFYGDYYGIPTHGVPAMRSKIDPILEARQKYAYGPQHDYLDHPDVIGWTREGDSSHPKSGLATLITDGPGGSKRMYAGLKNAGETWYDITGNRSDTVKIGSDGWGEFHVNDGSVSIYVQK

SEQ ID NO: 28652 - protein, 485 aa, Bacillus sp.
HHNGTNGTMMQYFEWYLPNDGNHWNRLNSDASNLKSKGITAVWIPPAWKGASQNDVGYGAYDLYDLGEFNQKGTVRTKYGTRSQLQAAVTSLKNNGIQVYGDVVMNHKGGADATEMVRAVEVNPNNRNQEVTGEYTIEAWTRFDFPGRGNTHSSFKWRWYHFDGVDWDQSRRLNNRIYKFRGHGKAWDWEVDTEFGNYDYLMYADYDMDHPEVVNELRNWGVWYTNTLGLDGFRIDAVKHIKYSFTRDWINHVRSATGKNMFAVAEFWKNDLGAIENYLQKTNWNHSVFDVPLHYNLYNASKSGGNYDMRNIFNGTVVQRHPSLAVTFVDNHDSQPEEALESFVEEWFKPLAYALTLTREQGYPSVFYGDYYGIPTHGVPAMRSKIDPILEARQKYAYGPQHDYLDHPDVIGWTREGDSSHPKSGLATLITDGPGGSKRMYAGLKNAGETWYDITGNRSDTVKIGSDGWGEFHVNDGSVSIYVQK

SEQ ID NO: 28653 - protein, 485 aa, Bacillus sp.
HHNGTNGTMMQYFEWYLPNDGNHWNRLNSDASNLKSKGITAVWIPPAWKGASQNDVGYGAYDLYDLGEFNQKGTVRTKYGTRSQLQAAVTSLKNNGIQVYGDVVMNHKGGADATEMVRAVEVNPNNRNQEVTGEYTIEAWTRFDFPGRGNTHSSFKWRWYHFDGVDWDQSRRLNNRIYKFRGHGKAWDWEVDTEFGNYDYLMYADYDMDHPEVVNELRNWGVWYTNTLGLDGFRIDAVKHIKYSFTRDWINHVRSATGKNMFAVAEFWVNDLGAIENYLQKTNWNHSVFDVPLHYNLYNASKSGGNYDMRNIFNGTVVQRHPSHAVTFVDNHDSQPEEALESFVEEWFKPLAYALTLTREQGYPSVFYGDYYGIPTHGVPAMRSKIDPILEARQKYAYGPQHDYLDHPDVIGWTREGDSSHPKSGLATLITDGPGGSKRMYAGLKNAGETWYDITGNRSDTVKIGSDGWGEFHVNDGSVSIYVQK

SEQ ID NO: 28654 - protein, 485 aa, Bacillus sp.
HHNGTNGTMMQYFEWYLPNDGNHWNRLNSDASNLKSKGITAVWIPPAWKATSQNDVGYGAYDLYDLGEFNQKGTVRTKYGTRSQLQAAVTSLKNNGIQVYGDVVMNHKGGADATEMVRAVEVNPNNRNQEVTGEYTIEAWTRFDFPGRGNTHSSFKWRWYHFDGVDFDQSRNVNNRIYKFRGHGKAWDWEVDTEFGNYDYLMYADYDMDHPEVVNELRNWGVWYTNTLGLDGFRIDAVKHIKYSFTRDWINHVRSATGKNMFAVAEFWKNDLGAIENYLQKTNWNHSVFDVPLHYNLYNASKSGGNYDMRNIFNGTVVQAHPNHAVTFVDNHDSQPEEALESFVEEWFKPLAYALTLTREQGYPSVFYGDYYGIPTHGVPAMRSKIDPILEARQKYAYGPQHDYLDHPDVIGWTREGDSSHPKSGLATLITDGPGGSKRMYAGLKNAGETWYDITGNRSDTVKIGSDGWGEFHVNDGSVSIYVQK

SEQ ID NO: 28655 - protein, 485 aa, Bacillus sp.
HHNGTNGTMMQYFEWYLPNDGNHWNRLNSDASNLKSKGITAVWIPPAWKGASQNDVGYGAYDLYDLGEFNQKGTVRTKYGTRSQLQAAVTSLKNNGINVYGDVVMNHKGGADLTEMVRAVEVNPNNRNQEVTGEYTIEAWTRFDFPGRGNTHSSFKWRWYHFDGVDWDQSRRLNNRIYKFRGHGKAWDWEVDTEFGNYDYLMYADYDMDHPEVVNELRNWGVWYTNTLGLDGFRIDAVKHIKYSFTRDWINHVRSATGKNMFAVAEFWKNDLGAIENYLQKTNWNHSVFDVPLHYNLYNASKSGGNYDMRNIFNGTVVQAHPMHAVTFVDNHDSQPEEALESFVEEWFKPLAYALTLTREQGYPSVFYGDYYGIPTHGVPAMRSKIDPILEARQKYAYGPQHDYLDHPDVIGWTREGDSSHPKSGLATLITDGPGGSKRMYAGLKNAGETWYDITGNRSDTVKIGSDGWGEFHVNDGSVSIYVQK

SEQ ID NO: 28656 - protein, 483 aa, Bacillus sp.
HHNGTNGTMMQYFEWYLPNDGNHWNRLNSDASNLKSKGITAVWIPPAWKAASQNDVGYGAYDLYDLGEFNQKGTVRTKYGTRSQLQAAVTSLKNNGIQVYGDVVMNHKGGADATEMVRAVEVNPNNRNQEVTGEYTIEAWTRFDFPGRGNTHSSFKWRWYHFDGVDWDQSRRLSNRIYKFRGKAWDWEVDTEFGNYDYLMYADYDMDHPEVVNELRNWGVWYTNTLGLDGFRIDAVKHIKYSFTRDWINHVRSATGKNMFAVAEFWKNDLGAIENYLQKTNWNHSVFDVPLHYNLYNASKSGGNYDMRNIFNGTVVQRHPSHAVTFVDNHDSQPEEALESFVEEWFKPLAYALTLTREQGYPSVFYGDYYGIPTHGVPAMRSKIDPILEARQKYAYGPQHDYLDHPDVIGWTREGDSSHPKSGLATLITDGPGGSKRMYAGLKNAGETWYDITGNRSDTVKIGSDGWGEFHVNDGSVSIYVQK

SEQ ID NO: 28657 - protein, 483 aa, Bacillus sp.
HHNGTNGTMMQYFEWYLPNDGNHWNRLNSDASNLKSKGITAVWIPPAWKAASQNDVGYGAYDLYDLGEFNQKGTVRTKYGTRSQLQAAVTSLKNNGIQVYGDVVMNHKGGADATEMVRAVEVNPNNRNQEVTGEYTIEAWTRFDFPGRGNTHSSFKWRWYHFDGVDWDQSRDTDNRIYKFRGKAWDWEVDTEFGNYDYLMYADYDMDHPEVVNELRNWGVWYTNTLGLDGFRIDAVKHIKYSFTRDWINHVRSATGKNMFAVAEFWKNDLGAIENYLQKTNWNHSVFDVPLHYNLYNASKSGGNYDMRNIFNGTVVQRHPSHAVTFVDNHDSQPEEALESFVEEWFKPLAYALTLTREQGYPSVFYGDYYGIPTHGVPAMRSKIDPILEARQKYAYGPQHDYLDHPDVIGWTREGDSSHPKSGLATLITDGPGGSKRMYAGLKNAGETWYDITGNRSDTVKIGSDGWGEFHVNDGSVSIYVQK

SEQ ID NO: 28658 - protein, 485 aa, Bacillus sp.
HHNGTNGTMMQYFEWYLPNDGNHWNRLNSDASNLKSKGITAVWIPPAWKGASQNDVGYGAYDLYDLGEFNQKGTVRTKYGTRSQLQAAVTSLKNNGIQVYGDVVMNHKGGAHATEMVRAVEVNPNNRNQEVTGEYTIEAWTRFDFPGRGNTHSSFKWRWYHFDGVDWDQSRRLNNRIYKFRGHGKAWDWEVDTEFGNYDYLMYADYDMDHPEVVNELRNWGVWYTNTLGLDGFRIDAVKHIKYSFTRDWINHVRSATGKNMFAVAEFWKNDLGAIENYLQKTNWNHSVFDVPLHYNLYNASKSGGNYDMRNIFNGTVVQRHPSHAVTFVDNHDSQPEEALESFVEEWFKPLAYALTLTREQGYPSVFYGDYYGIPTHGVPAMRSKIDPILEARQKYAYGPQHDYLDHPDVIGWTREGDSSHPKSGLATLITDGPGGSKRMYAGLKNAGETWYDITGNRSDTVKIGSDGWGEFHVNDGSVSIYVQK

SEQ ID NO: 28659 - protein, 485 aa, Bacillus sp.
HHNGTNGTMMQYFEWYLPNDGNHWNRLNSDASNLKSKGITAVWIPPAWKGASQNDVGYGAYDLYDLGEFNQKGTVRTKYGTRSQLQAAVTSLKNNGIQVYGDVVMNHKGGADNTEMVRAVEVNPNNRNQEVTGEYTIEAWTRFDFPGRGNTHSSFKWRWYHFDGVDWDQSRRLNNRIYKFRGHGKAWDWEVDTEFGNYDYLMYADYDMDHPEVVNELRNWGVWYTNTLGLDGFRIDAVKHIKYSFTRDWINHVRSATGKNMFAVAEFWKNDLGAIENYLQKTNWNHSVFDVPLHYNLYNASKSGGNYDMRNIFNGTVVQRHPSHAVTFVDNHDSQPEEALESFVEEWFKPLAYALTLTREQGYPSVFYGDYYGIPTHGVPAMRSKIDPILEARQKYAYGPQHDYLDHPDVIGWTREGDSSHPKSGLATLITDGPGGSKRMYAGLKNAGETWYDITGNRSDTVKIGSDGWGEFHVNDGSVSIYVQK

SEQ ID NO: 28660 - protein, 483 aa, Synthetic construct
HHNGTNGTMMQYFEWYLPNDGNHWNRLNSDASNLKSKGITAVWIPPAWKGASQNDVGYGAYDLYDLGEFNQKGTVRTKYGTRSQLQAAVTSLKNNGIQVYGDVVMNHKGGADATEMVRAVEVNPNNRNQEVTGEYTIEAWTRFDFPGRGNTHSSFKWRWYHFDGVDWDQSRRLNNRIYKFRGKAWDWEVDTENGNYDYLMYADIDMDHPEGTNELRNWGVWYTNTLGLDGFRIDAVKHIKYSFTRDWINHVRSATGKNMFAVAEFWKNDLGAIENYLQKTNWNHSVFDVPLHYNLYNASKSGGNYDMRNIFNGTVVQRHPSHAVTFVDNHDSQPEEALESFVEEWFKPLAYALTLTREQGYPSVFYGDYYGIPTHGVPAMRSKIDPILEARQKYAYGPQHDYLDHPDVIGWTREGDSSHPKSGLATLITDGPGGSKRMYAGLKNAGETWYDITGNRSDTVKIGSDGWGEFHVNDGSVSIYVQK

SEQ ID NO: 28661 - protein, 483 aa, Bacillus sp.
HHNGTNGTMMQYFEWYLPNDGNHWNRLNSDASNLKSKGITAVWIPPAWKGASQNDVGYGAYDLYDLGEFNQKGTVRTKYGTRSQLQAAVTSLKNNGIQVYGDVVMNHKGGADATEMVRAVEVNPNNRNQEVTGEYTIEAWTRFDFPGRGNTHSSFKWRWYHFDGVDWDQSRRLNNRIYKFRGKAWDWEVDTENGNYDYLMYADIDYDHPEVVSELRNWGVWYTNTLGLDGFRIDAVKHIKYSFTRDWINHVRSATGKNMFAVAEFWKNDLGAIENYLQKTNWNHSVFDVPLHYNLYNASKSGGNYDMRNIFNGTVVQRHPSHAVTFVDNHDSQPEEALESFVEEWFKPLAYALTLTREQGYPSVFYGDYYGIPTHGVPAMRSKIDPILEARQKYAYGPQHDYLDHPDVIGWTREGDSSHPKSGLATLITDGPGGSKRMYAGLKNAGETWYDITGNRSDTVKIGSDGWGEFHVNDGSVSIYVQK

SEQ ID NO: 28662 - protein, 485 aa, Bacillus sp.
HHNGTNGTMMQYFEWYLPNDGNHWNRLNSDASNLKSKGITAVWIPPAWKGASQNDVGYGAYDLYDLGEFNQKGTVRTKYGTRSQLQAAVTSLKNNGIQVYGDVVMNHKGGADATEMVRAVEVNPNNRNQEVTGEYTIEAWTRFDFPGRGNTHSSFKWRWYHFDGVDWDQSRRLNNRIYKFRGHGKAWDWEVDTEFGNYDYLMYADYDMDHPEVVNELRNWGVWYTNTLGLDGFRIDAVKHIKYSFTRDWINHVRSATGKNMFAVAEFWKNDLGAIENYLQKTNWNHSVFDVPLHYNLYNASKSGGNYDMRNIFNGTVVQRHPSHAVTFVDNHDSQPEEALESFVEEWFKPLAYALTLTREQGYPSVFYGDYYGIPTHGVPAMRSKIDPILHARQKYAYGPQHDYLDHPDVIGWTREGDSSHPKSGLATLITDGPGGSKRMYAGLKNAGETWYDITGNRSDTVKIGSDGWGEFHVNDGSVSIYVQK

SEQ ID NO: 28663 - protein, 485 aa, Bacillus sp.
HHNGTNGTMMQYFEWYLPNDGNHWNRLNSDASNLKSKGITAVWIPPAWKGASQNDVGYGAYDLYDLGEFNQKGTVRTKYGTRSQLQAAVTSLKNNGIQVYGDVVMNHKGGADATEMVRAVEVNPNNRNQEVTGEYTIEAWTRFDFPGRGNTHSSFKWRWYHFDGVDWDQSRRLNNRIYKFRGHGKAWDWEVDTEFGNYDYLMYADYDMDHPEVVNELRNWGVWYTNTLGLDGFRIDAVKHIKYSFTRDWINHVRSATGKNMFAVAEFWKNDLGAIENYLQKTNWNHSVFDVPLHYNLYNASKSGGNYDMRNIFNGTVVQRHPSHAVTFVDNHDSQPEEALESFVDEWFKPLAYALTLTREQGYPSVFYGDYYGIPTHGVPAMRSKIDPILEARQKYAYGPQHDYLDHPDVIGWTREGDSSHPKSGLATLITDGPGGSKRMYAGLKNAGETWYDITGNRSDTVKIGSDGWGEFHVNKSSVSIYVQK

SEQ ID NO: 28664 - protein, 485 aa, Bacillus sp.
HHNGTNGTMMQYFEWYLPNDGNHWNRLNSDASNLKSKGITAVWIPPAWKGASQNDVGYGAYDLYDLGEFNQKGTVRTKYGTRSQLQAAVTSLKNNGIQVYGDVVMNHKGGADATEMVRAVEVNPNNRNQEVTGEYTIEAWTRFDFPGRGNTHSSFKWRWYHFDGVDWDQSRRLNNRIYKFRGHGKAWDWEVDTEFGNYDYLMYADYDMDHPEVVNELRNWGVWYTNTLGLDGFRIDAVKHIKYSFTRDWINHVRSATGKNMFAVAEFWKNDLGAIENYLQKTNWNHSVFDVPLHYNLYNASKSGGNYDMRNIFNGTVVQRHPSHAVTFVDNHDSQPEEALESFVEEWFKPLAYALTLTREQGYPSVFYGDYYGIPTHGVPAMRSKIDPILMARQKYAYGPQHDYLDHPDVIGWTREGDSSHPKSGLATLITDGPGGSKRMYAGLKNAGETWYDITGNRSDTVKIGSDGWGEFHVNDGSVSIYVQK

SEQ ID NO: 28665 - protein, 485 aa, Bacillus sp.
HHNGTNGTMMQYFEWYLPNDGNHWNRLNSDASNLKSKGITAVWIPPAWKAASQNDVGYGAYDLYDLGEFNQKGTVRTKYGTRSQLQAAVTSLKNNGIQVYGDVVMNHKGGADATEMVRAVEVNPNNRNQEVTGEYTIEAWTRFDFPGRGNTHSSFKWRWYHFDGVDWDQSRKLNNRIYKFRGHGKAWDWEVDTEFGNYDYLMYADYDMDHPEVVNELRNWGVWYTNTLGLDGFRIDAVKHIKYSFTRDWINHVRSATGKNMFAVAEFWKNDLGAIENYLQKTNWNHSVFDVPLHYNLYNASKSGGNYDMRNIFNGTVVQRHPSHAVTFVDNHDSQPEEALESFVEEWFKPLAYALTLTREQGYPSVFYGDYYGIPTHGVPAMRSKIDPILEARQKYAYGPQHDYLDHPDVIGWTREGDSSHPKSGLATLITDGPGGSKRMYAGLKNAGETWYDITGNRSDTVKIGSDGWGEFHVNDGSVSIYVQK

SEQ ID NO: 28666 - protein, 483 aa, Bacillus sp.
HHNGTNGTMMQYFEWYLPNDGNHWNRLNSDASNLKSKGITAVWIPPAWKGASQNDVGYGAYDLYDLGEFNQKGTVRTKYGTRSQLQAAVTSLKNNGIQVYGDVVMNHKGGADATEMVRAVEVNPNNRNQEVTGEYTIEAWTRFDFPGRGNTHSSFKWRWYHFDGVDWDQSRRLNNRIYKFRGKAWDWEVDTEFGNYDYLMYADYDMDHPEVVNELRNWGVWYTNTLGLDGFRIDAVKHIKYSFTRDWINHVRSATGKNMFAVAEFWKNDLGAIENYLQKTNWNHSVFDVPLHYNLYNASNSGGNYDMRNIFNGTVVQRHPSHAVTFVDNHDSQPEEALESFVETWFKPLAYALTLTREQGYPSVFYGDYYGIPTHGVPAMRSKIDPILEARQKYAYGPQHDYLDHPDVIGWTREGDSSHPKSGLATLITDGPGGSKRMYAGLKNAGETWYDITGNRSDTVKIGSDGWGEFHVNKASVSIYVQK

SEQ ID NO: 28667 - protein, 485 aa, Bacillus sp.
HHNGTNGTMMQYFEWYLPNDGNHWNRLNSDASNLKSKGITAVWIPPAWKGASQNDVGYGAYDLYDLGEFNQKGTVRTKYGTRSQLQAAVTSLKNNGIQVYGDVVMNHKGGADATEMVRAVEVNPNNRNQEVTGEYTIEAWTRFDFPGRGNTHSSFKWRWGHFDGVDWDQSRRLNNRIYKFRGHGKAWDWEVDTEFGNYDYLMYADYDMDHPEVVNELRNWGVWYTNTLGLDGFRIDAVKHIKYSFTRDWINHVRSATGKNMFAVAEFWKNDLGAIENYLQKTNWNHSVFDVPLHYNLYNASKSGGNYDMRNIFNGTVVQRHPSHAVTFVDNHDSQPEEALESFVEEWFKPLAYALTLTREQGYPSVFYGDYYGIPTHGVPAMRSKIDPILEARQKYAYGPQHDYLDHPDVIGWTREGDSSHPKSGLATLITDGPGGSKRMYAGLKNAGETWYDITGNRSDTVKIGSDGWGEFHVNDGSVSIYVQK

SEQ ID NO: 28668 - protein, 483 aa, Bacillus sp.
HHNGTNGTMMQYFEWYLPNDGNHWNRLNSDASNLKSKGITAVWIPPAWKGASQNDVGYGAYDLYDLGEFNQKGTVRTKYGTRSQLQAAVTSLKNNGIQVYGDVVMNHKGGADATEMVRAVEVNPNNRNQEVTGEYTIEAWTRFDFPGRGNTHSSFKWRWYHFDGVDWDQSRRLNNRIYKFRGKAWDWEVDTEFGNYDYLMYADYDMDHPEVVNELRNWGVWYTNTLGLDGFRIDAVKHIKYSFTRDWINHVRSATGKNMFAVAEFWKNDLGAIENYLQKTNWNHSVFDVPLHYNLYNASKSGGNYDMRNIFNGTVVQRHPSHAVTFVDNHDSQPEEALESFVEEWFKPLAYALTLTREQGYPSVFYGDYYGIPTHGVPAMRSKIDPILEARQKYAYGPQHDYLDHPDVIGWTREGDSSHPKSGLATLITDGPGGSKRMYAGLKNAGETWYDITGNRSDTVKIGSDGWGEFHVNKQSVSIYVQK

SEQ ID NO: 28669 - protein, 483 aa, Bacillus sp.
HHNGTNGTMMQYFEWYLPNDGNHWNRLNSDASNLKSKGITAVWIPPAWKATSQNDVGYGAYDLYDLGEFNQKGTVRTKYGTRSQLQSAVTSLKNNGIQVYGDVVMNHKGGADATEMVRAVEVNPNNRNQEVTGEYTIEAWTRFDFPGRGNTHSSFKWRWYHFDGVDWDQSRNTDNRIYKFRGKAWDWEVDTEFGNYDYLMYADYDMDHPEVVNELRNWGVWYTNTLGLDGFRIDAVKHIKYSFTRDWINHVRSATGKNMFAVAEFWKNDLGAIENYLQKTNWNHSVFDVPLHYNLYNASKSQGNYDMRNIFNGTVVQRHPSHAVTFVDNHDSQPEEALESFVDTWFKPLAYALTLTREQGYPSVFYGDYYGIPTHGVPAMRSKIDPILEARQKYAYGPQHDYLDHPDVIGWTREGDSSHPKSGLATLITDGPGGSKRMYAGLKNAGETWYDITGNRSDTVKIGSDGWGEFHVNGSSVSIYVQK

SEQ ID NO: 28670 - protein, 485 aa, Bacillus sp.
HQNGTNGTMMQYFEWYLPNDGNHWNRLNSDASNLKSKGITAVWIPPAWKGASQNDVGYGAYDLYDLGEFNQKGTVRTKYGTRSQLQAAVTSLKNNGIQVYGDVVMNHKGGADATEMVRAVEVNPNNRNQEVTGEYTIEAWTRFDFPGRGNTHSSFKWRWYHFDGVDWDQSRRLNNRIYKFRGHGKAWDWEVDTEFGNYDYLMYADYDMDHPEVVNELRNWGVWYTNTLGLDGFRIDAVKHIKYSFTRDWINHVRSATGKNMFAVAEFWKNDLGAIENYLQKTNWNHSVFDVPLHYNLYNASKSGGNYDMRNIFNGTVVQRHPSHAVTFVDNHDSQPEEALESFVEEWFKPLAYALTLTREQGYPSVFYGDYYGIPTHGVPAMRSKIDPILEARQKYAYGPQHDYLDHPDVIGWTREGDSSHPKSGLATLITDGPGGSKRMYAGLKNAGETWYDITGNRSDTVKIGSDGWGEFHVNDGSVSIYVQK

SEQ ID NO: 28671 - protein, 483 aa, Bacillus sp.
HHNGTNGTMMQYFEWYLPNDGNHWNRLNSDASNLKSKGITAVWIPPAWKGASQNDVGYGAYDLYDLGEFNQKGTVRTKYGTRSQLQAAVTSLKNNGIQVYGDVVMNHKGGADATEMVRAVEVNPNNRNQEVTGEYTIEAWTRFDFPGRGNTHSSFKWRWYHFDGVDWDQSRRLNNRIYKFRGKAWDWEVDTENGFYDYLMYADIDYDHPEVVNELRVWGVWYTNTLGLDGFRIDAVKHIKYSFTRDWINHVRSATGKNMFAVAEFWKNDLGAIENYLQKTNWNHSVFDVPLHYNLYNASKSGGNYDMRNIFNGTVVQRHPSHAVTFVDNHDSQPEEALESFVEEWFKPLAYALTLTREQGYPSVFYGDYYGIPTHGVPAMRSKIDPILEARQKYAYGPQHDYLDHPDVIGWTREGDSSHPKSGLATLITDGPGGSKRMYAGLKNAGETWYDITGNRSDTVKIGSDGWGEFHVNDGSVSIYVQK

SEQ ID NO: 28672 - protein, 485 aa, Bacillus sp.
HHNGTNGTMMQYFEWYLPNDGNHWNRLNSDASNLKSKGITAVWIPPAWKAVSQNDVGYGAYDLYDLGEFNQKGTVRTKYGTRSQLQAAVTSLKNNGIQVYGDVVMNHKGGADATEMVPAVEVNPNNRNQEVTGEYTIEAWTRFDFPGRGNTHSSFKWRWYHFDGVDWDQSRRLSNRIYKFRGHSKAWDWEVDTEFGNYDYLMYADYDMDHPEVVNELRNWGVWYTNTLGLDGFRIDAVKHIKYSFTRDWINHVRSATGKNMFAVAEFWKNDLGAIENYLQKTNWNHSVFDVPLHYNLYNASKSGGNYDMRNIFNGTVVQRHPSHAVTFVDNHDSQPEEALESFVEEWFKPLAYALTLTREQGYPSVFYGDYYGIPTHGVPAMRSKIDPILEARQKYAYGPQHDYLDHPDVIGWTREGDSSHPKSGLATLITDGPGGSKRMYAGLKNAGETWYDITGNRSDTVKIGSDGWGEFHVNDGSVSIYVQK

SEQ ID NO: 28673 - protein, 483 aa, Bacillus sp.
HHNGTNGTMMQYFEWYLPNDGNHWNRLNSDASNLKSKGITAVWIPPAWKGASQNDVGYGAYDLYDLGEFNQKGTVRTKYGTRSQLQAAVTSLKNNGIQVYGDVVMNHKGGADATEMVRAVEVNPNNRNQEVTGEYTIEAWTRFDFPGRGNTHSSFKWRWYHFDGVDWDQSRRLNNRIYKFRGKAWDWEVDTEFGNYDYLMYADYDMDHPEVVNELRNWGVWYTNTLGLDGFRIDAVKHIKYSFTRDWINHVRSATGKNMFAVAEFWKNDLGAIENYLQKTNWNHSVFDVPLHYNLYNASKSVGNYDMRNIFNGTVVQRHPSHAVTFVDNHDSQPEEALESFVEEWFKPLAYALTLTREQGYPSVFYGDYYGIPTHGVPAMRSKIDPILEARQKYAYGPQHDYLDHPDVIGWTREGDSSHPKSGLATLITDGPGGSKRMYAGLKNAGETWYDITGNRSDTVKIGSDGWGEFHVNDGSVSIYVQK

SEQ ID NO: 28674 - protein, 483 aa, Bacillus sp.
HHNGTNGTMMQYFEWYLPNDGNHWNRLNSDASNLKSKGITAVWIPPAWKGASQNDVGYGAYDLYDLGEFNQKGTVRTKYGTRSQLQAAVTSLKNNGIQVYGDVVMNHKGGADATEMVPAVEVNPNNRNQEVTGEYTIEAYTRFDFPGRGNTHSSFKWRWYHFDGVDWDQSRRLNNRIYKFRGKAWDWEVDTEFGNYDYLMYADYDMDHPEVVNELRNWGVWYTNTLGLDGFRIDAVKHIKYSFTRDWINHVRSATGKNMFAVAEFWKNDLGAIENYLQKTNWNHSVFDVPLHYNLYNASKSGGNYDMRNIFNGTVVQRHPSHAVTFVDNHDSQPEEALESFVEEWFKPLAYALTLTREQGYPSVFYGDYYGIPTHGVPAMRSKIDPILEARQKYAYGPQHDYLDHPDVIGWTREGDSSHPKSGLATLITDGPGGSKRMYAGLKNAGETWYDITGNRSDTVKIGSDGWGEFHVNDGSVSIYVQK

SEQ ID NO: 28675 - protein, 485 aa, Bacillus sp.
HHNGTNGTMMQYFEWYLPNDGNHWNRLNSDASNLKSKGITAVWIPPAWKGASQNDVGYGAYDLYDLGEFNQKGTVRTKYGTRSQLQAAVTSLKNNGIQVYGDVVMNHKGGADATEMVRAVEVNPNNRNQEVTGEYTIEAWTRFDFPGRGNTHSSFKWRWYHFDGVDWDQSRRLNNRIYKFRGHGKAWDWEVDTEFGNYDYLMYADYDMDHAEVVNELRNWGVWYTNTLGLDGFRIDAVKHIKYSFTRDWINHVRSATGKNMFAVAEFWKNDLGAIENYLQKTNWNHSVFDVPLHYNLYNASKSGGNYDMRNIFNGTVVQRHPSHAVTFVDNHDSQPEEALESFVEEWFKPLAYALTLTREQGYPSVFYGDYYGIPTHGVPAMRSKIDPILEARQKYAYGPQHDYLDHPDVIGWTREGDSSHPKSGLATLITDGPGGSKRMYAGLKNAGETWYDITGNRSDTVKIGSDGWGEFHVNDGSVSIYVQK

SEQ ID NO: 28676 - protein, 485 aa, Bacillus sp.
HHNGTNGTMMQYFEWYLPNDGNHWNRLNSDASNLKSKGITAVWIPPAWKGASQNDVGYGAYDLYDLGEFNQKGTVRTKYGTRSQLQAAVTSLKNNGIAVYGDVVMNHKGGADATEMVRAVEVNPNNRNQEVTGEYTIEAWTRFDFPGRGNTHSSFKWRWYHFDGVDWDQSRRLNNRIYKFRGHGKAWDWEVDTEFGNYDYLMYADYDMDHPEVVNELRNWGVWYTNTLGLDGFRIDAVKHIKYSFTRDWINHVRSATGKNMFAVAEFWKNDLGAIENYLQKTNWNHSVFDVPLHYNLYNASKSGGNYDMRNIFNGTVVQAHPNHAVTFVDNHDSQPEEALESFVEEWFKPLAYALTLTREQGYPSVFYGDYYGIPTHGVPAMRSKIDPILEARQKYAYGPQHDYLDHPDVIGWTREGDSSHPKSGLATLITDGPGGSKRMYAGLKNAGETWYDITGNRSDTVKIGSDGWGEFHVNDGSVSIYVQK

SEQ ID NO: 28677 - protein, 485 aa, Bacillus sp.
HHNGTNGTMMQYFEWYLPNDGNHWNRLNSDASNLKSKGITAVWIPPAWKGASQNDVGYGAYDLYDLGEFNQKGTVRTKYGTRSQLQAAVTSLKNNGIQVYGDVVMNHKGGADATEMVRAVEVNPNNRNQEVTGEYTIEAWTRFDFPGRGNTHSSFKWRWYHFDGVDWDQSRRLNNRIYKFRGHGKAWDWEVDTEFGNYDYLMYADYDMDHPEVVNELRNWGVWYTNTLGLDGFRIDAVKHIKYSFTRDWINHVRSATGKNMFAVAEFWKNDLGAIENYLQKTNWNHSVFDVPLHYNLYNASQSGGNYDMRNIFNGTVVQRHPSHAVTFVDNHDSQPEEALESFVDTWFKPLAYALTLTREQGYPSVFYGDYYGIPTHGVPAMRSKIDPILEARQKYAYGPQHDYLDHPDVIGWTREGDSSHPKSGLATLITDGPGGSKRMYAGLKNAGETWYDITGNRSDTVKIGSDGWGEFHVNGASVSIYVQK

SEQ ID NO: 28678 - protein, 485 aa, Bacillus sp.
HHNGTNGTMMQYFEWYLPNDGNHWNRLNSDASNLKSKGITAVWIPPAWKGASQNDVGYGAYDLYDLGEFNQKGTVRTKYGTRSQLQAAVTSLKNNGIQVYGDVVMNHKGGADATEMVRAVEVNPNNRNQEVTGEYTIEAWTRFDFPGRGNTHSSFKWRWYHFDGVDWDQSRRLNNRIYKFRGHGKAWDWEVDTEFGNYDYLMYADYDMDHPEVVNELRNWGVWYTNTLGLDGFRIDAVKHIKYSFTRDWINHVRSATGKNMFAVAEFWKNDLGAIENYLQKTNWNHSVFDVPLHYNLYNASKSGGNYDMRNIFNGTVVQRHPSHAVTFVDNHDSQPEEALESFVEEWFKPLAYVLTLTREQGYPSVFYGDYYGIPTHGVPAMRSKIDPILEARQKYAYGPQHDYLDHPDVIGWTREGDSSHPKSGLATLITDGPGGSKRMYAGLKNAGETWYDITGNRSDTVKIGSDGWGEFHVNDGSVSIYVQK

SEQ ID NO: 28679 - protein, 483 aa, Bacillus sp.
HHNGTNGTMMQYFEWYLPNDGNHWNRLNSDASNLKSKGITAVWIPPAWKATSQNDVGYGAYDLYDLGEFNQKGTVRTKYGTRSQLQAAVTSLKNNGIQVYGDVVMNHKGGADATEMVRAVEVNPNNRNQEVTGEYTIEAWTRFDFPGRGNTHSSFKWRWYHFDGVDWDQSRNLDNRIYKFRVKAWDWEVDTEFGNYDYLMYADYDMDHPEVVNELRNWGVWYTNTLGLDGFRIDAVKHIKYSFTRDWINHVRSATGKNMFAVAEFWKNDLGAIENYLQKTNWNHSVFDVPLHYNLYNASKSGGNYDMRNIFNGTVVQRHPSHAVTFVDNHDSQPEEALESFVEEWFKPLAYALTLTREQGYPSVFYGDYYGIPTHGVPAMRSKIDPILEARQKYAYGPQHDYLDHPDVIGWTREGDSSHPKSGLATLITDGPGGSKRMYAGLKNAGETWYDITGNRSDTVKIGSDGWGEFHVNDGSVSIYVQK

SEQ ID NO: 28680 - protein, 485 aa, Synthetic construct
HHNGTNGTMMQYFEWYLPNDGNHWNRLNSDASNLKSKGITAVWIPPAWKGASQNDVGYGAYDLYDLGEFNQKGTVRTKYGTRSQLQAAVTSLKNNGIQVYGDVVMNHKGGADATEMVRAVEVNPNNRNQEVTGEYTIEAWTRFDFPGRGNTHSSFKWRWYHFDGVDWDQSRRLNNRIYKFRGHGKAWDWEVDTENGNYDYLMYADIDMDHPEVVNELRNWGVWYTNTLGLDGFRIDAVKHIKYSFTRDWINHVRSATGKNMFAVAEFWKNDLGAIENYLQKTNWNHSVFDVPLHYNLYNASKSGGNYDMRNIFNGTVVQRHPSHAVTFVDNHDSQPEEALESFVEEWFKPLAYALTLTREQGYPSVFYGDYYGIPTHGVPAMRSKIDPILEARQKYAYGPQHDYIDHPDVIGWTREGDSSAAKSGLATLITDGPGGSKRMYAGLKNAGETWYDITGNRSDTVKIGSDGWGEFHVNDGSVSIYVQK

SEQ ID NO: 28681 - protein, 483 aa, Bacillus sp.
HHNGTNGTMMQYFEWYLPNDGNHWNRLNSDASNLKSKGITAVWIPPAWKGASQNDVGYGAYDLYDLGEFNQKGTVRTKYGTRSQLQAAVTSLKNNGIQVYGDVVMNHKGGADHTEMVRAVEVNPNNRNQEVTGEYTIEAWTRFDFPGRGNTHSSFKWRWYHFDGVDWDQSRRLNNRIYKFRGKAWDWEVDTEFGNYDYLMYADYDMDHPEVVNELRNWGVWYTNTLGLDGFRIDAVKHIKYSFTRDWINHVRSATGKNMFAVAEFWKNDLGAIENYLQKTNWNHSVFDVPLHYNLYNASKSGGNYDMRNIFNGTVVQRHPSHAVTFVDNHDSQPEEALESFVEEWFKPLAYALTLTREQGYPSVFYGDYYGIPTHGVPAMRSKIDPILEARQKYAYGPQHDYLDHPDVIGWTREGDSSHPKSGLATLITDGPGGSKRMYAGLKNAGETWYDITGNRSDTVKIGSDGWGEFHVNDGSVSIYVQK

SEQ ID NO: 28682 - protein, 485 aa, Bacillus sp.
HHNGTNGTMMQYFEWYLPNDGNHWNRLNSDASNLKSKGITAVWIPPAWKGASQNDVGYGAYDLYDLGEFNQKGTVRTKYGTRSQLQAAVTSLKNNGIQVYGDVVMNHKGGADATEMVRAVEVNPNNRNQEVTGEYTIEAWTRFDFPGRGNTHSSFKWRWYHFDGVDWDQSRRLNNRIYKFRGHGKAWDWEVDTEFGNYDYLMYADYDMDHPEVVNELRNWGVWYTNTLGLDGFRIDAVKHIKYSFTRDWINHVRSATGKNMFAVAEFWKNDLGAIENYLQKTNWNHSVFDVPLHYNLYNASKSGGNYDMRNIFNGTVVQRHPSHAVTFVDNHDSQPEEALESFVEEWFKPLAYAVTLTREQGYPSVFYGDYYGIPTHGVPAMRSKIDPILEARQKYAYGPQHDYLDHPDVIGWTREGDSSHPKSGLATLITDGPGGSKRMYAGLKNAGETWYDITGNRSDTVKIGSDGWGEFHVNDGSVSIYVQK

SEQ ID NO: 28683 - protein, 485 aa, Bacillus sp.
HHNGTNGTMMQYFEWYLPNDGNHWNRLNSDASNLKSKGITAVWIPPAWKAASQNDVGYGAYDLYDLGEFNQKGTVRTKYGTRSQLQAAVTSLKNNGIQVYGDVVMNHKGGADLTEMVRAVEVNPNNRNQEVTGEYTIEAWTRFDFPGRGNTHSSFKWRWYHFDGVDWDQSRDLQNRIYKFRGHGKAWDWEVDTEFGNYDYLMYADYDMDHPEVVNELRNWGVWYTNTLGLDGFRIDAVKHIKYSFTRDWINHVRSATGKNMFAVAEFWKNDLGAIENYLQKTNWNHSVFDVPLHYNLYNASKSGGNYDMRNIFNGTVVQRHPSHAVTFVDNHDSQPEEALESFVEEWFKPLAYALTLTREQGYPSVFYGDYYGIPTHGVPAMRSKIDPILEARQKYAYGPQHDYLDHPDVIGWTREGDSSHPKSGLATLITDGPGGSKRMYAGLKNAGETWYDITGNRSDTVKIGSDGWGEFHVNDGSVSIYVQK

SEQ ID NO: 28684 - protein, 483 aa, Bacillus sp.
HHNGTNGTMMQYFEWYLPNDGNHWNRLNSDASNLKSKGITAVWIPPAWKGASQNDVGYGAYDLYDLGEFNQKGTVRTKYGTRSQLQAAVTSLKNNGIQVYGDVVMNHKGGADATEMVRAVEVNPNNRNQEVTGEYTIEAWTRFDFPGRGNTHSSFKWRWYHFDGVDWDQSRRLNNRIYKFRGKAWDWEVDTEFGNYDYLMYADYDMDHPEVVNELRNWGVWYTNTLGLDGFRIDAVKHIKYSFTRDWINHVRSATGKNMFAVAEFWLNDLGAIENYLQKTNWNHSVFDVPLHYNLYNASKSGGNYDMRNIFNGTVVQRHPSHAVTFVDNHDSQPEEALESFVEEWFKPLAYALTLTREQGYPSVFYGDYYGIPTHGVPAMRSKIDPILEARQKYAYGPQHDYLDHPDVIGWTREGDSSHPKSGLATLITDGPGGSKRMYAGLKNAGETWYDITGNRSDTVKIGSDGWGEFHVNDGSVSIYVQK

SEQ ID NO: 28685 - protein, 485 aa, Bacillus sp.
HHNGTNGTMMQYFEWYLPNDGNHWNRLNSDASNLKSKGITAVWIPPAWKAASQNDVGYGAYDLYDLGEFNQKGTVRTKYGTRSQLQAAVTSLKNNGIQVYGDVVMNHKGGADATEMVRAVEVNPNNRNQEVTGEYTIEAWTRFDFPGRGNTHSSFKWRWYHFDGVDWDQSRQLNNRIYKFRGHGKAWDWEVDTEFGNYDYLMYTDYDMDHPEVVNELRNWGVWYTNTLGLDGFRIDAVKHIKYSFTRDWINHVRSATGKNMFAVAEFWKNDLGAIENYLQKTNWNHSVFDVPLHYNLYNASKSGGNYDMRNIFNGTVVQRHPSHAVTFVDNHDSQPEEALESFVEEWFKPLAYALTLTREQGYPSVFYGDYYGIPTHGVPAMRSKIDPILEARQKYAYGPQHDYLDHPDVIGWTREGDSSHPKSGLATLITDGPGGSKRMYAGLKNAGETWYDITGNRSDTVKIGSDGWGEFHVNDGSVSIYVQK

SEQ ID NO: 28686 - protein, 485 aa, Bacillus sp.
HHNGTNGTMMQYFEWYLPNDGNHWNRLNSDASNLKSKGITAVWIPPAWKGASQNDVGYGAYDLYDLGEFNQKGTVRTKYGTRSQLQAAVTSLKNNGIQVYGDVVMNHKGGADATEMVRAVEVNPNNRNQEVTGEYTIEAWTRFDFPGRGNTHSSFKWRWYHFDGVDWDQSRRLNNRIYKFRGHGKAWDWEVDTEFGNYDYLMYADYDMDHPEVVNELRNWGVWYTNTLGLDGFRIDAVKHIKYSFTRDWINHVRSATGKNMFAVAEFWKNDLGAIENYLQKTNWNHSVFDVPLHYQLYNASKSGGNYDMRNIFNGTVVQRHPSHAVTFVDNHDSQPEEALESFVEEWFKPLAYALTLTREQGYPSVFYGDYYGIPTHGVPAMRSKIDPILEARQKYAYGPQHDYLDHPDVIGWTREGDSSHPKSGLATLITDGPGGSKRMYAGLKNAGETWYDITGNRSDTVKIGSDGWGEFHVNDGSVSIYVQK

SEQ ID NO: 28687 - protein, 485 aa, Bacillus sp.
HHNGTNGTMMQYFEWYLPNDGNHWNRLNSDASNLKSKGITAVWIPPAWKAASQNDVGYGAYDLYDLGEFNQKGTVRTKYGTRSQLQAAVTSLKNNGIQVYGDVVMNHKGGADATEMVRAVEVNPNNRNQEVTGEYTIEAWTRFDFPGRGNTHSSFKWRWYHFDGVDWDQSRSLHNRIYKFRGHGKAWDWEVDTEFGNYDYLMYADYDMDHPEVVNELRNWGVWYTNTLGLDGFRIDAVKHIKYSFTRDWINHVRSATGKNMFAVAEFWKNDLGAIENYLQKTNWNHSVFDVPLHYNLYNASKSGGNYDMRNIFNGTVVQRHPSHAVTFVDNHDSQPEEALESFVEEWFKPLAYALTLTREQGYPSVFYGDYYGIPTHGVPAMRSKIDPILEARQKYAYGPQHDYLDHPDVIGWTREGDSSHPKSGLATLITDGPGGSKRMYAGLKNAGETWYDITGNRSDTVKIGSDGWGEFHVNDGSVSIYVQK

SEQ ID NO: 28688 - protein, 485 aa, Bacillus sp.
HHNGTNGTMMQYFEWYLPNDGNHWNRLNSDASNLKSKGITAVWIPPAWKGASQNDVGYGAYDLYDLGEFNQKGTVRTKYGTRSQLQAAVTSLKNNGIQVYGDVVMNHKGGADATEMVRAVEVNPNNRNQEVTGEYTIEAWTRFDFPGRGNTHSSFKWRWYHFDGVDWDQSRRLNNRIYKFRGHGKAWDWEVDTEFGNYDYLMYADYDMDHQEVVNELRNWGVWYTNTLGLDGFRIDAVKHIKYSFTRDWINHVRSATGKNMFAVAEFWKNDLGAIENYLQKTNWNHSVFDVPLHYNLYNASKSGGNYDMRNIFNGTVVQRHPSHAVTFVDNHDSQPEEALESFVEEWFKPLAYALTLTREQGYPSVFYGDYYGIPTHGVPAMRSKIDPILEARQKYAYGPQHDYLDHPDVIGWTREGDSSHPKSGLATLITDGPGGSKRMYAGLKNAGETWYDITGNRSDTVKIGSDGWGEFHVNDGSVSIYVQK

SEQ ID NO: 28689 - protein, 485 aa, Bacillus sp.
HHNGTNGTMMQYFEWYLPNDGNHWNRLNSDASNLKSKGITAVWIPPAWKGASQNDVGYGAYDLYDLGEFNQKGTVRTKYGTRSQLQAAVTSLKNNGIQVYGDVVMNHKGGADATEMVRAVEVNPNNRNQEVTGEYTIEAWTRFDFPGRGNTHSSFKWAWYHFDGVDWDQSRRLNNRIYKFRGHGKAWDWEVDTEFGNYDYLMYADYDMDHPEVVNELRNWGVWYTNTLGLDGFRIDAVKHIKYSFTRDWINHVRSATGKNMFAVAEFWKNDLGAIENYLQKTNWNHSVFDVPLHYNLYNASKSGGNYDMRNIFNGTVVQRHPSHAVTFVDNHDSQPEEALESFVEEWFKPLAYALTLTREQGYPSVFYGDYYGIPTHGVPAMRSKIDPILEARQKYAYGPQHDYLDHPDVIGWTREGDSSHPKSGLATLITDGPGGSKRMYAGLKNAGETWYDITGNRSDTVKIGSDGWGEFHVNDGSVSIYVQK

SEQ ID NO: 28690 - protein, 483 aa, Bacillus sp.
HHNGTNGTMMQYFEWYLPNDGNHWNRLNSDASNLKSKGITAVWIPPAWKGASQNDVGYGAYDLYDLGEFNQKGTVRTKYGTRSQLQAAVTSLKNNGIQVYGDVVMNHKGGADATEMVRAVEVNPNNRNQEVTGEYTIEAWTRFDFPGRGNTHSSFKWRWYHFDGVDWDQSRRLNNRIYKFRGKAWDWEVDTEFGNYDYLMYADYDMDHPEVVNELRNWGVWYTNTLGLDGFRIDAVKHIKYSFTRDWINHVRSATGKNMFAVAEFWKNDLGAIENYLQKTNWNHSVFDVPLHYNLYNASKSGGNYDMRNIFNGTVVQANPNHAVTFVDNHDSQPEEALESFVEEWFKPLAYALTLTREQGYPSVFYGDYYGIPTHGVPAMRSKIDPILEARQKYAYGPQHDYLDHPDVIGWTREGDSSHPKSGLATLITDGPGGSKRMYAGLKNAGETWYDITGNRSDTVKIGSDGWGEFHVNDGSVSIYVQK

SEQ ID NO: 28691 - protein, 483 aa, Bacillus sp.
HHNGTNGTMMQYFEWYLPNDGNHWNRLNSDASNLKSKGITAVWIPPAWKGASQNDVGYGAYDLYDLGEFNQKGTVRTKYGTRSQLQAAVTSLKNNGIQVYGDVVMNHKGGADATEMVRAVEVNPNNRNQEVTGEYTIEAWTRFDFPGRGNTHSSFKWRWYHFDGVDWDQSRRLNNRIYKFRGKAWDWEVDTENGFYDYLMYADIDMDHPEVVSELRNWGVWYTNTLGLDGFRIDAVKHIKYSFTRDWINHVRSATGKNMFAVAEFWKNDLGAIENYLQKTNWNHSVFDVPLHYNLYNASKSGGNYDMRNIFNGTVVQRHPSHAVTFVDNHDSQPEEALESFVEEWFKPLAYALTLTREQGYPSVFYGDYYGIPTHGVPAMRSKIDPILEARQKYAYGPQHDYLDHPDVIGWTREGDSSHPKSGLATLITDGPGGSKRMYAGLKNAGETWYDITGNRSDTVKIGSDGWGEFHVNDGSVSIYVQK

SEQ ID NO: 28692 - protein, 483 aa, Bacillus sp.
HHNGTNGTMMQYFEWYLPNDGNHWNRLNSDASNLKSKGITAVWIPPAWKGASQNDVGYGAYDLYDLGEFNQKGTVRTKYGTRSQLQAAVTSLKNNGIQVYGDVVMNHKGGADATEMVRAVEVNPNNRNQEVTGEYTIEAWTRFDFPGRGNTHSSFKWRWYHFDGVDWDQSRRLNNRIYKFRGKAWDWEVDTEFGNYDYLMYADYDMDHPEVVNELRNWGVWYTNTLGLDGFRIDAVKHIKYSFTRDWINHVRSATGKNMFAVAEFWKNDLGLIENYLQKTNWNHSVFDVPLHYNLYNASKSGGNYDMRNIFNGTVVQRHPSHAVTFVDNHDSQPEEALESFVEEWFKPLAYALTLTREQGYPSVFYGDYYGIPTHGVPAMRSKIDPILEARQKYAYGPQHDYLDHPDVIGWTREGDSSHPKSGLATLITDGPGGSKRMYAGLKNAGETWYDITGNRSDTVKIGSDGWGEFHVNDGSVSIYVQK

SEQ ID NO: 28693 - protein, 483 aa, Synthetic construct
HHNGTNGTMMQYFEWYLPNDGNHWNRLNSDASNLKSKGITAVWIPPAWKGASQNDVGYGAYDLYDLGEFNQKGTVRTKYGTRSQLQAAVTSLKNNGIQVYGDVVMNHKGGADATEMVRAVEVNPNNRNQEVTGEYTIEAWTRFDFPGRGNTHSSFKWRWYHFDGVDWDQSRRLNNRIYKFRVKKWDWEVDTENGNYDYLMYADIDMDHPEVVNELRNWGVWYTNTLGLDGFRIDAVKHIKYSFTRDWINHVRSATGKNMFAVAEFWKNDLGAIENYLQKTNWNHSVFDVPLHYNLYNASKSGGNYDMRNIFNGTVVQRHPSHAVTFVDNHDSQPEEALESFVEEWFKPLAYALTLTREQGYPSVFYGDYYGIPTHGVPAMRSKIDPILEARQKYAYGPQHDYLDHPDVIGWTREGDSSHPKSGLATLITDGPGGSKRMYAGLKNAGETWYDITGNRSDTVKIGSDGWGEFHVNDGSVSIYVQK

SEQ ID NO: 28694 - protein, 485 aa, Bacillus sp.
HHNGTNNTMMQYFEWYLPNDGNHWNRLNSDASNLKSKGITAVWIPPAWKGASQNDVGYGAYDLYDLGEFNQKGTVRTKYGTRSQLQAAVTSLKNNGIQVYGDVVMNHKGGADATEMVRAVEVNPNNRNQEVTGEYTIEAWTRFDFPGRGNTHSSFKWRWYHFDGVDWDQSRRLNNRIYKFRGHGKAWDWEVDTEFGNYDYLMYADYDMDHPEVVNELRNWGVWYTNTLGLDGFRIDAVKHIKYSFTRDWINHVRSATGKNMFAVAEFWKNDLGAIENYLQKTNWNHSVFDVPLHYNLYNASKSGGNYDMRNIFNGTVVQAHPSHAVTFVDNHDSQPEEALESFVEEWFKPLAYALTLTREQGYPSVFYGDYYGIPTHGVPAMRSKIDPILEARQKYAYGPQHDYLDHPDVIGWTREGDSSHPKSGLATLITDGPGGSKRMYAGLKNAGETWYDITGNRSDTVKIGSDGWGEFHVNDGSVSIYVQK

SEQ ID NO: 28695 - protein, 483 aa, Synthetic construct
HHNGTNGTMMQYFEWYLPNDGNHWNRLNSDASNLKSKGITAVWIPPAWKGASQNDVGYGAYDLYDLGEFNQKGTVRTKYGTRSQLQAAVTSLKNNGIQVYGDVVMNHKGGADATEMVRAVEVNPNNRNQEVTGEYTIEAWTRFDFPGRGNTHSSFKWRWYHFDGVDWDQSRRLSNRIYKFRGKAWDWEVDTENGNYDYLMYADIDMDHPEVVNELRNWGVWYTNTLGLDGFRIDAVKHIKYSFTRDWINHVRSATGKNMFAVAEFWKNDLGAIENYLQKTNWNHSVFDVPLHYNLYNASKSGGNYDMRKLLNGTVVSKHPSKAVTFVDNHDTQPEEALESFVQPWFKPLAYAFILTRESGYPSVFYGDMYGIPTHGVPAMKHKIEPILKARKQYAYGAQHDYLDHPDIIGWTREGDSSHPKSGLATLITDGPGGSKRMYAGLKNAGETWYDITGNRSDTVKIGSDGWGTFHVNKGSVSIYVQK

SEQ ID NO: 28696 - protein, 485 aa, Bacillus sp.
HHNGTNGTMMQYFEWYLPNDGNHWNRLNSDASNLKSKGITAVWIPPSWKGASQNDVGYGAYDLYDLGEFNQKGTVRTKYGTRSQLQAAVTSLKNNGIQVYGDVVMNHKGGADATEMVRAVEVNPNNRNQEVTGEYTIEAWTRFDFPGRGNTHSSFKWRWYHFDGVDWDQSRRLNNRIYKFRGHGKAWDWEVDTEFGNYDYLMYADYDMDHPEVVNELRNWGVWYTNTLGLDGFRIDAVKHIKYSFTRDWINHVRSATGKNMFAVAEFWKNDLGAIENYLQKTNWNHSVFDVPLHYNLYNASKSGGNYDMRNIFNGTVVQRHPSHAVTFVDNHDSQPEEALESFVEEWFKPLAYALTLTREQGYPSVFYGDYYGIPTHGVPAMRSKIDPILEARQKYAYGPQHDYLDHPDVIGWTREGDSSHPKSGLATLITDGPGGSKRMYAGLKNAGETWYDITGNRSDTVKIGSDGWGEFHVNDGSVSIYVQK

SEQ ID NO: 28697 - protein, 485 aa, Synthetic construct
HHNGTNGTMMQYFEWYLPNDGNHWNRLNSDASNLKSKGITAVWIPPAWKGASQNDVGYGAYDLYDLGEFNQKGTVRTKYGTRSQLQAAVTSLKNNGIQVYGDVVINHKGGADATEMVRAVEVNPNNRNQEVTGEYTIEAWTRFDFPGRGNTHSSFKWRWYHFDGVDWDQSRRLNNRIYKFRGHGKAWDWEVDTENGNYDYLMYADYDMDHPEVVNELRNWGVWYTNTLGLDGFRIDAVKHIKYSFLRDWINHVRSATGKNMFAVAEFWKNDLGAIENYLQKTNWNHSVFDVPLHYNLYNASKSGGNYDMRNIFNGTVVQRHPSHAVTFVDNHDSQPEEALESFVEEWFKPLAYALTLTREQGYPSVFYGDYYGIPTHGVPAMRSKIDPILEARQKYAYGPQHDYLDHPDVIGWTREGDSSHPKSGLATLITDGPGGSKRMYAGLKNAGETWYDITGNRSDTVKIGSDGWGEFHVNDGSVSIYVQK

SEQ ID NO: 28698 - protein, 485 aa, Bacillus sp.
HHNGTNGTMMQYFEWYLPNDGNHWNRLNSDASNLKSKGITAVWIPPAWKGASQNDVGYGAYDLYDLGEFNQKGTVRTKYGTRSQLQAAVTSLKNNGIQVYGDVVMNHKGGADATEMVRAVEVNPNNRNQEVTGEYTIEAWTRFDFPGRGNTHSSFKWRWYHFDGVDWDQSRRLNNRIYKFRGHGKAWDWEVDTEFGNYDLLMYADYDMDHPEVVNELRNWGVWYTNTLGLDGFRIDAVKHIKYSFTRDWINHVRSATGKNMFAVAEFWKNDLGAIENYLQKTNWNHSVFDVPLHYNLYNASKSGGNYDMRNIFNGTVVQRHPSHAVTFVDNHDSQPEEALESFVEEWFKPLAYALTLTREQGYPSVFYGDYYGIPTHGVPAMRSKIDPILEARQKYAYGPQHDYLDHPDVIGWTREGDSSHPKSGLATLITDGPGGSKRMYAGLKNAGETWYDITGNRSDTVKIGSDGWGEFHVNDGSVSIYVQK

SEQ ID NO: 28699 - protein, 485 aa, Bacillus sp.
HHNGTNLTMMQYFEWYLPNDGNHWNRLNSDASNLKSKGITAVWIPPAWKGASQNDVGYGAYDLYDLGEFNQKGTVRTKYGTRSQLQAAVTSLKNNGIQVYGDVVMNHKGGADATEMVRAVEVNPNNRNQEVTGEYTIEAWTRFDFPGRGNTHSSFKWRWYHFDGVDWDQSRRLNNRIYKFRGHGKAWDWEVDTEFGNYDYLMYADYDMDHPEVVNELRNWGVWYTNTLGLDGFRIDAVKHIKYSFTRDWINHVRSATGKNMFAVAEFWKNDLGAIENYLQKTNWNHSVFDVPLHYNLYNASKSGGNYDMRNIFNGTVVQMHPNHAVTFVDNHDSQPEEALESFVEEWFKPLAYALTLTREQGYPSVFYGDYYGIPTHGVPAMRSKIDPILEARQKYAYGPQHDYLDHPDVIGWTREGDSSHPKSGLATLITDGPGGSKRMYAGLKNAGETWYDITGNRSDTVKIGSDGWGEFHVNDGSVSIYVQK

SEQ ID NO: 28700 - protein, 483 aa, Bacillus sp.
HHNGTNGTMMQYFEWYLPNDGNHWNRLNSDASNLKSKGITAVWIPPAWKGASQNDVGYGAYDLYDLGEFNQKGTVRTKYGTRSQLQAAVTSLKNNGIQVYGDVVMNHKGGADATEMVRAVEVNPNNRNQEVTGEYTIEAWTRFDFPGRANTHSSFKWRWYHFDGVDWDQSRRLNNRIYKFRGKAWDWEVDTEFGNYDYLMYADYDMDHPEVVNELRNWGVWYTNTLGLDGFRIDAVKHIKYSFTRDWINHVRSATGKNMFAVAEFWKNDLGAIENYLQKTNWNHSVFDVPLHYNLYNASKSGGNYDMRNIFNGTVVQRHPSHAVTFVDNHDSQPEEALESFVEEWFKPLAYALTLTREQGYPSVFYGDYYGIPTHGVPAMRSKIDPILEARQKYAYGPQHDYLDHPDVIGWTREGDSSHPKSGLATLITDGPGGSKRMYAGLKNAGETWYDITGNRSDTVKIGSDGWGEFHVNDGSVSIYVQK

SEQ ID NO: 28701 - protein, 483 aa, Bacillus sp.
HHNGTNGTMMQYFEWYLPNDGNHWNRLNSDASNLKSKGITAVWIPPAWKGASQNDVGYGAYDLYDLGEFNQKGTVRTKYGTRSQLQAAVTSLKNNGIQVYGDVVMNHKGGADATEMVRAVEVNPNNRNQEVTGEYTIEAWTRFDFPGRGNTHSSFKWRWYHFDGVDWDQSRKLNNRIYKFRGKAWDWEVDTEFGNYDYLMYVDYDMDHPEVVNELRNWGVWYTNTLGLDGFRIDAVKHIKYSFTRDWINHVRSATGKNMFAVAEFWKNDLGAIENYLQKTNWNHSVFDVPLHYNLYNASKSGGNYDMRNIFNGTVVQRHPSHAVTFVDNHDSQPEEALESFVDEWFKPLAYALTLTREQGYPSVFYGDYYGIPTHGVPAMRSKIDPILEARQKYAYGPQHDYLDHPDVIGWTREGDSSHPKSGLATLITDGPGGSKRMYAGLKNAGETWYDITGNRSDTVKIGSDGWGEFHVNKGSVSIYVQK

SEQ ID NO: 28702 - protein, 485 aa, Bacillus sp.
HHNGTNGTMMQYFEWYLPNDGNHWNRLNSDASNLKSKGITAVWIPPAWKGASQNDVGYGAYDLYDLGEFNQKGTVRTKYGTRSQLQAAVTSLKNNGIQVYGDVVMNHKGGADATEMVRAVEVNPNNRNQEVTGEYTIEAWTRFDFPGRGNTHSSFKWRWYHFDGVDWDQSRRLNNRIYKFRGHGKAWDWEVDTEFGNYDYLMYADYDMDHPEVVNELRNWGVWYTNTLGLDGFRIDAVKHIKYSFTRDWINHVRSATGKNMFAVAEFWKNDLGAIENYLQKTNWNHSVFDVPLHYNLYNASKSQGNYDMRNIFNGTVVQRHPSHAVTFVDNHDSQPEEALESFVEEWFKPLAYALTLTREQGYPSVFYGDYYGIPTHGVPAMRSKIDPILEARQKYAYGPQHDYLDHPDVIGWTREGDSSHPKSGLATLITDGPGGSKRMYAGLKNAGETWYDITGNRSDTVKIGSDGWGEFHVNDGSVSIYVQK

SEQ ID NO: 28703 - protein, 483 aa, Bacillus sp.
HHNGTNGTMMQYFEWYLPNDGNHWNRLNSDASNLKSKGITAVWIPPAWKGASQNDVGYGAYDVYDLGEFNQKGTVRTKYGTRSQLQAAVTSLKNNGIQVYGDVVMNHKGGADATEMVRAVEVNPNNRNQEVTGEYTIEAWTRFDFPGRGNTHSSFKWRWYHFDGVDWDQSRRLNNRIYKFRGKAWDWEVDTENGNYDYLMYADIDLDHPEVVNELRVWGVWYTNTLGLDGFRIDAVKHIKYSFTRDWINHVRSATGKNMFAVAEFWKNDLGAIENYLQKTNWNHSVFDVPLHYNLYNASKSGGNYDMRNIFNGTVVQRHPSHAVTFVDNHDSQPEEALESFVEEWFKPLAYALTLTREQGYPSVFYGDYYGIPTHGVPAMRSKIDPILEARQKYAYGPQHDYLDHPDVIGWTREGDSSHPKSGLATLITDGPGGSKRMYAGLKNAGETWYDITGNRSDTVKIGSDGWGEFHVNDGSVSIYVQK

SEQ ID NO: 28704 - protein, 485 aa, Synthetic construct
HHNGTNGTMMQYFEWYLPNDGNHWNRLNSDASNLKSKGITAVWIPPAWKGASQNDVGYGAYDLYDLGEFNQKGTVRTKYGTRSQLQAAVTSLKNNGIQVYGDVVMNHKGGADATEMVRAVEVNPNNRNQEVTGEYTIEAWTRFDFPGRGNTHSSFKWRWYHFDGVDWDQSRRLNNRIYKFRGHGKAWDWEVDTEFGNYDYLMYADYDYDHPEVVNELRNWGVWYTNTLGLDGFRIDAVKHIKYSFTRDWINHVRSATGKNMFAVAEFWKNDLGAIENYLQKTNWNHSVFDVPLHYNLYNASKSGGNYDMRNIFNGTVVQRHPSHAVTFVDNHDSQPEEALESFVEEWFKPLAYALTLTREQGYPSVFYGDYYGIPTHGVPAMRSKIDPILEARQKYAYGPQHDYLDHPDVIGWTREGDSSHPKSGLATLITDGPGGSKRMYAGLKNAGETWYDITGNRSDTVKIGSDGWGEFHVNDGSVSIYVQK

SEQ ID NO: 28705 - protein, 485 aa, Bacillus sp.
HHNGTNGTMMQYFEWYLPNDGNHWNRLNSDASNLKSKGITAVWIPPAWKGASQNDVGYGAYDLYDLGEFNQKGTVRTKYGTRSQLQAAVTSLKNNGIQVYGDVVMNHKGGADATEMVRAVEVNPNNRNQEVTGEYTIEAWTRFDFPGRGNTHSSFKWRWYHFDGVDWDKSRRLNNRIYKFRGHGKAWDWEVDTEFGNYDYLMYADYDMDHPEVVNELRNWGVWYTNTLGLDGFRIDAVKHIKYSFTRDWINHVRSATGKNMFAVAEFWKNDLGAIENYLQKTNWNHSVFDVPLHYNLYNASKSGGNYDMRNIFNGTVVQRHPSHAVTFVDNHDSQPEEALESFVEEWFKPLAYALTLTREQGYPSVFYGDYYGIPTHGVPAMRSKIDPILEARQKYAYGPQHDYLDHPDVIGWTREGDSSHPKSGLATLITDGPGGSKRMYAGLKNAGETWYDITGNRSDTVKIGSDGWGEFHVNDGSVSIYVQK

SEQ ID NO: 28706 - protein, 483 aa, Bacillus sp.
HHNGTNGTMMQYFEWYLPNDGNHWNRLNSDASNLKSKGITAVWIPPAWKGASQNDVGYGAYDLYDLGEFNQKGTVRTKYGTRSQLQAAVTSLKNNGISVYGDVVMNHKGGADATEMVRAVEVNPNNRNQEVTGEYTIEAWTRFDFPGRGNTHSSFKWRWYHFDGVDWDQSRRLNNRIYKFRGKAWDWEVDTEFGNYDYLMYADYDMDHPEVVNELRNWGVWYTNTLGLDGFRIDAVKHIKYSFTRDWINHVRSATGKNMFAVAEFWKNDLGAIENYLQKTNWNHSVFDVPLHYNLYNASKSGGNYDMRNIFNGTVVQAHPNHAVTFVDNHDSQPEEALESFVEEWFKPLAYALTLTREQGYPSVFYGDYYGIPTHGVPAMRSKIDPILEARQKYAYGPQHDYLDHPDVIGWTREGDSSHPKSGLATLITDGPGGSKRMYAGLKNAGETWYDITGNRSDTVKIGSDGWGEFHVNDGSVSIYVQK

SEQ ID NO: 28707 - protein, 485 aa, Bacillus sp.
HHNGTNGTMMQYFEWYLPNDGNHWNRLNSDASNLKSKGITAVWIPPAWKGASQNDVGYGAYDLYDLGEFNQKGTVRTKYGTRSQLQAAVTSLKNNGIQVYGDVVMNHKGGADATEMVRAVEVNPNNRNQEVTQEYTIEAWTRFDFPGRGNTHSSFKWRWYHFDGVDWDQSRRLNNRIYKFRGHGKAWDWEVDTEFGNYDYLMYADYDMDHPEVVNELRNWGVWYTNTLGLDGFRIDAVKHIKYSFTRDWINHVRSATGKNMFAVAEFWKNDLGAIENYLQKTNWNHSVFDVPLHYNLYNASKSGGNYDMRNIFNGTVVQRHPSHAVTFVDNHDSQPEEALESFVEEWFKPLAYALTLTREQGYPSVFYGDYYGIPTHGVPAMRSKIDPILEARQKYAYGPQHDYLDHPDVIGWTREGDSSHPKSGLATLITDGPGGSKRMYAGLKNAGETWYDITGNRSDTVKIGSDGWGEFHVNDGSVSIYVQK

SEQ ID NO: 28708 - protein, 485 aa, Bacillus sp.
HHNGTNGTMMQYFEWYLPNDGNHWNRLNSDASNLKSKGITAVWIPPAWKATSQNDVGYGAYDLYDLGEFNQKGTVRTKYGTRSQLQAAVTSLKNNGIQVYGDVVMNHKGGADATEMVPAVEVNPNNRNQEVTGEYTIEAWTRFDFPGRGNTHSSFKWRWYHFDGVDWDQSRELNNRIYKFRGHSKAWDWEVDTEFGNYDYLMYTDYDMDHPEVVNELRNWGVWYTNTLGLDGFRIDAVKHIKYSFTRDWINHVRSATGKNMFAVAEFWKNDLGAIENYLQKTNWNHSVFDVPLHYNLYNASKSGGNYDMRNIFNGTVVQRHPSHAVTFVDNHDSQPEEALESFVEEWFKPLAYALTLTREQGYPSVFYGDYYGIPTHGVPAMRSKIDPILEARQKYAYGPQHDYLDHPDVIGWTREGDSSHPKSGLATLITDGPGGSKRMYAGLKNAGETWYDITGNRSDTVKIGSDGWGEFHVNDGSVSIYVQK

SEQ ID NO: 28709 - protein, 485 aa, Synthetic construct
HHNGTNGTMMQYFEWYLPNDGNHWNRLNSDASNLKSKGITAVWIPPAWKGASQNDVGYGAYDLYDLGEFNQKGTVRTKYGTRSQLQAAVTSLKNNGIQVYGDVVMNHKGGADATEMVRAVEVNPNNRNQEVTGEYTIEAWTRFDFPGRGNTHSSFKWRWYHFDGVDWDQSRRLNNRIYKFRGHGKAWDWEVDTEFGNYDYLMYADYDMDHPEVVNEVRNWGVWYTNTLGLDGFRIDAVKHIKYSFTRDWINHVRSATGKNMFAVAEFWKNDLGAIENYLQKTNWNHSVFDVPLHYNLYNASKSGGNYDMRNIFNGTVVQRHPSHAVTFVDNHDSQPEEALESFVEEWFKPLAYALTLTREQGYPSVFYGDYYGIPTHGVPAMRSKIDPILEARQKYAYGPQHDYLDHPDVIGWTREGDSSHPKSGLATLITDGPGGSKRMYAGLKNAGETWYDITGNRSDTVKIGSDGWGEFHVNDGSVSIYVQK

SEQ ID NO: 28710 - protein, 483 aa, Bacillus sp.
HHNGTNGTMMQYFEWYLPNDGNHWNRLNSDASNLKSKGITAVWIPPAWKGASQNDVGYGAYDLYDLGEFNQKGTVRTKYGTRSQLQAAVTSLKNNGIQVYGDVVMNHKGGADATEMVRAVEVNPNNRNQEVTGEYTIEAWTRFDFPGRGNTHSSFKWRWYHFDGVDWDQSRRLNNRIYKFRGKAWDWEVDTEFGNYDYLMYADYDMDHPEVSNELRNWGVWYTNTLGLDGFRIDAVKHIKYSFTRDWINHVRSATGKNMFAVAEFWKNDLGAIENYLQKTNWNHSVFDVPLHYNLYNASKSGGNYDMRNIFNGTVVQRHPSHAVTFVDNHDSQPEEALESFVEEWFKPLAYALTLTREQGYPSVFYGDYYGIPTHGVPAMRSKIDPILEARQKYAYGPQHDYLDHPDVIGWTREGDSSHPKSGLATLITDGPGGSKRMYAGLKNAGETWYDITGNRSDTVKIGSDGWGEFHVNDGSVSIYVQK

SEQ ID NO: 28711 - protein, 485 aa, Bacillus sp.
HHNGTNGTMMQYFEWYLPNDGNHWNRLNSDASNLKSKGITAVWIPPAWKAVSQNDVGYGAYDLYDLGEFNQKGTVRTKYGTRSQLQAAVTSLKNNGIQVYGDVVMNHKGGADATEMVRAVEVNPNNRNQEVTGEYTIEAWTRFDFPGRGNTHSSFKWRWYHFDGVDWDQSRRLSNRIYKFRGHGKAWDWEVDTEFGNYDYLMYADYDMDHPEVVNELRNWGVWYTNTLGLDGFRIDAVKHIKYSFTRDWINHVRSATGKNMFAVAEFWKNDLGAIENYLQKTNWNHSVFDVPLHYNLYNASKSGGNYDMRNIFNGTVVQAHPNHAVTFVDNHDSQPEEALESFVEEWFKPLAYALTLTREQGYPSVFYGDYYGIPTHGVPAMRSKIDPILEARQKYAYGPQHDYLDHPDVIGWTREGDSSHPKSGLATLITDGPGGSKRMYAGLKNAGETWYDITGNRSDTVKIGSDGWGEFHVNDGSVSIYVQK

SEQ ID NO: 28712 - protein, 485 aa, Bacillus sp.
HHNGTNQTMMQYFEWYLPNDGNHWNRLNSDASNLKSKGITAVWIPPAWKGASQNDVGYGAYDLYDLGEFNQKGTVRTKYGTRSQLQAAVTSLKNNGIAVYGDVVMNHKGGADATEMVRAVEVNPNNRNQEVTGEYTIEAWTRFDFPGRGNTHSSFKWRWYHFDGVDWDQSRRLNNRIYKFRGHGKAWDWEVDTEFGNYDYLMYADYDMDHPEVVNELRNWGVWYTNTLGLDGFRIDAVKHIKYSFTRDWINHVRSATGKNMFAVAEFWKNDLGAIENYLQKTNWNHSVFDVPLHYNLYNASKSGGNYDMRNIFNGTVVQMHPMHAVTFVDNHDSQPEEALESFVEEWFKPLAYALTLTREQGYPSVFYGDYYGIPTHGVPAMRSKIDPILEARQKYAYGPQHDYLDHPDVIGWTREGDSSHPKSGLATLITDGPGGSKRMYAGLKNAGETWYDITGNRSDTVKIGSDGWGEFHVNDGSVSIYVQK

SEQ ID NO: 28713 - protein, 485 aa, Bacillus sp.
HCNGTNGTMMQYFEWYLPNDGNHWNRLNSDASNLKSKGITAVWIPPAWKGASQNDVGYGAYDLYDLGEFNQKGTVRTKYGTRSQLQAAVTSLKNNGIQVYGDVVMNHKGGADATEMVRAVEVNPNNRNQEVTGEYTIEAWTRFDFPGRGNTHSSFKWRWYHFDGVDWDQSRRLNNRIYKFRGHGKAWDWEVDTEFGNYDYLMYADYDMDHPEVVNELRNWGVWYTNTLGLDGFRIDAVKHIKYSFTRDWINHVRSATGKNMFAVAEFWKNDLGAIENYLQKTNWNHSVFDVPLHYNLYNASKSGGNYDMRNIFNGTVVQRHPSHAVTFVDNHDSQPEEALESFVEEWFKPLAYALTLTREQGYPSVFYGDYYGIPTHGVPAMRSKIDPILEARQKYAYGPQHDYLDHPDVIGWTREGDSSHPKSGLATLITDGPGGSKRMYAGLKNAGETWYDITGNRSDTVKIGSDGWGEFHVNDGSVSIYVQK

SEQ ID NO: 28714 - protein, 485 aa, Bacillus sp.
HHNGTNGTMMQYFEWYLPNDGNHWNRLNSDASNLKSKGITAVWIPPAWKGASQNDVGYGAYDLYDLGEFNQKGTVRTKYGTRSQLQAAVTSLKNNGIQVYGDVVMNHKGGADATEMVSAVEVNPNNRLQEVTGEYTIEAWTRFDFPGRGNTHSSFKWRWYHFDGVDWDQSRRLNNRIYKFRSHGKAWDWEVDTEFGNYDYLMYADYDMDHPEVVNELRNWGVWYTNTLGLDGFRIDAVKHIKYSFTRDWINHVRSATGKNMFAVAEFWKNDLGAIENYLQKTNWNHSVFDVPLHYNLYNASKSGGNYDMRNIFNGTVVQRHPSHAVTFVDNHDSQPEEALESFVEEWFKPLAYALTLTREQGYPSVFYGDYYGIPTHGVPAMRSKIDPILEARQKYAYGPQHDYLDHPDVIGWTREGDSSHPKSGLATLITDGPGGSKRMYAGLKNAGETWYDITGNRSDTVKIGSDGWGEFHVNDGSVSIYVQK

SEQ ID NO: 28715 - protein, 485 aa, Bacillus sp.
HHNGTNGTMMQYFEWYLPNDGNHWNRLNSDASNLKSKGITAVWIPPAWKGASQNDVGYGAYDLYDLGEFNQKGTVRTKYGTRSQLQAAVTSLKNNGIQVYGDVVMNHKGGADATEMVRAVEVNPNNRNQEVTGEYTIEAWTRFDFPGRGNTHSSFKWRWYHFDGVDWDQSRQLDNRIYKFRGHGKAWDWEVDTEFGNYDYLMYADYDMDHPEVVNELRNWGVWYTNTLGLDGFRIDAVKHIKYSFTRDWINHVRSATGKNMFAVAEFWKNDLGAIENYLQKTNWNHSVFDVPLHYNLYNASKSQGNYDMRNIFNGTVVQRHPSHAVTFVDNHDSQPEEALESFVDTWFKPLAYALTLTREQGYPSVFYGDYYGIPTHGVPAMRSKIDPILEARQKYAYGPQHDYLDHPDVIGWTREGDSSHPKSGLATLITDGPGGSKRMYAGLKNAGETWYDITGNRSDTVKIGSDGWGEFHVNGSSVSIYVQK

SEQ ID NO: 28716 - protein, 485 aa, Bacillus sp.
HHNGTNGTMMQYFEWYLPNDGNHWNRLNSDASNLKSKGITAVWIPPAWKGASQNDVGYGAYDLYDLGEFNQKGTVRTKYGTRSQLQAAVTSLKNNGIQVYGDVVMNHKGGADATEMVRAVEVNPNNRNQEVTGEYTIEAWTRFDFPGRGNTHSSFKWRWYHFDGVDWDQSRRLNNRIYKFRGHGKAWDWEVDTEFGNYDYLMYADYDMDHPEVVNELRNWGVWYTNTLGLDGFRIDAVKHIKYSFTRDWINHVRSATGKNMFAVAEFWKNDLGAIENYLQKTNWNHSVFDVPLHYNLYNASKSQGNYDMRNIFNGTVVQRHPSHAVTFVDNHDSQPEEALESFVDTWFKPLAYALTLTREQGYPSVFYGDYYGIPTHGVPAMRSKIDPILEARQKYAYGPQHDYLDHPDVIGWTREGDSSHPKSGLATLITDGPGGSKRMYAGLKNAGETWYDITGNRSDTVKIGSDGWGEFHVNGGSVSIYVQK

SEQ ID NO: 28717 - protein, 485 aa, Bacillus sp.
HHNGTNGTMMQYFEWYLPNDGNHWNRLNSDASNLKSKGITAVWIPPAWKAASQNDVGYGAYDLYDLGEFNQKGTVRTKYGTRSQLQAAVTSLKNNGIQVYGDVVMNHKGGADATEMVRAVEVNPNNRNQEVTGEYTIEAWTRFDFPGRGNTHSSFKWRWYHFDGVDWDQSRRTSNRIYKFRGHGKAWDWEVDTEFGNYDYLMYADYDMDHPEVVNELRNWGVWYTNTLGLDGFRIDAVKHIKYSFTRDWINHVRSATGKNMFAVAEFWKNDLGAIENYLQKTNWNHSVFDVPLHYNLYNASKSGGNYDMRNIFNGTVVQRHPSHAVTFVDNHDSQPEEALESFVEEWFKPLAYALTLTREQGYPSVFYGDYYGIPTHGVPAMRSKIDPILEARQKYAYGPQHDYLDHPDVIGWTREGDSSHPKSGLATLITDGPGGSKRMYAGLKNAGETWYDITGNRSDTVKIGSDGWGEFHVNDGSVSIYVQK

SEQ ID NO: 28718 - protein, 485 aa, Bacillus sp.
HHNGTNGTMMQYFEWYLPNDGNHWNRLNSDASNLKSKGITAVWIPPAWKGASQNDVGYGAYDLYDLGEFNQKGTVRTKYGTRSQLQAAVTSLKNNGIQVYGDVVMNHKGGADATEMVRAVEVNPNNRNQEVTGEYTIEAWTRFDFPGRGNTHSSFKWRWYHFDGVDWDQSRRLNNRIYKFRGHGKAWDWEVDTEFGNYDYLMYADYDMDHPEVVNELRNWGVWYTNTLGLDGFRIDAVKHIKYSFTRDWINHVRSATGKNMFAVAEFWKNDLGAIENYLQKTNWNHSVFDVPLHYNLYNASKSGGNYDMRNIFNGTVVQRHPSHAVTFVDNHDSQPEEALESWVEEWFKPLAYALTLTREQGYPSVFYGDYYGIPTHGVPAMRSKIDPILEARQKYAYGPQHDYLDHPDVIGWTREGDSSHPKSGLATLITDGPGGSKRMYAGLKNAGETWYDITGNRSDTVKIGSDGWGEFHVNDGSVSIYVQK

SEQ ID NO: 28719 - protein, 485 aa, Bacillus sp.
HHNGTNGTMMQYFEWYLPNDGNHWNRLNSDASNLKSKGITAVWIPPAWKGASQNDVGYGAYDLYDLGEFNQKGTVRTKYGTRSQLQAAVTSLKNNGIQVYGDVVMNHKGGADATEMVRAVEVNPNNRNQEVTGEYTIEAWTRFDFPGRGNTHSSFKWRWYHFDGVDWDQSRRLNNRIYKFRGHGKAWDWEVDTEFGNYDYLMYADYDMDHPEVVNELRNWGVWYTNTLGLDGFRIDAVKHIKYSFTRDWINHVRSATGKNMFAVAEFWKNDLGAIENYLQKTNWNHSVFDVPLHYNLYNASKSGGNYDMRNIFNGTVVQRHPSHAVTFVDNHDSQPEEALESFVEEWFKPLAYALTLTREQGYPSVFYGDYYGIPTHGVPAMRSKIDPILEARQKYAYGPQHDYLDHPDVIGWTREGDSSHPKSGLATLITDGPGGSKRMYAGLKNAGETWYDITGNRSDTVKIGSDGWGEFHVNKQSVSIYVQK

SEQ ID NO: 28720 - protein, 485 aa, Bacillus sp.
HHNGTNGTMMQYFEWYLPNDGNHWNRLNSDASNLKSKGITAVWIPPAWKGASQNDVGYGAYDLYDLGEFNQKGTVRTKYGTRSQLQAAVTSLKNNGIQVYGDVVMNHKGGADATEMVRAVEVNPNNRNQEVTGEYTIEAWTRFDFPGRGNTHSSFKWRWYHFDGVDWDQSRRLNNRIYKFRGHGKAWDWEVDTEFGNYDYLMYADYDMDSPEVVNELRNWGVWYTNTLGLDGFRIDAVKHIKYSFTRDWINHVRSATGKNMFAVAEFWKNDLGAIENYLQKTNWNHSVFDVPLHYNLYNASKSGGNYDMRNIFNGTVVQRHPSHAVTFVDNHDSQPEEALESFVEEWFKPLAYALTLTREQGYPSVFYGDYYGIPTHGVPAMRSKIDPILEARQKYAYGPQHDYLDHPDVIGWTREGDSSHPKSGLATLITDGPGGSKRMYAGLKNAGETWYDITGNRSDTVKIGSDGWGEFHVNDGSVSIYVQK

SEQ ID NO: 28721 - protein, 485 aa, Bacillus sp.
HHNGTNGTMMQYFEWDLPNDGNHWDRLNSDASNLKSKGITAVWIPPAWKGASQNDVGYGAYDLYDLGEFNQKGTVRTKYGTRSQLQAAVTSLKNNGIQVYGDVVMNHKGGADATEMVRAVEVNPNNRNQEVTGEYTIEAWTRFDFPGRGNTHSSFKWRWYHFDGVDWDQSRRLNNRIYKFRGHGKAWDWEVDTEFGNYDYLMYADYDMDHPEVVNELRNWGVWYTNTLGLDGFRIDAVKHIKYSFTRDWINHVRSATGKNMFAVAEFWKNDLGAIENYLQKTNWNHSVFDVPLHYNLYNASKSGGNYDMRNIFNGTVVQRHPSHAVTFVDNHDSQPEEALESFVEEWFKPLAYALTLTREQGYPSVFYGDYYGIPTHGVPAMRSKIDPILEARQKYAYGPQHDYLDHPDVIGWTREGDSSHPKSGLATLITDGPGGSKRMYAGLKNAGETWYDITGNRSDTVKIGSDGWGEFHVNDGSVSIYVQK

SEQ ID NO: 28722 - protein, 483 aa, Synthetic construct
HHNGTNGTMMQYFEWYLPNDGNHWNRLNSDASNLKSKGITAVWIPPAWKGASQNDVGYGAYDLYDLGEFNQKGTVRTKYGTRSQLQAAVTSLKNNGIQVYGDVVLNHKGGADATEMVRAVEVNPNNRNQEVTGEYTIEAWTRFDFPGRGNTHSSFKWRWYHFDGVDWDQSRRLNNRIYKFRGKAWDWEVDTENGNYDYLMYADYDMDHPEVVNEIRNWGVWYTNTLGLDGFRIDAVKHIKYSFTRDWINHVRSATGKNMFAVAEFWKNDLGAIENYLQKTNWNHSVFDVPLHYNLYNASKSGGNYDMRNIFNGTVVQRHPSHAVTFVDNHDSQPEEALESFVEEWFKPLAYALTLTREQGYPSVFYGDYYGIPTHGVPAMRSKIDPILEARQKYAYGPQHDYLDHPDVIGWTREGDSSHPKSGLATLITDGPGGSKRMYAGLKNAGETWYDITGNRSDTVKIGSDGWGEFHVNDGSVSIYVQK

SEQ ID NO: 28723 - protein, 485 aa, Bacillus sp.
HHNGTNGTMMQYFEWYLPNDGNHWNRLNSDASNLKSKGITAVWIPPAWKGASQNDVGYGAYDLYDLGEFNQKGTVRTKYGTRSQLQAAVTSLKNNGIQVYGDVVMNHKGGADATEMVRAVEVNPNNRNQEVTGEYTIEAYTRFDFPGRGNTHSSFKWRWYHFDGVDWDQSRNFQNRIYKFRGHGKAWDWEVDTEFGNYDYLMYADYDMDHPEVVNELRNWGVWYTNTLGLDGFRIDAVKHIKYSFTRDWINHVRSATGKNMFAVAEFWKNDLGAIENYLQKTNWNHSVFDVPLHYNLYNASKSQGNYDMRNIFNGTVVQRHPSHAVTFVDNHDSQPEEALESFVDTWFKPLAYALTLTREQGYPSVFYGDYYGIPTHGVPAMRSKIDPILEARQKYAYGPQHDYLDHPDVIGWTREGDSSHPKSGLATLITDGPGGSKRMYAGLKNAGETWYDITGNRSDTVKIGSDGWGEFHVNGSSVSIYVQK

SEQ ID NO: 28724 - protein, 483 aa, Bacillus sp.
HHNGTNGTMMQYFEWYLPNDGNHWNRLNSDASNLKSKGITAVWIPPAWKGASQNDVGYGAYDLYDLGEFNQKGTVRTKYGTRSQLQAAVTSLKNNGIQVYGDVVMNHKGGADATEMVRAVEVNPNNRNQEVTGEYTIEAWTRFDFPGRGNTHSSFKWRWYHFDGVDWDQSRRLNNRIYKFRGKAWDWEVDTENGNYDYLMYADIDLDFPEVVNELRIWGVWYTNTLGLDGFRIDAVKHIKYSFTRDWINHVRSATGKNMFAVAEFWKNDLGAIENYLQKTNWNHSVFDVPLHYNLYNASKSGGNYDMRNIFNGTVVQRHPSHAVTFVDNHDSQPEEALESFVEEWFKPLAYALTLTREQGYPSVFYGDYYGIPTHGVPAMRSKIDPILEARQKYAYGPQHDYLDHPDVIGWTREGDSSHPKSGLATLITDGPGGSKRMYAGLKNAGETWYDITGNRSDTVKIGSDGWGEFHVNDGSVSIYVQK

SEQ ID NO: 28725 - protein, 483 aa, Bacillus sp.
HHNGTNGTMMQYFEWYLPNDGNHWNRLNSDASNLKSKGITAVWIPPAWKGASQNDVGYGAYDLYDLGEFNQKGTVRTKYGTRSQLQAAVTSLKNNGIQVYGDVVMNHKGGADATEMVRAVEVNPNNRNQEVTGEYTIEAWTRFDFPGRGNTHSSFKWRWYHFDGVDWDQSRRLNNRIYKFRGKAWDWEVDTEFGNYDYLMYADYDMDHPEVVNELRNWGVWYTNTLGLDGFRIDAVKHIKYSFTRDWINHVRSATGKNMFAVAEFWKNDLGAIENYLQKTNWNHSVFDVPLHYNLYNASKSGGNYDMRNIFNGTVVQRHPSHAVTFVDNHDSQPEEALESFVEEWFKPLAYALTLTREAGYPSVFYGDYYGIPTHGVPAMRSKIDPILEARQKYAYGPQHDYLDHPDVIGWTREGDSSHPKSGLATLITDGPGGSKRMYAGLKNAGETWYDITGNRSDTVKIGSDGWGEFHVNDGSVSIYVQK

SEQ ID NO: 28726 - protein, 485 aa, Bacillus sp.
HHNGTNGTMMQYFEWYLPNDGNHWNRLNSDASNLKSKGITAVWIPPAWKGASQNDVGYGAYDLYDLGEFNQKGTVRTKYGTRSQLQAAVTSLKNNGIQVYGDVVMNHKGGADATEMVRAVEVNPNNRNQEVTGEYTIEAWTRFDFPGRGNTHSSFKWRWYHFDGVDWDQSRRLNNRIYKFRGHGKAWDWEVDTEFGNYDYLMYADYDMDHPEVVNELRNWGVWYTNTLGLDGFRIDAVKHIKYSFTRDWINHVRSATGKNMFAVSEFWKNDLGAIENYLQKTNWNHSVFDVPLHYNLYNASKSGGNYDMRNIFNGTVVQRHPSHAVTFVDNHDSQPEEALESFVEEWFKPLAYALTLTREQGYPSVFYGDYYGIPTHGVPAMRSKIDPILEARQKYAYGPQHDYLDHPDVIGWTREGDSSHPKSGLATLITDGPGGSKRMYAGLKNAGETWYDITGNRSDTVKIGSDGWGEFHVNDGSVSIYVQK

SEQ ID NO: 28727 - protein, 485 aa, Bacillus sp.
HHNGTNGTMMQYFEWYLPNDGNHWNRLNSDASNLKSKGITAVWIPPAWKGASQNDVGYGAYDLYDLGEFNQKGTVRTKYGTRSQLQAAVTSLKNNGIQVYGDVVMNHKGGADATEMVRAVEVNPNNRNQEVTGEYTIEAWTRFDFPGRGNTHSSFKWRWYHFDGVDWDQSRRLNNRIYKFRGHGKAWDWEVDTEFGNYDYLMYADYDMDHPEVVNELRNWGVWYTNTLGLDGFRIDAVKHIKYSFTRDWINHVRSATGKNMFAVAEFWKNDLGAIENYLQKTNWNHSVFDVPLHYNLYNASKSGGNYDMRNIFNGTVVQRHPSHAVTFVDNHDSQPEEALESFVEEWFMPLAYALTLTREQGYPSVFYGDYYGIPTHGVPAMRSKIDPILEARQKYAYGPQHDYLDHPDVIGWTREGDSSHPKSGLATLITDGPGGSKRMYAGLKNAGETWYDITGNRSDTVKIGSDGWGEFHVNDGSVSIYVQK

SEQ ID NO: 28728 - protein, 485 aa, Bacillus sp.
HHNGTNGTMMQYFEWYLPNDGNHWNRLNSDASNLKSKGITAVWIPPAWKGASQNDVGYGAYDLYDLGEFNQKGTVRTKYGTRSQLQAAVTSLKNNGIQVYGDVVMNHKGGADATEMVRAVEVNPNNRNQEVTGEYTIEAWTRFDFPGRGNTHSSFKWRWYHFDGVDWDQSRRLNNRIYKFRGHGKAWDWEVDTEFGNYDYLMYADYDMDHPEVVNELRNWGVWYTNTLGLDGFRIDAVKHIKYSFTRDWINHVRSATGKNMFAVAEFWKGDLGAIENYLQKTNWNHSVFDVPLHYNLYNASKSGGNYDMRNIFNGTVVQRHPSHAVTFVDNHDSQPEEALESFVEEWFKPLAYALTLTREQGYPSVFYGDYYGIPTHGVPAMRSKIDPILEARQKYAYGPQHDYLDHPDVIGWTREGDSSHPKSGLATLITDGPGGSKRMYAGLKNAGETWYDITGNRSDTVKIGSDGWGEFHVNDGSVSIYVQK

SEQ ID NO: 28729 - protein, 485 aa, Bacillus sp.
HHNGTNGTMMQYFEWYLPNDGNHWNRLNSDASNLKSKGITAVWIPPAWKGASQNDVGYGAYDLYDLGEFNQKGTVRTKYGTRSQLQAAVTSLKNNGIQVYGDVVMNHKGGADATEMVRAVEVNPNNRNQEVTGEYTIEAWTRFDFPGRGNTHSSFKWRWYHFDGVDWDQSRRLNNRIYKFRGHGKHWDWEVDTEFGNYDYLMYADYDMDHPEVVNELRNWGVWYTNTLGLDGFRIDAVKHIKYSFTRDWINHVRSATGKNMFAVAEFWKNDLGAIENYLQKTNWNHSVFDVPLHYNLYNASKSGGNYDMRNIFNGTVVQRHPSHAVTFVDNHDSQPEEALESFVEEWFKPLAYALTLTREQGYPSVFYGDYYGIPTHGVPAMRSKIDPILEARQKYAYGPQHDYLDHPDVIGWTREGDSSHPKSGLATLITDGPGGSKRMYAGLKNAGETWYDITGNRSDTVKIGSDGWGEFHVNDGSVSIYVQK

SEQ ID NO: 28730 - protein, 483 aa, Bacillus sp.
HHNGTNGTMMQYFEWYLPNDGNHWNRLNSDASNLKSKGITAVWIPPAWKAASQNDVGYGAYDLYDLGEFNQKGTVRTKYGTRSQLQAAVTSLKNNGIQVYGDVVMNHKGGADATEMVRAVEVNPNNRNQEVTGEYTIEAWTRFDFPGRGNTHSSFKWRWYHFDGVDWDQSREVTNRIYKFRGKAWDWEVDTEFGNYDYLMYADYDMDHPEVVNELRNWGVWYTNTLGLDGFRIDAVKHIKYSFTRDWINHVRSATGKNMFAVAEFWKNDLGAIENYLQKTNWNHSVFDVPLHYNLYNASKSGGNYDMRNIFNGTVVQRHPSHAVTFVDNHDSQPEEALESFVEEWFKPLAYALTLTREQGYPSVFYGDYYGIPTHGVPAMRSKIDPILEARQKYAYGPQHDYLDHPDVIGWTREGDSSHPKSGLATLITDGPGGSKRMYAGLKNAGETWYDITGNRSDTVKIGSDGWGEFHVNDGSVSIYVQK

SEQ ID NO: 28731 - protein, 485 aa, Bacillus sp.
HHNGTNGTMMQYFEWYLPNDGNHWNRLNSDASNLKSKGITAVWIPPAWKSASQNDVGYGAYDLYDLGEFNQKGTVRTKYGTRSQLQAAVTSLKNNGIQVYGDVVMNHKGGADATEMVRAVEVNPNNRNQEVTGEYTIEAWTRFDFPGRGNTHSSFKWRWYHFDGVDWDQSRKLDNRIYKFRGHGKAWDWEVDTEFGNYDYLMYADYDMDHPEVVNELRNWGVWYTNTLGLDGFRIDAVKHIKYSFTRDWINHVRSATGKNMFAVAEFWKNDLGAIENYLQKTNWNHSVFDVPLHYNLYNASKSGGNYDMRNIFNGTVVQRHPSHAVTFVDNHDSQPEEALESFVEEWFKPLAYALTLTREQGYPSVFYGDYYGIPTHGVPAMRSKIDPILEARQKYAYGPQHDYLDHPDVIGWTREGDSSHPKSGLATLITDGPGGSKRMYAGLKNAGETWYDITGNRSDTVKIGSDGWGEFHVNDGSVSIYVQK

SEQ ID NO: 28732 - protein, 485 aa, Bacillus sp.
HHNGTNGTMMQYFEWYLPNDGNHWNRLNSDASNLKSKGITAVWIPPAWKGASQNDVGYGAYDLYDLGEFNQKGTVRTKYGTRSQLQAAVTSLKNNGIQVYGDVVMNHKGGADATEMVRAVEVNPNNRNQEVTGEYTIEAWTRFDFPGRGNTHSSFKWRWYHFDGVDWDQSRRLNNRIYKFRGHGKAWDWEVDTEFGAYDYLMYADYDMDHPEVVNELRNWGVWYTNTLGLDGFRIDAVKHIKYSFTRDWINHVRSATGKNMFAVAEFWKNDLGAIENYLQKTNWNHSVFDVPLHYNLYNASKSGGNYDMRNIFNGTVVQRHPSHAVTFVDNHDSQPEEALESFVEEWFKPLAYALTLTREQGYPSVFYGDYYGIPTHGVPAMRSKIDPILEARQKYAYGPQHDYLDHPDVIGWTREGDSSHPKSGLATLITDGPGGSKRMYAGLKNAGETWYDITGNRSDTVKIGSDGWGEFHVNDGSVSIYVQK

SEQ ID NO: 28733 - protein, 485 aa, Bacillus sp.
HHNGTNGTMMQYFEWYLPNDGNHWNRLNSDASNLKSKGITAVWIPPAWKGASQNDVGYGAYDLYDLGEFNQKGTVRTKYGTRSQLQAAVTSLKNNGIQVYGDVVMNHKGGADATEMVRAVEVNPNNRNQEVTGEYTIEAWTRFDFPGRGNTHSSFKWRWYHFDGVDWDQSRRLNNRIYKFRGHGKAWDWEVDTEFGNYDYLMYADYDMDHPEVVNELRNWGVWYTNTLGLDGFRIDAVKHIKYSFTRDWINHVRSATGKNMFAVAEFWKNDLGAIENYLQKTNWNHSVFDVPLHYNLYNASKSGGNYDMRNIFNGTVVQRHPSHAVTFVDNHDSQPEEALESFVEEWFKPLAYALTLTREQGYPSVFYGDYYGIPTHGVPAMRSKIDPILEARQKYAYGPQHDYLDHPDVIGWTREGDSSHPKSGLATLITDGPGGSNRMYAGLKNAGETWYDITGNRSDTVKIGSDGWGEFHVNDGSVSIYVQK

SEQ ID NO: 28734 - protein, 485 aa, Bacillus sp.
HHNGTNGTMMQYFEWYLPNDGNHWNRLNSDASNLKSKGITAVWIPPAWKGASQNDVGYGAYDLYDLGEFNQKGTVRTKYGTRSQLQAAVTSLKNNGIQVYGDVVMNHKGGADATEMVRAVEVNPNNRNQEVTGEYTIEAWTRFDFPGRGNTHSSFKWRWYHFDGVDWDQSRRLNNRIYKFRGHGKAWDWEVDTEFGNYDYLMYADYDMDHPEVVNELRNWGVWYTNTLGLDGFRIDAVKHIKYSFTRDWINHVRSATGKNMFAVAEFFKNDLGAIENYLQKTNWNHSVFDVPLHYNLYNASKSGGNYDMRNIFNGTVVQRHPSHAVTFVDNHDSQPEEALESFVEEWFKPLAYALTLTREQGYPSVFYGDYYGIPTHGVPAMRSKIDPILEARQKYAYGPQHDYLDHPDVIGWTREGDSSHPKSGLATLITDGPGGSKRMYAGLKNAGETWYDITGNRSDTVKIGSDGWGEFHVNDGSVSIYVQK

SEQ ID NO: 28735 - protein, 485 aa, Bacillus sp.
HHNGTNGTMMQYFEWYLPNDGNHWNRLNSDASNLKSKGITAVWIPPAWKAASQNDVGYGAYDLYDLGEFNQKGTVRTKYGTRSQLQAAVTSLKNNGIQVYGDVVMNHKGGADATEMVRAVEVNPNNRNQEVTGEYTIEAWTRFDFPGRGNTHSSFKWRWYHFDGVDWDQSRDLQNRIYKFRGHGKAWDWEVDTEFGNYDYLMYVDYDMDHPEVVNELRNWGVWYTNTLGLDGFRIDAVKHIKYSFTRDWINHVRSATGKNMFAVAEFWKNDLGAIENYLQKTNWNHSVFDVPLHYNLYNASKSGGNYDMRNIFNGTVVQRHPSHAVTFVDNHDSQPEEALESFVEEWFKPLAYALTLTREQGYPSVFYGDYYGIPTHGVPAMRSKIDPILEARQKYAYGPQHDYLDHPDVIGWTREGDSSHPKSGLATLITDGPGGSKRMYAGLKNAGETWYDITGNRSDTVKIGSDGWGEFHVNDGSVSIYVQK

SEQ ID NO: 28736 - protein, 485 aa, Synthetic construct
HHNGTNGTMMQYFEWYLPNDGNHWNRLNSDASNLKSKGITAVWIPPAWKGASQNDVGYGAYDLYDLGEFNQKGTVRTKYGTRSQLQAAVTSLKNNGIQVYGDVVMNHKGGADATEMVRAVEVNPNNRNQEVTGEYTIEAWTRFDFPGRGNTHSSFKWRWYHFDGVDWDQSRRLNNRIYKFRGHGKAWDWEVDTENGNYDYLMYADLDMDHPEVVNEVRNWGVWYTNTLGLDGFRIDAVKHIKYSFLRDWINHVRSATGKNMFAVAEFWKNDLGAIENYLQKTNWNHSVFDVPLHYNLYNASKSGGNYDMRNIFNGTVVQRHPSHAVTFVDNHDSQPEEALESFVEEWFKPLAYALTLTREQGYPSVFYGDYYGIPTHGVPAMRSKIDPILEARQKYAYGPQHDYLDHPDVIGWTREGDSSHPKSGLATLITDGPGGSKRMYAGLKNAGETWYDITGNRSDTVKIGSDGWGEFHVNDGSVSIYVQK

SEQ ID NO: 28737 - protein, 483 aa, Synthetic construct
HHNGTNGTMMQYFEWYLPNDGNHWNRLNSDASNLKSKGITAVWIPPAWKGASQNDVGYGAYDLYDLGEFNQKGTVRTKYGTRSQLQAAVTSLKNNGIQVYGDVVMNHKGGADATEMVRAVEVNPNNRNQEVTGEYTIEAWTRFDFPGRGNTHSSFKWRWYHFDGVDWDQSRRLNNRIYKFRGKEWDWEVDTEFGNYDYLMYADYDMDHPEVVNELRNWGVWYTNTLGLDGFRIDAVKHIKYSFTRDWINHVRSATGKNMFAVAEFWKNDLGAIENYLQKTNWNHSVFDVPLHYNLYNASKSGGNYDMRNIFNGTVVQRHPSHAVTFVDNHDSQPEEALESFVEEWFKPLAYALTLTREQGYPSVFYGDYYGIPTHGVPAMRSKIDPILEARQKYAYGPQHDYLDHPDVIGWTREGDSSHPKSGLATLITDGPGGSKRMYAGLKNAGETWYDITGNRSDTVKIGSDGWGEFHVNDGSVSIYVQK

SEQ ID NO: 28738 - protein, 483 aa, Bacillus sp.
HHNGTNGTMMQYFEWYLPNDGNHWNRLNSDASNLKSKGITAVWIPPAWKGASQNDVGYGAYDLYDLGEFNQKGTVRTKYGTRSQLQAAVTSLKNNGIQVYGDVVMNHKGGADATEMVRAVEVNPNNRNQEVTGEYTIEAWTRFDFPGRGNTHSSFKWKWYHFDGVDWDQSRRLNNRIYKFRGKAWDWEVDTEFGNYDYLMYADYDMDHPEVVNELRNWGVWYTNTLGLDGFRIDAVKHIKYSFTRDWINHVRSATGKNMFAVAEFWKNDLGAIENYLQKTNWNHSVFDVPLHYNLYNASKSGGNYDMRNIFNGTVVQRHPSHAVTFVDNHDSQPEEALESFVEEWFKPLAYALTLTREQGYPSVFYGDYYGIPTHGVPAMRSKIDPILEARQKYAYGPQHDYLDHPDVIGWTREGDSSHPKSGLATLITDGPGGSKRMYAGLKNAGETWYDITGNRSDTVKIGSDGWGEFHVNDGSVSIYVQK

SEQ ID NO: 28739 - protein, 485 aa, Bacillus sp.
HHNGTNGTMMQYFEWYLPNDGNHWNRLNSDASNLKSKGITAVWIPPAWKGASQNDVGYGAYDLYDLGEFNQKGTVRTKYGTRSQLQAAVTSLKNNGIQVYGDVVMNHKGGADATEMVRAVEVNPNNRNQEVTGEYTIEAWTRFDFPGRGNTHSSFKWRWYHFDGVDWDQSRRLNNRIYKFRGHGKAWDWEVDTEFGNYDYLMYADYDMDHPEVSNELRNWGVWYTNTLGLDGFRIDAVKHIKYSFTRDWINHVRSATGKNMFAVAEFWKNDLGAIENYLQKTNWNHSVFDVPLHYNLYNASKSGGNYDMRNIFNGTVVQRHPSHAVTFVDNHDSQPEEALESFVEEWFKPLAYALTLTREQGYPSVFYGDYYGIPTHGVPAMRSKIDPILEARQKYAYGPQHDYLDHPDVIGWTREGDSSHPKSGLATLITDGPGGSKRMYAGLKNAGETWYDITGNRSDTVKIGSDGWGEFHVNDGSVSIYVQK

SEQ ID NO: 28740 - protein, 485 aa, Bacillus sp.
HHNGTNGTMMQYFEWYLPNDGNHWNRLNSDASNLKSKGITAVWIPPAWKGASQNDVGYGAYDLYDLGEFNQKGTVRTKYGTRSQLQAAVTSLKNNGIQVYGDVVMNHKGGADATEMVRAVEVNPNNRNQEVTGEYTIEAWTRFDFPGRGNTHSSFKWRWYHFDGVDWDQSRRLNNRIYKFRGHGKAWDWEVDTEFGNYDYLMYADYDMDHPEVVNELRNWGVWYTNTLGLDGFRIDAVKHFKYSFTRDWINHVRSATGKNMFAVAEFWKNDLGAIENYLQKTNWNHSVFDVPLHYNLYNASKSGGNYDMRNIFNGTVVQRHPSHAVTFVDNHDSQPEEALESFVEEWFKPLAYALTLTREQGYPSVFYGDYYGIPTHGVPAMRSKIDPILEARQKYAYGPQHDYLDHPDVIGWTREGDSSHPKSGLATLITDGPGGSKRMYAGLKNAGETWYDITGNRSDTVKIGSDGWGEFHVNDGSVSIYVQK

SEQ ID NO: 28741 - protein, 485 aa, Bacillus sp.
HHNGTNGTMMQYFEWYLPNDGNHWNRLNSDASNLKSKGITAVWIPPAWKGASQNDVGYGAYDLYDLGEFNQKGTVRTKYGTRSQLQAAVTSLKNNGIQVYGDVVMNHKGGADATEMVRAVEVNPNNRNQEVTGEYTIEAWTRFDFPGRGNTHSSFKWRWYHFDGVDWDQSRRLNNRIYKFRGHGKAWDWEVDTEFGNYDYLMYADYDMDHPEVVNELRNWGVWYTNTLGLDGFRIDAVKHIKYSFTRDWINHVRSATGKNMFAVAEFWKNDLGAIENYLQKTNWNHSVFDVPLHYNLYNASKSGGNYDMRNIFNGTVVQRHPSHAVTFVDNHDSQPEEALESFVETWFKPLAYALTLTREQGYPSVFYGDYYGIPTHGVPAMRSKIDPILEARQKYAYGPQHDYLDHPDVIGWTREGDSSHPKSGLATLITDGPGGSKRMYAGLKNAGETWYDITGNRSDTVKIGSDGWGEFHVNQGSVSIYVQK

SEQ ID NO: 28742 - protein, 483 aa, Bacillus sp.
HHNGTNGTMMQYFEWYLPNDGNHWNRLNSDASNLKSKGITAVWIPPAWKGASQNDVGYGAYDLYDLGEFNQKGTVRTKYGTRSQLQAAVTSLKNNGIQVYGDVVMNHKGGADATEMVRAVEVNPNNRNQEVTGEYTIEAWTRFDFPGRGNTHSSFKWRWYHFDGVDWDQSRRLNNRIYKFRGKAWDWEVDTEFGNYDYLMYADYDMDHPEVVNELRNWGVWYTNTLGLDGFRIDAVKHIKYSFTRDWINHVRSATGKNMFAVAEFWKNDLGAIENYLQKTNWNHSVFDVPLHYNLYNASKSGGNYDMRNIFNGTVVQRHPSHAVTFVDNHDSQPEEALESFVEEWFKPLAYALTLTREQGLPSVFYGDYYGIPTHGVPAMRSKIDPILEARQKYAYGPQHDYLDHPDVIGWTREGDSSHPKSGLATLITDGPGGSKRMYAGLKNAGETWYDITGNRSDTVKIGSDGWGEFHVNDGSVSIYVQK

SEQ ID NO: 28743 - protein, 485 aa, Bacillus sp.
HHNGTNGTMMQYFEWYLPNDGNHWNRLNSDASNLKSKGITAVWIPPAWKGASQNDVGYGAYDLYDLGEFNQKGTVRTKYGTRSQLQAAVTSLKNNGIQVYGDVVMNHKGGADATEMVRAVEVNPNNRNQEVTGEYTIEAWTRFDFPGRGNTHSSFKWRWYHFDGVDWDQSRRTNNRIYKFRGHGKAWDWEVDTEFGNYDYLMYTDYDMDHPEVVNELRNWGVWYTNTLGLDGFRIDAVKHIKYSFTRDWINHVRSATGKNMFAVAEFWKNDLGAIENYLQKTNWNHSVFDVPLHYNLYNASKSGGNYDMRNIFNGTVVQRHPSHAVTFVDNHDSQPEEALESFVEEWFKPLAYALTLTREQGYPSVFYGDYYGIPTHGVPAMRSKIDPILEARQKYAYGPQHDYLDHPDVIGWTREGDSSHPKSGLATLITDGPGGSKRMYAGLKNAGETWYDITGNRSDTVKIGSDGWGEFHVNDGSVSIYVQK

SEQ ID NO: 28744 - protein, 485 aa, Bacillus sp.
HHNGTNGTMMQYFEWYLPNDGNHWNRLNSDASNLKSKGITAVWIPPAWKGASQNDVGYGAYDLYDLGEFNQKGTVRTKYGTRSQLQAAVTSLKNNGIQVYGDVVMNHKGGADATEMVRAVEVNPNNRMQEVTGEYTIEAWTRFDFPGRGNTHSSFKWRWYHFDGVDWDQSRRLNNRIYKFRGHGKAWDWEVDTEFGNYDYLMYADYDMDHPEVVNELRNWGVWYTNTLGLDGFRIDAVKHIKYSFTRDWINHVRSATGKNMFAVAEFWKNDLGAIENYLQKTNWNHSVFDVPLHYNLYNASKSGGNYDMRNIFNGTVVQRHPSHAVTFVDNHDSQPEEALESFVEEWFKPLAYALTLTREQGYPSVFYGDYYGIPTHGVPAMRSKIDPILEARQKYAYGPQHDYLDHPDVIGWTREGDSSHPKSGLATLITDGPGGSKRMYAGLKNAGETWYDITGNRSDTVKIGSDGWGEFHVNDGSVSIYVQK

SEQ ID NO: 28745 - protein, 483 aa, Bacillus sp.
HHNGTNGTMMQYFEWYLPNDGNHWNRLNSDASNLKSKGITAVWIPPAWKAASQNDVGYGAYDLYDLGEFNQKGTVRTKYGTRSQLQAAVTSLKNNGIQVYGDVVMNHKGGADATEMVRAVEVNPNNRNQEVTGEYTIEAWTRFDFPGRGNTHSSFKWRWYHFDGVDWDQSRRLQNRIYKFRGKAWDWEVDTEFGNYDYLMYTDYDMDHPEVVNELRNWGVWYTNTLGLDGFRIDAVKHIKYSFTRDWINHVRSATGKNMFAVAEFWKNDLGAIENYLQKTNWNHSVFDVPLHYNLYNASKSGGNYDMRNIFNGTVVQRHPSHAVTFVDNHDSQPEEALESFVEEWFKPLAYALTLTREQGYPSVFYGDYYGIPTHGVPAMRSKIDPILEARQKYAYGPQHDYLDHPDVIGWTREGDSSHPKSGLATLITDGPGGSKRMYAGLKNAGETWYDITGNRSDTVKIGSDGWGEFHVNDGSVSIYVQK

SEQ ID NO: 28746 - protein, 485 aa, Bacillus sp.
HHNGTNGTMMQYFEWYLPNDGNHWNRLNSDASNLKSKGITAVWIPPAWKGASQNDVGYGAYDLYDLGEFNQKGTVRTKYGTRSQLQAAVTSLKNNGIQVYGDVVMNHKGGADATEMVRAVEVNPNNRNQEVTGEYTIEAWTRFDFPGRGNTHSSFKWRWYHFDGVDWDQSRRLNNRIYKFRGHGKAWDWEVDTEFGNYDYLMYADYDMDHPEVVGELRNWGVWYTNTLGLDGFRIDAVKHIKYSFTRDWINHVRSATGKNMFAVAEFWKNDLGAIENYLQKTNWNHSVFDVPLHYNLYNASKSGGNYDMRNIFNGTVVQRHPSHAVTFVDNHDSQPEEALESFVEEWFKPLAYALTLTREQGYPSVFYGDYYGIPTHGVPAMRSKIDPILEARQKYAYGPQHDYLDHPDVIGWTREGDSSHPKSGLATLITDGPGGSKRMYAGLKNAGETWYDITGNRSDTVKIGSDGWGEFHVNDGSVSIYVQK

SEQ ID NO: 28747 - protein, 485 aa, Bacillus sp.
HHNGTNGTMMQYFEWYLPNDGNHWNRLNSDASNLKSKGITAVWIPPAWKAVSQNDVGYGAYDLYDLGEFNQKGTVRTKYGTRSQLQAAVTSLKNNGIQVYGDVVMNHKGGADATEMVPAVEVNPNNRNQEVTGEYTIEAWTRFDFPGRGNTHSSFKWRWYHFDGVDWDQSRELSNRIYKFRGHSKAWDWEVDTEFGNYDYLMYADYDMDHPEVVNELRNWGVWYTNTLGLDGFRIDAVKHIKYSFTRDWINHVRSATGKNMFAVAEFWKNDLGAIENYLQKTNWNHSVFDVPLHYNLYNASKSGGNYDMRNIFNGTVVQRHPSHAVTFVDNHDSQPEEALESFVEEWFKPLAYALTLTREQGYPSVFYGDYYGIPTHGVPAMRSKIDPILEARQKYAYGPQHDYLDHPDVIGWTREGDSSHPKSGLATLITDGPGGSKRMYAGLKNAGETWYDITGNRSDTVKIGSDGWGEFHVNDGSVSIYVQK

SEQ ID NO: 28748 - protein, 485 aa, Bacillus sp.
HHNGTNGTMMQYFEWYLPNDGNHWNRLNSDASNLKSKGITAVWIPPAWKGASQNDVGYGAYDLYDLGEFNQKGTVRTKYGTRSQLQAAVTSLKNNGIQVYGDVVMNHKGGADATEMVRAVEVNPNNRNQEVTGEYTIEAWTRFDFPGRGNTHSSFKWRWYHFDGVDWDQSRRLNNRIYKFRGHGKAWDWEVDTEFGNYDYLMYADYDMDHPEVVNELRNWGVWYTNTLGLDGFRIDAVKHIKYSFTRDWINHVRSATGKNMFAVAEFWKNDLGAIENYLQKTNWNHSVFDVPLHYNLYNASKSGGNYDMRNIFNGTVVQRHPSHAVTFVDNHDSQPEEALESFVEEWFKPLAYALTLTREAGYPSVFYGDYYGIPTHGVPAMRSKIDPILEARQKYAYGPQHDYLDHPDVIGWTREGDSSHPKSGLATLITDGPGGSKRMYAGLKNAGETWYDITGNRSDTVKIGSDGWGEFHVNDGSVSIYVQK

SEQ ID NO: 28749 - protein, 485 aa, Bacillus sp.
HHNGTNGTMMQYFEWYLPNDGNHWNRLNSDASNLKSKGITAVWIPPAWKGASQNDVGYGAYDLYDLGEFNQKGTVRTKYGTRSQLQAAVTSLKNNGIQVYGDVVMNHKGGADATEMVRAVEVNPNNRNQEVTGEYTIEAWTRFDFPGRGNTHSSFKWRWYHFDGVDWDQSRRLNNRIYKFRGHGKAWDWEVGTEFGNYDYLMYADYDMDHPEVVNELRNWGVWYTNTLGLDGFRIDAVKHIKYSFTRDWINHVRSATGKNMFAVAEFWKNDLGAIENYLQKTNWNHSVFDVPLHYNLYNASKSGGNYDMRNIFNGTVVQRHPSHAVTFVDNHDSQPEEALESFVEEWFKPLAYALTLTREQGYPSVFYGDYYGIPTHGVPAMRSKIDPILEARQKYAYGPQHDYLDHPDVIGWTREGDSSHPKSGLATLITDGPGGSKRMYAGLKNAGETWYDITGNRSDTVKIGSDGWGEFHVNDGSVSIYVQK

SEQ ID NO: 28750 - protein, 485 aa, Bacillus sp.
HHNGTNQTMMQYFEWYLPNDGNHWNRLNSDASNLKSKGITAVWIPPAWKGASQNDVGYGAYDLYDLGEFNQKGTVRTKYGTRSQLQAAVTSLKNNGIQVYGDVVMNHKGGADATEMVRAVEVNPNNRNQEVTGEYTIEAWTRFDFPGRGNTHSSFKWRWYHFDGVDWDQSRRLNNRIYKFRGHGKAWDWEVDTEFGNYDYLMYADYDMDHPEVVNELRNWGVWYTNTLGLDGFRIDAVKHIKYSFTRDWINHVRSATGKNMFAVAEFWKNDLGAIENYLQKTNWNHSVFDVPLHYNLYNASKSGGNYDMRNIFNGTVVQAQPMHAVTFVDNHDSQPEEALESFVEEWFKPLAYALTLTREQGYPSVFYGDYYGIPTHGVPAMRSKIDPILEARQKYAYGPQHDYLDHPDVIGWTREGDSSHPKSGLATLITDGPGGSKRMYAGLKNAGETWYDITGNRSDTVKIGSDGWGEFHVNDGSVSIYVQK

SEQ ID NO: 28751 - protein, 483 aa, Bacillus sp.
HHNGTNGTMMQYFEWYLPNDGNHWNRLNSDASNLKSKGITAVWIPPAWKGASQNDVGYGAYDLYDLGEFNQKGTVRTKYGTRSQLQAAVTSLKNNGIQVYGDVVMNHKGGADATEMVRAVEVNPNNRNQEVTGEYTIEAWTRFDFPGRGNTHSSFKWRWYHFDGVDWDQSRRLNNRIYKFRGKAWDWEVDTEFGNYDYLMYADYDMDHPEVVNELRNWGVWYTNTLGLDGFRIDAVKHIKYSFTRDWINHVRSATGKNMFAVAEFWKNDLGAIENYLQKTNWNHSVFDVPLHYNLYNASKSQGNYDMRNIFNGTVVQRHPSHAVTFVDNHDSQPEEALESFVEPWFKPLAYALTLTREQGYPSVFYGDYYGIPTHGVPAMRSKIDPILEARQKYAYGPQHDYLDHPDVIGWTREGDSSHPKSGLATLITDGPGGSKRMYAGLKNAGETWYDITGNRSDTVKIGSDGWGEFHVNGGSVSIYVQK

SEQ ID NO: 28752 - protein, 483 aa, Bacillus sp.
HHNGTNGTMMQYFEWYLPNDGNHWNRLNSDASNLKSKGITAVWIPPAWKGASQNDVGYGAYDLYDLGEFNQKGTVRTKYGTRSQLQAAVTSLKNNGIQVYGDVVMNHKGGADATEMVRAVEVNPNNRNQEVTGEYTIEAWTRFDFPGRGNTHSSFKWRWLHFDGVDWDQSRRLNNRIYKFRGKAWDWEVDTEFGNYDYLMYADYDMDHPEVVNELRNWGVWYTNTLGLDGFRIDAVKHIKYSFTRDWINHVRSATGKNMFAVAEFWKNDLGAIENYLQKTNWNHSVFDVPLHYNLYNASKSGGNYDMRNIFNGTVVQRHPSHAVTFVDNHDSQPEEALESFVEEWFKPLAYALTLTREQGYPSVFYGDYYGIPTHGVPAMRSKIDPILEARQKYAYGPQHDYLDHPDVIGWTREGDSSHPKSGLATLITDGPGGSKRMYAGLKNAGETWYDITGNRSDTVKIGSDGWGEFHVNDGSVSIYVQK

SEQ ID NO: 28753 - protein, 485 aa, Synthetic construct
HHNGTNGTMMQYFEWYLPNDGNHWNRLNSDASNLKSKGITAVWIPPAWKGASQNDVGYGAYDLYDLGEFNQKGTVRTKYGTRSQLQAAVTSLKNNGIQVYGDVVMNHKGGADATEMVRAVEVNPNNRNQEVTGEYTIEAWTRFDFPGRGNTHSSFKWRWYHFDGVDWDQSRRLNNRIYLFRGHGKAWDWPVDTENGNYDYLMYADIDMDHPEVVNELRNWGVWYTNTLGLDGFRIDAVKHIKYSFTRDWINHVRSATGKNMFAVAEFWKNDLGAIENYLQKTNWNHSVFDVPLHYNLYNASKSGGNYDMRNIFNGTVVQRHPSHAVTFVDNHDSQPEEALESFVEEWFKPLAYALTLTREQGYPSVFYGDYYGIPTHGVPAMRSKIDPILEARQKYAYGPQHDYLDHPDVIGWTREGDSSHPKSGLATLITDGPGGSKRMYAGLKNAGETWYDITGNRSDTVKIGSDGWGEFHVNDGSVSIYVQK

SEQ ID NO: 28754 - protein, 483 aa, Bacillus sp.
HHNGTNGTMMQYFEWYLPNDGNHWNRLNSDASNLKSKGITAVWIPPAWKGASQNDVGYGAYDLYDLGEFNQKGTVRTKYGTRSQLQAAVTSLKNNGIQVYGDVVMNHKGGADATEMVRAVEVNPNNRNQEVTGEYTIEAWTRFDFPGRGNTHSSFKWRWYHFDGVDWDQSRRLNNRIYKFRGKAWDWEVDTEFGNYDYLMYADYDMDHPEVVNELRNWGVWYTNTLGLDGFRIDAVKHIKYSFTRDWINHVRSATGKNMFAVAEFWKNDLGAIENYLQKTNWNHSVFDVPLHYNLYNASNSGGNYDMRNIFNGTVVQRHPSHAVTFVDNHDSQPEEALESFVDPWFKPLAYALTLTREQGYPSVFYGDYYGIPTHGVPAMRSKIDPILEARQKYAYGPQHDYLDHPDVIGWTREGDSSHPKSGLATLITDGPGGSKRMYAGLKNAGETWYDITGNRSDTVKIGSDGWGEFHVNQSSVSIYVQK

SEQ ID NO: 28755 - protein, 485 aa, Bacillus sp.
HHNGTNGTMMQYFEWYLPNDGNHWNRLNSDASNLKSKGITAVWIPPAWKGASQNDVGYGAYDLYDLGEFNQKGTVRTKYGTRSQLQAAVTSLKNNGIQVYGDVVMNHKGGADATEMVRAVEVNPNNRNQEVTGEYTIEAWTRFDFPGRGNTHSSFKWRWYHFDGVDWDQSRRLNNRIYKFRGHGKAWDWEVDTEFGNYDYLMYADYDMDHPEVVNELRNWGVWYTNTLGLDGFRIDAVKHIKYSFTRDWINHVRSATGKNMFAVAEFWKNDLGAISNYLQKTNWNHSVFDVPLHYNLYNASKSGGNYDMRNIFNGTVVQRHPSHAVTFVDNHDSQPEEALESFVEEWFKPLAYALTLTREQGYPSVFYGDYYGIPTHGVPAMRSKIDPILEARQKYAYGPQHDYLDHPDVIGWTREGDSSHPKSGLATLITDGPGGSKRMYAGLKNAGETWYDITGNRSDTVKIGSDGWGEFHVNDGSVSIYVQK

SEQ ID NO: 28756 - protein, 485 aa, Bacillus sp.
HHNGTNGTMMQYFEWYLPNDGNHWNRLNSDASNLKSKGITAVWIPPAWKATSQNDVGYGAYDLYDLGEFNQKGTVRTKYGTRSQLQAAVTSLKNNGIQVYGDVVMNHKGGADATEMVRAVEVNPNNRNQEVTGEYTIEAWTRFDFPGRGNTHSSFKWRWYHFDGVDWDQSRNVNNRIYKFRGHGKAWDWEVDTEFGNYDYLMYADYDMDHPEVVNELRNWGVWYTNTLGLDGFRIDAVKHIKYSFTRDWINHVRSATGKNMFAVAEFWKNDLGAIENYLQKTNWNHSVFDVPLHYNLYNASKSGGNYDMRNIFNGTVVQRHPSHAVTFVDNHDSQPEEALESFVDEWFKPLAYALTLTREQGYPSVFYGDYYGIPTHGVPAMRSKIDPILEARQKYAYGPQHDYLDHPDVIGWTREGDSSHPKSGLATLITDGPGGSKRMYAGLKNAGETWYDITGNRSDTVKIGSDGWGEFHVNKSSVSIYVQK

SEQ ID NO: 28757 - protein, 485 aa, Bacillus sp.
HHNGTNGTMMQYFEWYLPNDGNHWNRLNSDASNLKSKGITAVWIPPAWKGASQNDVGYGAYDLYDLGEFNQKGTVRTKYGTRSQLQAAVTSLKNNGIQVYGDVVMNHKGGADATEMVRAVEVNPNNRNQEVTGEYTIEAWTRFDFPGRGNTHSSFKWRWYHFDGVDWDQSRRLNNRIYKFRGHGKAWDWEVDTEFGNYDYLMYADYDMDHPEVVNELRNWGVWYTNTLGLDGFRIDAVKHIKYSFTRDWINHVRSATGKNMFAVAEFWHNDLGAIENYLQKTNWNHSVFDVPLHYNLYNASKSGGNYDMRNIFNGTVVQRHPSHAVTFVDNHDSQPEEALESFVEEWFKPLAYALTLTREQGYPSVFYGDYYGIPTHGVPAMRSKIDPILEARQKYAYGPQHDYLDHPDVIGWTREGDSSHPKSGLATLITDGPGGSKRMYAGLKNAGETWYDITGNRSDTVKIGSDGWGEFHVNDGSVSIYVQK

SEQ ID NO: 28758 - protein, 485 aa, Bacillus sp.
HHNGTNGTMMQYFEWYLPNDGNHWNRLNSDASNLKSKGITAVWIPPAWKGASQNDVGYGAYDLYDLGEFNQKGTVRTKYGTRSQLQAAVTSLKNNGIQVYGDVVMNHKGGADATEMVRAVEVNPNNRNQEVTGEYTIEAWTRFDFPGRGNTHSSFKWRWYHFDGVDWDQSRRLNNRIYPFRGHGKAWDWEVDTEFGNYDYLMYADYDMDHPEVVNELRNWGVWYTNTLGLDGFRIDAVKHIKYSFTRDWINHVRSATGKNMFAVAEFWKNDLGAIENYLQKTNWNHSVFDVPLHYNLYNASKSGGNYDMRNIFNGTVVQRHPSHAVTFVDNHDSQPEEALESFVEEWFKPLAYALTLTREQGYPSVFYGDYYGIPTHGVPAMRSKIDPILEARQKYAYGPQHDYLDHPDVIGWTREGDSSHPKSGLATLITDGPGGSKRMYAGLKNAGETWYDITGNRSDTVKIGSDGWGEFHVNDGSVSIYVQK

SEQ ID NO: 28759 - protein, 483 aa, Bacillus sp.
HHNGTNGTMMQYFEWYLPNDGNHWNRLNSDASNLKSKGITAVWIPPAWKGASQNDVGYGAYDLYDLGEFNQKGTVRTKYGTRSQLQAAVTSLKNNGIQVYGDVVMNHKGGADATEMVRAVEVNPNNRNQEVTGEYTIEAWTRFDFPGRGNTHSSFKWRWYHFDGVDWDQSRRLNNRIYKFRGKAWDWEVDTEFGNYDYLMYADYDMDHPEVVNELRNWGVWYTNTLGLDGFRIDAVKHIKYSFTRDWINHVRSATGKNMFAVAEFWKNDLGAIENYLQKGNWNHSVFDVPLHYNLYNASKSGGNYDMRNIFNGTVVQRHPSHAVTFVDNHDSQPEEALESFVEEWFKPLAYALTLTREQGYPSVFYGDYYGIPTHGVPAMRSKIDPILEARQKYAYGPQHDYLDHPDVIGWTREGDSSHPKSGLATLITDGPGGSKRMYAGLKNAGETWYDITGNRSDTVKIGSDGWGEFHVNDGSVSIYVQK

SEQ ID NO: 28760 - protein, 483 aa, Bacillus sp.
HHNGTNGTMMQYFEWYLPNDGNHWNRLNSDASNLKSKGITAVWIPPAWKGASQNDVGYGAYDLYDLGEFNQKGTVRTKYGTRSQLQAAVTSLKNNGIQVYGDVVMNHKGGADATEMVRAVEVNPNNRNQEVTGEYTIEAWTRFDFPGRGNTHSSFKWRWYHFDGVDWDQSRRLNNRIYKFRGKAWDWEVDTEFGNYDYLMYADYDMDSPEVVNELRNWGVWYTNTLGLDGFRIDAVKHIKYSFTRDWINHVRSATGKNMFAVAEFWKNDLGAIENYLQKTNWNHSVFDVPLHYNLYNASKSGGNYDMRNIFNGTVVQRHPSHAVTFVDNHDSQPEEALESFVEEWFKPLAYALTLTREQGYPSVFYGDYYGIPTHGVPAMRSKIDPILEARQKYAYGPQHDYLDHPDVIGWTREGDSSHPKSGLATLITDGPGGSKRMYAGLKNAGETWYDITGNRSDTVKIGSDGWGEFHVNDGSVSIYVQK

SEQ ID NO: 28761 - protein, 485 aa, Bacillus sp.
HHNGTNNTMMQYFEWYLPNDGNHWNRLNSDASNLKSKGITAVWIPPAWKGASQNDVGYGAYDLYDLGEFNQKGTVRTKYGTRSQLQAAVTSLKNNGILVYGDVVMNHKGGADATEMVRAVEVNPNNRNQEVTGEYTIEAWTRFDFPGRGNTHSSFKWRWYHFDGVDWDQSRRLNNRIYKFRGHGKAWDWEVDTEFGNYDYLMYADYDMDHPEVVNELRNWGVWYTNTLGLDGFRIDAVKHIKYSFTRDWINHVRSATGKNMFAVAEFWKNDLGAIENYLQKTNWNHSVFDVPLHYNLYNASKSGGNYDMRNIFNGTVVQAHPMHAVTFVDNHDSQPEEALESFVEEWFKPLAYALTLTREQGYPSVFYGDYYGIPTHGVPAMRSKIDPILEARQKYAYGPQHDYLDHPDVIGWTREGDSSHPKSGLATLITDGPGGSKRMYAGLKNAGETWYDITGNRSDTVKIGSDGWGEFHVNDGSVSIYVQK

SEQ ID NO: 28762 - protein, 485 aa, Bacillus sp.
HHNGTNGTMMQYFEWYLPNDGNHWNRLNSDASNLKSKGITAVWIPPAWKGASQNDVGYGAYDLYDLGEFNQKGTVRTKYGTRSQLQAAVTSLKNNGINVYGDVVMNHKGGADATEMVRAVEVNPNNRNQEVTGEYTIEAWTRFDFPGRGNTHSSFKWRWYHFDGVDWDQSRRLNNRIYKFRGHGKAWDWEVDTEFGNYDYLMYADYDMDHPEVVNELRNWGVWYTNTLGLDGFRIDAVKHIKYSFTRDWINHVRSATGKNMFAVAEFWKNDLGAIENYLQKTNWNHSVFDVPLHYNLYNASKSGGNYDMRNIFNGTVVQAHPNHAVTFVDNHDSQPEEALESFVEEWFKPLAYALTLTREQGYPSVFYGDYYGIPTHGVPAMRSKIDPILEARQKYAYGPQHDYLDHPDVIGWTREGDSSHPKSGLATLITDGPGGSKRMYAGLKNAGETWYDITGNRSDTVKIGSDGWGEFHVNDGSVSIYVQK

SEQ ID NO: 28763 - protein, 485 aa, Bacillus sp.
HHNGTNLTMMQYFEWYLPNDGNHWNRLNSDASNLKSKGITAVWIPPAWKGASQNDVGYGAYDLYDLGEFNQKGTVRTKYGTRSQLQAAVTSLKNNGIQVYGDVVMNHKGGADATEMVRAVEVNPNNRNQEVTGEYTIEAWTRFDFPGRGNTHSSFKWRWYHFDGVDWDQSRRLNNRIYKFRGHGKAWDWEVDTEFGNYDYLMYADYDMDHPEVVNELRNWGVWYTNTLGLDGFRIDAVKHIKYSFTRDWINHVRSATGKNMFAVAEFWKNDLGAIENYLQKTNWNHSVFDVPLHYNLYNASKSGGNYDMRNIFNGTVVQRHPSHAVTFVDNHDSQPEEALESFVEEWFKPLAYALTLTREQGYPSVFYGDYYGIPTHGVPAMRSKIDPILEARQKYAYGPQHDYLDHPDVIGWTREGDSSHPKSGLATLITDGPGGSKRMYAGLKNAGETWYDITGNRSDTVKIGSDGWGEFHVNDGSVSIYVQK

SEQ ID NO: 28764 - protein, 485 aa, Bacillus sp.
HHNGTNGTMMQYFEWYLPNDGNHWNRLNSDASNLKSKGITAVWIPPAWKGASQNDVGYGAYDLYDLGEFNQKGTVRTKYGTRSQLQAAVTSLKNNGIQVYGDVVMNHKGGADATEMVRAVEVNPNNRNQEVTGEYTIEAWTRFDFPGRGNTHSSFKWRWYHFDGVDWDQSRRLNNRIYKFRGHGKAWDWEVDTEFGNYDYLMYADYDMDHPEVVNELRNWGVWYTNTLGLDGFRIDAVKHIKYSFTRDWINHVRSATGKNMFAVAEFLKNDLGAIENYLQKTNWNHSVFDVPLHYNLYNASKSGGNYDMRNIFNGTVVQRHPSHAVTFVDNHDSQPEEALESFVEEWFKPLAYALTLTREQGYPSVFYGDYYGIPTHGVPAMRSKIDPILEARQKYAYGPQHDYLDHPDVIGWTREGDSSHPKSGLATLITDGPGGSKRMYAGLKNAGETWYDITGNRSDTVKIGSDGWGEFHVNDGSVSIYVQK

SEQ ID NO: 28765 - protein, 485 aa, Synthetic construct
HHNGTNGTMMQYFEWYLPNDGNHWNRLNSDASNLKSKGITAVWIPPAWKGASQNDVGYGAYDLYDLGEFNQKGTVRTKYGTRSQLQAAVTSLKNNGIQVYGDVVMNHKGGADATEMVRAVEVNPNNRNQEVTGEYTIEAWTRFDFPGRGNTHSSFKWRWYHFDGVDWDQSRRLNNRIYKFRGHGKAWDWEVDTENGNYDYLMYADLDFDHPEVVNEIRNWGVWYTNTLGLDGFRIDAVKHIKYSFTRDWINHVRSATGKNMFAVAEFWKNDLGAIENYLQKTNWNHSVFDVPLHYNLYNASKSGGNYDMRNIFNGTVVQRHPSHAVTFVDNHDSQPEEALESFVEEWFKPLAYALTLTREQGYPSVFYGDYYGIPTHGVPAMRSKIDPILEARQKYAYGPQHDYLDHPDVIGWTREGDSSHPKSGLATLITDGPGGSKRMYAGLKNAGETWYDITGNRSDTVKIGSDGWGEFHVNDGSVSIYVQK

SEQ ID NO: 28766 - protein, 483 aa, Bacillus sp.
HHNGTNGTMMQYFEWYLPNDGNHWNRLNSDASNLKSKGITAVWIPPAWKAASQNDVGYGAYDLYDLGEFNQKGTVRTKYGTRSQLQAAVTSLKNNGIQVYGDVVMNHKGGADATEMVRAVEVNPNNRNQEVTGEYTIEAWTRFDFPGRGNTHSSFKWRWYHFDGVDWDQSRQITNRIYKFRGKAWDWEVDTEFGNYDYLMYTDYDMDHPEVVNELRNWGVWYTNTLGLDGFRIDAVKHIKYSFTRDWINHVRSATGKNMFAVAEFWKNDLGAIENYLQKTNWNHSVFDVPLHYNLYNASKSGGNYDMRNIFNGTVVQRHPSHAVTFVDNHDSQPEEALESFVEEWFKPLAYALTLTREQGYPSVFYGDYYGIPTHGVPAMRSKIDPILEARQKYAYGPQHDYLDHPDVIGWTREGDSSHPKSGLATLITDGPGGSKRMYAGLKNAGETWYDITGNRSDTVKIGSDGWGEFHVNDGSVSIYVQK

SEQ ID NO: 28767 - protein, 485 aa, Bacillus sp.
HHNGTNETMMQYFEWYLPNDGNHWNRLNSDASNLKSKGITAVWIPPAWKGASQNDVGYGAYDLYDLGEFNQKGTVRTKYGTRSQLQAAVTSLKNNGIQVYGDVVMNHKGGADATEMVRAVEVNPNNRNQEVTGEYTIEAWTRFDFPGRGNTHSSFKWRWYHFDGVDWDQSRRLNNRIYKFRGHGKAWDWEVDTEFGNYDYLMYADYDMDHPEVVNELRNWGVWYTNTLGLDGFRIDAVKHIKYSFTRDWINHVRSATGKNMFAVAEFWKNDLGAIENYLQKTNWNHSVFDVPLHYNLYNASKSGGNYDMRNIFNGTVVQRHPSHAVTFVDNHDSQPEEALESFVEEWFKPLAYALTLTREQGYPSVFYGDYYGIPTHGVPAMRSKIDPILEARQKYAYGPQHDYLDHPDVIGWTREGDSSHPKSGLATLITDGPGGSKRMYAGLKNAGETWYDITGNRSDTVKIGSDGWGEFHVNDGSVSIYVQK

SEQ ID NO: 28768 - protein, 485 aa, Bacillus sp.
HHNGTNGTMMQYFEWYLPNDGNHWNRLNSDASNLKSKGITAVWIPPAWKGASQNDVGYGAYDLYDLGEFNQKGTVRTKYGTRSQLQAAVTSLKNNGIQVYGDVVMNHKGGADATEMVRAVEVNPNNRNQEVTGEYTIEAWTRFDFPGRGNTHSSFKWRWYHFDGVDWDRSRRLNNRIYKFRGHGKAWDWEVDTEFGNYDYLMYADYDMDHPEVVNELRNWGVWYTNTLGLDGFRIDAVKHIKYSFTRDWINHVRSATGKNMFAVAEFWKNDLGAIENYLQKTNWNHSVFDVPLHYNLYNASKSGGNYDMRNIFNGTVVQRHPSHAVTFVDNHDSQPEEALESFVEEWFKPLAYALTLTREQGYPSVFYGDYYGIPTHGVPAMRSKIDPILEARQKYAYGPQHDYLDHPDVIGWTREGDSSHPKSGLATLITDGPGGSKRMYAGLKNAGETWYDITGNRSDTVKIGSDGWGEFHVNDGSVSIYVQK

SEQ ID NO: 28769 - protein, 485 aa, Bacillus sp.
HHNGTNGTMMQYFEWYLPNDGNHWNRLNSDASNLKSKGITAVWIPPAWKGASQNDVGYGAYDLYDLGEFNQKGTVRTKYGTRSQLQAAVTSLKNNGIQVYGDVVMNHKGGADATEMVRAVEVNPNNRNQEVTGEYTIEAWTRFDFPGRGNTHSSFKWRWYHFDGVDWDQSRRLNNRIYKFRGHGKAWDWEVDTEFGNYDYLMYADYDMDHPEVVNELRNWGVWYTNTLGLDGFRIDAVKHIKYSFTRDWINHVRSATGKNMFAVAEFWKNDLGAIENYLQKTNWNHSVFDVPLHYNLYNASKSGGNYDMRNIFNGTVVQRHPSHAVTFVDNHDSQPEEALESFVEEWFKPLAYALTLTREQGYPSVFYGDYYGIPTHGVPAMRSKIDPILEARQKYAYGPQHDYLDHPDVIGWTRKGDSSHPKSGLATLITDGPGGSKRMYAGLKNAGETWYDITGNRSDTVKIGSDGWGEFHVNDGSVSIYVQK

SEQ ID NO: 28770 - protein, 483 aa, Bacillus sp.
HHNGTNGTMMQYFEWYLPNDGNHWNRLNSDASNLKSKGITAVWIPPAWKGASQNDVGYGAYDLYDLGEFNQKGTVRTKYGTRSQLQAAVTSLKNNGIQVYGDVVMNHKGGADATEMVRAVEVNPNNRNQEVTGEYTIEAWTRFDFPGRGNTHSSFKWRWYHFDGVDWDQSRRLNNRIYKFRGKAWDWEVDTEFGNYDYLMYADYDMDHPEVVNELRNWGVWYTNTLGLDGFRIDAVKHIKYSFTRDWINHVRSATGKNMFAVAEFWKNDLGAIENYLQKTNWNHSVFDVPLHYNLYNASKSGGNYDMRNIFNGTVVQRHPSHAVTFVDNHDSQPEEALESFVEEWFKPCAYALTLTREQGYPSVFYGDYYGIPTHGVPAMRSKIDPILEARQKYAYGPQHDYLDHPDVIGWTREGDSSHPKSGLATLITDGPGGSKRMYAGLKNAGETWYDITGNRSDTVKIGSDGWGEFHVNDGSVSIYVQK

SEQ ID NO: 28771 - protein, 485 aa, Bacillus sp.
HHNGTNGTMMQYFEWYLPNDGNHWNRLNSDASNLKSKGITAVWIPPAWKGASQNDVGYGAYDLYDLGEFNQKGTVRTKYGTRSQLQAAVTSLKNNGIQVYGDVVMNHKGGADATEMVRAVEVNPNNRNQEVTGEYTIEAWTRFDFPGRGNTHSSFKWRWYHFDGVDWDQSRRLNNRIYKFRGHGKAWDWEVDTAFGNYDYLMYADYDMDHPEVVNELRNWGVWYTNTLGLDGFRIDAVKHIKYSFTRDWINHVRSATGKNMFAVAEFWKNDLGAIENYLQKTNWNHSVFDVPLHYNLYNASKSGGNYDMRNIFNGTVVQRHPSHAVTFVDNHDSQPEEALESFVEEWFKPLAYALTLTREQGYPSVFYGDYYGIPTHGVPAMRSKIDPILEARQKYAYGPQHDYLDHPDVIGWTREGDSSHPKSGLATLITDGPGGSKRMYAGLKNAGETWYDITGNRSDTVKIGSDGWGEFHVNDGSVSIYVQK

SEQ ID NO: 28772 - protein, 483 aa, Bacillus sp.
HHNGTNGTMMQYFEWYLPNDGNHWNRLNSDASNLKSKGITAVWIPPAWKGASQNDVGYGAYDLYDLGEFNQKGTVRTKYGTRSQLQAAVTSLKNNGIQVYGDVVMNHKGGADATEMVRAVEVNPNNRNQEVTGEYTIEAWTRFDFPGRGNTHSSFKWRWYHFDGVDWDQSRRLNNRIYKFRGKAWDWEVDTEFGNYDYLMYADYDMDHPEVVNELRNWGVWYTNTLGLDGFRIDAVKHIKYSFTRDWINHVRSATGKNMFAVAEFWKNDLGTIENYLQKTNWNHSVFDVPLHYNLYNASKSGGNYDMRNIFNGTVVQRHPSHAVTFVDNHDSQPEEALESFVEEWFKPLAYALTLTREQGYPSVFYGDYYGIPTHGVPAMRSKIDPILEARQKYAYGPQHDYLDHPDVIGWTREGDSSHPKSGLATLITDGPGGSKRMYAGLKNAGETWYDITGNRSDTVKIGSDGWGEFHVNDGSVSIYVQK

SEQ ID NO: 28773 - protein, 485 aa, Bacillus sp.
HHNGTNGTMMQYFEWYLPNDGNHWNRLNSDASNLKSKGITAVWIPPAWKGASQNDVGYGAYDLYDLGEFNQKGTVRTKYGTRSQLQAAVTSLKNNGIQVYGDVVMNHKGGADATEMVRAVEVNPNNRNQEVTGEYTIEAWTRFDFPGRGNTHSSFKWRWYHFDGVDWDQSRRLNNRIYKFRGHGKAWDWEVDTEFGNYDYLMYADYDSDHPEVVNELRNWGVWYTNTLGLDGFRIDAVKHIKYSFTRDWINHVRSATGKNMFAVAEFWKNDLGAIENYLQKTNWNHSVFDVPLHYNLYNASKSGGNYDMRNIFNGTVVQRHPSHAVTFVDNHDSQPEEALESFVEEWFKPLAYALTLTREQGYPSVFYGDYYGIPTHGVPAMRSKIDPILEARQKYAYGPQHDYLDHPDVIGWTREGDSSHPKSGLATLITDGPGGSKRMYAGLKNAGETWYDITGNRSDTVKIGSDGWGEFHVNDGSVSIYVQK

SEQ ID NO: 28774 - protein, 485 aa, Bacillus sp.
HHNGTNGTMMQYFEWYLPNDGNHWNRLNSDASNLKSKGITAVWIPPAWKAASQNDVGYGAYDLYDLGEFNQKGTVRTKYGTRSQLQAAVTSLKNNGIQVYGDVVMNHKGGADATEMVRAVEVNPNNRNQEVTGEYTIEAWTRFDFPGRGNTHSSFKWRWYHFDGVDWDQSRRLTNRIYKFRGHGKAWDWEVDTEFGNYDYLMYADYDMDHPEVVNELRNWGVWYTNTLGLDGFRIDAVKHIKYSFTRDWINHVRSATGKNMFAVAEFWKNDLGAIENYLQKTNWNHSVFDVPLHYNLYNASKSGGNYDMRNIFNGTVVQRHPSHAVTFVDNHDSQPEEALESFVDPWFKPLAYALTLTREQGYPSVFYGDYYGIPTHGVPAMRSKIDPILEARQKYAYGPQHDYLDHPDVIGWTREGDSSHPKSGLATLITDGPGGSKRMYAGLKNAGETWYDITGNRSDTVKIGSDGWGEFHVNGGSVSIYVQK

SEQ ID NO: 28775 - protein, 485 aa, Bacillus sp.
HHNGTNGTMMQYFEWYLPNDGNHWNRLNSDASNLKSKGITAVWIPPAWKGASQNDVGYGAYDLYDLGEFNQKGTVRTKYGTRSQLQAAVTSLKNNGIQVYGDVVMNHKGGADATEMVRAVEVNPNNRNQEVTGEYTIEAWTRFDFPGRGNTHSSFKWRWYHFDGVDWDQSREFDNRIYKFRGHGKAWDWEVDTEFGNYDYLMYADYDMDHPEVVNELRNWGVWYTNTLGLDGFRIDAVKHIKYSFTRDWINHVRSATGKNMFAVAEFWKNDLGAIENYLQKTNWNHSVFDVPLHYNLYNASKSGGNYDMRNIFNGTVVQRHPSHAVTFVDNHDSQPEEALESFVETWFKPLAYALTLTREQGYPSVFYGDYYGIPTHGVPAMRSKIDPILEARQKYAYGPQHDYLDHPDVIGWTREGDSSHPKSGLATLITDGPGGSKRMYAGLKNAGETWYDITGNRSDTVKIGSDGWGEFHVNDASVSIYVQK

SEQ ID NO: 28776 - protein, 483 aa, Bacillus sp.
HHNGTNGTMMQYFEWYLPNDGNHWNRLNSDASNLKSKGITAVWIPPAWKAASQNDVGYGAYDLYDLGEFNQKGTVRTKYGTRSQLQAAVTSLKNNGIQVYGDVVMNHKGGADATEMVRAVEVNPNNRNQEVTGEYTIEAWTRFDFPGRGNTHSSFKWRWYHFDGVDWDQSRRTNNRIYKFRGKAWDWEVDTEFGNYDYLMYADYDMDHPEVVNELRNWGVWYTNTLGLDGFRIDAVKHIKYSFTRDWINHVRSATGKNMFAVAEFWKNDLGAIENYLQKTNWNHSVFDVPLHYNLYNASKSGGNYDMRNIFNGTVVQRHPSHAVTFVDNHDSQPEEALESFVEEWFKPLAYALTLTREQGYPSVFYGDYYGIPTHGVPAMRSKIDPILEARQKYAYGPQHDYLDHPDVIGWTREGDSSHPKSGLATLITDGPGGSKRMYAGLKNAGETWYDITGNRSDTVKIGSDGWGEFHVNDGSVSIYVQK

SEQ ID NO: 28777 - protein, 483 aa, Bacillus sp.
HHNGTNGTMMQYFEWYLPNDGNHWNRLNSDASNLKSKGITAVWIPPAWKGASQNDVGYGAYDLYDLGEFNQKGTVRTKYGTRSQLQAAVTSLKNNGIAVYGDVVMNHKGGADATEMVRAVEVNPNNRNQEVTGEYTIEAWTRFDFPGRGNTHSSFKWRWYHFDGVDWDQSRRLNNRIYKFRGKAWDWEVDTEFGNYDYLMYADYDMDHPEVVNELRNWGVWYTNTLGLDGFRIDAVKHIKYSFTRDWINHVRSATGKNMFAVAEFWKNDLGAIENYLQKTNWNHSVFDVPLHYNLYNASKSGGNYDMRNIFNGTVVQAHPNHAVTFVDNHDSQPEEALESFVEEWFKPLAYALTLTREQGYPSVFYGDYYGIPTHGVPAMRSKIDPILEARQKYAYGPQHDYLDHPDVIGWTREGDSSHPKSGLATLITDGPGGSKRMYAGLKNAGETWYDITGNRSDTVKIGSDGWGEFHVNDGSVSIYVQK

SEQ ID NO: 28778 - protein, 483 aa, Bacillus sp.
HHNGTNGTMMQYFEWYLPNDGNHWNRLNSDASNLKSKGITAVWIPPAWKGASQNDVGYGAYDLYDLGEFNQKGTVRTKYGTRSQLQAAVTSLKNNGIQVYGDVVMNHKGGADATEMVRAVEVNPNNRNQEVTGEYTIEAWTRFDFPGRGNTHSSFKWRWYHFDGVDWDQSRRLNNRIYKFRGKAWDWEVDTEFGNYDYLMYADYDMDHPEVVNELRNWGVWYTNTLGLDGFRIDAVKHIKYSFTRDWINHVRSATGKNMFAVAEFWKNDLGAIENYLQKTNWNHSVFDVPLHYNLYNASKSGGNYDMRNIFNGTVVQRLPSHAVTFVDNHDSQPEEALESFVEEWFKPLAYALTLTREQGYPSVFYGDYYGIPTHGVPAMRSKIDPILEARQKYAYGPQHDYLDHPDVIGWTREGDSSHPKSGLATLITDGPGGSKRMYAGLKNAGETWYDITGNRSDTVKIGSDGWGEFHVNDGSVSIYVQK

SEQ ID NO: 28779 - protein, 485 aa, Bacillus sp.
HHNGTNGTMMQYFEWYLPNDGNHWNRLNSDASNLKSKGITAVWIPPAWKGASQNDVGYGAYDLYDLGEFNQKGTVRTKYGTRSQLQAAVTSLKNNGIQVYGDVVMNHKGGADATEMVRAVEVNPNNRNQEVTGEYTIEAWTRFDFPGRGNTHSSFKWRWYHFDGVDFDQSRNFQNRIYKFRGHGKAWDWEVDTEFGNYDYLMYADYDMDHPEVVNELRNWGVWYTNTLGLDGFRIDAVKHIKYSFTRDWINHVRSATGKNMFAVAEFWKNDLGAIENYLQKTNWNHSVFDVPLHYNLYNASKSQGNYDMRNIFNGTVVQRHPSHAVTFVDNHDSQPEEALESFVDTWFKPLAYALTLTREQGYPSVFYGDYYGIPTHGVPAMRSKIDPILEARQKYAYGPQHDYLDHPDVIGWTREGDSSHPKSGLATLITDGPGGSKRMYAGLKNAGETWYDITGNRSDTVKIGSDGWGEFHVNGSSVSIYVQK

SEQ ID NO: 28780 - protein, 483 aa, Bacillus sp.
HHNGTNGTMMQYFEWYLPNDGNHWNRLNSDASNLKSKGITAVWIPPAWKATSQNDVGYGAYDLYDLGEFNQKGTVRTKYGTRSQLQAAVTSLKNNGIQVYGDVVMNHKGGADATEMVRAVEVNPNNRNQEVTGEYTIEAYTRFDFPGRGNTHSSFKWRWYHFDGVDWDQSRNVNNRIYKFRGKAWDWEVDTEFGNYDYLMYADYDMDHPEVVNELRNWGVWYTNTLGLDGFRIDAVKHIKYSFTRDWINHVRSATGKNMFAVAEFWKNDLGAIENYLQKTNWNHSVFDVPLHYNLYNASKSGGNYDMRNIFNGTVVQRHPSHAVTFVDNHDSQPEEALESFVEEWFKPLAYALTLTREQGYPSVFYGDYYGIPTHGVPAMRSKIDPILEARQKYAYGPQHDYLDHPDVIGWTREGDSSHPKSGLATLITDGPGGSKRMYAGLKNAGETWYDITGNRSDTVKIGSDGWGEFHVNDGSVSIYVQK

SEQ ID NO: 28781 - protein, 485 aa, Bacillus sp.
HHNGTNGTMMQYFEWYLPNDGNHWNRLNSDASNLKSKGITAVWIPPAWKGASQNDVGYGAYDLYDLGEFNQKGTVRTKYGTRSQLQAAVTSLKNNGIQVYGDVVMNHKGGADATEMVRAVEVNPNNRNQEVTGEYTIEAWTRFDFPGRGNTHSSFKWRWYHFDGVDWDQSRRLNNRIYKFRGHGKAWDWEVDTEFGNYDYLMYVDYDMDHPEVVNELRNWGVWYTNTLGLDGFRIDAVKHIKYSFTRDWINHVRSATGKNMFAVAEFWKNDLGAIENYLQKTNWNHSVFDVPLHYNLYNASKSGGNYDMRNIFNGTVVQRHPSHAVTFVDNHDSQPEEALESFVEEWFKPLAYALTLTREQGYPSVFYGDYYGIPTHGVPAMRSKIDPILEARQKYAYGPQHDYLDHPDVIGWTREGDSSHPKSGLATLITDGPGGSKRMYAGLKNAGETWYDITGNRSDTVKIGSDGWGEFHVNDGSVSIYVQK

SEQ ID NO: 28782 - protein, 485 aa, Bacillus sp.
HHNGTNGTMMQYFEWYLPNDGNHWNRLNSDASNLKSKGITAVWIPPAWKGASQNDVGYGAYDLYDLGEFNQKGTVRTKYGTRSQLQAAVTSLKNNGINVYGDVVMNHKGGADATEMVRAVEVNPNNRNQEVTGEYTIEAWTRFDFPGRGNTHSSFKWRWYHFDGVDWDQSRRLNNRIYKFRGHGKAWDWEVDTEFGNYDYLMYADYDMDHPEVVNELRNWGVWYTNTLGLDGFRIDAVKHIKYSFTRDWINHVRSATGKNMFAVAEFWKNDLGAIENYLQKTNWNHSVFDVPLHYNLYNASKSVGNYDMRNIFNGTVVQAHPMHAVTFVDNHDSQPEEALESFVEEWFKPLAYALTLTREQGYPSVFYGDYYGIPTHGVPAMRSKIDPILEARQKYAYGPQHDYLDHPDVIGWTREGDSSHPKSGLATLITDGPGGSKRMYAGLKNAGETWYDITGNRSDTVKIGSDGWGEFHVNDGSVSIYVQK

SEQ ID NO: 28783 - protein, 483 aa, Bacillus sp.
HHNGTNGTMMQYFEWYLPNDGNHWNRLNSDASNLKSKGITAVWIPPAWKGASQNDVGYGAYDLYDLGEFNQKGTVRTKYGTRSQLQAAVTSLKNNGIQVYGDVVMNHKGGADATEMVRAVEVNPNNRNQEVTGEYTIEAWTRFDFPGRGNTHSSFKWRWGHFDGVDWDQSRRLNNRIYKFRGKAWDWEVDTEFGNYDYLMYADYDMDHPEVVNELRNWGVWYTNTLGLDGFRIDAVKHIKYSFTRDWINHVRSATGKNMFAVAEFWKNDLGAIENYLQKTNWNHSVFDVPLHYNLYNASKSGGNYDMRNIFNGTVVQRHPSHAVTFVDNHDSQPEEALESFVEEWFKPLAYALTLTREQGYPSVFYGDYYGIPTHGVPAMRSKIDPILEARQKYAYGPQHDYLDHPDVIGWTREGDSSHPKSGLATLITDGPGGSKRMYAGLKNAGETWYDITGNRSDTVKIGSDGWGEFHVNDGSVSIYVQK

SEQ ID NO: 28784 - protein, 483 aa, Bacillus sp.
HHNGTNGTMMQYFEWYLPNDGNHWNRLNSDASNLKSKGITAVWIPPAWKAVSQNDVGYGAYDLYDLGEFNQKGTVRTKYGTRSQLQAAVTSLKNNGIQVYGDVVMNHKGGADATEMVDAVEVNPNNRNQEVTGEYTIEAWTRFDFPGRGNTHSSFKWRWYHFDGVDWDQSREFTNRIYKFRGKAWDWEVDTEFGNYDYLMYVDYDMDHPEVVNELRNWGVWYTNTLGLDGFRIDAVKHIKYSFTRDWINHVRSATGKNMFAVAEFWKNDLGAIENYLQKTNWNHSVFDVPLHYNLYNASKSGGNYDMRNIFNGTVVQRHPSHAVTFVDNHDSQPEEALESFVEEWFKPLAYALTLTREQGYPSVFYGDYYGIPTHGVPAMRSKIDPILEARQKYAYGPQHDYLDHPDVIGWTREGDSSHPKSGLATLITDGPGGSKRMYAGLKNAGETWYDITGNRSDTVKIGSDGWGEFHVNDGSVSIYVQK

SEQ ID NO: 28785 - protein, 485 aa, Bacillus sp.
HHNGTNGTMMQYFEWYLPNDGNHWNRLNSDASNLKSKGITAVWIPPAWKGASQNDVGYGAYDLYDLGEFNQRGTVRTKYGTRSQLQAAVTSLKNNGIQVYGDVVMNHKGGADATEMVRAVEVNPNNRNQEVTGEYTIEAWTRFDFPGRGNTHSSFKWRWYHFDGVDWDQSRRLNNRIYKFRGHGKAWDWEVDTEFGNYDYLMYADYDMDHPEVVNELRNWGVWYTNTLGLDGFRIDAVKHIKYSFTRDWINHVRSATGKNMFAVAEFWKNDLGAIENYLQKTNWNHSVFDVPLHYNLYNASKSGGNYDMRNIFNGTVVQRHPSHAVTFVDNHDSQPEEALESFVEEWFKPLAYALTLTREQGYPSVFYGDYYGIPTHGVPAMRSKIDPILEARQKYAYGPQHDYLDHPDVIGWTREGDSSHPKSGLATLITDGPGGSKRMYAGLKNAGETWYDITGNRSDTVKIGSDGWGEFHVNDGSVSIYVQK

SEQ ID NO: 28786 - protein, 485 aa, Bacillus sp.
HHNGTNGTMMQYFEWYLPNDGNHWNRLNSDASNLKSKGITAVWIPPAWKGASQNDVGYGAYDLYDLGEFNQKGTVRTKYGTRSQLQAAVTSLKNNGIQVYGDVVMNHKGGADATEMVRAVEVNPNNRNQEVTGEYTIEAWTRFDFPGRGNTHSSFKWRWYHFDGVDWDQSRRLNNRIYKFRGHGKAWDWEVDTEFGNYDYLMYADYDMDHPEVVNELRNWGVWYTNTLGLDGFRIDAVKHIKYSFTRDWINHVRSATGKNMFAVAEFWKNDLGAIENYLQKTNWNHSVFDVPLHYNLYNASKRGGNYDMRNIFNGTVVQRHPSHAVTFVDNHDSQPEEALESFVEEWFKPLAYALTLTREQGYPSVFYGDYYGIPTHGVPAMRSKIDPILEARQKYAYGPQHDYLDHPDVIGWTREGDSSHPKSGLATLITDGPGGSKRMYAGLKNAGETWYDITGNRSDTVKIGSDGWGEFHVNDGSVSIYVQK

SEQ ID NO: 28787 - protein, 485 aa, Bacillus sp.
HHNGTNGTMMQYFEWYLPNDGNHWNRLNSDASNLKSKGITAVWIPPAWKAASQNDVGYGAYDLYDLGEFNQKGTVRTKYGTRSQLQAAVTSLKNNGIQVYGDVVMNHKGGADATEMVRAVEVNPNNRNQEVTGEYTIEAWTRFDFPGRGNTHSSFKWRWYHFDGVDWDQSRRLENRIYKFRGHGKAWDWEVDTEFGNYDYLMYADYDMDHPEVVNELRNWGVWYTNTLGLDGFRIDAVKHIKYSFTRDWINHVRSATGKNMFAVAEFWKNDLGAIENYLQKTNWNHSVFDVPLHYNLYNASKSGGNYDMRNIFNGTVVQRHPSHAVTFVDNHDSQPEEALESFVEEWFKPLAYALTLTREQGYPSVFYGDYYGIPTHGVPAMRSKIDPILEARQKYAYGPQHDYLDHPDVIGWTREGDSSHPKSGLATLITDGPGGSKRMYAGLKNAGETWYDITGNRSDTVKIGSDGWGEFHVNDGSVSIYVQK

SEQ ID NO: 28788 - protein, 483 aa, Bacillus sp.
HHNGTNGTMMQYFEWYLPNDGNHWNRLNSDASNLKSKGITAVWIPPAWKGASQNDVGYGAYDLYDLGEFNQKGTVRTKYGTRSQLQAAVTSLKNNGIQVYGDVVMNHKGGADATEMVRAVEVNPNNRNQEVTGEYTIEAWTRFDFPGRGNTHSSFKWRWYHFDGVDWDQSRRTNNRIYKFRGKAWDWEVDTEFGNYDYLMYTDYDMDHPEVVNELRNWGVWYTNTLGLDGFRIDAVKHIKYSFTRDWINHVRSATGKNMFAVAEFWKNDLGAIENYLQKTNWNHSVFDVPLHYNLYNASKSGGNYDMRNIFNGTVVQVHPSHAVTFVDNHDSQPEEALESFVEEWFKPLAYALTLTREQGYPSVFYGDYYGIPTHGVPAMRSKIDPILEARQKYAYGPQHDYLDHPDVIGWTREGDSSHPKSGLATLITDGPGGSKRMYAGLKNAGETWYDITGNRSDTVKIGSDGWGEFHVNYGSVSIYVQK

SEQ ID NO: 28789 - protein, 485 aa, Bacillus sp.
HHNGTNGTMMQYFEWYLPNDGNHWNRLNSDASNLKSKGITAVWIPPAWKGASQNDVGYGAYDLYDLGEFNQKGTVRTKYGTRSQLQAAVTSLKNNGIQVYGDVVMNHKGGADATEMVRAVEVNPNNRNQEVTGEYTIEAWTRFDFPGRGNTHSSFKWRWYHFDGVDWDQSRRLDNRIYKFRGHGKAWDWEVDTEFGNYDYLMYVDYDMDHPEVVNELRNWGVWYTNTLGLDGFRIDAVKHIKYSFTRDWINHVRSATGKNMFAVAEFWKNDLGAIENYLQKTNWNHSVFDVPLHYNLYNASKSGGNYDMRNIFNGTVVQRHPSHAVTFVDNHDSQPEEALESFVEEWFKPLAYALTLTREQGYPSVFYGDYYGIPTHGVPAMRSKIDPILEARQKYAYGPQHDYLDHPDVIGWTREGDSSHPKSGLATLITDGPGGSKRMYAGLKNAGETWYDITGNRSDTVKIGSDGWGEFHVNDGSVSIYVQK

SEQ ID NO: 28790 - protein, 483 aa, Bacillus sp.
HHNGTNGTMMQYFEWYLPNDGNHWNRLNSDASNLKSKGITAVWIPPAWKGASQNDVGYGAYDLYDLGEFNQKGTVRTKYGTRSQLQAAVTSLKNNGIQVYGDVVMNHKGGADATEMVRAVEVNPNNRNQEVTGEYTIEAWTRFDFPGRGNTHSSFKWRWYHFDGVDWDQSRRLNNRIYMFRGKAWDWEVDTEFGNYDYLMYADYDMDHPEVVNELRNWGVWYTNTLGLDGFRIDAVKHIKYSFTRDWINHVRSATGKNMFAVAEFWKNDLGAIENYLQKTNWNHSVFDVPLHYNLYNASKSGGNYDMRNIFNGTVVQRHPSHAVTFVDNHDSQPEEALESFVEEWFKPLAYALTLTREQGYPSVFYGDYYGIPTHGVPAMRSKIDPILEARQKYAYGPQHDYLDHPDVIGWTREGDSSHPKSGLATLITDGPGGSKRMYAGLKNAGETWYDITGNRSDTVKIGSDGWGEFHVNDGSVSIYVQK

SEQ ID NO: 28791 - protein, 485 aa, Bacillus sp.
HHNGTNGTMMQYFEWYLPNDGNHWNRLNSDASNLKSKGITAVWIPPAWKGASQNDVGYGAYDLYDLGEFNQKGTVRTKYGTRSQLQAAVTSLKNNGIQVYGDVVMNHKGGADATEMVRAVEVNPNNRNQEVTGEYTIEAWTRFDFPGRGNTHSSFKWRWYHFDGVDWDQSRRTNNRIYKFRGHSKAWDWEVDTEFGNYDYLMYTDYDMDHPEVVNELRNWGVWYTNTLGLDGFRIDAVKHIKYSFTRDWINHVRSATGKNMFAVAEFWKNDLGAIENYLQKTNWNHSVFDVPLHYNLYNASKSGGNYDMRNIFNGTVVQRHPSHAVTFVDNHDSQPEEALESFVEEWFKPLAYALTLTREQGYPSVFYGDYYGIPTHGVPAMRSKIDPILEARQKYAYGPQHDYLDHPDVIGWTREGDSSHPKSGLATLITDGPGGSKRMYAGLKNAGETWYDITGNRSDTVKIGSDGWGEFHVNDGSVSIYVQK

SEQ ID NO: 28792 - protein, 483 aa, Bacillus sp.
HHNGTNKTMMQYFEWYLPNDGNHWNRLNSDASNLKSKGITAVWIPPAWKGASQNDVGYGAYDLYDLGEFNQKGTVRTKYGTRSQLQAAVTSLKNNGIQVYGDVVMNHKGGADATEMVRAVEVNPNNRNQEVTGEYTIEAWTRFDFPGRGNTHSSFKWRWYHFDGVDWDQSRRLNNRIYKFRGKAWDWEVDTEFGNYDYLMYADYDMDHPEVVNELRNWGVWYTNTLGLDGFRIDAVKHIKYSFTRDWINHVRSATGKNMFAVAEFWKNDLGAIENYLQKTNWNHSVFDVPLHYNLYNASKSGGNYDMRNIFNGTVVQAHPMLAVTFVDNHDSQPEEALESFVEEWFKPLAYALTLTREQGYPSVFYGDYYGIPTHGVPAMRSKIDPILEARQKYAYGPQHDYLDHPDVIGWTREGDSSHPKSGLATLITDGPGGSKRMYAGLKNAGETWYDITGNRSDTVKIGSDGWGEFHVNDGSVSIYVQK

SEQ ID NO: 28793 - protein, 483 aa, Bacillus sp.
HHNGTNGTMMQYFEWYLPNDGNHWNRLNSDASNLKSKGITAVWIPPAWKGASQNDVGYGAYDLYDLGEFNQKGTVRTKYGTRSQLQAAVTSLKNNGIQVYGDVVMNHKGGADATEMVRAVEVNPNNRNQEVTGEYTIEAWTRFDFPGRGNTHSSFKWRWYHFDGVDWDQSRRTSNRIYKFRGKAWDWEVDTEFGNYDYLMYVDYDMDHPEVVNELRNWGVWYTNTLGLDGFRIDAVKHIKYSFTRDWINHVRSATGKNMFAVAEFWKNDLGAIENYLQKTNWNHSVFDVPLHYNLYNASKSGGNYDMRNIFNGTVVQRHPSHAVTFVDNHDSQPEEALESFVEEWFKPLAYALTLTREQGYPSVFYGDYYGIPTHGVPAMRSKIDPILEARQKYAYGPQHDYLDHPDVIGWTREGDSSHPKSGLATLITDGPGGSKRMYAGLKNAGETWYDITGNRSDTVKIGSDGWGEFHVNDGSVSIYVQK

SEQ ID NO: 28794 - protein, 483 aa, Bacillus sp.
HHNGTNGTMMQYFEWYLPNDGNHWNRLNSDASNLKSKGITAVWIPPAWKGASQNDVGYGAYDLYDLGEFNQKGTVRTKYGTRSQLQAAVTSLKNNGIQVYGDVVMNHKGGADATEMVRAVEVNPNNRNQEVTGEYTIEAWTRFDFPGRGNTHSSFKWRWYHFDGVDWDQSRRLNNRIYKFRGKAWDWEVDTEFGNYDYLMYADYDMDHPEVVNELRNWGVWYTNTLGLDGFRIDAVKHIKYSFTRDWINHVRSATGKNMFAVAEFWKNDLGAIENYLQKTNWNHSVFDVPLHYNLYNASKSGGNYDMRNIFNGTVVQRHPSHAVTFVDNHDSQPEEALESFVEEWFKPLAYALTLTREQGYPSVFYGDYYGIPTHGVPAMRSKIDPILLARQKYAYGPQHDYLDHPDVIGWTREGDSSHPPSGLATLITDGPGGSKRMYAGLKNAGETWYDITGNRSDTVKIGSDGWGEFHVNDGSVSIYVQK

SEQ ID NO: 28795 - protein, 483 aa, Bacillus sp.
HHNGTNGTMMQYFEWYLPNDGNHWNRLNSDASNLKSKGITAVWIPPAWKGASQNDVGYGAYDLYDLGEFNQKGTVRTKYGTRSQLQAAVTSLKNNGIQVYGDVVMNHKGGADATEMVRAVEVNPNNRNQEVTGEYTIEAWTRFDFPGRGNTHSSFKWRWYHFDGVDWDQSRKVSNRIYKFRGKAWDWEVDTEFGNYDYLMYTDYDMDHPEVVNELRNWGVWYTNTLGLDGFRIDAVKHIKYSFTRDWINHVRSATGKNMFAVAEFWKNDLGAIENYLQKTNWNHSVFDVPLHYNLYNASKSGGNYDMRNIFNGTVVQRHPSHAVTFVDNHDSQPEEALESFVEEWFKPLAYALTLTREQGYPSVFYGDYYGIPTHGVPAMRSKIDPILEARQKYAYGPQHDYLDHPDVIGWTREGDSSHPKSGLATFITDGPGGSKRMYAGLKNAGETWYDITGNRSDTVKIGSDGWGEFHVNDGSVSIYVQK

SEQ ID NO: 28796 - protein, 485 aa, Bacillus sp.
HHNGTNGTMMQYFEWYLPNDGNHWNRLNSDASNLKSKGITAVWIPPAWKGASQNDVGYGAYDLYDLGEFNQKGTVRTKYGTRSQLQAAVTSLKNNGIQVYGDVVMNHKGGADATEMVRAVEVNPNNRGQEVTGEYTIEAWTRFDFPGRGNTHSSFKWRWYHFDGVDWDQSRRLNNRIYKFRGHGKAWDWEVDTEFGNYDYLMYADYDMDHPEVVNELRNWGVWYTNTLGLDGFRIDAVKHIKYSFTRDWINHVRSATGKNMFAVAEFWKNDLGAIENYLQKTNWNHSVFDVPLHYNLYNASKSGGNYDMRNIFNGTVVQRHPSHAVTFVDNHDSQPEEALESFVEEWFKPLAYALTLTREQGYPSVFYGDYYGIPTHGVPAMRSKIDPILEARQKYAYGPQHDYLDHPDVIGWTREGDSSHPKSGLATLITDGPGGSKRMYAGLKNAGETWYDITGNRSDTVKIGSDGWGEFHVNDGSVSIYVQK

SEQ ID NO: 28797 - protein, 485 aa, Bacillus sp.
HHNGTNGTMMQYFEWYLPNDGNHWNRLNSDASNLKSKGITAVWIPPAWKAASQNDVGYGAYDLYDLGEFNQKGTVRTKYGTRSQLQAAVTSLKNNGIQVYGDVVMNHKGGADATEMVRAVEVNPNNRNQEVTGEYTIEAWTRFDFPGRGNTHSSFKWRWYHFDGVDWDQSRDLDNRIYKFRGHGKAWDWEVDTEFGNYDYLMYADYDMDHPEVVNELRNWGVWYTNTLGLDGFRIDAVKHIKYSFTRDWINHVRSATGKNMFAVAEFWKNDLGAIENYLQKTNWNHSVFDVPLHYNLYNASKSGGNYDMRNIFNGTVVQRHPSHAVTFVDNHDSQPEEALESFVEEWFKPLAYALTLTREQGYPSVFYGDYYGIPTHGVPAMRSKIDPILEARQKYAYGPQHDYLDHPDVIGWTREGDSSHPKSGLATLITDGPGGSKRMYAGLKNAGETWYDITGNRSDTVKIGSDGWGEFHVNDGSVSIYVQK

SEQ ID NO: 28798 - protein, 485 aa, Bacillus sp.
HHNGTNGTMMQYFEWYLPNDGNHWNRLNSDASNLKSKGITAVWIPPAWKGASQNDVGYGAYDLYDLGEFNQKGTVRTKYGTRSQLQAAVTSLKNNGIQVYGDVVMNHKGGADATEMVRAVEVNPNNRNQEVTGEYTIEAWTRFDFPGRGNTHSSFKWRWYHFDGVDWDQSRRLNNRIYKFRGHGKAWDWEVDTEFGNYDYLMYADYDMDHPEVVNELRNWGVWYTNTLGLDGFRIDAVKHIKYSFTRDWINHVRSATGKNMFAVAEFWKNDLGAIENYLQKTNWNHSVFDVPLHYNLYNASNSGGNYDMRNIFNGTVVQRHPSHAVTFVDNHDSQPEEALESFVDTWFKPLAYALTLTREQGYPSVFYGDYYGIPTHGVPAMRSKIDPILEARQKYAYGPQHDYLDHPDVIGWTREGDSSHPKSGLATLITDGPGGSKRMYAGLKNAGETWYDITGNRSDTVKIGSDGWGEFHVNQQSVSIYVQK

SEQ ID NO: 28799 - protein, 485 aa, Bacillus sp.
HHNGTNGTMMQYFEWYLPNDGNHWNRLNSDASNLKSKGITAVWIPPAWKGASQNDVGYGAYDLYDLGEFNQKGTVRTKYGTRSQLQAAVTSLKNNGIQVYGDVVMNHKGGADATEMVRAVEVNPNNRNQEVTGEYTIEAWTRFDFPGRGNTHSSFKWRWYHFDGVDWDQSRRLNNRIYKFRGHGKAWDWEVDTEFGNYDYLMYADYDMDHPEVVNELRNWGVWYTNTLGLDGFRIDAVKHIKYSFTRDWINHVRSATGKNMFAVAEFWKNDLGAIENYLQKTNWNHSVFDVPLHYNLYNASKSGGNYDMRNIFNGTVVQRHPSHAVTFVDNHDSQPEEALESFVEEWFKPLAYALTLTREQGYPSVFYGDYYGIPTHGVPAMRSKIDPILLARQKYAYGPQHDYLDHPDVIGWTREGDSSHPPSGLATLITDGPGGSKRMYAGLKNAGETWYDITGNRSDTVKIGSDGWGEFHVNDGSVSIYVQK

SEQ ID NO: 28800 - protein, 483 aa, Bacillus sp.
HHNGTNGTMMQYFEWYLPNDGNHWNRLNSDASNLKSKGITAVWIPPAWKGASQNDVGYGAYDLYDLGEFNQKGTVRTKYGTRSQLQAAVTSLKNNGIQVYGDVVMNHKGGADATEMVRAVEVNPNNRNQEVTGEYTIEAWTRFDFPGRGNTHSSFKWRWYHFDGVDWDQSRRLNNRIYKFRGKAWDWEVDTEFGNYDYLMYADYDMDHPEVVNELRNWGVWYTNTLGLDGFRIDAVKHIKYSFTRDWINHVRSATGKNMFAVAEFWKNDLGAIENYLQKTNWNHSVFDVPLHYNLYNASKSGGNYDMRNIFNGTVVQRHPSHAVTFVDNHDSQPEEALESFVDPWFKPLAYALTLTREQGYPSVFYGDYYGIPTHGVPAMRSKIDPILEARQKYAYGPQHDYLDHPDVIGWTREGDSSHPKSGLATLITDGPGGSKRMYAGLKNAGETWYDITGNRSDTVKIGSDGWGEFHVNGSSVSIYVQK

SEQ ID NO: 28801 - protein, 485 aa, Bacillus sp.
HHNGTNGTMMQYFEWYLPNDGNHWNRLNSDASNLKSKGITAVWIPPAWKGASQNDVGYGAYDLYDLGEFNQKGTVRTKYGTRSQLQAAVTSLKNNGIQVYGDVVMNHKGGADATEMVRAVEVNPNNRNQEVTGEYTIEAWTRFDFPGRGNTHSSFKWRWYHFDGVDWDQSRRLTNRIYKFRGHGKAWDWEVDTEFGNYDYLMYTDYDMDHPEVVNELRNWGVWYTNTLGLDGFRIDAVKHIKYSFTRDWINHVRSATGKNMFAVAEFWKNDLGAIENYLQKTNWNHSVFDVPLHYNLYNASKSGGNYDMRNIFNGTVVQRHPSHAVTFVDNHDSQPEEALESFVEEWFKPLAYALTLTREQGYPSVFYGDYYGIPTHGVPAMRSKIDPILEARQKYAYGPQHDYLDHPDVIGWTREGDSSHPKSGLATLITDGPGGSKRMYAGLKNAGETWYDITGNRSDTVKIGSDGWGEFHVNDGSVSIYVQK

SEQ ID NO: 28802 - protein, 485 aa, Bacillus sp.
HHNGTNGTMMQYFEWYLPNDGNHWNRLNSDASNLKSKGITAVWIPPAWKGASQNDVGYGAYDLYDLGEFNQKGTVRTKYGTRSQLQAAVTSLKNNGIQVYGDVVMNHKGGADATEMVRAVEVNPNNRNQEVTGEYTIEAWTRFDFPGRGNTHSSFKWRWYHFDGVDWDQSRRLNNRIYKFRGHGKAWDWEVDTEFGNYDYLMYADYDMDHPEVVNELRNWGVWYTNTLGLDGFRIDAVKHIKYSFTRDWINHVRSATGKNMFAVAEFWKNDLGAIENYLQKTNWNHSVFDVPLHYNLYNASKSGGNYDMRNIFNGTVVQRWPSHAVTFVDNHDSQPEEALESFVEEWFKPLAYALTLTREQGYPSVFYGDYYGIPTHGVPAMRSKIDPILEARQKYAYGPQHDYLDHPDVIGWTREGDSSHPKSGLATLITDGPGGSKRMYAGLKNAGETWYDITGNRSDTVKIGSDGWGEFHVNDGSVSIYVQK

SEQ ID NO: 28803 - protein, 483 aa, Synthetic construct
HHNGTNGTMMQYFEWYLPNDGNHWNRLNSDASNLKSKGITAVWIPPAWKGASQNDVGYGAYDLYDLGEFNQKGTVRTKYGTRSQLQAAVTSLKNNGIQVYGDVVMNHKGGADATEMVRAVEVNPNNRNQEVTGEYTIEAWTRFDFPGRGNTHSSFKWRWYHFDGVDWDQSRRLNNRIYKFRGKAWDWEVDTENGNYDYLMYADFDMDYPEVVNEMRNWGVWYTNTLGLDGFRIDAVKHIKYSFTRDWINHVRSATGKNMFAVAEFWKNDLGAIENYLQKTNWNHSVFDVPLHYNLYNASKSGGNYDMRNIFNGTVVQRHPSHAVTFVDNHDSQPEEALESFVEEWFKPLAYALTLTREQGYPSVFYGDYYGIPTHGVPAMRSKIDPILEARQKYAYGPQHDYLDHPDVIGWTREGDSSHPKSGLATLITDGPGGSKRMYAGLKNAGETWYDITGNRSDTVKIGSDGWGEFHVNDGSVSIYVQK

SEQ ID NO: 28804 - protein, 483 aa, Bacillus sp.
HHNGTNQTMMQYFEWYLPNDGNHWNRLNSDASNLKSKGITAVWIPPAWKGASQNDVGYGAYDLYDLGEFNQKGTVRTKYGTRSQLQAAVTSLKNNGIQVYGDVVMNHKGGADATEMVRAVEVNPNNRNQEVTGEYTIEAWTRFDFPGRGNTHSSFKWRWYHFDGVDWDQSRRLNNRIYKFRGKAWDWEVDTEFGNYDYLMYADYDMDHPEVVNELRNWGVWYTNTLGLDGFRIDAVKHIKYSFTRDWINHVRSATGKNMFAVAEFWKNDLGAIENYLQKTNWNHSVFDVPLHYNLYNASKSGGNYDMRNIFNGTVVQAHPNHAVTFVDNHDSQPEEALESFVEEWFKPLAYALTLTREQGYPSVFYGDYYGIPTHGVPAMRSKIDPILEARQKYAYGPQHDYLDHPDVIGWTREGDSSHPKSGLATLITDGPGGSKRMYAGLKNAGETWYDITGNRSDTVKIGSDGWGEFHVNDGSVSIYVQK

SEQ ID NO: 28805 - protein, 485 aa, Bacillus sp.
HHNGTNGTMMQYFEWYLPNDGNHWNRLNSDASNLKSKGITAVWIPPAWKGASQNDVGYGAYDLYDLGEFNQKGTVRTKYGTRSQLQAAVTSLKNNGIQVYGDVVMNHKGGADATEMVRAVEVNPNNRNQEVTGEYTIEAWTRFDFPGRGNTHSSFKWRWYHFDGVDWDQSRRLNNRIYKFRGHGKAWDWEVDTEFGNYDYLMYADYDMDHPEVVNELRNWGVWYTNTLGLDGFRIDAVKHIKYSFTRDWINHVRSATGKNMFAVAEFWKNDLGAIENYLQKTNWNHSVFDVPLHYNLYNASKSGGNYDMRNIFNGTVVQRHPSHAVTFVDNHDSQPEEALESFVEKWFKPLAYALTLTREQGYPSVFYGDYYGIPTHGVPAMRSKIDPILEARQKYAYGPQHDYLDHPDVIGWTREGDSSHPKSGLATLITDGPGGSKRMYAGLKNAGETWYDITGNRSDTVKIGSDGWGEFHVNDGSVSIYVQK

SEQ ID NO: 28806 - protein, 485 aa, Bacillus sp.
HHNGTNGTMMQYFEWYLPNDGNHWNRLNSDASNLKSKGITAVWIPPAWKGASQNDVGYGAYDLYDLGEFNQKGTVRTKYGTRSQLQAAVTSLKNNGIQVYGDVVMNHKGGADATEMVRAVEVNPNNRNQEVTGEYTIEAWTRFDFPGRGNTHSSFKWRWYHFDGVDWDQSRRLNNRIYKFRGHGKAWDWEVDTEFGNYDYLMYADYDMDHPEVVNELRNWGVWYTNTLGLDGFRIDAVKHIKYSFTRDWINHVRSATGKNMFAVAEFWKNDLGAIENYLQKTNWNHSVFDVPLHYNLYNASKSGGNYDMRNIFNGTVVQRHPSHAVTFVDNHDSQPEEALESFVEPWFKPLAYALTLTREQGYPSVFYGDYYGIPTHGVPAMRSKIDPILEARQKYAYGPQHDYLDHPDVIGWTREGDSSHPKSGLATLITDGPGGSKRMYAGLKNAGETWYDITGNRSDTVKIGSDGWGEFHVNQGSVSIYVQK

SEQ ID NO: 28807 - protein, 485 aa, Bacillus sp.
NHNGTNGTMMQYFEWYLPNDGNHWNRLNSDASNLKSKGITAVWIPPAWKGASQNDVGYGAYDLYDLGEFNQKGTVRTKYGTRSQLQAAVTSLKNNGIQVYGDVVMNHKGGADATEMVRAVEVNPNNRNQEVTGEYTIEAWTRFDFPGRGNTHSSFKWRWYHFDGVDWDQSRRLNNRIYKFRGHGKAWDWEVDTEFGNYDYLMYADYDMDHPEVVNELRNWGVWYTNTLGLDGFRIDAVKHIKYSFTRDWINHVRSATGKNMFAVAEFWKNDLGAIENYLQKTNWNHSVFDVPLHYNLYNASKSGGNYDMRNIFNGTVVQRHPSHAVTFVDNHDSQPEEALESFVEEWFKPLAYALTLTREQGYPSVFYGDYYGIPTHGVPAMRSKIDPILEARQKYAYGPQHDYLDHPDVIGWTREGDSSHPKSGLATLITDGPGGSKRMYAGLKNAGETWYDITGNRSDTVKIGSDGWGEFHVNDGSVSIYVQK

SEQ ID NO: 28808 - protein, 483 aa, Bacillus sp.
HHNGTNGTMMQYFEWYLPNDGNHWNRLNSDASNLKSKGITEVWIPPAWKGISQNDVGYGAYDLYDLGEFNQKGTVRTKYGTRSQLQAAVTSLKNNGIQVYGDVVMNHKGGADATEMVRAVEVNPNNRNQEVTGEYTIEAWTRFDFPGRGNTHSSFKWRWYHFDGVDWDQSRDTNNRIYKFRGKAWDWEVDTEFGNYDYLMYADYDMDHPEVVNELRNWGVWYTNTLGLDGFRIDAVKHIKYSFTRDWINHVRSATGKNMFAVAEFWKNDLGAIENYLQKTNWNHSVFDVPLHYNLYNASKSGGNYDMRNIFNGTVVQRHPSHAVTFVDNHDSQPEEALESFVEEWFKPLAYALTLTREQGYPSVFYGDYYGIPTHGVPAMRSKIDPILEARQKYAYGPQHDYLDHPDVIGWTREGDSSHPKSGLATLITDGPGGSKRMYAGLKNAGETWYDITGNRSDTVKIGSDGWGEFHVNDGSVSIYVQK

SEQ ID NO: 28809 - protein, 485 aa, Bacillus sp.
HHNGTNGTMMQYFEWYLPNDGNHWNRLNSDASNLKSKGITAVWIPPAWKGASQNDVGYGAYDLYDLGEFNQKGTVRTKYGTRSQLQAAVTSLKNNGIQVYGDVVMNHKGGADATEMVRAVEVNPNNRNQEVTGEYTIEAWTRFDFPGRGNTHSSFKWRWYHFDGVDWDQSRRLNNRIYKFRGHGKAWDWEVDTEFGNYDYLMYADYDMDHPEVVNELRNWGVWYTNTLGLDGFRIDAVKHIKYSFTRDWINHVRSATGKNMFAVAEFWKNDLGAIENYLQKTNWNHSVFDVPLHYNLYNASKSGGNYDMRNIFNETVVQRHPSHAVTFVDNHDSQPEEALESFVEEWFKPLAYALTLTREQGYPSVFYGDYYGIPTHGVPAMRSKIDPILEARQKYAYGPQHDYLDHPDVIGWTREGDSSHPKSGLATLITDGPGGSKRMYAGLKNAGETWYDITGNRSDTVKIGSDGWGEFHVNDGSVSIYVQK

SEQ ID NO: 28810 - protein, 485 aa, Bacillus sp.
HHNGTNGTMMQYFEWYLPNDGNHWNRLNSDASNLKSKGITAVWIPPAWKGASQNDVGYGAYDLYDLGEFNQKGTVRTKYGTRSQLQAAVTSLKNNGIQVYGDVVMNHKGGADATEMVRAVEVNPNNRNQEVTGEYTIEAWTRFDFPGRGNTHSSFKWRWYHFDGVDWDQSRRLNNRIYKFRGHGKAWDWEVDTEFGNYDYLMYADYDMDHPEVVNELRNWGVWYTNTLGLDGFRIDAVKHIKYSFTRDWINHVRSATGKNMFAVAEFWKADLGAIENYLQKTNWNHSVFDVPLHYNLYNASKSGGNYDMRNIFNGTVVQRHPSHAVTFVDNHDSQPEEALESFVEEWFKPLAYALTLTREQGYPSVFYGDYYGIPTHGVPAMRSKIDPILEARQKYAYGPQHDYLDHPDVIGWTREGDSSHPKSGLATLITDGPGGSKRMYAGLKNAGETWYDITGNRSDTVKIGSDGWGEFHVNDGSVSIYVQK

SEQ ID NO: 28811 - protein, 485 aa, Bacillus sp.
HHNGTNGTMMQYFEWYLPNDGNHWNRLNSDASNLKSKGITAVWIPPAWKGASQNDVGYGAYDLYDLGEFNQKGTVRTKYGTRSQLQAAVTSLKNNGISVYGDVVMNHKGGADATEMVRAVEVNPNNRNQEVTGEYTIEAWTRFDFPGRGNTHSSFKWRWYHFDGVDWDQSRRLNNRIYKFRGHGKAWDWEVDTEFGNYDYLMYADYDMDHPEVVNELRNWGVWYTNTLGLDGFRIDAVKHIKYSFTRDWINHVRSATGKNMFAVAEFWKNDLGAIENYLQKTNWNHSVFDVPLHYNLYNASKSGGNYDMRNIFNGTVVQSHPSHAVTFVDNHDSQPEEALESFVEEWFKPLAYALTLTREQGYPSVFYGDYYGIPTHGVPAMRSKIDPILEARQKYAYGPQHDYLDHPDVIGWTREGDSSHPKSGLATLITDGPGGSKRMYAGLKNAGETWYDITGNRSDTVKIGSDGWGEFHVNDGSVSIYVQK

SEQ ID NO: 28812 - protein, 483 aa, Bacillus sp.
HHNGTNGTMMQYFEWYLPNDGNHWNRLNSDASNLKSKGITAVWIPPAWKGASQNDVGYGAYDLYDLGEFNQKGTVRTKYGTRSQLQAAVTSLKNNGIQVYGDVVMNHKGGADATEMVRAVEVNPNNRNQEVTGEYTIEAWTRFDFPGRGNTHSSFKWRWYHFDGVDWDQSRRLNNRIYKFRGKAWDWEVDTEFGNYDYLMYADYDMDHPEVVNELRNWGVWYTNTLGLDGFRIDAVKHIKYSFTRDWINHVRSATGKNMFAVAEFWKNDLGAIENYLQKTNWNHSVFDVPLHYNLYNASKSGGNYDMRNIFNGTVVQRHPSHAVTFVDNHDSQPEEALESFVEEWFKPLAYVLTLTREQGYPSVFYGDYYGIPTHGVPAMRSKIDPILEARQKYAYGPQHDYLDHPDVIGWTREGDSSHPKSGLATLITDGPGGSKRMYAGLKNAGETWYDITGNRSDTVKIGSDGWGEFHVNDGSVSIYVQK

SEQ ID NO: 28813 - protein, 483 aa, Bacillus sp.
HHNGTNGTMMQYFEWYLPNDGNHWNRLNSDASNLKSKGITAVWIPPAWKGASQNDVGYGAYDLYDLGEFNQKGTVRTKYGTRSQLQAAVTSLKNNGIQVYGDVVMNHKGGADATEMVRAVEVNPNNRNQEVTGEYTIEAWTRFDFPGRGNTHSSFKWRWYHFDGVDWDQSRRLNNRIYKFRGKAWDWEVDTEFGNYDYLMYADYDMDHPEVVNELRNWGVWYTNTLGLDGFRIDAVKHIKYSFTRDWINHVRSATGKNMFAVAEFWKNDLGAISNYLQKTNWNHSVFDVPLHYNLYNASKSGGNYDMRNIFNGTVVQRHPSHAVTFVDNHDSQPEEALESFVEEWFKPLAYALTLTREQGYPSVFYGDYYGIPTHGVPAMRSKIDPILEARQKYAYGPQHDYLDHPDVIGWTREGDSSHPKSGLATLITDGPGGSKRMYAGLKNAGETWYDITGNRSDTVKIGSDGWGEFHVNDGSVSIYVQK

SEQ ID NO: 28814 - protein, 485 aa, Bacillus sp.
HHNGTNSTMMQYFEWYLPNDGNHWNRLNSDASNLKSKGITAVWIPPAWKGASQNDVGYGAYDLYDLGEFNQKGTVRTKYGTRSQLQAAVTSLKNNGIQVYGDVVMNHKGGADATEMVRAVEVNPNNRNQEVTGEYTIEAWTRFDFPGRGNTHSSFKWRWYHFDGVDWDQSRRLNNRIYKFRGHGKAWDWEVDTEFGNYDYLMYADYDMDHPEVVNELRNWGVWYTNTLGLDGFRIDAVKHIKYSFTRDWINHVRSATGKNMFAVAEFWKNDLGAIENYLQKTNWNHSVFDVPLHYNLYNASKSGGNYDMRNIFNGTVVQRHPSHAVTFVDNHDSQPEEALESFVEEWFKPLAYALTLTREQGYPSVFYGDYYGIPTHGVPAMRSKIDPILEARQKYAYGPQHDYLDHPDVIGWTREGDSSHPKSGLATLITDGPGGSKRMYAGLKNAGETWYDITGNRSDTVKIGSDGWGEFHVNDGSVSIYVQK

SEQ ID NO: 28815 - protein, 485 aa, Synthetic construct
HHNGTNGTMMQYFEWYLPNDGNHWNRLNSDASNLKSKGITAVWIPPAWKGASQNDVGYGAYDLYDLGEFNQKGTVRTKYGTRSQLQAAVTSLKNNGIQVYGDVVMNHKGGADATEMVRAVEVNPNNRNQEVTGEYTIEAWTRFDFPGRGNTHSSFKWRWYHFDGVDWDQSRRLNNRIYKFRGHGKAWDWEVDTENGNYDYLMYADIDMDHPESRNELRNWGVWYTNTLGLDGFRIDAVKHIKYSFTRDWINHVRSATGKNMFAVAEFWKNDLGAIENYLQKTNWNHSVFDVPLHYNLYNASKSGGNYDMRNIFNGTVVQRHPSHAVTFVDNHDSQPEEALESFVEEWFKPLAYALTLTREQGYPSVFYGDYYGIPTHGVPAMRSKIDPILEARQKYAYGPQHDYLDHPDVIGWTREGDSSHPKSGLATLITDGPGGSKRMYAGLKNAGETWYDITGNRSDTVKIGSDGWGEFHVNDGSVSIYVQK

SEQ ID NO: 28816 - protein, 485 aa, Bacillus sp.
HHNGTNGTMMQYFEWYLPNDGNHWNRLNSDASNLKSKGITAVWIPPAWKGASQNDVGYGAYDLYDLGEFNQKGTVRTKYGTRSQLQAAVTSLKNNGIQVYGDVVMNHKGGADATEMVRAVEVNPNNRNQEVTGEYTIEAWTRFDFPGRQNTHSSFKWRWYHFDGVDWDQSRRLNNRIYKFRGHGKAWDWEVDTEFGNYDYLMYADYDMDHPEVVNELRNWGVWYTNTLGLDGFRIDAVKHIKYSFTRDWINHVRSATGKNMFAVAEFWKNDLGAIENYLQKTNWNHSVFDVPLHYNLYNASKSGGNYDMRNIFNGTVVQRHPSHAVTFVDNHDSQPEEALESFVEEWFKPLAYALTLTREQGYPSVFYGDYYGIPTHGVPAMRSKIDPILEARQKYAYGPQHDYLDHPDVIGWTREGDSSHPKSGLATLITDGPGGSKRMYAGLKNAGETWYDITGNRSDTVKIGSDGWGEFHVNDGSVSIYVQK

SEQ ID NO: 28817 - protein, 483 aa, Bacillus sp.
HHNGTNGTMMQYFEWYLPNDGNHWNRLNSDASNLKSKGITAVWIPPAWKGLSQNDVGYGAYDLYDLGEFNQKGTVRTKYGTRSQLQAAVTSLKNNGIQVYGDVVMNHKGGADATEMVRAVEVNPNNRNQEVTGEYTIEAWTRFDFPGRGNTHSSFKWRWYHFDGVDWDQSRNLSNRIYKFRGKAWDWEVDTEFGNYDYLMYTDYDMDHPEVVNELRNWGVWYTNTLGLDGFRIDAVKHIKYSFTRDWINHVRSATGKNMFAVAEFWKNDLGAIENYLQKTNWNHSVFDVPLHYNLYNASKSGGNYDMRNIFNGTVVQRHPSHAVTFVDNHDSQPEEALESFVEEWFKPLAYALTLTREQGYPSVFYGDYYGIPTHGVPAMRSKIDPILEARQKYAYGPQHDYLDHPDVIGWTREGDSSHPKSGLATLITDGPGGSKRMYAGLKNAGETWYDITGNRSDTVKIGSDGWGEFHVNDGSVSIYVQK

SEQ ID NO: 28818 - protein, 483 aa, Bacillus sp.
HHNGTNGTMMQYFEWYLPNDGNHWNRLNSDASNLKSKGITAVWIPPAWKGASQNDVGYGAYDLYDLGEFNQKGTVRTKYGTRSQLQAAVTSLKNNGIQVYGDVVMNHKGGADATEMVRAVEVNPNNRNQEVTGEYTIEAWTRFDFPGRGNTHSSFKWRWYHFDGVDWDQSRRLNNRIYKFRGKAWDWEVDTEFGNYDYLMYADYDMDHPEVVNELRNWGVWYTNTLGLDGFRIDAVKHIKYSFTRDWINHVRSATGKNMFAVAEFWKNDLGAIENYLQKTNWNHSVFDVPLHYNLYNASKSGGNLDMRNIFNGTVVQRHPSHAVTFVDNHDSQPEEALESFVEEWFKPLAYALTLTREQGYPSVFYGDYYGIPTHGVPAMRSKIDPILEARQKYAYGPQHDYLDHPDVIGWTREGDSSHPKSGLATLITDGPGGSKRMYAGLKNAGETWYDITGNRSDTVKIGSDGWGEFHVNDGSVSIYVQK

SEQ ID NO: 28819 - protein, 485 aa, Bacillus sp.
HHNGTNGTMMQYFEWYLPNDGNHWNRLNSDASNLKSKGITAVWIPPAWKGASQNDVGYGAYDLYDLGEFNQKGTVRTKYGTRSQLQAAVTSLKNNGIQVYGDVVMNHKGGADATEMVRAVEVNPNNRNQEVTGEYTIEAWTRFDFPGRGNTHSSFKWRWYHFDGVDWDQSRRLNNRIYKFRGHGKAWDWEVDTEFGNYDYLMYADYDMDHPEVVNELRNWGVWYTNTLGLDGFRIDAVKHIKYSFTRDWINHVRSATGKNMFAVAEFWKYDLGAIENYLQKTNWNHSVFDVPLHYNLYNASKSGGNYDMRNIFNGTVVQRHPSHAVTFVDNHDSQPEEALESFVEEWFKPLAYALTLTREQGYPSVFYGDYYGIPTHGVPAMRSKIDPILEARQKYAYGPQHDYLDHPDVIGWTREGDSSHPKSGLATLITDGPGGSKRMYAGLKNAGETWYDITGNRSDTVKIGSDGWGEFHVNDGSVSIYVQK

SEQ ID NO: 28820 - protein, 485 aa, Bacillus sp.
HHNGTNGTMMQYFEWYLPNDGNHWNRLNSDASNLKSKGITAVWIPPAWKGASQNDVGYGAYDLYDLGEFNQKGTVRTKYGTRSQLQAAVTSLKNNGIQVYGDVVMNHKGGADATEMVRAVEVNPNNRNQEVTGEYTIEAWTRFDFPGRGNTHSSFKWRWYHFDGVDWDQSRRLNNRIYKFRGHGKAWDWEVDTEFGNYDYLMYADYDMDHPEVVNELRNWGVWYTNTLGLDGFRIDAVKHIKYSFTRDWINHVRSATGKNMFAVAEFWKNDLGAIENYLQKTNWNHSVFDVPLHYNLYNASKSGGNYDMRNIFNGTVVQRHPSHAVTFVDNHDSQPEEALESFVEEWFKPLAYALTLTREQGYPSVFYGDYYGIPTHGVPAMRSKIDPILEARQKYAYGPQHDYLDHPDVIGWTREGDSSHPKSGLATLITDGPGGSKRMYAGLKNAGETWYDITGNRSDTVKIGSDGWGEFHINDGSVSIYVQK

SEQ ID NO: 28821 - protein, 485 aa, Bacillus sp.
HHNGTNGTMMQYFEWYLPNDGNHWNRLNSDASNLKSKGITAVWIPPAWKSASQNDVGYGAYDLYDLGEFNQKGTVRTKYGTRSQLQAAVTSLKNNGIQVYGDVVMNHKGGADATEMVRAVEVNPNNRNQEVTGEYTIEAWTRFDFPGRGNTHSSFKWRWYHFDGVDWDQSRRLNNRIYKFRGHGKAWDWEVDTEFGNYDYLMYADYDMDHPEVVNELRNWGVWYTNTLGLDGFRIDAVKHIKYSFTRDWINHVRSATGKNMFAVAEFWKNDLGAIENYLQKTNWNHSVFDVPLHYNLYNASKSGGNYDMRNIFNGTVVQRHPSHAVTFVDNHDSQPEEALESFVEEWFKPLAYALTLTREQGYPSVFYGDYYGIPTHGVPAMRSKIDPILEARQKYAYGPQHDYLDHPDVIGWTREGDSSHPKSGLATLITDGPGGSKRMYAGLKNAGETWYDITGNRSDTVKIGSDGWGEFHVNDGSVSIYVQK

SEQ ID NO: 28822 - protein, 485 aa, Bacillus sp.
HHNGTNGTMMQYFEWYLPNDGNHWNRLNSDASNLKSKGITAVWIPPAWKGASQNDVGYGAYDLYDLGEFNQKGTVRTKYGTRSQLQAAVTSLKNNGIQVYGDVVMNHKGGADATEMVRAVEVNPNNRNQEVTGEYTIEAWTRFDFPGRGNTHSSFKWRWYHFDGVDWDQSRRLNNRIYKFRGHGKWWDWEVDTEFGNYDYLMYADYDMDHPEVVNELRNWGVWYTNTLGLDGFRIDAVKHIKYSFTRDWINHVRSATGKNMFAVAEFWKNDLGAIENYLQKTNWNHSVFDVPLHYNLYNASKSGGNYDMRNIFNGTVVQRHPSHAVTFVDNHDSQPEEALESFVEEWFKPLAYALTLTREQGYPSVFYGDYYGIPTHGVPAMRSKIDPILEARQKYAYGPQHDYLDHPDVIGWTREGDSSHPKSGLATLITDGPGGSKRMYAGLKNAGETWYDITGNRSDTVKIGSDGWGEFHVNDGSVSIYVQK

SEQ ID NO: 28823 - protein, 485 aa, Bacillus sp.
HHNGTNGTMMQYFEWYLPNDGNHWNRLNSDASNLKSKGITAVWIPPAWKGASQNDVGYGAYDLYDLGEFNQKGTVRTKYGTRSQLQAAVTSLKNNGIQVYGDVVMNHKGGADLTEMVRAVEVNPNNRNQEVTGEYTIEAWTRFDFPGRGNTHSSFKWRWYHFDGVDWDQSRRLNNRIYKFRGHGKAWDWEVDTEFGNYDYLMYADYDMDHPEVVNELRNWGVWYTNTLGLDGFRIDAVKHIKYSFTRDWINHVRSATGKNMFAVAEFWKNDLGAIENYLQKTNWNHSVFDVPLHYNLYNASKSGGNYDMRNIFNGTVVQRHPSHAVTFVDNHDSQPEEALESFVEEWFKPLAYALTLTREQGYPSVFYGDYYGIPTHGVPAMRSKIDPILEARQKYAYGPQHDYLDHPDVIGWTREGDSSHPKSGLATLITDGPGGSKRMYAGLKNAGETWYDITGNRSDTVKIGSDGWGEFHVNDGSVSIYVQK

SEQ ID NO: 28824 - protein, 485 aa, Bacillus sp.
HHNGTNGTMMQYFEWYLPNDGNHWNRLNSDASNLKSKGITAVWIPPAWKGASQNDVGYGAYDLYDLGEFNQKGTVRTKYGTRSQLQAAVTSLKNNGIQVYGDVVMNHKGGADATEMVRAVEVNPNNRNQEVTGEYTIEAWTRFDFPGRGNTHSSFKWRWYHFDGVDWDQSRRLNNRIYKFRGHGKAWDWEVDTEFGNYDYLMYADYDMDHPEVVNELRNWGVWYTNTLGLDGFRIDAVKHIKYSFTRDWINHVRSATGKNMFAVAEFWKNDLGAIENYLQKTNWNHSVFDVPLHYNLYNASKSGGNYDMRNIFNGTVVQRHPSHAVTFVDNHDSQPEEALESFVEEWFKPLAYALTLTREQGYPSVFYGDYYGIPTHGVPAMRSKIDPILEARQKYAYGPQHDYLDHPDVIGWTKEGDSSHPKSGLATLITDGPGGSKRMYAGLKNAGETWYDITGNRSDTVKIGSDGWGEFHVNDGSVSIYVQK

SEQ ID NO: 28825 - protein, 483 aa, Bacillus sp.
HHNGTNGTMMQYFEWYLPNDGNHWNRLNSDASNLKSKGITAVWIPPAWKGASQNDVGYGAYDLYDLGEFNQKGTVRTKYGTRSQLQAAVTSLKNNGIQVYGDVVMNHKGGADATEMVKAVEVNPNNRNQEVTGEYTIEAWTRFDFPGRGNTHSSFKWRWYHFDGVDWDQSRRLNNRIYKFRGKAWDWEVDTEFGNYDYLMYADIDMDHPEVVNELRNWGVWYTNTLGLDGFRIDAVKHIKYSFTRDWINHVRSATGKNMFAVAEFWKNDLGAIENYLQKTNWNHSVFDVPLHYNLYNASKSGGNYDMRNIFNGTVVQKHPSHAVTFVDNHDSQPEEALESFVEEWFKPLAYALTLTREQGYPSVFYGDYYGIPTHGVPAMRSKIDPILEARQKYAYGPQHDYIDHPDVIGWTREGDSSAAKSGLAALITDGPGGSKRMYAGLKNAGETWYDITGNKSDTVKIGSDGWGEFHVNDGSVSIYVQK

SEQ ID NO: 28826 - protein, 485 aa, Bacillus sp.
HHNGTNGTMMQYFEWYLPNDGNHWNRLNSDASNLKSKGITAVWIPPAWKGASQNDVGYGAYDLYDLGEFNQKGTVRTKYGTRSQLQAAVTSLKNNGIQVYGDVVMNHKGGADATEMVRAVEVNPNNRNQEVTGEYTIEAWTRFDFPGRGNTHSSFKWRWYHFDGVDWDQSRRLNNRIYKFRNHGKAWDWEVDTEFGNYDYLMYADYDMDHPESVNELRNWGVWYTNTLGLDGFRIDAVKHIKYSFTRDWINHVRSATGKNMFAVAEFWKNDLGAIENYLQKTNWNHSVFDVPLHYNLYNASKSGGNYDMRNIFNGTVVQRHPSHAVTFVDNHDSQPEEALESFVEEWFKPLAYALTLTREQGYPSVFYGDYYGIPTHGVPAMRSKIDPILEARQKYAYGPQHDYLDHPDVIGWTREGDSSHPKSGLATLITDGPGGSKRMYAGLKNAGETWYDITGNRSDTVKIGSDGWGEFHVNDGSVSIYVQK

SEQ ID NO: 28827 - protein, 483 aa, Bacillus sp.
HHNGTNKTMMQYFEWYLPNDGNHWNRLNSDASNLKSKGITAVWIPPAWKGASQNDVGYGAYDLYDLGEFNQKGTVRTKYGTRSQLQAAVTSLKNNGIQVYGDVVMNHKGGADATEMVRAVEVNPNNRNQEVTGEYTIEAWTRFDFPGRGNTHSSFKWRWYHFDGVDWDQSRRLNNRIYKFRGKAWDWEVDTEFGNYDYLMYADYDMDHPEVVNELRNWGVWYTNTLGLDGFRIDAVKHIKYSFTRDWINHVRSATGKNMFAVAEFWKNDLGAIENYLQKTNWNHSVFDVPLHYNLYNASKSGGNYDMRNIFNGTVVQAHPSHAVTFVDNHDSQPEEALESFVEEWFKPLAYALTLTREQGYPSVFYGDYYGIPTHGVPAMRSKIDPILEARQKYAYGPQHDYLDHPDVIGWTREGDSSHPKSGLATLITDGPGGSKRMYAGLKNAGETWYDITGNRSDTVKIGSDGWGEFHVNDGSVSIYVQK

SEQ ID NO: 28828 - protein, 483 aa, Bacillus sp.
HHNGTNGTMMQYFEWYLPNDGNHWNRLNSDASNLKSKGITAVWIPPAWKAASQNDVGYGAYDLYDLGEFNQKGTVRTKYGTRSQLQAAVTSLKNNGIQVYGDVVMNHKGGADATEMVRAVEVNPNNRNQEVTGEYTIEAYTRFDFPGRGNTHSSFKWRWYHFDGVDWDQSRDLQNRIYKFRGKAWDWEVDTEFGNYDYLMYADYDMDHPEVVNELRNWGVWYTNTLGLDGFRIDAVKHIKYSFTRDWINHVRSATGKNMFAVAEFWKNDLGAIENYLQKTNWNHSVFDVPLHYNLYNASKSGGNYDMRNIFNGTVVQRHPSHAVTFVDNHDSQPEEALESFVEEWFKPLAYALTLTREQGYPSVFYGDYYGIPTHGVPAMRSKIDPILEARQKYAYGPQHDYLDHPDVIGWTREGDSSHPKSGLATLITDGPGGSKRMYAGLKNAGETWYDITGNRSDTVKIGSDGWGEFHVNDGSVSIYVQK

SEQ ID NO: 28829 - protein, 485 aa, Bacillus sp.
HHNGTNGTMMQYFEWYLPNDGNHWNRLNSDASNLKSKGITAVWIPPAWKGASQNDVGYGAYDLYDLGEFNQKGTVRTKYGTRSQLQAAVTSLKNNGIQVYGDVVMNHKGGADATEMVRAVEVNPNNRNQEVTGEYTIEAWTRFDFPGRGNTHSSFKWRWYHFDGSDWDQSRRLNNRIYKFRGHGKAWDWEVDTEFGNYDYLMYADYDMDHPEVVNELRNWGVWYTNTLGLDGFRIDAVKHIKYSFTRDWINHVRSATGKNMFAVAEFWKNDLGAIENYLQKTNWNHSVFDVPLHYNLYNASKSGGNYDMRNIFNGTVVQRHPSHAVTFVDNHDSQPEEALESFVEEWFKPLAYALTLTREQGYPSVFYGDYYGIPTHGVPAMRSKIDPILEARQKYAYGPQHDYLDHPDVIGWTREGDSSHPKSGLATLITDGPGGSKRMYAGLKNAGETWYDITGNRSDTVKIGSDGWGEFHVNDGSVSIYVQK

SEQ ID NO: 28830 - protein, 485 aa, Bacillus sp.
HHNGTNGTMMQYFEWYLPNDGNHWNRLNSDASNLKSKGITAVWIPPAWKGASQNDVGYGAYDLYDLGEFNQKGTVRTKYGTRSQLQAAVTSLKNNGIQVYGDVVMNHKGGADATEMVRAVEVNPNNRNQEVTGEYTIEAWTRFDFPGRGNTHSSFKWRWYHFDGVDWDQSRRLNNRIYKFRGHGKAWDWEVDTEFGNYDYLMYADYDMDHPEVVNELRNWGVWYTNTLGLDGFRIDAVKHIKYSFTRDWINHVRSATGKNMFAVAEFWKNDLGAIENYLQKTNWNHSVFDVPLHYNLYNASKSGGNYDMRNIFNGTVVQRHPSHAVTFVDNHDSQPEEALESFVEEWFKPKAYALTLTREQGYPSVFYGDYYGIPTHGVPAMRSKIDPILEARQKYAYGPQHDYLDHPDVIGWTREGDSSHPKSGLATLITDGPGGSKRMYAGLKNAGETWYDITGNRSDTVKIGSDGWGEFHVNDGSVSIYVQK

SEQ ID NO: 28831 - protein, 483 aa, Bacillus sp.
HHNGTNGTMMQYFEWYLPNDGNHWNRLNSDASNLKSKGITAVWIPPAWKGASQNDVGYGAYDLYDLGEFNQKGTVRTKYGTRSQLQAAVTSLKNNGIQVYGDVVMNHKGGADATEMVRAVEVNPNNRNQEVTGEYTIEAWTRFDFPGRGNTHSSFKWRWYHFDGVDWDQSRRLNNRIYKFRGKAWDWEVDTEFGNYDYLMYADYDMDHPEVVNELRNWGVWYTNTLGLDGFRIDAVKHIKYSFTRDWINHVRIATGKNMFAVAEFWKNDLGAIENYLQKTNWNHSVFDVPLHYNLYNASKSGGNYDMRNIFNGTVVQRHPSHAVTFVDNHDSQPEEALESFVDEWFKPLAYALTLTREQGYPSVFYGDYYGIPTHGVPAMRSKIDPILEARQKYAYGPQHDYLDHPDVIGWTREGDSSHPKSGLATLITDGPGGSKRMYAGLKNAGETWYDITGNRSDTVKIGSDGWGEFHVNDQSVSIYVQK

SEQ ID NO: 28832 - protein, 485 aa, Bacillus sp.
HHNGTNGTMMQYFEWYLPNDGNHWNRLNSDASNLKSKGITAVWIPPAWKGASQNDVGYGAYDLYDLGEFNQKGTVRTKYGTRSQLQAAVTSLKNNGIQVYGDVVMNHKGGADATEMVRAVEVNPNNRNQEVTGEYTIEAWTRFDFPGRGNTHSSFKWRWYHFDGVDWDQSRRLNNRIYRFRGHGKAWDWEVDTEFGNYDYLMYADYDMDHPEVVNELRNWGVWYTNTLGLDGFRIDAVKHIKYSFTRDWINHVRSATGKNMFAVAEFWKNDLGAIENYLQKTNWNHSVFDVPLHYNLYNASKSGGNYDMRNIFNGTVVQRHPSHAVTFVDNHDSQPEEALESFVEEWFKPLAYALTLTREQGYPSVFYGDYYGIPTHGVPAMRSKIDPILEARQKYAYGPQHDYLDHPDVIGWTREGDSSHPKSGLATLITDGPGGSKRMYAGLKNAGETWYDITGNRSDTVKIGSDGWGEFHVNDGSVSIYVQK

SEQ ID NO: 28833 - protein, 485 aa, Bacillus sp.
HHNGTNGTMMQYFEWYLPNDGNHWNRLNSDASNLKSKGITAVWIPPAWKGASQNDVGYGAYDLYDLGEFNQKGTVRTKYGTRSQLQAAVTSLKNNGIQVYGDVVMNHKGGADATEMVRAVEVNPNNRNQEVTGEYTIEAWTRFDFPGRGNTHSSFKWRWYHFDGVDWDQSRRLNNRIYKFRGHGKAWDWEVDTEFGNYDYLMYADYDMDHPEVTNELRNWGVWYTNTLGLDGFRIDAVKHIKYSFTRDWINHVRSATGKNMFAVAEFWKNDLGAIENYLQKTNWNHSVFDVPLHYNLYNASKSGGNYDMRNIFNGTVVQRHPSHAVTFVDNHDSQPEEALESFVEEWFKPLAYALTLTREQGYPSVFYGDYYGIPTHGVPAMRSKIDPILEARQKYAYGPQHDYLDHPDVIGWTREGDSSHPKSGLATLITDGPGGSKRMYAGLKNAGETWYDITGNRSDTVKIGSDGWGEFHVNDGSVSIYVQK

SEQ ID NO: 28834 - protein, 485 aa, Bacillus sp.
HHNGTNGTMMQYFEWYLPNDGNHWNRLNSDASNLKSKGITAVWIPPAWKGASQNDVGYGAYDLYDLGEFNQKGTVRTKYGTRSQLQAAVTSLKNNGIQVYGDVVMNHKGGADATEMVRAVEVNPNNRNQEVTGEYTIEAWTRFDFPGRGNTHSSFKWRWYHFDGGDWDQSRRLNNRIYKFRGHGKAWDWEVDTEFGNYDYLMYADYDMDHPEVVNELRNWGVWYTNTLGLDGFRIDAVKHIKYSFTRDWINHVRSATGKNMFAVAEFWKNDLGAIENYLQKTNWNHSVFDVPLHYNLYNASKSGGNYDMRNIFNGTVVQRHPSHAVTFVDNHDSQPEEALESFVEEWFKPLAYALTLTREQGYPSVFYGDYYGIPTHGVPAMRSKIDPILEARQKYAYGPQHDYLDHPDVIGWTREGDSSHPKSGLATLITDGPGGSKRMYAGLKNAGETWYDITGNRSDTVKIGSDGWGEFHVNDGSVSIYVQK

SEQ ID NO: 28835 - protein, 483 aa, Bacillus sp.
HHNGTNGTMMQYFEWYLPNDGNHWNRLNSDASNLKSKGITAVWIPPAWKGASQNDVGYGAYDLYDLGEFNQKGTVRTKYGTRSQLQAAVTSLKNNGINVYGDVVMNHKGGADLTEMVRAVEVNPNNRNQEVTGEYTIEAWTRFDFPGRGNTHSSFKWRWYHFDGVDWDQSRRLNNRIYKFRGKAWDWEVDTEFGNYDYLMYADYDMDHPEVVNELRNWGVWYTNTLGLDGFRIDAVKHIKYSFTRDWINHVRSATGKNMFAVAEFWKNDLGAIENYLQKTNWNHSVFDVPLHYNLYNASKSGGNYDMRNIFNGTVVQAHPMHAVTFVDNHDSQPEEALESFVEEWFKPLAYALTLTREQGYPSVFYGDYYGIPTHGVPAMRSKIDPILEARQKYAYGPQHDYLDHPDVIGWTREGDSSHPKSGLATLITDGPGGSKRMYAGLKNAGETWYDITGNRSDTVKIGSDGWGEFHVNDGSVSIYVQK

SEQ ID NO: 28836 - protein, 485 aa, Bacillus sp.
HHNGTNGTMMQYFEWYLPNDGNHWNRLNSDASNLKSKGITAVWIPPAWKGASQNDVGYGAYDLYDLGEFNQKGTVRTKYGTRSQLQAAVTSLKNNGIQVYGDVVMNHKGGADATEMVRAVEVNPNNRNQEVTGEYTIEAWTRFDFPGRGNTHSSFKWRWYHFDGVDWDQSRELDNRIYKFRGHGKAWDWEVDTEFGNYDYLMYTDYDMDHPEVVNELRNWGVWYTNTLGLDGFRIDAVKHIKYSFTRDWINHVRSATGKNMFAVAEFWKNDLGAIENYLQKTNWNHSVFDVPLHYNLYNASKSGGNYDMRNIFNGTVVQRHPSHAVTFVDNHDSQPEEALESFVEEWFKPLAYALTLTREQGYPSVFYGDYYGIPTHGVPAMRSKIDPILEARQKYAYGPQHDYLDHPDVIGWTREGDSSHPKSGLATLITDGPGGSKRMYAGLKNAGETWYDITGNRSDTVKIGSDGWGEFHVNDGSVSIYVQK

SEQ ID NO: 28837 - protein, 483 aa, Bacillus sp.
HHNGTNGTMMQYFEWYLPNDGNHWNRLNSDASNLKSKGITAVWIPPAWKGASQNDVGYGAYDLYDLGEFNQKGTVRTKYGTRSQLQAAVTSLKNNGIQVYGDVVMNHKGGADATEMVRAVEVNPNNRNQEVTGEYTIEAWTRFDFPGRGNTHSSFKWRWYHFDGVDWDQSRRLNNRIYKFRGKAWDWEVDTEFGNYDYLMYADYDMDHPEVVNELRNWGVWYTNTLGLDGFRIDAVKHIKYSFTRDWINHVRSATGKNMFAVAEFWKNDLGAIENYLQKTNWNHSVFDAPLHYNLYNASKSGGNYDMRNIFNGTVVQRHPSHAVTFVDNHDSQPEEALESFVEEWFKPLAYALTLTREQGYPSVFYGDYYGIPTHGVPAMRSKIDPILEARQKYAYGPQHDYLDHPDVIGWTREGDSSHPKSGLATLITDGPGGSKRMYAGLKNAGETWYDITGNRSDTVKIGSDGWGEFHVNDGSVSIYVQK

SEQ ID NO: 28838 - protein, 485 aa, Bacillus sp.
HHNGTNQTMMQYFEWYLPNDGNHWNRLNSDASNLKSKGITAVWIPPAWKGASQNDVGYGAYDLYDLGEFNQKGTVRTKYGTRSQLQAAVTSLKNNGIQVYGDVVMNHKGGADATEMVRAVEVNPNNRNQEVTGEYTIEAWTRFDFPGRGNTHSSFKWRWYHFDGVDWDQSRRLNNRIYKFRGHGKAWDWEVDTEFGNYDYLMYADYDMDHPEVVNELRNWGVWYTNTLGLDGFRIDAVKHIKYSFTRDWINHVRSATGKNMFAVAEFWKNDLGAIENYLQKTNWNHSVFDVPLHYNLYNASKSGGNYDMRNIFNGTVVQRHPSHAVTFVDNHDSQPEEALESFVEEWFKPLAYALTLTREQGYPSVFYGDYYGIPTHGVPAMRSKIDPILEARQKYAYGPQHDYLDHPDVIGWTREGDSSHPKSGLATLITDGPGGSKRMYAGLKNAGETWYDITGNRSDTVKIGSDGWGEFHVNDGSVSIYVQK

SEQ ID NO: 28839 - protein, 485 aa, Bacillus sp.
HHNGTNGTMMQYFEWYLPNDGNHWNRLNSDASNLKSKGITAVWIPPAWKGASQNDVGYGAYDLYDLGEFNQKGTVRTKYGTRSQLQAAVTSLKNNGIQVYGDVVMNHKGGADATEMVRAVEVNPNNRNQEVTGEYTIEAWTRFDFPGRGNTHSSFKWRWYHFDGVDWDQSRRLNNRIYKFRGHGKAWDWEVDTEFGNYDYLMYADYDMDHPEVVNELRNWGVWYTNTLGLDGFRIDAVKHIKYSFTRDWINHVRSATGKNMFAVAEFWKNDLGAIENYLQKTNWNHSVFDVPLHYNLYNASKSGGNYDMRNIFNGTVVQRHPSAAVTFVDNHDSQPEEALESFVEEWFKPLAYALTLTREQGYPSVFYGDYYGIPTHGVPAMRSKIDPILEARQKYAYGPQHDYLDHPDVIGWTREGDSSHPKSGLATLITDGPGGSKRMYAGLKNAGETWYDITGNRSDTVKIGSDGWGEFHVNDGSVSIYVQK

SEQ ID NO: 28840 - protein, 485 aa, Synthetic construct
HHNGTNGTMMQYFEWYLPNDGNHWNRLNSDASNLKSKGITAVWIPPAWKGASQNDVGYGAYDLYDLGEFNQKGTVRTKYGTRSQLQAAVTSLKNNGIQVYGDVVLNHKGGADATEMVRAVEVNPNNRNQEVTGEYTIEAWTRFDFPGRGNTHSSFKWRWYHFDGVDWDQSRRLNNRIYKFRGHGKAWDWEVDTENGNYDYLMYADYDMDHPEVVNEIRNWGVWYTNTLGLDGFRIDAVKHIKYSFTRDWINHVRSATGKNMFAVAEFWKNDLGAIENYLQKTNWNHSVFDVPLHYNLYNASKSGGNYDMRNIFNGTVVQRHPSHAVTFVDNHDSQPEEALESFVEEWFKPLAYALTLTREQGYPSVFYGDYYGIPTHGVPAMRSKIDPILEARQKYAYGPQHDYLDHPDVIGWTREGDSSHPKSGLATLITDGPGGSKRMYAGLKNAGETWYDITGNRSDTVKIGSDGWGEFHVNDGSVSIYVQK

SEQ ID NO: 28841 - protein, 485 aa, Bacillus sp.
HHNGTNGTMMQYFEWYLPNDGNHWNRLNSDASNLKSKGITAVWIPPAWKGASQNDVGYGAYDLYDLGEFNQKGTVRTKYGTRSQLQAAVTSLKNNGIQVYGDVVMNHKGGADTTEMVRAVEVNPNNRNQEVTGEYTIEAWTRFDFPGRGNTHSSFKWRWYHFDGVDWDQSRRLNNRIYKFRGHGKAWDWEVDTEFGNYDYLMYADYDMDHPEVVNELRNWGVWYTNTLGLDGFRIDAVKHIKYSFTRDWINHVRSATGKNMFAVAEFWKNDLGAIENYLQKTNWNHSVFDVPLHYNLYNASKSGGNYDMRNIFNGTVVQRHPSHAVTFVDNHDSQPEEALESFVEEWFKPLAYALTLTREQGYPSVFYGDYYGIPTHGVPAMRSKIDPILEARQKYAYGPQHDYLDHPDVIGWTREGDSSHPKSGLATLITDGPGGSKRMYAGLKNAGETWYDITGNRSDTVKIGSDGWGEFHVNDGSVSIYVQK

SEQ ID NO: 28842 - protein, 485 aa, Bacillus sp.
HHNGTNGTMMQYFEWYLPNDGNHWNRLNSDASNLKSKGITAVWIPPAWKGASQNDVGYGAYDLYDLGEFNQKGTVRTKYGTRSQLQAAVTSLKNNGIQVYGDVVMNHKGGADATEMVRAVEVNPNNRNQEVTGEYTIEAWTRFDFPGRGNTHSSFKWRWYHFDGVDWDQSRRLNNRIYKFRGHGKAWDWEVDTEFGNYDYLMYADYDMDHPEVVNELRNWGVWYTNTLGLDGFRIDAVKHIKYSFTRDWINHVRSATGKNMFAVAEFWKNDLGAIENYLQKTNWNHSVFDVPLHYNLYNASKSGGNYDMRNIFNGTVVQRHPSHAVTFVDNHDSQPEEALESFVDTWFKPLAYALTLTREQGYPSVFYGDYYGIPTHGVPAMRSKIDPILEARQKYAYGPQHDYLDHPDVIGWTREGDSSHPKSGLATLITDGPGGSKRMYAGLKNAGETWYDITGNRSDTVKIGSDGWGEFHVNGASVSIYVQK

SEQ ID NO: 28843 - protein, 483 aa, Bacillus sp.
HHNGTNGTMMQYFEWYLPNDGNHWNRLNSDASNLKSKGITAVWIPPAWKGASQNDVGYGAYDLYDLGEFNQKGTVRTKYGTRSQLQAAVTSLKNNGIQVYGDVVMNHKGGADATEMVRAVEVNPNNRNQEVTGEYTIEAWTRFDFPGRGNTHSSFKWRWYHFDGVDWDQSRRLNNRIYSFRGKAWDWEVDTEFGNYDYLMYADYDMDHPEVVNELRNWGVWYTNTLGLDGFRIDAVKHIKYSFTRDWINHVRSATGKNMFAVAEFWKNDLGAIENYLQKTNWNHSVFDVPLHYNLYNASKSGGNYDMRNIFNGTVVQRHPSHAVTFVDNHDSQPEEALESFVEEWFKPLAYALTLTREQGYPSVFYGDYYGIPTHGVPAMRSKIDPILEARQKYAYGPQHDYLDHPDVIGWTREGDSSHPKSGLATLITDGPGGSKRMYAGLKNAGETWYDITGNRSDTVKIGSDGWGEFHVNDGSVSIYVQK

SEQ ID NO: 28844 - protein, 483 aa, Bacillus sp.
HHNGTNGTMMQYFEWYLPNDGNHWNRLNSDASNLKSKGITAVWIPPAWKGASQNDVGYGAYDLYDLGEFNQKGTVRTKYGTRSQLQAAVTSLKNNGIQVYGDVVMNHKGGADATEMVRAVEVNPNNRNQEVTGEYTIEAWTRFDFPGRGNTHSSFKWRWYHFDGVDWDQSRKLNNRIYKFRGKAWDWEVDTEFGNYDYLMYVDYDMDHPEVVNELRNWGVWYTNTLGLDGFRIDAVKHIKYSFTRDWINHVRSATGKNMFAVAEFWKNDLGAIENYLQKTNWNHSVFDVPLHYNLYNASKSGGNYDMRNIFNGTVVQRHPSHAVTFVDNHDSQPEEALESFVEEWFKPLAYALTLTREQGYPSVFYGDYYGIPTHGVPAMRSKIDPILEARQKYAYGPQHDYLDHPDVIGWTREGDSSHPKSGLATLITDGPGGSKRMYAGLKNAGETWYDITGNRSDTVKIGSDGWGEFHVNDGSVSIYVQK

SEQ ID NO: 28845 - protein, 483 aa, Bacillus sp.
HHNGTNGTMMQYFEWYLPNDGNHWNRLNSDASNLKSKGITAVWIPPAWKGASQNDVGYGAYDLYDLGEFNQKGTVRTKYGTRSQLQAAVTSLKNNGIQVYGDVVMNHKGGADATEMVRAVEVNPNNRNQEVTGEYTIEAWTRFDFPGRGNTHSSFKWRWYHFDGVDWDQSRRLNNRIYKFRGKAWDWEVDTEFGNYDYLMYADYDMDHPEVVNELRNWGVWYTNTLGLDGFRIDAVKHIKYSFTRDWINHVRSATGKNMFAVAEFWKNDLGAIENYLQKTNWNHSVFDVPLHYNLYNASKSGGNYDMRNIFNGTVVQRHPSHAVTFVDNHDSQPEEALESFVETWFKPLAYALTLTREQGYPSVFYGDYYGIPTHGVPAMRSKIDPILEARQKYAYGPQHDYLDHPDVIGWTREGDSSHPKSGLATLITDGPGGSKRMYAGLKNAGETWYDITGNRSDTVKIGSDGWGEFHVNGTSVSIYVQK

SEQ ID NO: 28846 - protein, 485 aa, Bacillus sp.
HHNGTNGTMMQYFEWYLPNDGNHWNRLNSDASNLKSKGITAVWIPPAWKGASQNDVGYGAYDLYDLGEFNQKGTVRTKYGTRSQLQAAVTSLKNNGIQVYGDVVMNHKGGADATEMVRAVEVNPNNRNQEVTGEYTIEAWTRFDFPGRGNTHSSFKWRWYHFDGVDWDQSRRLNNRIYKFRGHGKAWDWEVDTEFGNYDYLMYADYDMDHPEVVNELRNWGVWYTNTLGLDGFRIDAVKHIKYSFTRDWINHVRSATGKNMFAVAEFWKNDLGAIENYLQKTNWNHSVFDVPLHYNLYNASKSGGNYDMRNIFNGTVVQANPNHAVTFVDNHDSQPEEALESFVEEWFKPLAYALTLTREQGYPSVFYGDYYGIPTHGVPAMRSKIDPILEARQKYAYGPQHDYLDHPDVIGWTREGDSSHPKSGLATLITDGPGGSKRMYAGLKNAGETWYDITGNRSDTVKIGSDGWGEFHVNDGSVSIYVQK

SEQ ID NO: 28847 - protein, 485 aa, Bacillus sp.
HHNGTNPTMMQYFEWYLPNDGNHWNRLNSDASNLKSKGITAVWIPPAWKGASQNDVGYGAYDLYDLGEFNQKGTVRTKYGTRSQLQAAVTSLKNNGIQVYGDVVMNHKGGADATEMVRAVEVNPNNRNQEVTGEYTIEAWTRFDFPGRGNTHSSFKWRWYHFDGVDWDQSRRLNNRIYKFRGHGKAWDWEVDTEFGNYDYLMYADYDMDHPEVVNELRNWGVWYTNTLGLDGFRIDAVKHIKYSFTRDWINHVRSATGKNMFAVAEFWKNDLGAIENYLQKTNWNHSVFDVPLHYNLYNASKSGGNYDMRNIFNGTVVQSHPKHAVTFVDNHDSQPEEALESFVEEWFKPLAYALTLTREQGYPSVFYGDYYGIPTHGVPAMRSKIDPILEARQKYAYGPQHDYLDHPDVIGWTREGDSSHPKSGLATLITDGPGGSKRMYAGLKNAGETWYDITGNRSDTVKIGSDGWGEFHVNDGSVSIYVQK

SEQ ID NO: 28848 - protein, 483 aa, Bacillus sp.
HHNGTNGTMMQYFEWYLPNDGNHWNRLNSDASNLKSKGITAVWIPPAWKGASQNDVGYGAYDLYDLGEFNQKGTVRTKYGTRSQLQAAVTSLKNNGIQVYGDVVMNHKGGADATEMVRAVEVNPNNRNQEVTGEYTIEAWTRFDFPGRGNTHSSFKWRWYHFDGVDWDQSRRLNNRIYKFRGKAWDWEVDTENGNYDYLMYADIDYDFPEVVNELRHWGVWYTNTLGLDGFRIDAVKHIKYSFTRDWINHVRSATGKNMFAVAEFWKNDLGAIENYLQKTNWNHSVFDVPLHYNLYNASKSGGNYDMRNIFNGTVVQRHPSHAVTFVDNHDSQPEEALESFVEEWFKPLAYALTLTREQGYPSVFYGDYYGIPTHGVPAMRSKIDPILEARQKYAYGPQHDYLDHPDVIGWTREGDSSHPKSGLATLITDGPGGSKRMYAGLKNAGETWYDITGNRSDTVKIGSDGWGEFHVNDGSVSIYVQK

SEQ ID NO: 28849 - protein, 485 aa, Bacillus sp.
HHNGTNGTMMQYFEWYLPNDGNHWNRLNSDASNLKSKGITAVWIPPAWKGASQNDVGYGAYDLYDLGEFNQKGTVRTKYGTRSQLQAAVTSLKNNGIQVYGDVVMNHKGGADATEMVRAVEVNPNNRNQEVTGEYTIEAWTRFDFPGRGNTHSSFKWRWYHFDGVDWDQSRRLNNRIYKFRGHGKAWDWEVDTEFGNYDYLMYADYDMDHPEVVNELRNWGVWYTNTLGLDGFRIDAVKHIKLSFTRDWINHVRSATGKNMFAVAEFWKNDLGAIENYLQKTNWNHSVFDVPLHYNLYNASKSGGNYDMRNIFNGTVVQRHPSHAVTFVDNHDSQPEEALESFVEEWFKPLAYALTLTREQGYPSVFYGDYYGIPTHGVPAMRSKIDPILEARQKYAYGPQHDYLDHPDVIGWTREGDSSHPKSGLATLITDGPGGSKRMYAGLKNAGETWYDITGNRSDTVKIGSDGWGEFHVNDGSVSIYVQK

SEQ ID NO: 28850 - protein, 485 aa, Bacillus sp.
HHNGTNGTMMQYFEWYLPNDGNHWNRLNSDASNLKSKGITAVWIPPAWKGASQNDVGYGAYDLYDLGEFNQKGTVRTKYGTRSQLQAAVTSLKNNGIQVYGDVVMNHKGGADATEMVRAVEVNPNNRNQEVTGEYTIEAWTRFDFPGRGNTHSSFKWRWYHFDGVDWDQSRRLNNRIYKFRGHGKAWDWEVDTEFGNYDYLMYADYDMDHPEVVNELRNWGVWYTNTLGLDGFRIDAVKHIKYSFTRDWINHVRSATGKNMFAVAEFWKNDLGAIENYLQKTNWNHSVFDVPLHYNLYNASKSGGNYDMRNIFNGTVVQRHPSHAVTFVDNHDSQPEEALESFVEEWFKPLAYALTLTREQGYPSVFYGDYYGIPTHGVPAMRSKIDPILEARQKYAYGPQHDYLDHPDVIGWTREGDSSHPKSGLATLITDGPGGSKRMYAGLKNAGETWYDITGNRSDTVKIGSDGWGEFHVNDTSVSIYVQK

SEQ ID NO: 28851 - protein, 483 aa, Bacillus sp.
HHNGTNGTMMQYFEWYLPNDGNHWNRLNSDASNLKSKGITAVWIPPAWKATSQNDVGYGAYDLYDLGEFNQKGTVRTKYGTRSQLQSAVTSLKNNGIQVYGDVVMNHKGGADATEMVRAVEVNPNNRNQEVTGEYTIEAWTRFDFPGRGNTHSSFKWRWYHFDGVDWDMSRNTDNRIYKFRGKAWDWEVDTEFGNYDYLMYADIDMDHPEVVNELRNWGVWYTNTLGLDGFRIDAVKHIKYSFTRDWINHVRSATGKNMFAVAEFWKNDLGAIENYLQKTNWNHSVFDVPLHYNLYNASKSQGNYDMRNIFNGTVVQRHPSHAVTFVDNHDSQPEEALESFVTEWFKPLAYALTLTREQGYPSVFYGDYYGIPTHGVPAMRSKIDPILEARQKYAYGPQHDYLDHPDVIGWTREGDSSHPKSGLATLITDGPGGSKRMYAGLKNAGETWYDITGNRSDTVKIGSDGWGEFHVNGSSVSIYVQK

SEQ ID NO: 28852 - protein, 483 aa, Bacillus sp.
HHNGTNGTMMQYFEWYLPNDGNHWNRLNSDASNLKSKGITAVWIPPAWKGASQNDVGYGAYDLYDLGEFNQKGTVRTKYGTRSQLQAAVTSLKNNGIQVYGDVVMNHKGGADATEMVRAVEVNPNNRNQEVTGEYTIEAWTRFDFPGRGNTHSSFKWRWYHFDGVDWDQSRRLNNRIYKFRGKVWDWEVDTEFGNYDYLMYADYDMDHPEVVNELRNWGVWYTNTLGLDGFRIDAVKHIKYSFTRDWINHVRSATGKNMFAVAEFWKNDLGAIENYLQKTNWNHSVFDVPLHYNLYNASKSGGNYDMRNIFNGTVVQRHPSHAVTFVDNHDSQPEEALESFVEEWFKPLAYALTLTREQGYPSVFYGDYYGIPTHGVPAMRSKIDPILEARQKYAYGPQHDYLDHPDVIGWTREGDSSHPKSGLATLITDGPGGSKRMYAGLKNAGETWYDITGNRSDTVKIGSDGWGEFHVNDGSVSIYVQK

SEQ ID NO: 28853 - protein, 485 aa, Bacillus sp.
HHNGTNGTMMQYFEWYLPNDGNHWNRLNSDASNLKSKGITAVWIPPAWKAASQNDVGYGAYDLYDLGEFNQKGTVRTKYGTRSQLQAAVTSLKNNGIQVYGDVVMNHKGGADATEMVRAVEVNPNNRNQEVTGEYTIEAWTRFDFPGRGNTHSSFKWRWYHFDGVDWDQSRNTDNRIYKFRGHGKAWDWEVDTEFGNYDYLMYADYDMDHPEVVNELRNWGVWYTNTLGLDGFRIDAVKHIKYSFTRDWINHVRSATGKNMFAVAEFWKNDLGAIENYLQKTNWNHSVFDVPLHYNLYNASKSGGNYDMRNIFNGTVVQRHPSHAVTFVDNHDSQPEEALESFVEEWFKPLAYALTLTREQGYPSVFYGDYYGIPTHGVPAMRSKIDPILEARQKYAYGPQHDYLDHPDVIGWTREGDSSHPKSGLATLITDGPGGSKRMYAGLKNAGETWYDITGNRSDTVKIGSDGWGEFHVNDGSVSIYVQK

SEQ ID NO: 28854 - protein, 485 aa, Bacillus sp.
HHNGTNGTMMQYFEWYLPNDGNHWNRLNSDASNLKSKGITAVWIPPAWKGASQNDVGYGAYDLYDLGEFNQKGTVRTKYGTRSQLQAAVTSLKNNGIQVYGDVVMNHKGGADATEMVRAVEVNPNNRNQEVTGEYTIEAWTRFDFPGRGNTHSSFKWRWYHFDGVDWDQSRRLNNRIYKFRGHGKAWDWEVDTEFGNYDYLMYADYDMDHPEVVNELRNWGVWYTNTLGLDGFRIDAVKHIKYSFTRDWINHVRSATGKNMFAVAEFWKNDLGAIENYLQKTNWNHSVFDVPLHYNLYNASKSGGNYDMRNIFNGTVVQRHPSHAVTFVDNHDSQPEEALESFVDPWFKPLAYALTLTREQGYPSVFYGDYYGIPTHGVPAMRSKIDPILEARQKYAYGPQHDYLDHPDVIGWTREGDSSHPKSGLATLITDGPGGSKRMYAGLKNAGETWYDITGNRSDTVKIGSDGWGEFHVNGTSVSIYVQK

SEQ ID NO: 28855 - protein, 485 aa, Bacillus sp.
HHNGTNGTMMQYFEWYLPNDGNHWNRLNSDASNLKSKGITAVWIPPAWKGASQNDVGYGAYDLYDLGEFNQKGTVRTKYGTRSQLQAAVTSLKNNGIQVYGDVVMNHKGGADATEMVRAVEVNPNNRNQEVTGEYTIEAWTRFDFPGRGNTHSSFKWRWYHFDGVDWDQSRRLNNRIYKFRGHGKAWDWEVDTEFGNYDYLMYADYDMDHPEVVNELRNWGVWYTNTLGLDGFRIDAVKHIKYSFTRDWINHVRSATGKNMFAVAEFWKNDLGAIENYLQKTNWNHSVFDVPLHYNLYNASKSGGNYDMRNIFNGTVVQRHPSHAVTFVDNHDSQPEEALESFVDEWFKPLAYALTLTREQGYPSVFYGDYYGIPTHGVPAMRSKIDPILEARQKYAYGPQHDYLDHPDVIGWTREGDSSHPKSGLATLITDGPGGSKRMYAGLKNAGETWYDITGNRSDTVKIGSDGWGEFHVNKQSVSIYVQK

SEQ ID NO: 28856 - protein, 483 aa, Synthetic construct
HHNGTNGTMMQYFEWYLPNDGNHWNRLNSDASNLKSKGITAVWIPPAWKGASQNDVGYGAYDLYDLGEFNQKGTVRTKYGTRSQLQAAVTSLKNNGIQVYGDVVMNHKGGADATEMVRAVEVNPNNRNQEVTGEYTIEAWTRFDFPGRGNTHSSFKWRWYHFDGVDWDQSRRLNNRIYKFRGKAWDWEVDTENGNYDYLMYADIDMDHPEVVNELRNWGVWYTNTLGLDGFRIDAVKHIKYSFTRDWINHVRSATGKNMFAVAEFWKNDLGAIENYLQKTNWNHSVFDVPLHYNLYNASKSGGNYDMRKLLNGTVVSKHPSKAVTFVDNHDTQPEEALESFVQPWFKPLAYAFILTRESGYPSVFYGDMYGIPTHGVPAMKHKIEPILKARKQYAYGAQHDYLDHPDIIGWTREGDSSHPKSGLATLITDGPGGSKRMYAGLKNAGETWYDITGNRSDTVKIGSDGWGTFHVNKGSVSIYVQK

SEQ ID NO: 28857 - protein, 483 aa, Bacillus sp.
HHNGTNGTMMQYFEWYLPNDGNHWNRLNSDASNLKSKGITAVWIPPAWKGASQNDVGYGAYDLYDLGEFNQKGTVRTKYGTRSQLQAAVTSLKNNGIQVYGDVVMNHKGGADATEMVRAVEVNPNNRNQEVTGEYTIEAWTRFDFPGRGNTHSSFKWRWYHFDGVDWDQSRRLNNRIYKFRGKAWDWEVDTENGFYDYLMYADIDYDHPEVVNELRNWGVWYTNTLGLDGFRIDAVKHIKYSFTRDWINHVRSATGKNMFAVAEFWKNDLGAIENYLQKTNWNHSVFDVPLHYNLYNASKSGGNYDMRNIFNGTVVQRHPSHAVTFVDNHDSQPEEALESFVEEWFKPLAYALTLTREQGYPSVFYGDYYGIPTHGVPAMRSKIDPILEARQKYAYGPQHDYLDHPDVIGWTREGDSSHPKSGLATLITDGPGGSKRMYAGLKNAGETWYDITGNRSDTVKIGSDGWGEFHVNDGSVSIYVQK

SEQ ID NO: 28858 - protein, 485 aa, Bacillus sp.
HHNGTNGTMMQYFEWYLPNDGNHWNRLNSDASNLKSKGITAVWIPPAWKGASQNDVGYGAYDLYDLGEFNQKGTVRTKYGTRSQLQAAVTSLKNNGIQVYGDVVMNHKGGADATEMVRAVEVNPNNRNQEVTGEYTIEAWTRFDFPGRGNTHSSFKWRWYHFDGVDWDQSRRLNNRIYKFRGHGKAWDWEVDTEFGNYDYLMYADYDMDHPEVVNELRNWGVWYTNTLGLDGFRIDAVKHIKYSFTRDWINHVRSATGKNMFAVAEFWKNDLGAIENYLQKTNWNHSVFDVPLHYNLYNASKSGGNYDMRNIFNGTVVQRQPSHAVTFVDNHDSQPEEALESFVEEWFKPLAYALTLTREQGYPSVFYGDYYGIPTHGVPAMRSKIDPILEARQKYAYGPQHDYLDHPDVIGWTREGDSSHPKSGLATLITDGPGGSKRMYAGLKNAGETWYDITGNRSDTVKIGSDGWGEFHVNDGSVSIYVQK

SEQ ID NO: 28859 - protein, 485 aa, Bacillus sp.
HHNGTNGTMMQYFEWYLPNDGNHWNRLNSDASNLKSKGITAVWIPPAWKGASQNDVGYGAYDLYDLGEFNQKGTVRTKYGTRSQLQAAVTSLKNNGIQVYGDVVMNHKGGADATEMVRAVEVNPNNRNQEVTGEYTIEAWTRFDFPGRGNTHSSFKWRWYHFDGVDWDQSRRLNNRIYKFRGHGKAWDWEVDTEFGNYDYLMYADYDMDHPEVVNELRNWGVWYTNTLGLDGFRIDAVKHIKYSFTRDWINHVRSATGKNMFAVAEFWKNDLGAIENYLQKTNWNHSVFDVPLHYNLYNASNSGGNYDMRNIFNGTVVQRHPSHAVTFVDNHDSQPEEALESFVEPWFKPLAYALTLTREQGYPSVFYGDYYGIPTHGVPAMRSKIDPILEARQKYAYGPQHDYLDHPDVIGWTREGDSSHPKSGLATLITDGPGGSKRMYAGLKNAGETWYDITGNRSDTVKIGSDGWGEFHVNQKSVSIYVQK

SEQ ID NO: 28860 - protein, 483 aa, Bacillus sp.
HHNGTNGTMMQYFEWYLPNDGNHWNRLNSDASNLKSKGITAVWIPPAWKGASQNDVGYGAYDLYDLGEFNQKGTVRTKYGTRSQLQAAVTSLKNNGIQVYGDVVMNHKGGADATEMVRAVEVNPNNRNQEVTGEYTIEAWTRFDFPGRGNTHSSFKWRWYHFDGVDWDQSRRLNNRIYKFRGKAWDWEVDTEFGNYDYLMYADYDMDHPEVVNELRNWGVWYTNTLGLDGFRIDAVKHIKYSFTRDWINHVRSATGKNMFAVAEFWKNDLGAIENYLQKTNWNHSVFDVPLHYNLYNASKSGGNYDMRNIFNGTVVQRHPSHAVTFVDNHDSQPEEALESFVEEWFKPHAYALTLTREQGYPSVFYGDYYGIPTHGVPAMRSKIDPILEARQKYAYGPQHDYLDHPDVIGWTREGDSSHPKSGLATLITDGPGGSKRMYAGLKNAGETWYDITGNRSDTVKIGSDGWGEFHVNDGSVSIYVQK

SEQ ID NO: 28861 - protein, 485 aa, Synthetic construct
HHNGTNGTMMQYFEWYLPNDGNHWNRLNSDASNLKSKGITAVWIPPAWKGASQNDVGYGAYDLYDLGEFNQKGTVRTKYGTRSQLQAAVTSLKNNGIQVYGDVVMNHKGGADATEMVRAVEVNPNNRNQEVTGEYTIEAWTRFDFPGRGNTHSSFKWRWYHFDGVDWDQSRRLNNRIYKFRGHGKAWDWEVDTENGNYDYLMYADFDYDHPEVVNEMRNWGVWYTNTLGLDGFRIDAVKHIKYSFTRDWINHVRSATGKNMFAVAEFWKNDLGAIENYLQKTNWNHSVFDVPLHYNLYNASKSGGNYDMRNIFNGTVVQRHPSHAVTFVDNHDSQPEEALESFVEEWFKPLAYALTLTREQGYPSVFYGDYYGIPTHGVPAMRSKIDPILEARQKYAYGPQHDYLDHPDVIGWTREGDSSHPKSGLATLITDGPGGSKRMYAGLKNAGETWYDITGNRSDTVKIGSDGWGEFHVNDGSVSIYVQK

SEQ ID NO: 28862 - protein, 483 aa, Bacillus sp.
HHNGTNGTMMQYFEWYLPNDGNHWNRLNSDASNLKSKGITAVWIPPAWKGASQNDVGYGAYDLYDLGEFNQKGTVRTKYGTRSQLQAAVTSLKNNGIQVYGDVVMNHKGGADATEMVRAVEVNPNNRNQEVTGEYTIEAWTRFDFPGRGNTHSSFKWRWYHFDGVDWDQSRRLNNRIYKFRGKAWDWEVDTEFGNYDYLMYADYDMDHPEVVNELRNWGVWYTNTLGLDGFRIDAVKHIKYSFTRDWINHVRSATGKNMFAVAEFWKNDLGAIENYLQKTNWNHSVFDVPLHYNLYNASKSGGNYDMRNIFNGTVVQRHPSAAVTFVDNHDSQPEEALESFVEEWFKPLAYALTLTREQGYPSVFYGDYYGIPTHGVPAMRSKIDPILEARQKYAYGPQHDYLDHPDVIGWTREGDSSHPKSGLATLITDGPGGSKRMYAGLKNAGETWYDITGNRSDTVKIGSDGWGEFHVNDGSVSIYVQK

SEQ ID NO: 28863 - protein, 483 aa, Synthetic construct
HHNGTNGTMMQYFEWYLPNDGNHWNRLNSDASNLKSKGITAVWIPPAWKGASQNDVGYGAYDLYDLGEFNQKGTVRTKYGTRSQLQAAVTSLKNNGIQVYGDVVMNHKGGADATEMVRAVEVNPNNRNQEVTGEYTIEAWTRFDFPGRGNTHSSFKWRWYHFDGVDWDQSRRLNNRIYKFRGKAWDWEVDTENGNYDYLMYADIDMDHPESRNELRNWGVWYTNTLGLDGFRIDAVKHIKYSFTRDWINHVRSATGKNMFAVAEFWKNDLGAIENYLQKTNWNHSVFDVPLHYNLYNASKSGGNYDMRNIFNGTVVQRHPSHAVTFVDNHDSQPEEALESFVEEWFKPLAYALTLTREQGYPSVFYGDYYGIPTHGVPAMRSKIDPILEARQKYAYGPQHDYLDHPDVIGWTREGDSSHPKSGLATLITDGPGGSKRMYAGLKNAGETWYDITGNRSDTVKIGSDGWGEFHVNDGSVSIYVQK

SEQ ID NO: 28864 - protein, 485 aa, Bacillus sp.
HHNGTNGTMMQYFEWYLPNDGNHWNRLNSDASNLKSKGITAVWIPPAWKAASQNDVGYGAYDLYDLGEFNQKGTVRTKYGTRSQLQAAVTSLKNNGIQVYGDVVMNHKGGADATEMVRAVEVNPNNRNQEVTGEYTIEAWTRFDFPGRGNTHSSFKWRWYHFDGVDWDQSRDLQNRIYKFRGHGKAWDWEVDTEFGNYDYLMYADYDMDHPEVVNELRNWGVWYTNTLGLDGFRIDAVKHIKYSFTRDWINHVRIATGKNMFAVAEFWKNDLGAIENYLQKTNWNHSVFDVPLHYNLYNASKSGGNYDMRNIFNGTVVQRHPSHAVTFVDNHDSQPEEALESFVDEWFKPLAYALTLTREQGYPSVFYGDYYGIPTHGVPAMRSKIDPILEARQKYAYGPQHDYLDHPDVIGWTREGDSSHPKSGLATLITDGPGGSKRMYAGLKNAGETWYDITGNRSDTVKIGSDGWGEFHVNDQSVSIYVQK

SEQ ID NO: 28865 - protein, 485 aa, Bacillus sp.
HHNGTNGTMMQYFEWYLPNDGNHWNRLNSDASNLKSKGITAVWIPPAWKGASQNDVGYGAYDLYDLGEFNQKGTVRTKYGTRSQLQAAVTSLKNNGIQVYGDVVMNHKGGADATEMVRAVEVNPNNRNQEVTGEYTIEAWTRFDFPGRGNTHSSFKWRWYHFDGVDLDQSRRLNNRIYKFRGHGKAWDWEVDTEFGNYDYLMYADYDMDHPEVVNELRNWGVWYTNTLGLDGFRIDAVKHIKYSFTRDWINHVRSATGKNMFAVAEFWKNDLGAIENYLQKTNWNHSVFDVPLHYNLYNASKSGGNYDMRNIFNGTVVQRHPSHAVTFVDNHDSQPEEALESFVEEWFKPLAYALTLTREQGYPSVFYGDYYGIPTHGVPAMRSKIDPILEARQKYAYGPQHDYLDHPDVIGWTREGDSSHPKSGLATLITDGPGGSKRMYAGLKNAGETWYDITGNRSDTVKIGSDGWGEFHVNDGSVSIYVQK

SEQ ID NO: 28866 - protein, 485 aa, Bacillus sp.
HHNGTNGTMMQYFEWYLPNDGNHWNRLNSDASNLKSKGITAVWIPPAWKGASQNDVGYGAYDLYDLGEFNQKGTVRTKYGTRSQLQAAVTSLKNNGIQVYGDVVMNHKGGADATEMVRAVEVNPNNRNQEVTGEYTIEAWTRFDFPGRGNTHSSFKWRWYHFDGVDWDQSRRLNNRIYKFRGHGKAWDWEVDTEFGNYDYLMYADYDMDHPEVVNELRNWGVWYTNTLGLDGFRIDAVKHIKYSFTRDWINHVRSATGKNMFAVAEFWKNDLGAIENYLQKTNWNHSVFDVPLHYNLYNASKSGGNYDMRNIFNGTVVQANPNHAVTFVDNHDSQPEEALESFVDPWFKPLAYALTLTREQGYPSVFYGDYYGIPTHGVPAMRSKIDPILEARQKYAYGPQHDYLDHPDVIGWTREGDSSHPKSGLATLITDGPGGSKRMYAGLKNAGETWYDITGNRSDTVKIGSDGWGEFHVNGGSVSIYVQK

SEQ ID NO: 28867 - protein, 483 aa, Bacillus sp.
HHNGTNGTMMQYFEWYLPNDGNHWNRLNSDASNLKSKGITAVWIPPAWKGASQNDVGYGAYDLYDLGEFNQKGTVRTKYGTRSQLQAAVTSLKNNGIQVYGDVVMNHKGGADATEMVRAVEVNPNNRNQEVTGEYTIEAWTRFDFPGRGNTHSSFKWRWYHFDGVDWDQSRRLNNRIYKFRGKAWDWEVDTEFGNYDYLMYADYDMDHPEVVNELRNWGVWYTNTLGLDGFRIDAVKHIKYSFTRDWINHVRSATGKNMFAVAEFWKNDLGAIENYLQKTNWNHSVFDVPLHYNLYNASKSGGNYDMRNIFNGTVVQRHPSHAVTFVDNHDSQPEEALESFVEEWFKPLAYALTLTREQGYPSVFYGDYYGIPTHGVPAMRSKIDPILEARQKYARGPQHDYLDHPDVIGWTREGDSSHPKSGLATLITDGPGGSKRMYAGLKNAGETWYDITGNRSDTVKIGSDGWGEFHVNDGSVSIYVQK

SEQ ID NO: 28868 - protein, 483 aa, Bacillus sp.
HHNGTNGTMMQYFEWYLPNDGNHWNRLNSDASNLKSKGITAVWIPPAWKATSQNDVGYGAYDLYDLGEFNQKGTVRTKYGTRSQLQAAVTSLKNNGIQVYGDVVMNHKGGADATEMVRAVEVNPNNRNQEVTGEYTIEAWTRFDFPGRGNTHSSFKWRWYHFDGVDWDQSRNVNNRIYKFRGKAWDWEVDTEFGNYDYLMYADYDMDHPEVVNELRNWGVWYTNTLGLDGFRIDAVKHIKYSFTRDWINHVRSATGKNMFAVAEFWKNDLGAIENYLQKTNWNHSVFDVPLHYNLYNASKSGGNYDMRNIFNGTVVQRHPSHAVTFVDNHDSQPEEALESFVDEWFKPLAYALTLTREQGYPSVFYGDYYGIPTHGVPAMRSKIDPILEARQKYAYGPQHDYLDHPDVIGWTREGDSSHPKSGLATLITDGPGGSKRMYAGLKNAGETWYDITGNRSDTVKIGSDGWGEFHVNKSSVSIYVQK

SEQ ID NO: 28869 - protein, 483 aa, Bacillus sp.
HHNGTNGTMMQYFEWYLPNDGNHWNRLNSDASNLKSKGITAVWIPPAWKGASQNDVGYGAYDLYDLGEFNQKGTVRTKYGTRSQLQAAVTSLKNNGIQVYGDVVMNHKGGADATEMVRAVEVNPNNRNQEVTGEYTIEAWTRFDFPGRGNTHSSFKWRWYHFDGQDWDQSRRLNNRIYKFRGKAWDWEVDTEFGNYDYLMYADYDMDHPEVVNELRNWGVWYTNTLGLDGFRIDAVKHIKYSFTRDWINHVRSATGKNMFAVAEFWKNDLGAIENYLQKTNWNHSVFDVPLHYNLYNASKSGGNYDMRNIFNGTVVQRHPSHAVTFVDNHDSQPEEALESFVEEWFKPLAYALTLTREQGYPSVFYGDYYGIPTHGVPAMRSKIDPILEARQKYAYGPQHDYLDHPDVIGWTREGDSSHPKSGLATLITDGPGGSKRMYAGLKNAGETWYDITGNRSDTVKIGSDGWGEFHVNDGSVSIYVQK

SEQ ID NO: 28870 - protein, 483 aa, Synthetic construct
HHNGTNGTMMQYFEWYLPNDGNHWNRLNSDASNLKSKGITAVWIPPAWKGASQNDVGYGAYDLYDLGEFNQKGTVRTKYGTRSQLQAAVTSLKNNGIQVYGDVVMNHKGGADATEMVRAVEVNPNNRNQEVTGEYTIEAWTRFDFPGRGNTHSSFKWRWYHFDGVDWDQSRRLNNRIYKFRGKAWDWEVDTEFGNYDYLMYADIDMDHPESVNELRNWGVWYTNTLGLDGFRIDAVKHIKYSFTRDWINHVRSATGKNMFAVAEFWKNDLGAIENYLQKTNWNHSVFDVPLHYNLYNASKSGGNYDMRNIFNGTVVQRHPSHAVTFVDNHDSQPEEALESFVEEWFKPLAYALTLTREQGYPSVFYGDYYGIPTHGVPAMRSKIDPILEARQKYAYGPQHDYLDHPDVIGWTREGDSSHPKSGLATLITDGPGGSKRMYAGLKNAGETWYDITGNRSDTVKIGSDGWGEFHVNDGSVSIYVQK

SEQ ID NO: 28871 - protein, 485 aa, Bacillus sp.
HHNGTNGTMMQYFEWYLPNDGNHWNRLNSDASNLKSKGITAVWIPPAWKGASQNDVGYGAYDLYDLGEFNQKGTVRTKYGTRSQLQAAVTSLKNNGIQVYGDVVMNHKGGADATEMVRAVEVNPNNRNQEVTGEYTIEAWTRFDFPGRGNTHSSFKWRWYHFDGVDWDQSRRLNNRIYKFRGHGKAWDWEVDTEFGNYDYLMYADYDMDHPDVVNELRNWGVWYTNTLGLDGFRIDAVKHIKYSFTRDWINHVRSATGKNMFAVAEFWKNDLGAIENYLQKTNWNHSVFDVPLHYNLYNASKSGGNYDMRNIFNGTVVQRHPSHAVTFVDNHDSQPEEALESFVEEWFKPLAYALTLTREQGYPSVFYGDYYGIPTHGVPAMRSKIDPILEARQKYAYGPQHDYLDHPDVIGWTREGDSSHPKSGLATLITDGPGGSKRMYAGLKNAGETWYDITGNRSDTVKIGSDGWGEFHVNDGSVSIYVQK

SEQ ID NO: 28872 - protein, 485 aa, Synthetic construct
HHNGTNGTMMQYFEWYLPNDGNHWNRLNSDASNLKSKGITAVWIPPAWKGASQNDVGYGAYDLYDLGEFNQKGTVRTKYGTRSQLQAAVTSLKNNGIQVYGDVVMNHKGGADATEMVRAVEVNPNNRNQEVTGEYTIEAWTRFDFPGRGNTHSSFKWRWYHFDGVDWDQSRRLNNRIYKFRGHGKAWDWEVDTENGNYDYLMYADIDMDHPEVVNELRNWGVWYTNTLGLDGFRIDAVKHIKYSFTRDWINHVRSATGKNMFAVAEFWKNDLGAIENYLQKTNWNHSVFDVPLHYNLYNASKSGGNYDMRNIFNGTVVQRHPSHAVTFVDNHDSQPEEALESFVEEWFKPLAYALTLTREQGYPSVFYGDYYGIPTHGVPAMRSKIDPILEARQKYAYGPQHDYIDHPDVIGWTREGDSSAPKSGLAALITDGPGGSKRMYAGLKNAGETWYDITGNRSDTVKIGSDGWGEFHVNDGSVSIYVQK

SEQ ID NO: 28873 - protein, 485 aa, Bacillus sp.
HHNGTNGTMMQYFEWYLPNDGNHWNRLNSDASNLKSKGITAVWIPPAWKAASQNDVGYGAYDLYDLGEFNQKGTVRTKYGTRSQLQAAVTSLKNNGIQVYGDVVMNHKGGADATEMVRAVEVNPNNRNQEVTGEYTIEAWTRFDFPGRGNTHSSFKWRWYHFDGVDWDQSRELTNRIYKFRGHGKAWDWEVDTEFGNYDYLMYADYDMDHPEVVNELRNWGVWYTNTLGLDGFRIDAVKHIKYSFTRDWINHVRSATGKNMFAVAEFWKNDLGAIENYLQKTNWNHSVFDVPLHYNLYNASKSGGNYDMRNIFNGTVVQRHPSHAVTFVDNHDSQPEEALESFVEEWFKPLAYALTLTREQGYPSVFYGDYYGIPTHGVPAMRSKIDPILEARQKYAYGPQHDYLDHPDVIGWTREGDSSHPKSGLATLITDGPGGSKRMYAGLKNAGETWYDITGNRSDTVKIGSDGWGEFHVNDGSVSIYVQK

SEQ ID NO: 28874 - protein, 485 aa, Synthetic construct
HHNGTNGTMMQYFEWYLPNDGNHWNRLNSDASNLKSKGITAVWIPPAWKGASQNDVGYGAYDVYDLGEFNQKGTVRTKYGTRSQLQAAVTSLKNNGIQVYGDVVFNHKGGADATEMVRAVEVNPNNRNQEVTGEYTIEAWTRFDFPGRGNTHSSFKWRWYHFDGVDWDQSRRLNNRIYKFRGHGKAWDWEVDTENGNYDYLMYADYDMDHPEVVNELRNWGVWYTNTLGLDGFRIDAVKHIKYSFTRDWINHVRSATGKNMFAVAEFWKNDLGAIENYLQKTNWNHSVFDVPLHYNLYNASKSGGNYDMRNIFNGTVVQRHPSHAVTFVDNHDSQPEEALESFVEEWFKPLAYALTLTREQGYPSVFYGDYYGIPTHGVPAMRSKIDPILEARQKYAYGPQHDYLDHPDVIGWTREGDSSHPKSGLATLITDGPGGSKRMYAGLKNAGETWYDITGNRSDTVKIGSDGWGEFHVNDGSVSIYVQK

SEQ ID NO: 28875 - protein, 483 aa, Bacillus sp.
HHNGTNGTMMQYFEWYLPNDGNHWNRLNSDASNLKSKGITAVWIPPAWKGASQNDVGYGAYDLYDLGEFNQKGTVRTKYGTRSQLQAAVTSLKNNGINVYGDVVMNHKGGADATEMVRAVEVNPNNRNQEVTGEYTIEAWTRFDFPGRGNTHSSFKWRWYHFDGVDWDQSRRLNNRIYKFRGKAWDWEVDTEFGNYDYLMYADYDMDHPEVVNELRNWGVWYTNTLGLDGFRIDAVKHIKYSFTRDWINHVRSATGKNMFAVAEFWKNDLGAIENYLQKTNWNHSVFDVPLHYNLYNASKSGGNYDMRNIFNGTVVQSHPNHAVTFVDNHDSQPEEALESFVEEWFKPLAYALTLTREQGYPSVFYGDYYGIPTHGVPAMRSKIDPILEARQKYAYGPQHDYLDHPDVIGWTREGDSSHPKSGLATLITDGPGGSKRMYAGLKNAGETWYDITGNRSDTVKIGSDGWGEFHVNDGSVSIYVQK

SEQ ID NO: 28876 - protein, 483 aa, Bacillus sp.
HHNGTNGTMMQYFEWYLPNDGNHWNRLNSDASNLKSKGIKAVWIPPAWKGASQNDVGYGAYDLYDLGEFNQRGTVRTKYGTRSQLQAAVTSLKNNGIQVYGDVVMNHKGGADATEMVRAVEVNPNNRNQEVTGEYTIEAWTRFDFPGRGNTHSSFKWRWYHFDGVDWDQSRNFQNRIYKFRGKAWDWEVDTEFGNYDYLMYADYDMDHPEVVNELRNWGVWYTNTLGLDGFRIDAVKHIKYSFTRDWINHVRSATGKNMFAVAEFWKNDLGAIENYLQKTNWNHSVFDVPLHYNLYNASKSQGNYDMRNIFNGTVVQRHPSHAVTFVDNHDSQPEEALESFVDTWFKPLAYALTLTREQGYPSVFYGDYYGIPTHGVPAMRSKIDPILEARQKYAYGPQHDYLDHPDVIGWTREGDSSHPKSGLATLITDGPGGSKRMYAGLKNAGETWYDITGNRSDTVKIGSDGWGEFHVNGGSVSIYVQK

SEQ ID NO: 28877 - protein, 483 aa, Bacillus sp.
HHNGTNGTMMQYFEWYLPNDGNHWNRLNSDASNLKSKGITAVWIPPAWKGASQNDVGYGAYDLYDLGEFNQKGTVRTKYGTRSQLQAAVTSLKNNGIQVYGDVVMNHKGGADATEMVRAVEVNPNNRNQEVTGEYTIEAWTRFDFPGRGNTHSSFKWRWYHFDGVDWDQSRRLNNRIYKFRGKAWDWEVDTEFGNYDYLMYADYDMDHVEVVNELRNWGVWYTNTLGLDGFRIDAVKHIKYSFTRDWINHVRSATGKNMFAVAEFWKNDLGAIENYLQKTNWNHSVFDVPLHYNLYNASKSGGNYDMRNIFNGTVVQRHPSHAVTFVDNHDSQPEEALESFVEEWFKPLAYALTLTREQGYPSVFYGDYYGIPTHGVPAMRSKIDPILEARQKYAYGPQHDYLDHPDVIGWTREGDSSHPKSGLATLITDGPGGSKRMYAGLKNAGETWYDITGNRSDTVKIGSDGWGEFHVNDGSVSIYVQK

SEQ ID NO: 28878 - protein, 485 aa, Bacillus sp.
HHNGTNGTMMQYFEWYLPNDGNHWNRLNSDASNLKSKGITAVWIPPAWKGASQNDVGYGAYDLYDLGEFNQKGTVRTKYGTRSQLQAAVTSLKNNGIQVYGDVVMNHKGGADATEMVRAVEVNPNNRNQEVTGEYTIEAWTRFDFPGRGNTHSSFKWRWYHFDGVDWDQSRRLNNRIYKFRGHGKAWDWEVDTEFGNYDYLMYADYDMDHPEVVNELRNWGVWYTNTLGLDGFRIDAVKHIKYSFTRDWINHVRSATGKNMFAVAEFWKNDLGAIENYLQKTNWNHSVFDVPLHYNLYNASKSGGNYDMRNIFNGTVVQRHPSHAVTFVDNHDSQPEEALESFVEEWFKPLAYALTLTREQGYPSVFYGDYYGIPTHGVPAMRSKIDPILKARQKYAYGPQHDYLDHPDVIGWTREGDSSHPKSGLATLITDGPGGSKRMYAGLKNAGETWYDITGNRSDTVKIGSDGWGEFHVNDGSVSIYVQK

SEQ ID NO: 28879 - protein, 485 aa, Bacillus sp.
HHNGKNGTMMQYFEWYLPNDGNHWNRLNSDASNLKSKGITAVWIPPAWKGASQNDVGYGAYDLYDLGEFNQKGTVRTKYGTRSQLQAAVTSLKNNGIQVYGDVVMNHKGGADATEMVRAVEVNPNNRNQEVTGEYTIEAWTRFDFPGRGNTHSSFKWRWYHFDGVDWDQSRRLNNRIYKFRGHGKAWDWEVDTEFGNYDYLMYADYDMDHPEVVNELRNWGVWYTNTLGLDGFRIDAVKHIKYSFTRDWINHVRSATGKNMFAVAEFWKNDLGAIENYLQKTNWNHSVFDVPLHYNLYNASKSGGNYDMRNIFNGTVVQRHPSHAVTFVDNHDSQPEEALESFVEEWFKPLAYALTLTREQGYPSVFYGDYYGIPTHGVPAMRSKIDPILEARQKYAYGPQHDYLDHPDVIGWTREGDSSHPKSGLATLITDGPGGSKRMYAGLKNAGETWYDITGNRSDTVKIGSDGWGEFHVNDGSVSIYVQK

SEQ ID NO: 28880 - protein, 485 aa, Bacillus sp.
HHNGTNGTMMQYFEWYLPNDGNHWNRLNSDASNLKSKGITAVWIPPAWKGASQNDVGYGAYDLYDLGEFNQKGTVRTKYGTRSQLQAAVTSLKNNGIQVYGDVVMNHKGGADATEMVRAVEVNPNNRNQEVTGEYTIEAWTRFDFPGRGNTHSSFKWRWYHFDGVDWDQSRRLNNRIYKFRGHGKAWDWEVDTEFGNYDYLMYADYDMDHPEVVNELRNWGVWYTNTLGLDGFRIDAVKHIKYSFTRDWINHVRSATGKNMFAVAEFWKNDLGAIENYLQKTNWNHSVFDVPLHYNLYNASKSGGNYDMRNIFNGTVVQRHPSHAVTFVDNHDSQPEEALESFVEEWFKPLAYALTLTREQGYPSVFYGDYYGIPTHGVPAMRSKIDPILEARQKYAYGPQHDYLDHPDVIGWTREGDSSHPKSGLATLITDGPGGSKRMYAGLKNAGETWYDITGNRSDTVKIGSDGWGEFHVNDASVSIYVQK

SEQ ID NO: 28881 - protein, 483 aa, Bacillus sp.
HHNGTNETMMQYFEWYLPNDGNHWNRLNSDASNLKSKGITAVWIPPAWKGASQNDVGYGAYDLYDLGEFNQKGTVRTKYGTRSQLQAAVTSLKNNGIQVYGDVVMNHKGGADATEMVRAVEVNPNNRNQEVTGEYTIEAWTRFDFPGRGNTHSSFKWRWYHFDGVDWDQSRRLNNRIYKFRGKAWDWEVDTEFGNYDYLMYADYDMDHPEVVNELRNWGVWYTNTLGLDGFRIDAVKHIKYSFTRDWINHVRSATGKNMFAVAEFWKNDLGAIENYLQKTNWNHSVFDVPLHYNLYNASKSGGNYDMRNIFNGTVVQAHPSHAVTFVDNHDSQPEEALESFVEEWFKPLAYALTLTREQGYPSVFYGDYYGIPTHGVPAMRSKIDPILEARQKYAYGPQHDYLDHPDVIGWTREGDSSHPKSGLATLITDGPGGSKRMYAGLKNAGETWYDITGNRSDTVKIGSDGWGEFHVNDGSVSIYVQK

SEQ ID NO: 28882 - protein, 483 aa, Bacillus sp.
HHNGTNGTMMQYFEWYLPNDGNHWNRLNSDASNLKSKGITAVWIPPAWKGASQNDVGYGAYDLYDLGEFNQKGTVRTKYGTRSQLQAAVTSLKNNGIQVYGDVVMNHKGGADATEMVRAVEVNPNNRNQEVTGEYTIEAWTRFDFPGRGNTHSSFKWRWYHFDGVDWDQSRRLNNRIYKFRGKLWDWEVDTEFGNYDYLMYADYDMDHPEVVNELRNWGVWYTNTLGLDGFRIDAVKHIKYSFTRDWINHVRSATGKNMFAVAEFWKNDLGAIENYLQKTNWNHSVFDVPLHYNLYNASKSGGNYDMRNIFNGTVVQRHPSHAVTFVDNHDSQPEEALESFVEEWFKPLAYALTLTREQGYPSVFYGDYYGIPTHGVPAMRSKIDPILEARQKYAYGPQHDYLDHPDVIGWTREGDSSHPKSGLATLITDGPGGSKRMYAGLKNAGETWYDITGNRSDTVKIGSDGWGEFHVNDGSVSIYVQK

SEQ ID NO: 28883 - protein, 483 aa, Bacillus sp.
HHNGTNGTMMQYFEWYLPNDGNHWNRLNSDASNLKSKGITAVWIPPAWKGASQNDVGYGAYDLYDLGEFNQKGTVRTKYGTRSQLQAAVTSLKNNGIQVYGDVVMNHKGGADATEMVRAVEVNPNNRNQEVTGEYTIEAWTRFDFPGRGNTHSSFKWRWYHFDGVDFDQSRNFQNRIYKFRGKAWDWEVDTEFGNYDYLMYADYDMDHPEVVNELRNWGVWYTNTLGLDGFRIDAVKHIKYSFTRDWINHVRSATGKNMFAVAEFWKNDLGAIENYLQKTNWNHSVFDVPLHYNLYNASKSQGNYDMRNIFNGTVVQRHPSHAVTFVDNHDSQPEEALESFVDTWFKPLAYALTLTREQGYPSVFYGDYYGIPTHGVPAMRSKIDPILEARQKYAYGPQHDYLDHPDVIGWTREGDSSHPKSGLATLITDGPGGSKRMYAGLKNAGETWYDITGNRSDTVKIGSDGWGEFHVNGSSVSIYVQK

SEQ ID NO: 28884 - protein, 485 aa, Bacillus sp.
HHNGTNGTMMQYFEWYLPNDGNHWNRLNSDASNLKSKGITAVWIPPAWKGASQNDVGYGAYDLYDLGEFNQKGTVRTKYGTRSQLQAAVTSLKNNGIQVYGDVVMNHKGGADATEMVRAVEVNPNNRNQEVTGEYTIEAWTRFDFPGRGNTHSSFKWRWYHFDGVDWDQSRRLNNRIYKFRGHGKAWDWEVDTEFGNYDYLMYADYDMDHPEVVNELRNWGVWYTNTLGLDGFRIDAVKHIKYSFTRDWINHVRSATGKNMFAVAEFWKNDLGAIENYLQKTNWNHSVFDVPLHYNLYNASKSGGNYDMRNIFNGTVVQRHPSRAVTFVDNHDSQPEEALESFVEEWFKPLAYALTLTREQGYPSVFYGDYYGIPTHGVPAMRSKIDPILEARQKYAYGPQHDYLDHPDVIGWTREGDSSHPKSGLATLITDGPGGSKRMYAGLKNAGETWYDITGNRSDTVKIGSDGWGEFHVNDGSVSIYVQK

SEQ ID NO: 28885 - protein, 485 aa, Bacillus sp.
HHNGTNGTMMQYFEWYLPNDGNHWNRLNSDASNLKSKGITAVWIPPAWKAASQNDVGYGAYDLYDLGEFNQKGTVRTKYGTRSQLQAAVTSLKNNGIQVYGDVVMNHKGGADATEMVRAVEVNPNNRNQEVTGEYTIEAWTRFDFPGRGNTHSSFKWRWYHFDGVDWDQSRDLQNRIYKFRGHGKAWDWEVDTEFGNYDYLMYVDYDMDHPEVVNELRNWGVWYTNTLGLDGFRIDAVKHIKYSFTRDWINHVRSATGKNMFAVAEFWKNDLGAIENYLQKTNWNHSVFDVPLHYNLYNASKSGGNYDMRNIFNGTVVQRHPSHAVTFVDNHDSQPEEALESFVDPWFKPLAYALTLTREQGYPSVFYGDYYGIPTHGVPAMRSKIDPILEARQKYAYGPQHDYLDHPDVIGWTREGDSSHPKSGLATLITDGPGGSKRMYAGLKNAGETWYDITGNRSDTVKIGSDGWGEFHVNGGSVSIYVQK

SEQ ID NO: 28886 - protein, 485 aa, Bacillus sp.
HHNGTNGTMMQYFEWYLPNDGNHWNQLNSDASNLKSKGITAVWIPPAWKGASQNDVGYGAYDLYDLGEFNQKGTVRTKYGTRSQLQAAVTSLKNNGIQVYGDVVMNHKGGADATEMVRAVEVNPNNRNQEVTGEYTIEAWTRFDFPGRGNTHSSFKWRWYHFDGVDWDQSRRLNNRIYKFRGHGKAWDWEVDTEFGNYDYLMYADYDMDHPEVVNELRNWGVWYTNTLGLDGFRIDAVKHIKYSFTRDWINHVRSATGKNMFAVAEFWKNDLGAIENYLQKTNWNHSVFDVPLHYNLYNASKSGGNYDMRNIFNGTVVQRHPSHAVTFVDNHDSQPEEALESFVEEWFKPLAYALTLTREQGYPSVFYGDYYGIPTHGVPAMRSKIDPILEARQKYAYGPQHDYLDHPDVIGWTREGDSSHPKSGLATLITDGPGGSKRMYAGLKNAGETWYDITGNRSDTVKIGSDGWGEFHVNDGSVSIYVQK

SEQ ID NO: 28887 - protein, 485 aa, Bacillus sp.
HHNGTNGTMMQYFEWYLPNDGNHWNRLNSDASNLKSKGITAVWIPPAWKGASQNDVGYGAYDLYDLGEFNQKGTVRTKYGTRSQLQAAVTSLKNNGIQVYGDVVMNHKGGADATEMVRAVEVNPNNRNQEVTGEYTIEAWTRFDFPGRGNTHSSFKWRWYHFDGVDWDQSRRLNNRIYKFRGHGKAWDWEVDTEFGNYDYLMYADYDMDHPEVVNELRNWGVWYTNTLGLDGFRIDAVKHIKYSFTRDWINHVRSATGKNMFAVAEFWKNDLGAIENYLQKTNWNHSVFDVPLHYNLYNASKSGGNYDMRNIFNGTVVQRHPSHAVTFVDNHDSQPEEALESFVDEWFKPLAYALTLTREQGYPSVFYGDYYGIPTHGVPAMRSKIDPILEARQKYAYGPQHDYLDHPDVIGWTREGDSSHPKSGLATLITDGPGGSKRMYAGLKNAGETWYDITGNRSDTVKIGSDGWGEFHVNQKSVSIYVQK

SEQ ID NO: 28888 - protein, 483 aa, Bacillus sp.
HHNGTNGTMMQYFEWYLPNDGNHWNRLNSDASNLKSKGITAVWIPPAWKGASQNDVGYGAYDLYDLGEFNQKGTVRTKYGTRSQLQAAVTSLKNNGIQVYGDVVMNHKGGADATEMVRAVEVNPNNRNQEVTGEYTIEAWTRFDFPGRGNTHSSFKWRWYHFDGVDWDQSRRLNNRIYKFRGKAWDWEVDTENGNYDYLMYADIDFDYPEVVNELRVWGVWYTNTLGLDGFRIDAVKHIKYSFTRDWINHVRSATGKNMFAVAEFWKNDLGAIENYLQKTNWNHSVFDVPLHYNLYNASKSGGNYDMRNIFNGTVVQRHPSHAVTFVDNHDSQPEEALESFVEEWFKPLAYALTLTREQGYPSVFYGDYYGIPTHGVPAMRSKIDPILEARQKYAYGPQHDYLDHPDVIGWTREGDSSHPKSGLATLITDGPGGSKRMYAGLKNAGETWYDITGNRSDTVKIGSDGWGEFHVNDGSVSIYVQK

SEQ ID NO: 28889 - protein, 483 aa, Bacillus sp.
HHNGTNGTMMQYFEWYLPNDGNHWNRLNSDASNLKSKGITAVWIPPSWKAASQNDVGYGAYDLYDLGEFNQKGTVRTKYGTRSQLQAAVTSLKNNGIQVYGDVVMNHKGGADATEMVRAVEVNPNNRNQEVTGEYTIEAWTRFDFPGRGNTHSSFKWRWYHFDGVDWDQSRKFDNRIYKFRGKAWDWEVDTEFGNYDYLMYADYDMDHPEVVNELRNWGVWYTNTLGLDGFRIDAVKHIKYSFTRDWINHVRSATGKNMFAVAEFWKNDLGAIENYLQKTNWNHSVFDVPLHYNLYNASKSGGNYDMRNIFNGTVVQRHPSHAVTFVDNHDSQPEEALESFVEEWFKPLAYALTLTREQGYPSVFYGDYYGIPTHGVPAMRSKIDPILEARQKYAYGPQHDYLDHPDVIGWTREGDSSHPKSGLATLITDGPGGSKRMYAGLKNAGETWYDITGNRSDTVKIGSDGWGEFHVNDGSVSIYVQK

SEQ ID NO: 28890 - protein, 483 aa, Bacillus sp.
HHNGTNGTMMQYFEWYLPNDGNHWNRLNSDASNLKSKGITAVWIPPAWKGASQNDVGYGAYDLYDLGEFNQKGTVRTKYGTRSQLQAAVTSLKNNGIQVYGDVVMNHKGGADATEMVRAVEVNPNNRNQEVTGEYTIEAWTRFDFPGRGNTHSSFKWRWYHFDGVDWDQSRRLNNRIYKFRGKAWDWEVDTEFGNYDYLMYADYDMDHPEVVNELRNWGVWYTNTLGLDGFRIDAVKHIKYSFTRDWINHVRSATGKNMFAVAEFWKNDLGWIENYLQKTNWNHSVFDVPLHYNLYNASKSGGNYDMRNIFNGTVVQRHPSHAVTFVDNHDSQPEEALESFVEEWFKPLAYALTLTREQGYPSVFYGDYYGIPTHGVPAMRSKIDPILEARQKYAYGPQHDYLDHPDVIGWTREGDSSHPKSGLATLITDGPGGSKRMYAGLKNAGETWYDITGNRSDTVKIGSDGWGEFHVNDGSVSIYVQK

SEQ ID NO: 28891 - protein, 485 aa, Bacillus sp.
HHNGTNGTMMQYFEWYLPNDGNHWNRLNSDASNLKSKGITAVWIPPAWKGASQNDVGYGAYDLYDLGEFNQKGTVRTKYGTRSQLQAAVTSLKNNGIQVYGDVVMNHKGGADATEMVRAVEVNPNNRNQEVTGEYTIEAWTRFDFPGRGNTHSSFKWRWYHFDGVDWDQSRRLNNRIYKFRGHGKAWDWEVETEFGNYDYLMYADYDMDHPEVVNELRNWGVWYTNTLGLDGFRIDAVKHIKYSFTRDWINHVRSATGKNMFAVAEFWKNDLGAIENYLSKTNWNHSVFDVPLHYNLYNASKSGGNYDMRNIFNGTVVQRHPSHAVTFVDNHDSQPEEALESFVEEWFKPLAYALTLTREQGYPSVFYGDYYGIPTHGVPAMRSKIDPILEARQKYAYGPQHDYLDHPDVIGWTREGDSSHPKSGLATLITDGPGGSKRMYAGLKNAGETWYDITGNRSDTVKIGSDGWGEFHVNDGSVSIYVQK

SEQ ID NO: 28892 - protein, 485 aa, Bacillus sp.
HHNGTNGTMMQYFEWYLPNDGNHWNRLNSDASNLKSKGITAVWIPPAWKAISQNDVGYGAYDLYDLGEFNQKGTVRTKYGTRSQLQAAVTSLKNNGIQVYGDVVMNHKGGADATEMVRAVEVNPNNRNQEVTGEYTIEAWTRFDFPGRGNTHSSFKWRWYHFDGVDWDQSRDVNNRIYKFRGHGKAWDWEVDTEFGNYDYLMYADYDMDHPEVVNELRNWGVWYTNTLGLDGFRIDAVKHIKYSFTRDWINHVRSATGKNMFAVAEFWKNDLGAIENYLQKTNWNHSVFDVPLHYNLYNASKSGGNYDMRNIFNGTVVQRHPSHAVTFVDNHDSQPEEALESFVEEWFKPLAYALTLTREQGYPSVFYGDYYGIPTHGVPAMRSKIDPILEARQKYAYGPQHDYLDHPDVIGWTREGDSSHPKSGLATLITDGPGGSKRMYAGLKNAGETWYDITGNRSDTVKIGSDGWGEFHVNDGSVSIYVQK

SEQ ID NO: 28893 - protein, 485 aa, Bacillus sp.
HHNGTNGTMMQYFEWYLPNDGNHWNRLNSDASNLKSKGITAVWIPPAWKGASQNDVGYGAYDLYDLGEFNQKGTVRTKYGTRSQLQAAVTSLKNNGIQVYGDVVMNHKGGADATEMVRAVEVNPNNRNQEVTGEYTIEAWTRFDFPGRGNTHSSFKWRWYHFDGVDWDQSRRLNNRIYKFRGHGKAWDWEVDTEFGNYDYLMYADYDMDHPEVVNELRNWGVWYTNTLGLDGFRIDAVKHIKYSFTRDWINHVRSATGKNMFAVAEFWKNDLGAIENYLQKTNWNHSVFDVPLHYNLYNASKSGGNYDMRNIFNGTVVQRHPSHAVTFVDNHDSQPEEALESFVEEWFKPLAYALTLTREQGYPSVFYGDYYGIPTHGVPAMRSKIDPILEARQKYAYGPQHDYLDHPDVIGWTREGDSSHPKSGLATLITDGPGGSKRMYAGLKNAGETWYDITGNRSDTVKIGSDGWGEFHTNDGSVSIYVQK

SEQ ID NO: 28894 - protein, 483 aa, Bacillus sp.
HHNGTNGTMMQYFEWYLPNDGNHWNRLNSDASNLKSKGITAVWIPPAWKAASQNDVGYGAYDLYDLGEFNQKGTVRTKYGTRSQLQAAVTSLKNNGIQVYGDVVMNHKGGADATEMVRAVEVNPNNRNQEVTGEYTIEAWTRFDFPGRGNTHSSFKWRWYHFDGVDWDQSRRFDNRIYKFRGKAWDWEVDTEFGNYDYLMYTDYDMDHPEVVNELRNWGVWYTNTLGLDGFRIDAVKHIKYSFTRDWINHVRSATGKNMFAVAEFWKNDLGAIENYLQKTNWNHSVFDVPLHYNLYNASKSGGNYDMRNIFNGTVVQRHPSHAVTFVDNHDSQPEEALESFVEEWFKPLAYALTLTREQGYPSVFYGDYYGIPTHGVPAMRSKIDPILEARQKYAYGPQHDYLDHPDVIGWTREGDSSHPKSGLATLITDGPGGSKRMYAGLKNAGETWYDITGNRSDTVKIGSDGWGEFHVNDGSVSIYVQK

SEQ ID NO: 28895 - protein, 485 aa, Bacillus sp.
HHNGTNGTMMQYFEWYLPNDGNHWNRLNSDASNLKSKGITAVWIPPAWKATSQNDVGYGAYDLYDLGEFNQKGTVRTKYGTRSQLQAAVTSLKNNGIQVYGDVVMNHKGGADATEMVRAVEVNPNNRNQEVTGEYTIEAWTRFDFPGRGNTHSSFKWRWYHFDGVDWDQSRDLNNRIYKFRGHGKAWDWEVDTEFGNYDYLMYADYDMDHPEVVNELRNWGVWYTNTLGLDGFRIDAVKHIKYSFTRDWINHVRIATGKNMFAVAEFWKNDLGAIENYLQKTNWNHSVFDVPLHYNLYNASKSGGNYDMRNIFNGTVVQRHPSHAVTFVDNHDSQPEEALESFVDEWFKPLAYALTLTREQGYPSVFYGDYYGIPTHGVPAMRSKIDPILEARQKYAYGPQHDYLDHPDVIGWTREGDSSHPKSGLATLITDGPGGSKRMYAGLKNAGETWYDITGNRSDTVKIGSDGWGEFHVNDQSVSIYVQK

SEQ ID NO: 28896 - protein, 485 aa, Bacillus sp.
HHNGTNGTMMQYFEWYLPNDGNHWNRLNSDASNLKSKGITAVWIPPAWKGASQNDVGYGAYDLYDLGEFNQKGTVRTKYGTRSQLQAAVTSLKNNGIQVYGDVVMNHKGGADATEMVRAVEVNPNNRNQEVTGEYTIEAWTRFDFPGRGNTHSSFKWRWYHFDGVDWDQSRRLNNRIYKFRGHGKAWDWEVDTEFGNYDYLMYADYDMDHPEVVNELRNWGVWYTNTLGLDGFRIDAVKHIKYSFTRDWINHVRSATGKNMFAVAEFWKNDLGAIENYLQKTNWNHSVFDVPLHYNLYNASKSAGNYDMRNIFNGTVVQRHPSHAVTFVDNHDSQPEEALESFVDEWFKPLAYALTLTREQGYPSVFYGDYYGIPTHGVPAMRSKIDPILEARQKYAYGPQHDYLDHPDVIGWTREGDSSHPKSGLATLITDGPGGSKRMYAGLKNAGETWYDITGNRSDTVKIGSDGWGEFHVNDGSVSIYVQK

SEQ ID NO: 28897 - protein, 485 aa, Bacillus sp.
HHNGTNGTMMQYFEWYLPNDGNHWNRLNSDASNLKSKGITAVWIPPAWKAASQNDVGYGAYDLYDLGEFNQKGTVRTKYGTRSQLQAAVTSLKNNGIQVYGDVVMNHKGGADATEMVRAVEVNPNNRNQEVTGEYTIEAWTRFDFPGRGNTHSSFKWRWYHFDGVDWDQSRRVHNRIYKFRGHGKAWDWEVDTEFGNYDYLMYADYDMDHPEVVNELRNWGVWYTNTLGLDGFRIDAVKHIKYSFTRDWINHVRSATGKNMFAVAEFWKNDLGAIENYLQKTNWNHSVFDVPLHYNLYNASKSGGNYDMRNIFNGTVVQRHPSHAVTFVDNHDSQPEEALESFVEEWFKPLAYALTLTREQGYPSVFYGDYYGIPTHGVPAMRSKIDPILEARQKYAYGPQHDYLDHPDVIGWTREGDSSHPKSGLATLITDGPGGSKRMYAGLKNAGETWYDITGNRSDTVKIGSDGWGEFHVNDGSVSIYVQK

SEQ ID NO: 28898 - protein, 485 aa, Bacillus sp.
HHNGTNGTMMQYFEWYLPNDGNHWNRLNSDASNLKSKGITAVWIPPAWKAASQNDVGYGAYDLYDLGEFNQKGTVRTKYGTRSQLQAAVTSLKNNGIQVYGDVVMNHKGGADATEMVRAVEVNPNNRNQEVTGEYTIEAWTRFDFPGRGNTHSSFKWRWYHFDGVDWDQSRDLQNRIYKFRGHGKAWDWEVDTEFGNYDYLMYADYDMDHPEVVNELRNWGVWYTNTLGLDGFRIDAVKHIKYSFTRDWINHVRSATGKNMFAVAEFWKNDLGAIENYLQKTNWNHSVFDVPLHYNLYNASKSGGNYDMRNIFNGTVVQRHPSHAVTFVDNHDSQPEEALESFVDEWFKPLAYALTLTREQGYPSVFYGDYYGIPTHGVPAMRSKIDPILEARQKYAYGPQHDYLDHPDVIGWTREGDSSHPKSGLATLITDGPGGSKRMYAGLKNAGETWYDITGNRSDTVKIGSDGWGEFHVNKSSVSIYVQK

SEQ ID NO: 28899 - protein, 485 aa, Bacillus sp.
HHNGTNGTMMQYFEWYLPNDGNHWNRLNSDASNLKSKGITAVWIPPAWKATSQNDVGYGAYDLYDLGEFNQKGTVRTKYGTRSQLQAAVTSLKNNGIQVYGDVVMNHKGGADLTEMVDAVEVNPNNRNQEVTGEYTIEAWTRFDFPGRGNTHSSFKWRWYHFDGVDWDQSRNVNNRIYKFRGHGKAWDWEVDTEFGNYDYLMYADYDMDHPEVVNELRNWGVWYTNTLGLDGFRIDAVKHIKYSFTRDWINHVRSATGKNMFAVAEFWKNDLGAIENYLQKTNWNHSVFDVPLHYNLYNASKSGGNYDMRNIFNGTVVQRHPSHAVTFVDNHDSQPEEALESFVEEWFKPLAYALTLTREQGYPSVFYGDYYGIPTHGVPAMRSKIDPILEARQKYAYGPQHDYLDHPDVIGWTREGDSSHPKSGLATLITDGPGGSKRMYAGLKNAGETWYDITGNRSDTVKIGSDGWGEFHVNDGSVSIYVQK

SEQ ID NO: 28900 - protein, 485 aa, Bacillus sp.
HHNGTNGTMMQYFEWYLPNDGNHWNRLNSDASNLKSKGITAVWIPPAWKGASQNDVGYGAYDLYDLGEFNQKGTVRTKYGTRSQLQAAVTSLKNNGINVYGDVVMNHKGGADATEMVRAVEVNPNNRNQEVTGEYTIEAWTRFDFPGRGNTHSSFKWRWYHFDGVDWDQSRRLNNRIYKFRGHGKAWDWEVDTEFGNYDYLMYADYDMDHPEVVNELRNWGVWYTNTLGLDGFRIDAVKHIKYSFTRDWINHVRSATGKNMFAVAEFWKNDLGAIENYLQKTNWNHSVFDVPLHYNLYNASKSGGNYDMRNIFNGTVVQRHPSHAVTFVDNHDSQPEEALESFVEEWFKPLAYALTLTREQGYPSVFYGDYYGIPTHGVPAMRSKIDPILEARQKYAYGPQHDYLDHPDVIGWTREGDSSHPKSGLATLITDGPGGSKRMYAGLKNAGETWYDITGNRSDTVKIGSDGWGEFHVNDGSVSIYVQK

SEQ ID NO: 28901 - protein, 483 aa, Synthetic construct
HHNGTNGTMMQYFEWYLPNDGNHWNRLNSDASNLKSKGITAVWIPPAWKGASQNDVGYGAYDLYDLGEFNQKGTVRTKYGTRSQLQAAVTSLKNNGIQVYGDVVMNHKGGADATEMVRAVEVNPNNRNQEVTGEYTIEAWTRFDFPGRGNTHSSFKWRWYHFDGVDWDQSRRLNNRIYKFRGKAWDWEVDTENGNYDYLMYADFDMDFPEVVNEIRNWGVWYTNTLGLDGFRIDAVKHIKYSFTRDWINHVRSATGKNMFAVAEFWKNDLGAIENYLQKTNWNHSVFDVPLHYNLYNASKSGGNYDMRNIFNGTVVQRHPSHAVTFVDNHDSQPEEALESFVEEWFKPLAYALTLTREQGYPSVFYGDYYGIPTHGVPAMRSKIDPILEARQKYAYGPQHDYLDHPDVIGWTREGDSSHPKSGLATLITDGPGGSKRMYAGLKNAGETWYDITGNRSDTVKIGSDGWGEFHVNDGSVSIYVQK

SEQ ID NO: 28902 - protein, 483 aa, Bacillus sp.
HHNGTNGTMMQYFEWYLPNDGNHWNRLNSDASNLKSKGITAVWIPPAWKGASQNDVGYGAYDLYDLGEFNQKGTVRTKYGTRSQLQAAVTSLKNNGIQVYGDVVMNHKGGADATEMVRAVEVNPNNRNQEVTGEYTIEAWTRFDFPGRGNTHSSFKWRWYHFDGVDWDQSRRLNNRIYKFRGKAWDWEVDTENGNYDYLMYADIDMDYPEVVAELRQWGVWYTNTLGLDGFRIDAVKHIKYSFTRDWINHVRSATGKNMFAVAEFWKNDLGAIENYLQKTNWNHSVFDVPLHYNLYNASKSGGNYDMRNIFNGTVVQRHPSHAVTFVDNHDSQPEEALESFVEEWFKPLAYALTLTREQGYPSVFYGDYYGIPTHGVPAMRSKIDPILEARQKYAYGPQHDYLDHPDVIGWTREGDSSHPKSGLATLITDGPGGSKRMYAGLKNAGETWYDITGNRSDTVKIGSDGWGEFHVNDGSVSIYVQK

SEQ ID NO: 28903 - protein, 483 aa, Synthetic construct
HHNGTNGTMMQYFEWYLPNDGNHWNRLNSDASNLKSKGITAVWIPPAWKGASQNDVGYGAYDLYDLGEFNQKGTVRTKYGTRSQLQAAVTSLKNNGIQVYGDVVMNHKGGADATEMVRAVEVNPNNRNQEVTGEYTIEAWTRFDFPGRGNTHSSFKWRWYHFDGVDWDQSRRLNNRIYKFRGKAWDWEVDTENGNYDYLMYADIDMDHPESTNELRNWGVWYTNTLGLDGFRIDAVKHIKYSFTRDWINHVRSATGKNMFAVAEFWKNDLGAIENYLQKTNWNHSVFDVPLHYNLYNASKSGGNYDMRNIFNGTVVQRHPSHAVTFVDNHDSQPEEALESFVEEWFKPLAYALTLTREQGYPSVFYGDYYGIPTHGVPAMRSKIDPILEARQKYAYGPQHDYLDHPDVIGWTREGDSSHPKSGLATLITDGPGGSKRMYAGLKNAGETWYDITGNRSDTVKIGSDGWGEFHVNDGSVSIYVQK

SEQ ID NO: 28904 - protein, 483 aa, Bacillus sp.
HHNGTNGTMMQYFEWYLPNDGNHWNRLNSDASNLKSKGITAVWIPPAWKGASQNDVGYGAYDLYDLGEFNQKGTVRTKYGTRSQLQAAVTSLKNNGIQVYGDVVMNHKGGADATEMVRAVEVNPNNRNQEVTGEYTIEAWTRFDFPGRGNTHSSFKWRWYHFDGVDWDQSRRLNNRIYKFRGKAWDWEVDTENGNYDYLMYADIDFDYPEVVNELRMWGVWYTNTLGLDGFRIDAVKHIKYSFTRDWINHVRSATGKNMFAVAEFWKNDLGAIENYLQKTNWNHSVFDVPLHYNLYNASKSGGNYDMRNIFNGTVVQRHPSHAVTFVDNHDSQPEEALESFVEEWFKPLAYALTLTREQGYPSVFYGDYYGIPTHGVPAMRSKIDPILEARQKYAYGPQHDYLDHPDVIGWTREGDSSHPKSGLATLITDGPGGSKRMYAGLKNAGETWYDITGNRSDTVKIGSDGWGEFHVNDGSVSIYVQK

SEQ ID NO: 28905 - protein, 485 aa, Bacillus sp.
HHNGTNGTMMQYFEWYLPNDGNHWNRLNSDASNLKSKGITAVWIPPAWKGASQNDVGYGAYDLYDLGEFNQKGTVRTKYGTRSQLQAAVTSLKNNGIQVYGDVVMNHKGGADATEMVRAVEVNPNNRNQEVTGEYTIEAWTRFDFPGRGNTHSSFKWRWYHFDGVDWDQSRRLNNRIYKFRGHGKAWDWEVDTEFGNYDYLMYADYDMDHPEVVNELRNWGVWYTNTLGLDGFRIDAVKHIKYSFTRDWINHVRSATGKNMFAVAEFWKNDLGAIENYLQKTNWNHSVFDVPLHYNLYNASKSGGNYDMRNIFNGTVVQRHPSHAVTFVDNHDSQPEEALESFVDPWFKPLAYALTLTREQGYPSVFYGDYYGIPTHGVPAMRSKIDPILEARQKYAYGPQHDYLDHPDVIGWTREGDSSHPKSGLATLITDGPGGSKRMYAGLKNAGETWYDITGNRSDTVKIGSDGWGEFHVNGSSVSIYVQK

SEQ ID NO: 28906 - protein, 485 aa, Bacillus sp.
HHNGTNGTMMQYFEWYLPNDGNHWNRLNSDASNLKSKGITAVWIPPAWKGASQNDVGYGAYDLYDLGEFNQKGTVRTKYGTRSQLQAAVTSLKNNGIQVYGDVVMNHKGGADATEMVRAVEVNPNNRNQEVTGEYTIEAWTRFDFPGRGNTHSSFKWRWYHFDGVDWDQSRRLNNRIYKFRGHGKAWDWEVDTEFGNYDYLMYADYDMDHPEVVNELRNWGVWYTNTLGLDGFRIDAVKHIKYSFTRDWINHVRSATGKNMFAVAEFWKNDLGAIENYLQKTNWNHSVFDVPLHYNLYNASKSGGNYDMRNIFNGTVVQRHPSHAVTFVDNHDSQPEEALESFVEEWFKPLAYALTLTREQGYPSVFYGDYYGIPTHGVPAMRSKIDPILEARQKYAYGPQNDYLDHPDVIGWTREGDSSHPKSGLATLITDGPGGSKRMYAGLKNAGETWYDITGNRSDTVKIGSDGWGEFHVNDGSVSIYVQK

SEQ ID NO: 28907 - protein, 485 aa, Bacillus sp.
HHNGTNGTMMQYFEWYLPNDGNHWNRLNSDASNLKSKGITAVWIPPAWKAASQNDVGYGAYDLYDLGEFNQKGTVRTKYGTRSQLQAAVTSLKNNGIQVYGDVVMNHKGGADATEMVRAVEVNPNNRNQEVTGEYTIEAWTRFDFPGRGNTHSSFKWRWYHFDGVDWDQSRNLNNRIYKFRGHGKAWDWEVDTEFGNYDYLMYADYDMDHPEVVNELRNWGVWYTNTLGLDGFRIDAVKHIKYSFTRDWINHVRSATGKNMFAVAEFWKNDLGAIENYLQKTNWNHSVFDVPLHYNLYNASKSGGNYDMRNIFNGTVVQRHPSHAVTFVDNHDSQPEEALESFVEEWFKPLAYALTLTREQGYPSVFYGDYYGIPTHGVPAMRSKIDPILEARQKYAYGPQHDYLDHPDVIGWTREGDSSHPKSGLATLITDGPGGSKRMYAGLKNAGETWYDITGNRSDTVKIGSDGWGEFHVNDGSVSIYVQK

SEQ ID NO: 28908 - protein, 485 aa, Bacillus sp.
HHNGTNGTMMQYFEWYLPNDGNHWNRLNSDASNLKSKGITAVWIPPAWKGASQNDVGYGAYDLYDLGEFNQKGTVRTKYGTRSQLQAAVTSLKNNGIQVYGDVVMNHKGGADATEMVRAVEVNPNNRNQEVTGEYTIEAWTRFDFPGRGNTHSSFKWRWQHFDGVDWDQSRRLNNRIYKFRGHGKAWDWEVDTEFGNYDYLMYADYDMDHPEVVNELRNWGVWYTNTLGLDGFRIDAVKHIKYSFTRDWINHVRSATGKNMFAVAEFWKNDLGAIENYLQKTNWNHSVFDVPLHYNLYNASKSGGNYDMRNIFNGTVVQRHPSHAVTFVDNHDSQPEEALESFVEEWFKPLAYALTLTREQGYPSVFYGDYYGIPTHGVPAMRSKIDPILEARQKYAYGPQHDYLDHPDVIGWTREGDSSHPKSGLATLITDGPGGSKRMYAGLKNAGETWYDITGNRSDTVKIGSDGWGEFHVNDGSVSIYVQK

SEQ ID NO: 28909 - protein, 485 aa, Bacillus sp.
HHNGTNGTMMQYFEWYLPNDGNHWNRLNSDASNLKSKGITAVWIPPAWKGASQNDVGYGAYDLYDLGEFNQKGTVRTKYGTRSQLQAAVTSLKNNGIQVYGDVVMNHKGGADATEMVRAVEVNPNNRNQEVTGEYTIEAWTRFDFPGRGNTHSSFKWRWYHFDGVDWDQSRRLNNRIYKFRGHGKAWDWEVDTEFGNYDYLMYADYDMDHPEVVNELRNWGVWYTNTLGLDGFRIDAVKHIKYSFTRDWINHVRSATGKNMFAVAEFWKNDLGVIENYLQKTNWNHSVFDVPLHYNLYNASKSGGNYDMRNIFNGTVVQRHPSHAVTFVDNHDSQPEEALESFVEEWFKPLAYALTLTREQGYPSVFYGDYYGIPTHGVPAMRSKIDPILEARQKYAYGPQHDYLDHPDVIGWTREGDSSHPKSGLATLITDGPGGSKRMYAGLKNAGETWYDITGNRSDTVKIGSDGWGEFHVNDGSVSIYVQK

SEQ ID NO: 28910 - protein, 483 aa, Bacillus sp.
HHNGTNGTMMQYFEWYLPNDGNHWNRLNSDASNLKSKGITAVWIPPAWKGASQNDVGYGAYDLYDLGEFNQKGTVRTKYGTRSQLQAAVTSLKNNGIQVYGDVVMNHKGGADATEMVRAVEVNPNNRNQEVTGEYTIEAWTRFDFPGRGNTHSSFKWRWYHFDGVDWDQSRRVNNRIYKFRGKAWDWEVDTEFGNYDYLMYTDYDMDHPEVVNELRNWGVWYTNTLGLDGFRIDAVKHIKYSFTRDWINHVRSATGKNMFAVAEFWKNDLGAIENYLQKTNWNHSVFDVPLHYNLYNASKSGGNYDMRNIFNGTVVQRHPSHAVTFVDNHDSQPEEALESFVEEWFKPLAYALTLTREQGYPSVFYGDYYGIPTHGVPAMRSKIDPILEARQKYAYGPQHDYLDHPDVIGWTREGDSSHPKSGLATLITDGPGGSKRMYAGLKNAGETWYDITGNRSDTVKIGSDGWGEFHVNDGSVSIYVQK

SEQ ID NO: 28911 - protein, 483 aa, Bacillus sp.
HHNGTNGTMMQYFEWYLPNDGNHWNRLNSDASNLKSKGITAVWIPPAWKGASQNDVGYGAYDLYDLGEFNQKGTVRTKYGTRSQLQAAVTSLKNNGIQVYGDVVMNHKGGADATEMVRAVEVNPNNRNQEVTGEYTIEAWTRFDFPGRGNTHSSFKWRWYHFDGVDWDQSRRLNNRIYKFRGKAWDWEVDTEFGNYDYLMYADYDSDHPEVVNELRNWGVWYTNTLGLDGFRIDAVKHIKYSFTRDWINHVRSATGKNMFAVAEFWKNDLGAIENYLQKTNWNHSVFDVPLHYNLYNASKSGGNYDMRNIFNGTVVQRHPSHAVTFVDNHDSQPEEALESFVEEWFKPLAYALTLTREQGYPSVFYGDYYGIPTHGVPAMRSKIDPILEARQKYAYGPQHDYLDHPDVIGWTREGDSSHPKSGLATLITDGPGGSKRMYAGLKNAGETWYDITGNRSDTVKIGSDGWGEFHVNDGSVSIYVQK

SEQ ID NO: 28912 - protein, 483 aa, Bacillus sp.
HHNGTNGTMMQYFEWYLPNDGNHWNRLNSDASNLKSKGITAVWIPPAWKAASQNDVGYGAYDLYDLGEFNQKGTVRTKYGTRSQLQAAVTSLKNNGIQVYGDVVMNHKGGADATEMVRAVEVNPNNRNQEVTGEYTIEAWTRFDFPGRGNTHSSFKWRWYHFDGVDWDQSRQLNNRIYKFRGKAWDWEVDTEFGNYDYLMYTDYDMDHPEVVNELRNWGVWYTNTLGLDGFRIDAVKHIKYSFTRDWINHVRSATGKNMFAVAEFWKNDLGAIENYLQKTNWNHSVFDVPLHYNLYNASKSGGNYDMRNIFNGTVVQRHPSHAVTFVDNHDSQPEEALESFVEEWFKPLAYALTLTREQGYPSVFYGDYYGIPTHGVPAMRSKIDPILEARQKYAYGPQHDYLDHPDVIGWTREGDSSHPKSGLATLITDGPGGSKRMYAGLKNAGETWYDITGNRSDTVKIGSDGWGEFHVNDGSVSIYVQK

SEQ ID NO: 28913 - protein, 485 aa, Bacillus sp.
HHNGTNGTMMQYFEWYLPNDGNHWNRLNSDASNLKSKGITAVWIPPAWKAASQNDVGYGAYDLYDLGEFNQKGTVRTKYGTRSQLQAAVTSLKNNGIQVYGDVVMNHKGGADATEMVRAVEVNPNNRNQEVTGEYTIEAWTRFDFPGRGNTHSSFKWRWYHFDGVDWDQSRNVNNRIYKFRGHGKAWDWEVDTEFGNYDYLMYADYDMDHPEVVNELRNWGVWYTNTLGLDGFRIDAVKHIKYSFTRDWINHVRSATGKNMFAVAEFWKNDLGAIENYLQKTNWNHSVFDVPLHYNLYNASKSGGNYDMRNIFNGTVVQRHPSHAVTFVDNHDSQPEEALESFVEEWFKPLAYALTLTREQGYPSVFYGDYYGIPTHGVPAMRSKIDPILEARQKYAYGPQHDYLDHPDVIGWTREGDSSHPKSGLATLITDGPGGSKRMYAGLKNAGETWYDITGNRSDTVKIGSDGWGEFHVNDGSVSIYVQK

SEQ ID NO: 28914 - protein, 483 aa, Bacillus sp.
HHNGTNGTMMQYFEWYLPNDGNHWNRLNSDASNLKSKGITAVWIPPAWKAVSQNDVGYGAYDLYDLGEFNQKGTVRTKYGTRSQLQAAVTSLKNNGIQVYGDVVMNHKGGADATEMVRAVEVNPNNRNQEVTGEYTIEAWTRFDFPGRGNTHSSFKWRWYHFDGVDWDQSRDLENRIYKFRGKAWDWEVDTEFGNYDYLMYADYDMDHPEVVNELRNWGVWYTNTLGLDGFRIDAVKHIKYSFTRDWINHVRSATGKNMFAVAEFWKNDLGAIENYLQKTNWNHSVFDVPLHYNLYNASKSGGNYDMRNIFNGTVVQSHPNHAVTFVDNHDSQPEEALESFVEEWFKPLAYALTLTREQGYPSVFYGDYYGIPTHGVPAMRSKIDPILEARQKYAYGPQHDYLDHPDVIGWTREGDSSHPKSGLATLITDGPGGSKRMYAGLKNAGETWYDITGNRSDTVKIGSDGWGEFHVNYGSVSIYVQK

SEQ ID NO: 28915 - protein, 485 aa, Bacillus sp.
HHNGTNPTMMQYFEWYLPNDGNHWNRLNSDASNLKSKGITAVWIPPAWKGASQNDVGYGAYDLYDLGEFNQKGTVRTKYGTRSQLQAAVTSLKNNGIQVYGDVVMNHKGGADATEMVRAVEVNPNNRNQEVTGEYTIEAWTRFDFPGRGNTHSSFKWRWYHFDGVDWDQSRRLNNRIYKFRGHGKAWDWEVDTEFGNYDYLMYADYDMDHPEVVNELRNWGVWYTNTLGLDGFRIDAVKHIKYSFTRDWINHVRSATGKNMFAVAEFWKNDLGAIENYLQKTNWNHSVFDVPLHYNLYNASKSGGNYDMRNIFNGTVVQRHPSHAVTFVDNHDSQPEEALESFVEEWFKPLAYALTLTREQGYPSVFYGDYYGIPTHGVPAMRSKIDPILEARQKYAYGPQHDYLDHPDVIGWTREGDSSHPKSGLATLITDGPGGSKRMYAGLKNAGETWYDITGNRSDTVKIGSDGWGEFHVNDGSVSIYVQK

SEQ ID NO: 28916 - protein, 485 aa, Bacillus sp.
HHNGTNGTMMQYFEWYLPNDGNHWNRLNSDASNLKSKGITAVWIPPAWKGASQNDVGYGAYDLYDLGEFNQKGTVRTKYGTRSQLQAAVTSLKNNGIQVYGDVVMNHKGGADATEMVRAVEVNPNNRNQEVTGEYTIEAWTRFDFPGRGNTHSSFKWRWYHFDGVDWDQSRRLNNRIYKFRGHGKAWDWEVDTEFGNYDYLMYADYDMDHPEVVNELRNWGVWYTNTLGLDGFRIDAVKHIKYSFTRDWINHVRSATGKNMFAVAEFWKNDLGAIENYLQKTNWNHSVFDVPLHYNLYNASKSGGNYDMRNIFNGTVVQRHPSHAVTFVDNHDSQPEEALESFVEEWFKPLAYALTLTREQGYPSVFYGDYYGIPTHGVPAMRSKIDPILEARQKYAYGPQHDYLDHPDVIGWTREGDSSHPKSGLATLITDGPGGSKRMYAGLKNVGETWYDITGNRSDTVKIGSDGWGEFHVNDGSVSIYVQK

SEQ ID NO: 28917 - protein, 485 aa, Bacillus sp.
HHNGTNGTMMQYFEWYLPNDGNHWNRLNSDASNLKSKGITAVWIPPAWKGASQNDVGYGAYDLYDLGEFNQKGTVRTKYGTRSQLQAAVTSLKNNGIQVYGDVVMNHKGGADATEMVRAVEVNPNNRNQEVTGEYTIEAWTRFDFPGRGNTHSSFKWRWYHFDGVDWDQSRRLNNRIYKFRGHGKAWDWEVDTEFGNYDYLMYADYDMDHPEVVNELRNWGVWYTNTLGLDGFRIDAVKHIKYSFTRDWINHVRSATGKNMFAVAEFWKNDLGAIENYLQKTNWNHSVFDVPLHYNLYNASKSGGNYDMRNIFNGTVVQRHPSHAVTFVDNHDSQPEEALESFVETWFKPLAYALTLTREQGYPSVFYGDYYGIPTHGVPAMRSKIDPILEARQKYAYGPQHDYLDHPDVIGWTREGDSSHPKSGLATLITDGPGGSKRMYAGLKNAGETWYDITGNRSDTVKIGSDGWGEFHVNDGSVSIYVQK

SEQ ID NO: 28918 - protein, 485 aa, Bacillus sp.
HHNGTNGTMMQYFEWYLPNDGNHWNRLNSDASNLKSKGITAVWIPPAWKGASQNDVGYGAYDLYDLGEFNQKGTVRTKYGTRSQLQAAVTSLKNNGIQVYGDVVMNHKGGADATEMVRAVEVNPNNRNQEVTGEYTIEAWTRFDFPGRGNTHSSFKWRWYHFDGVDWDQSRRLNNRIYKFRGHGKAWDWEVDTEFGNYDYLMYADYDMDHPEVVNELRNWGVWYTNTLGLDGFRIDAVKHIKYSFTRDWINHVRSATGKNMFAVAEFWKNDLVAIENYLQKTNWNHSVFDVPLHYNLYNASKSGGNYDMRNIFNGTVVQRHPSHAVTFVDNHDSQPEEALESFVEEWFKPLAYALTLTREQGYPSVFYGDYYGIPTHGVPAMRSKIDPILEARQKYAYGPQHDYLDHPDVIGWTREGDSSHPKSGLATLITDGPGGSKRMYAGLKNAGETWYDITGNRSDTVKIGSDGWGEFHVNDGSVSIYVQK

SEQ ID NO: 28919 - protein, 485 aa, Bacillus sp.
HHNGTNGTMMQYFEWYLPNDGNHWNRLNSDASNLKSKGITAVWIPPAWKGASQNDVGYGAYDLYDLGEFNQKGTVRTKYGTRSQLQAAVTSLKNNGIQVYGDVVMNHKGGADATEMVRAVEVNPNNRNQEVTGEYTIEAWTRFDFPGRGNTHSSFKWRWYHFDGVDWDQSRRTSNRIYKFRGHGKAWDWEVDTEFGNYDYLMYVDYDMDHPEVVNELRNWGVWYTNTLGLDGFRIDAVKHIKYSFTRDWINHVRKATGKNMFAVAEFWKNDLGAIENYLQKTNWNHSVFDVPLHYNLYNASKSGGNYDMRNIFNGTVVQRHPSHAVTFVDNHDSQPEEALESFVEEWFKPLAYALTLTREQGYPSVFYGDYYGIPTHGVPAMRSKIDPILEARQKYAYGPQHDYLDHPDVIGWTREGDSSHPKSGLATLITDGPGGSKRMYAGLKNAGETWYDITGNRSDTVKIGSDGWGEFHVNDGSVSIYVQK

SEQ ID NO: 28920 - protein, 485 aa, Synthetic construct
HHNGTNGTMMQYFEWYLPNDGNHWNRLNSDASNLKSKGITAVWIPPAWKGASQNDVGYGAYDLYDLGEFNQKGTVRTKYGTRSQLQAAVTSLKNNGIQVYGDVVMNHKGGADATEMVRAVEVNPNNRNQEVTGEYTIEAWTRFDFPGRGNTHSSFKWRWYHFDGVDWDQSRRLNNRIYKFRGHGKAWDWEVDTENGNYDYLMYADYDMDHPEVVNEIRNWGVWYTNTLGLDGFRIDAVKHIKYSFIRDWINHVRSATGKNMFAVAEFWKNDLGAIENYLQKTNWNHSVFDVPLHYNLYNASKSGGNYDMRNIFNGTVVQRHPSHAVTFVDNHDSQPEEALESFVEEWFKPLAYALTLTREQGYPSVFYGDYYGIPTHGVPAMRSKIDPILEARQKYAYGPQHDYLDHPDVIGWTREGDSSHPKSGLATLITDGPGGSKRMYAGLKNAGETWYDITGNRSDTVKIGSDGWGEFHVNDGSVSIYVQK

SEQ ID NO: 28921 - protein, 485 aa, Synthetic construct
HHNGTNGTMMQYFEWYLPNDGNHWNRLNSDASNLKSKGITAVWIPPAWKGASQNDVGYGAYDLYDLGEFNQKGTVRTKYGTRSQLQAAVTSLKNNGIQVYGDVVINHKGGADATEMVRAVEVNPNNRNQEVTGEYTIEAWTRFDFPGRGNTHSSFKWRWYHFDGVDWDQSRRLNNRIYKFRGHGKAWDWEVDTENGNYDYLMYADYDMDHPEVVNELRNWGVWYTNTLGLDGFRIDAVKHIKYSFIRDWINHVRSATGKNMFAVAEFWKNDLGAIENYLQKTNWNHSVFDVPLHYNLYNASKSGGNYDMRNIFNGTVVQRHPSHAVTFVDNHDSQPEEALESFVEEWFKPLAYALTLTREQGYPSVFYGDYYGIPTHGVPAMRSKIDPILEARQKYAYGPQHDYLDHPDVIGWTREGDSSHPKSGLATLITDGPGGSKRMYAGLKNAGETWYDITGNRSDTVKIGSDGWGEFHVNDGSVSIYVQK

SEQ ID NO: 28922 - protein, 485 aa, Bacillus sp.
HHNGTNGTMMQYFEWYLPNDGNHWNRLNSDASNLKSKGITAVWIPPAWKGASQNDVGYGAYDLYDLGEFNQKGTIRTKYGTRSQLQAAVTSLKNNGIQVYGDVVMNHKGGADATEMVRAVEVNPNNRNQEVTGEYTIEAWTRFDFPGRGNTHSSFKWRWYHFDGVDWDQSRRLNNRIYKFRGHGKAWDWEVDTEFGNYDYLMYADYDMDHPEVVNELRNWGVWYTNTLGLDGFRIDAVKHIKYSFTRDWINHVRSATGKNMFAVAEFWKNDLGAIENYLQKTNWNHSVFDVPLHYNLYNASKSGGNYDMRNIFNGTVVQRHPSHAVTFVDNHDSQPEEALESFVEEWFKPLAYALTLTREQGYPSVFYGDYYGIPTHGVPAMRSKIDPILEARQKYAYGPQHDYLDHPDVIGWTREGDSSHPKSGLATLITDGPGGSKRMYAGLKNAGETWYDITGNRSDTVKIGSDGWGEFHVNDGSVSIYVQK

SEQ ID NO: 28923 - protein, 485 aa, Bacillus sp.
HHNGTNGTMMQYFEWYLPNDGNHWNRLNSDASNLKSKGITAVWIPPAWKGASQNDVGYGAYDLYDLGEFNQKGTVRTKYGTRSQLQAAVTSLKNNGIQVYGDVVMNHKGGADATEMVRAVEVNPNNRNQEVTGEYTIEAWTRFDFPGRGNTHSSFKWRWYHFDGMDWDQSRRLNNRIYKFRGHGKAWDWEVDTEFGNYDYLMYADYDMDHPEVVNELRNWGVWYTNTLGLDGFRIDAVKHIKYSFTRDWINHVRSATGKNMFAVAEFWKNDLGAIENYLQKTNWNHSVFDVPLHYNLYNASKSGGNYDMRNIFNGTVVQRHPSHAVTFVDNHDSQPEEALESFVEEWFKPLAYALTLTREQGYPSVFYGDYYGIPTHGVPAMRSKIDPILEARQKYAYGPQHDYLDHPDVIGWTREGDSSHPKSGLATLITDGPGGSKRMYAGLKNAGETWYDITGNRSDTVKIGSDGWGEFHVNDGSVSIYVQK

SEQ ID NO: 28924 - protein, 485 aa, Bacillus sp.
HHNGTNGTMMQYFEWYLPNDGNHWNRLNSDASNLKSKGITAVWIPPAWKGASQNDVGYGAYDLYDLGEFNQKGTVRTKYGTRSQLQAAVTSLKNNGIQVYGDVVMNHKGGADATEMVRAVEVNPNNRNQEVTGEYTIEAWTRFDFPGRGNTHSSFKWRWYHFDGVDWDQSRRLNNRIYKFRGHGKAWDWEVDTEFGNYDYLMYADYDMDHPEVVNELRNWGVWYTNTLGLDGFRIDAVKHIKYSFTRDWINHVRSATGKNMFAVAEFWKNDLGEIENYLQKTNWNHSVFDVPLHYNLYNASKSGGNYDMRNIFNGTVVQRHPSHAVTFVDNHDSQPEEALESFVEEWFKPLAYALTLTREQGYPSVFYGDYYGIPTHGVPAMRSKIDPILEARQKYAYGPQHDYLDHPDVIGWTREGDSSHPKSGLATLITDGPGGSKRMYAGLKNAGETWYDITGNRSDTVKIGSDGWGEFHVNDGSVSIYVQK

SEQ ID NO: 28925 - protein, 483 aa, Bacillus sp.
HHNGTNGTMMQYFEWYLPNDGNHWNRLNSDASNLKSKGITAVWIPPAWKAASQNDVGYGAYDLYDLGEFNQKGTVRTKYGTRSQLQAAVTSLKNNGIQVYGDVVMNHKGGADATEMVRAVEVNPNNRNQEVTGEYTIEAWTRFDFPGRGNTHSSFKWRWYHFDGVDWDQSRDVNNRIYKFRGKAWDWEVDTEFGNYDYLMYADYDMDHPEVVNELRNWGVWYTNTLGLDGFRIDAVKHIKYSFTRDWINHVRSATGKNMFAVAEFWKNDLGAIENYLQKTNWNHSVFDVPLHYNLYNASKSGGNYDMRNIFNGTVVQRHPSHAVTFVDNHDSQPEEALESFVEEWFKPLAYALTLTREQGYPSVFYGDYYGIPTHGVPAMRSKIDPILEARQKYAYGPQHDYLDHPDVIGWTREGDSSHPKSGLATLITDGPGGSKRMYAGLKNAGETWYDITGNRSDTVKIGSDGWGEFHVNDGSVSIYVQK

SEQ ID NO: 28926 - protein, 485 aa, Bacillus sp.
HHNGTNGTMMQYFEWYLPNDGNHWNRLNSDASNLKSKGITAVWIPPAWKGASQNDVGYGAYDLYDLGEFNQKGTFRTKYGTRSQLQAAVTSLKNNGIQVYGDVVMNHKGGADATEMVRAVEVNPNNRNQEVTGEYTIEAWTRFDFPGRGNTHSSFKWRWYHFDGVDWDQSRRLNNRIYKFRGHGKAWDWEVDTEFGNYDYLMYADYDMDHPEVVNELRNWGVWYTNTLGLDGFRIDAVKHIKYSFTRDWINHVRSATGKNMFAVAEFWKNDLGAIENYLQKTNWNHSVFDVPLHYNLYNASKSGGNYDMRNIFNGTVVQRHPSHAVTFVDNHDSQPEEALESFVEEWFKPLAYALTLTREQGYPSVFYGDYYGIPTHGVPAMRSKIDPILEARQKYAYGPQHDYLDHPDVIGWTREGDSSHPKSGLATLITDGPGGSKRMYAGLKNAGETWYDITGNRSDTVKIGSDGWGEFHVNDGSVSIYVQK

SEQ ID NO: 28927 - protein, 485 aa, Bacillus sp.
HHNGTNGTMMQYFEWYLPNDGNHWNRLNSDASNLKSKGITAVWIPPAWKGASQNDVGYGAYDLYDLGEFNQKGTVRTKYGTRSQLQAAVTSLKNNGIQVYGDVVMNHKGGADHTEMVRAVEVNPNNRNQEVTGEYTIEAWTRFDFPGRGNTHSSFKWRWYHFDGVDWDQSRRLNNRIYKFRGHGKAWDWEVDTEFGNYDYLMYADYDMDHPEVVNELRNWGVWYTNTLGLDGFRIDAVKHIKYSFTRDWINHVRSATGKNMFAVAEFWKNDLGAIENYLQKTNWNHSVFDVPLHYNLYNASKSGGNYDMRNIFNGTVVQRHPSHAVTFVDNHDSQPEEALESFVEEWFKPLAYALTLTREQGYPSVFYGDYYGIPTHGVPAMRSKIDPILEARQKYAYGPQHDYLDHPDVIGWTREGDSSHPKSGLATLITDGPGGSKRMYAGLKNAGETWYDITGNRSDTVKIGSDGWGEFHVNDGSVSIYVQK

SEQ ID NO: 28928 - protein, 485 aa, Bacillus sp.
HHNGTNGTMMQYFEWYLPNDGNHWNRLNSDASNLKSKGITAVWIPPAWKGASQNDVGYGAYDLYDLGEFNQKGTVRTKYGTRSQLQAAVTSLKNNGIQVYGDVVMNHKGGADATEMVRAVEVNPNNRNQEVTGEYTIEAWTRFDFPGRGNTHSSFKWRWYHFDGVDWDQSRRLNNRIYKFRGHGKAWDWEVDTEFGNYDYLMYADYDMDHPEVVNELRNWGVWYTNTLGLDGFRIDAVKHIKYSFTRDWINHVRSATGKNMFAVAEFWKNDLGAIENYLQKTNWNHSVFDVPLHYNLYNASKSGRNYDMRNIFNGTVVQRHPSHAVTFVDNHDSQPEEALESFVEEWFKPLAYALTLTREQGYPSVFYGDYYGIPTHGVPAMRSKIDPILEARQKYAYGPQHDYLDHPDVIGWTREGDSSHPKSGLATLITDGPGGSKRMYAGLKNAGETWYDITGNRSDTVKIGSDGWGEFHVNDGSVSIYVQK

SEQ ID NO: 28929 - protein, 485 aa, Bacillus sp.
HHNGTNATMMQYFEWYLPNDGNHWNRLNSDASNLKSKGITAVWIPPAWKGASQNDVGYGAYDLYDLGEFNQKGTVRTKYGTRSQLQAAVTSLKNNGIQVYGDVVMNHKGGADATEMVRAVEVNPNNRNQEVTGEYTIEAWTRFDFPGRGNTHSSFKWRWYHFDGVDWDQSRRLNNRIYKFRGHGKAWDWEVDTEFGNYDYLMYADYDMDHPEVVNELRNWGVWYTNTLGLDGFRIDAVKHIKYSFTRDWINHVRSATGKNMFAVAEFWKNDLGAIENYLQKTNWNHSVFDVPLHYNLYNASKSGGNYDMRNIFNGTVVQRHPSHAVTFVDNHDSQPEEALESFVEEWFKPLAYALTLTREQGYPSVFYGDYYGIPTHGVPAMRSKIDPILEARQKYAYGPQHDYLDHPDVIGWTREGDSSHPKSGLATLITDGPGGSKRMYAGLKNAGETWYDITGNRSDTVKIGSDGWGEFHVNDGSVSIYVQK

SEQ ID NO: 28930 - protein, 485 aa, Bacillus sp.
HHNGTNGTMMQYFEWYLPNDGNHWNRLNSDASNLKSKGITAVWIPPAWKGASQNDVGYGAYDLYDLGEFNQKGTVRTKYGTRSQLQAAVTSLKNNGIQVYGDVVMNHKGGADATEMVRAVEVNPNNRNQEVTGEYTIEAWTRFDFPGRGNTHSSFKWRWYHFDGVDWDQSRRLNNRIYKFRGHGKAWDWEVDTEFGNYDYLMYADYDMDHPEVVNELRNWGVWYTNTLGLDGFRIDAVKHIKYSFTRDWINHVRSATGKNMFAVAEFWRNDLGAIENYLQKTNWNHSVFDVPLHYNLYNASKSGGNYDMRNIFNGTVVQRHPSHAVTFVDNHDSQPEEALESFVEEWFKPLAYALTLTREQGYPSVFYGDYYGIPTHGVPAMRSKIDPILEARQKYAYGPQHDYLDHPDVIGWTREGDSSHPKSGLATLITDGPGGSKRMYAGLKNAGETWYDITGNRSDTVKIGSDGWGEFHVNDGSVSIYVQK

SEQ ID NO: 28931 - protein, 485 aa, Bacillus sp.
HHNGTNGTMMQYFEWYLPNDGNHWNRLNSDASNLKSKGITAVWIPPAWKGASQNDVGYGAYDLYDLGEFNQKGTVRTKYGTRSQLQAAVTSLKNNGIQVYGDVVMNHKGGADATEMVRAVEVNPNNRNQEVTGEYTIEAWTRFDFPGRGNTHSSFKWRWYHFDGVDWDQSRRLNNRIYKFRGHGKAWDWEVDTEFGNYDYLMYADYDMDHPEVVNELRNWGVWYTNTLGLDGFRIDAVKHIKPSFTRDWINHVRSATGKNMFAVAEFWKNDLGAIENYLQKTNWNHSVFDVPLHYNLYNASKSGGNYDMRNIFNGTVVQRHPSHAVTFVDNHDSQPEEALESFVEEWFKPLAYALTLTREQGYPSVFYGDYYGIPTHGVPAMRSKIDPILEARQKYAYGPQHDYLDHPDVIGWTREGDSSHPKSGLATLITDGPGGSKRMYAGLKNAGETWYDITGNRSDTVKIGSDGWGEFHVNDGSVSIYVQK

SEQ ID NO: 28932 - protein, 483 aa, Bacillus sp.
HHNGTNGTMMQYFEWYLPNDGNHWNRLNSDASNLKSKGITAVWIPPAWKGASQNDVGYGAYDLYDLGEFNQKGTVRTKYGTRSQLQAAVTSLKNNGIQVYGDVVMNHKGGADATEMVRAVEVNPNNRNQEVTGEYTIEAWTRFDFPGRGNTHSSFKWRWYHFDGVDWDQSRDTDNRIYKFRGKAWDWEVDTEFGNYDYLMYTDYDMDHPEVVNELRNWGVWYTNTLGLDGFRIDAVKHIKYSFTRDWINHVRSATGKNMFAVAEFWKNDLGAIENYLQKTNWNHSVFDVPLHYNLYNASKSGGNYDMRNIFNGTVVQRHPSHAVTFVDNHDSQPEEALESFVEEWFKPLAYALTLTREQGYPSVFYGDYYGIPTHGVPAMRSKIDPILEARQKYAYGPQHDYLDHPDVIGWTREGDSSHPKSGLATLITDGPGGSKRMYAGLKNAGETWYDITGNRSDTVKIGSDGWGEFHVNDGSVSIYVQK

SEQ ID NO: 28933 - protein, 483 aa, Bacillus sp.
HHNGTNGTMMQYFEWYLPNDGNHWNRLNSDASNLKSKGITAVWIPPAWKAVSQNDVGYGAYDLYDLGEFNQKGTVRTKYGTRSQLQAAVTSLKNNGIQVYGDVVMNHKGGADATEMVRAVEVNPNNRNQEVTGEYTIEAWTRFDFPGRGNTHSSFKWRWYHFDGVDWDQSRRFDNRIYKFRGKAWDWEVDTEFGNYDYLMYADYDMDHPEVVNELRNWGVWYTNTLGLDGFRIDAVKHIKYSFTRDWINHVRSATGKNMFAVAEFWKNDLGAIENYLQKTNWNHSVFDVPLHYNLYNASKSGGNYDMRNIFNGTVVQANPNHAVTFVDNHDSQPEEALESFVEEWFKPLAYALTLTREQGYPSVFYGDYYGIPTHGVPAMRSKIDPILEARQKYAYGPQHDYLDHPDVIGWTREGDSSHPKSGLATLITDGPGGSKRMYAGLKNAGETWYDITGNRSDTVKIGSDGWGEFHVNDGSVSIYVQK

SEQ ID NO: 28934 - protein, 485 aa, Bacillus sp.
HHNGTNGTMMQYFEWYLPNDGNHWNRLNSDASNLKSKGITAVWIPPAWKATSQNDVGYGAYDLYDLGEFNQKGTVRTKYGTRSQLQAAVTSLKNNGIQVYGDVVMNHKGGADLTEMVRAVEVNPNNRNQEVTGEYTIEAWTRFDFPGRGNTHSSFKWRWYHFDGVDWDQSRNVNNRIYKFRGHGKAWDWEVDTEFGNYDYLMYADYDMDHPEVVNELRNWGVWYTNTLGLDGFRIDAVKHIKYSFTRDWINHVRSATGKNMFAVAEFWKNDLGAIENYLQKTNWNHSVFDVPLHYNLYNASKSGGNYDMRNIFNGTVVQRHPSHAVTFVDNHDSQPEEALESFVEEWFKPLAYALTLTREQGYPSVFYGDYYGIPTHGVPAMRSKIDPILEARQKYAYGPQHDYLDHPDVIGWTREGDSSHPKSGLATLITDGPGGSKRMYAGLKNAGETWYDITGNRSDTVKIGSDGWGEFHVNDGSVSIYVQK

SEQ ID NO: 28935 - protein, 483 aa, Bacillus sp.
HHNGTNGTMMQYFEWYLPNDGNHWNRLNSDASNLKSKGITAVWIPPAWKGASQNDVGYGAYDLYDLGEFNQKGTVRTKYGTRSQLQAAVTSLKNNGIQVYGDVVMNHKGGADATEMVRAVEVNPNNRNQEVTGEYTIEAWTRFDFPGRGNTHSSFKWRWYHFDGVDWDQSRRLNNRIYKFRGKAWDWEVDTEFGNYDYLMYADYDMDHPEVVNELRNWGVWYTNTLGLDGFRIDAVKHIKYSFTRDWINHVRSATGKNMFAVAEFWKNDLGAIENYLQKTNWNHSVFDVPLHYNLYNASKSGGNYDMRNIFNGTVVQRHPSHAVTFVDNHDSQPEEALESFVEEWFKPLAYALTLTREQGYPSVFYGDYYGIPTHGVPAMRSKIDPILEARQKYAYGPQHDYLDHPDVIGWTREGDSSRPKSGLATLITDGPGGSKRMYAGLKNAGETWYDITGNRSDTVKIGSDGWGEFHVNDGSVSIYVQK

SEQ ID NO: 28936 - protein, 483 aa, Bacillus sp.
HHNGTNNTMMQYFEWYLPNDGNHWNRLNSDASNLKSKGITAVWIPPAWKGASQNDVGYGAYDLYDLGEFNQKGTVRTKYGTRSQLQAAVTSLKNNGIQVYGDVVMNHKGGADATEMVRAVEVNPNNRNQEVTGEYTIEAWTRFDFPGRGNTHSSFKWRWYHFDGVDWDQSRRLNNRIYKFRGKAWDWEVDTEFGNYDYLMYADYDMDHPEVVNELRNWGVWYTNTLGLDGFRIDAVKHIKYSFTRDWINHVRSATGKNMFAVAEFWKNDLGAIENYLQKTNWNHSVFDVPLHYNLYNASKSGGNYDMRNIFNGTVVQAHPNHAVTFVDNHDSQPEEALESFVEEWFKPLAYALTLTREQGYPSVFYGDYYGIPTHGVPAMRSKIDPILEARQKYAYGPQHDYLDHPDVIGWTREGDSSHPKSGLATLITDGPGGSKRMYAGLKNAGETWYDITGNRSDTVKIGSDGWGEFHVNDGSVSIYVQK

SEQ ID NO: 28937 - protein, 485 aa, Bacillus sp.
HHNGTNGTMMQYFEWYLPNDGNHWNRLNSDASNLKSKGITAVWIPPAWKGASQNDVGYGAYDLYDLGEFNQKGTVRTKYGTRSQLQAAVTSLKNNGIQVYGDVVMNHKGGADATEMVRAVEVNPNNRNQEVTGEYTIEAWTRFDFPGRGNTHSSFKWRWYHFDGVDWDQSRRLDNRIYKFRGHGKAWDWEVDTEFGNYDYLMYTDYDMDHPEVVNELRNWGVWYTNTLGLDGFRIDAVKHIKYSFTRDWINHVRSATGKNMFAVAEFWKNDLGAIENYLQKTNWNHSVFDVPLHYNLYNASKSGGNYDMRNIFNGTVVQVHPSHAVTFVDNHDSQPEEALESFVEEWFKPLAYALTLTREQGYPSVFYGDYYGIPTHGVPAMRSKIDPILEARQKYAYGPQHDYLDHPDVIGWTREGDSSHPKSGLATLITDGPGGSKRMYAGLKNAGETWYDITGNRSDTVKIGSDGWGEFHVNYGSVSIYVQK

SEQ ID NO: 28938 - protein, 483 aa, Bacillus sp.
HHNGTNGTMMQYFEWYLPNDGNHWNRLNSDASNLKSKGITAVWIPPAWKGASQNDVGYGAYDLYDLGEFNQKGTVRTKYGTRSQLQAAVTSLKNNGIVVYGDVVMNHKGGADATEMVRAVEVNPNNRNQEVTGEYTIEAWTRFDFPGRGNTHSSFKWRWYHFDGVDWDQSRRLNNRIYKFRGKAWDWEVDTEFGNYDYLMYADYDMDHPEVVNELRNWGVWYTNTLGLDGFRIDAVKHIKYSFTRDWINHVRSATGKNMFAVAEFWKNDLGAIENYLQKTNWNHSVFDVPLHYNLYNASKSGGNYDMRNIFNGTVVQRHPSHAVTFVDNHDSQPEEALESFVEEWFKPLAYALTLTREQGYPSVFYGDYYGIPTHGVPAMRSKIDPILEARQKYAYGPQHDYLDHPDVIGWTREGDSSHPKSGLATLITDGPGGSKRMYAGLKNAGETWYDITGNRSDTVKIGSDGWGEFHVNDGSVSIYVQK

SEQ ID NO: 28939 - protein, 485 aa, Bacillus sp.
HHNGTNGTMMQYFEWYLPNDGNHWNRLNSDASNLKSKGIKAVWIPPAWKGASQNDVGYGAYDLYDLGEFNQRGTVRTKYGTRSQLQAAVTSLKNNGIQVYGDVVMNHKGGADATEMVRAVEVNPNNRNQEVTGEYTIEAWTRFDFPGRGNTHSSFKWRWYHFDGVDWDQSRNFQNRIYKFRGHGKAWDWEVDTEFGNYDYLMYADYDMDHPEVVNELRNWGVWYTNTLGLDGFRIDAVKHIKYSFTRDWINHVRSATGKNMFAVAEFWKNDLGAIENYLQKTNWNHSVFDVPLHYNLYNASKSQGNYDMRNIFNGTVVQRHPSHAVTFVDNHDSQPEEALESFVDTWFKPLAYALTLTREQGYPSVFYGDYYGIPTHGVPAMRSKIDPILEARQKYAYGPQHDYLDHPDVIGWTREGDSSHPKSGLATLITDGPGGSKRMYAGLKNAGETWYDITGNRSDTVKIGSDGWGEFHVNGGSVSIYVQK

SEQ ID NO: 28940 - protein, 485 aa, Bacillus sp.
HHNGTNGTMMQYFEWYLPNDGNHWNRLNSDASNLKSKGITAVWIPPAWKGASQNDVGYGAYDLYDLGEFNQKGTVRTKYGTRSQLQAAVTSLKNNGINVYGDVVMNHKGGADATEMVRAVEVNPNNRNQEVTGEYTIEAWTRFDFPGRGNTHSSFKWRWYHFDGVDWDQSRRLNNRIYKFRGHGKAWDWEVDTEFGNYDYLMYADYDMDHPEVVNELRNWGVWYTNTLGLDGFRIDAVKHIKYSFTRDWINHVRSATGKNMFAVAEFWKNDLGAIENYLQKTNWNHSVFDVPLHYNLYNASKSGGNYDMRNIFNGTVVQSHPNHAVTFVDNHDSQPEEALESFVEEWFKPLAYALTLTREQGYPSVFYGDYYGIPTHGVPAMRSKIDPILEARQKYAYGPQHDYLDHPDVIGWTREGDSSHPKSGLATLITDGPGGSKRMYAGLKNAGETWYDITGNRSDTVKIGSDGWGEFHVNDGSVSIYVQK

SEQ ID NO: 28941 - protein, 483 aa, Bacillus sp.
HHNGTNGTMMQYFEWYLPNDGNHWNRLNSDASNLKSKGITAVWIPPAWKGASQNDVGYGAYDLYDLGEFNQKGTVRTKYGTRSQLQAAVTSLKNNGIQVYGDVVMNHKGGADATEMVRAVEVNPNNRNQEVTGEYTIEAWTRFDFPGRGNTHSSFKWRWYHFDGVDWDMSRRLNNRIYKFRGKAWDWEVDTEFGNYDYLMYADYDMDHPEVVNELRNWGVWYTNTLGLDGFRIDAVKHIKYSFTRDWINHVRSATGKNMFAVAEFWKNDLGAIENYLQKTNWNHSVFDVPLHYNLYNASKSGGNYDMRNIFNGTVVQRHPSHAVTFVDNHDSQPEEALESFVEEWFKPLAYALTLTREQGYPSVFYGDYYGIPTHGVPAMRSKIDPILEARQKYAYGPQHDYLDHPDVIGWTREGDSSHPKSGLATLITDGPGGSKRMYAGLKNAGETWYDITGNRSDTVKIGSDGWGEFHVNDGSVSIYVQK

SEQ ID NO: 28942 - protein, 485 aa, Bacillus sp.
HHNGTNGTMMQYFEWYLPNDGNHWNRLNSDASNLKSKGITAVWIPPAWKAVSQNDVGYGAYDLYDLGEFNQKGTVRTKYGTRSQLQAAVTSLKNNGIQVYGDVVMNHKGGADATEMVRAVEVNPNNRNQEVTGEYTIEAWTRFDFPGRGNTHSSFKWRWYHFDGVDWDQSRRFDNRIYKFRGHGKAWDWEVDTEFGNYDYLMYADYDMDHPEVVNELRNWGVWYTNTLGLDGFRIDAVKHIKYSFTRDWINHVRSATGKNMFAVAEFWKNDLGAIENYLQKTNWNHSVFDVPLHYNLYNASKSGGNYDMRNIFNGTVVQANPNHAVTFVDNHDSQPEEALESFVEEWFKPLAYALTLTREQGYPSVFYGDYYGIPTHGVPAMRSKIDPILEARQKYAYGPQHDYLDHPDVIGWTREGDSSHPKSGLATLITDGPGGSKRMYAGLKNAGETWYDITGNRSDTVKIGSDGWGEFHVNDGSVSIYVQK

SEQ ID NO: 28943 - protein, 485 aa, Bacillus sp.
HHNGTNGTMMQYFEWYLPNDGNHWNRLNSDASNLKSKGITAVWIPPAWKGASQNDVGYGAYDLYDLGEFNQKGTVRTKYGTRSQLQAAVTSLKNNGIQVYGDVVMNHKGGADATEMVRAVEVNPNNRNQEVTGEYTIEAWTRFDFPGRGNTHSSFKWRWYHFDGVDWDQSRKLSNRIYKFRGHGKAWDWEVDTEFGNYDYLMYGDYDMDHPEVVNELRNWGVWYTNTLGLDGFRIDAVKHIKYSFTRDWINHVRSATGKNMFAVAEFWKNDLGAIENYLQKTNWNHSVFDVPLHYNLYNASKSGGNYDMRNIFNGTVVQRHPSHAVTFVDNHDSQPEEALESFVEEWFKPLAYALTLTREQGYPSVFYGDYYGIPTHGVPAMRSKIDPILEARQKYAYGPQHDYLDHPDVIGWTREGDSSHPKSGLATLITDGPGGSKRMYAGLKNAGETWYDITGNRSDTVKIGSDGWGEFHVNDGSVSIYVQK

SEQ ID NO: 28944 - protein, 485 aa, Bacillus sp.
HHNGTNGTMMQYFEWYLPNDGNHWNRLNSDASNLKSKGITAVWIPPAWKGASQNDVGYGAYDLYDLGEFNQKGTVRTKYGTRSQLQAAVTSLKNNGIQVYGDVVMNHKGGADATEMVRAVEVNPNNRNQEVTGEYTIEAWTRFDFPGRGNTHSSFKWGWYHFDGVDWDQSRRLENRIYKFRGHGKAWDWEVDTEFGNYDYLMYADYDMDHPEVVNELRNWGVWYTNTLGLDGFRIDAVKHIKYSFTRDWINHVRSATGKNMFAVAEFWKNDLGAIENYLQKTNWNHSVFDVPLHYNLYNASKSGGNYDMRNIFNGTVVQRHPSHAVTFVDNHDSQPEEALESFVEEWFKPLAYALTLTREQGYPSVFYGDYYGIPTHGVPAMRSKIDPILEARQKYAYGPQHDYLDHPDVIGWTREGDSSHPKSGLATLITDGPGGSKRMYAGLKNAGETWYDITGNRSDTVKIGSDGWGEFHVNDGSVSIYVQK

SEQ ID NO: 28945 - protein, 485 aa, Bacillus sp.
HHNGTNNTMMQYFEWYLPNDGNHWNRLNSDASNLKSKGITAVWIPPAWKGASQNDVGYGAYDLYDLGEFNQKGTVRTKYGTRSQLQAAVTSLKNNGIQVYGDVVMNHKGGADATEMVRAVEVNPNNRNQEVTGEYTIEAWTRFDFPGRGNTHSSFKWRWYHFDGVDWDQSRRLNNRIYKFRGHGKAWDWEVDTEFGNYDYLMYADYDMDHPEVVNELRNWGVWYTNTLGLDGFRIDAVKHIKYSFTRDWINHVRSATGKNMFAVAEFWKNDLGAIENYLQKTNWNHSVFDVPLHYNLYNASKSGGNYDMRNIFNGTVVQRHPSHAVTFVDNHDSQPEEALESFVEEWFKPLAYALTLTREQGYPSVFYGDYYGIPTHGVPAMRSKIDPILEARQKYAYGPQHDYLDHPDVIGWTREGDSSHPKSGLATLITDGPGGSKRMYAGLKNAGETWYDITGNRSDTVKIGSDGWGEFHVNDGSVSIYVQK

SEQ ID NO: 28946 - protein, 485 aa, Bacillus sp.
HHNGTNGTMMQYFEWYLPNDGNHWNRLNSDASNLKSKGITAVWIPPAWKGASQNDVGYGAYDLYDLGEFNQKGTVRTKYGTRSQLQAAVTSLKNNGISVYGDVVMNHKGGADATEMVRAVEVNPNNRNQEVTGEYTIEAWTRFDFPGRGNTHSSFKWRWYHFDGVDWDQSRRLNNRIYKFRGHGKAWDWEVDTEFGNYDYLMYADYDMDHPEVVNELRNWGVWYTNTLGLDGFRIDAVKHIKYSFTRDWINHVRSATGKNMFAVAEFWKNDLGAIENYLQKTNWNHSVFDVPLHYNLYNASKSGGNYDMRNIFNGTVVQAHPSHAVTFVDNHDSQPEEALESFVEEWFKPLAYALTLTREQGYPSVFYGDYYGIPTHGVPAMRSKIDPILEARQKYAYGPQHDYLDHPDVIGWTREGDSSHPKSGLATLITDGPGGSKRMYAGLKNAGETWYDITGNRSDTVKIGSDGWGEFHVNDGSVSIYVQK

SEQ ID NO: 28947 - protein, 485 aa, Synthetic construct
HHNGTNGTMMQYFEWYLPNDGNHWNRLNSDASNLKSKGITAVWIPPAWKGASQNDVGYGAYDVYDLGEFNQKGTVRTKYGTRSQLQAAVTSLKNNGIQVYGDVVMNHKGGADATEMVRAVEVNPNNRNQEVTGEYTIEAWTRFDFPGRGNTHSSFKWRWYHFDGVDWDQSRRLNNRIYKFRGHGKAWDWEVDTENGNYDYLMYADLDMDHPEVVNEVRNWGVWYTNTLGLDGFRIDAVKHIKYSFTRDWINHVRSATGKNMFAVAEFWKNDLGAIENYLQKTNWNHSVFDVPLHYNLYNASKSGGNYDMRNIFNGTVVQRHPSHAVTFVDNHDSQPEEALESFVEEWFKPLAYALTLTREQGYPSVFYGDYYGIPTHGVPAMRSKIDPILEARQKYAYGPQHDYLDHPDVIGWTREGDSSHPKSGLATLITDGPGGSKRMYAGLKNAGETWYDITGNRSDTVKIGSDGWGEFHVNDGSVSIYVQK

SEQ ID NO: 28948 - protein, 483 aa, Synthetic construct
HHNGTNGTMMQYFEWYLPNDGNHWNRLNSDASNLKSKGITAVWIPPAWKGASQNDVGYGAYDVYDLGEFNQKGTVRTKYGTRSQLQAAVTSLKNNGIQVYGDVVLNHKGGADATEMVRAVEVNPNNRNQEVTGEYTIEAWTRFDFPGRGNTHSSFKWRWYHFDGVDWDQSRRLNNRIYKFRGKAWDWEVDTENGNYDYLMYADYDMDHPEVVNELRNWGVWYTNTLGLDGFRIDAVKHIKYSFTRDWINHVRSATGKNMFAVAEFWKNDLGAIENYLQKTNWNHSVFDVPLHYNLYNASKSGGNYDMRNIFNGTVVQRHPSHAVTFVDNHDSQPEEALESFVEEWFKPLAYALTLTREQGYPSVFYGDYYGIPTHGVPAMRSKIDPILEARQKYAYGPQHDYLDHPDVIGWTREGDSSHPKSGLATLITDGPGGSKRMYAGLKNAGETWYDITGNRSDTVKIGSDGWGEFHVNDGSVSIYVQK

SEQ ID NO: 28949 - protein, 485 aa, Bacillus sp.
HHNGTNGTMMQYFEWYLPNDGNHWNRLNSDASNLKSKGITAVWIPPAWKGASQNDVGYGAYDLYDLGEFNQKGTVRTKYGTRSQLQAAVTSLKNNGIQVYGDVVMNHKGGADATEMVRAVEVNPNNRNQEVTGEYTIEAWTRFDFPGRGNTHSSFKWRWYHFDGVDWDQSRRLNNRIYKFRGHGKAWDWEVDTEFGNYDYLMYADYDMDHPEVVNELRNWGVWYTNTLGLDGFRIDAVKHIKYSFTRDWINHVRSATGKNMFAVAEFWKNDLGAIENYLQKTNWNHSVFDVPLHYNLYNASKSGGNYDMRNIFNGTVVQRHPSHAVTFVDNHDSQPEEALESFVETWFKPLAYALTLTREQGYPSVFYGDYYGIPTHGVPAMRSKIDPILEARQKYAYGPQHDYLDHPDVIGWTREGDSSHPKSGLATLITDGPGGSKRMYAGLKNAGETWYDITGNRSDTVKIGSDGWGEFHVNGTSVSIYVQK

SEQ ID NO: 28950 - protein, 485 aa, Bacillus sp.
HHNGTNGTMMQYFEWYLPNDGNHWNRLNSDASNLKSKGIKAVWIPPAWKGASQNDVGYGAYDLYDLGEFNQKGTVRTKYGTRSQLQAAVTSLKNNGIQVYGDVVMNHKGGADATEMVRAVEVNPNNRNQEVTGEYTIEAWTRFDFPGRGNTHSSFKWRWYHFDGVDWDQSRRLNNRIYKFRGHGKAWDWEVDTEFGNYDYLMYADYDMDHPEVVNELRNWGVWYTNTLGLDGFRIDAVKHIKYSFTRDWINHVRSATGKNMFAVAEFWKNDLGAIENYLQKTNWNHSVFDVPLHYNLYNASKSGGNYDMRNIFNGTVVQRHPSHAVTFVDNHDSQPEEALESFVEEWFKPLAYALTLTREQGYPSVFYGDYYGIPTHGVPAMRSKIDPILEARQKYAYGPQHDYLDHPDVIGWTREGDSSHPKSGLATLITDGPGGSKRMYAGLKNAGETWYDITGNRSDTVKIGSDGWGEFHVNDGSVSIYVQK

SEQ ID NO: 28951 - protein, 483 aa, Bacillus sp.
HHNGTNGTMMQYFEWYLPNDGNHWNRLNSDASNLKSKGITAVWIPPAWKGASQNDVGYGAYDLYDLGEFNQKGTVRTKYGTRSQLQAAVTSLKNNGIQVYGDVVMNHKGGADATEMVRAVEVNPNNRNQEVTGEYTIEAWTRFDFPGRGNTHSSFKWRWYHFDGVDWDQSRRLNNRIYKFRGKAWDWEVDTEFGNYDYLMYADYDMDHPEVVNELRNWGVWYTNTLGLDGFRIDAVKHIKYSFTRDWINHVRSATGKNMFAVAEFWKNDLGAIENYLQKTNWNHSVFDVPLHYNLYNASKSGGNYDMRNIFNGTVVQRHPSHAVTFVDNHDSQPEEALESFVETWFKPLAYALTLTREQGYPSVFYGDYYGIPTHGVPAMRSKIDPILEARQKYAYGPQHDYLDHPDVIGWTREGDSSHPKSGLATLITDGPGGSKRMYAGLKNAGETWYDITGNRSDTVKIGSDGWGEFHVNDGSVSIYVQK

SEQ ID NO: 28952 - protein, 485 aa, Bacillus sp.
HHNGTNGTMMQYFEWYLPNDGNHWNRLNSDASNLKSKGITAVWIPPAWKGASQNDVGYGAYDLYDLGEFNQKGTVRTKYGTRSQLQAAVTSLKNNGIQVYGDVVMNHKGGADATEMVRAVEVNPNNRQQEVTGEYTIEAWTRFDFPGRGNTHSSFKWRWYHFDGVDWDQSRRLNNRIYKFRGHGKAWDWEVDTEFGNYDYLMYADYDMDHPEVVNELRNWGVWYTNTLGLDGFRIDAVKHIKYSFTRDWINHVRSATGKNMFAVAEFWKNDLGAIENYLQKTNWNHSVFDVPLHYNLYNASKSGGNYDMRNIFNGTVVQRHPSHAVTFVDNHDSQPEEALESFVEEWFKPLAYALTLTREQGYPSVFYGDYYGIPTHGVPAMRSKIDPILEARQKYAYGPQHDYLDHPDVIGWTREGDSSHPKSGLATLITDGPGGSKRMYAGLKNAGETWYDITGNRSDTVKIGSDGWGEFHVNDGSVSIYVQK

SEQ ID NO: 28953 - protein, 485 aa, Bacillus sp.
HHNGTNGTMMQYFEWYLPNDGNHWNRLNSDASNLKSKGITAVWIPPAWKGASQNDVGYGAYDLYDLGEFNQKGTVRTKYGTRSQLQAAVTSLKNNGIQVYGDVVMNHKGGADATEMVRAVEVNPNNRNQEVTGEYTIEAWTRFDFPGRGNTHSSFKWRWYHFDGVDWDQSRRLNNRIYAFRGHGKAWDWEVDTEFGNYDYLMYADYDMDHPEVVNELRNWGVWYTNTLGLDGFRIDAVKHIKYSFTRDWINHVRSATGKNMFAVAEFWKNDLGAIENYLQKTNWNHSVFDVPLHYNLYNASKSGGNYDMRNIFNGTVVQRHPSHAVTFVDNHDSQPEEALESFVEEWFKPLAYALTLTREQGYPSVFYGDYYGIPTHGVPAMRSKIDPILEARQKYAYGPQHDYLDHPDVIGWTREGDSSHPKSGLATLITDGPGGSKRMYAGLKNAGETWYDITGNRSDTVKIGSDGWGEFHVNDGSVSIYVQK

SEQ ID NO: 28954 - protein, 485 aa, Bacillus sp.
HHNGTNGTMMQYFEWYLPNDGNHWNRLNSDASNLKSKGITAVWIPPAWKGASQNDVGYGAYDLYDLGEFNQKGTVRTKYGTRSQLQAAVTSLKNNGIQVYGDVVMNHKGGADATEMVRAVEVNPNNRNQEVTGEYTIEAWTRFDFPGRGNTHSSFKWRWYHFDGVDWDQSRRTTNRIYKFRGHGKAWDWEVDTEFGNYDYLMYTDYDMDHPEVVNELRNWGVWYTNTLGLDGFRIDAVKHIKYSFTRDWINHVRSATGKNMFAVAEFWKNDLGAIENYLQKTNWNHSVFDVPLHYNLYNASKSGGNYDMRNIFNGTVVQRHPSHAVTFVDNHDSQPEEALESFVEEWFKPLAYALTLTREQGYPSVFYGDYYGIPTHGVPAMRSKIDPILEARQKYAYGPQHDYLDHPDVIGWTREGDSSHPKSGLATLITDGPGGSKRMYAGLKNAGETWYDITGNRSDTVKIGSDGWGEFHVNDGSVSIYVQK

SEQ ID NO: 28955 - protein, 485 aa, Bacillus sp.
HHNGTNGTMMQYFEWYLPNDGNHWNRLNSDASNLKSKGITAVWIPPAWKAASQNDVGYGAYDLYDLGEFNQKGTVRTKYGTRSQLQAAVTSLKNNGIQVYGDVVMNHKGGADATEMVRAVEVNPNNRNQEVTGEYTIEAWTRFDFPGRGNTHSSFKWRWYHFDGVDWDQSRDLQNRIYKFRGHGKAWDWEVDTEFGNYDYLMYADYDMDHPEVVNELRNWGVWYTNTLGLDGFRIDAVKHIKYSFTRDWINHVRSATGKNMFAVAEFWKNDLGAIENYLQKTNWNHSVFDVPLHYNLYNASKSGGNYDMRNIFNGTVVQANPNHAVTFVDNHDSQPEEALESFVEEWFKPLAYALTLTREQGYPSVFYGDYYGIPTHGVPAMRSKIDPILEARQKYAYGPQHDYLDHPDVIGWTREGDSSHPKSGLATLITDGPGGSKRMYAGLKNAGETWYDITGNRSDTVKIGSDGWGEFHVNDGSVSIYVQK

SEQ ID NO: 28956 - protein, 483 aa, Bacillus sp.
HHNGTNGTMMQYFEWYLPNDGNHWNRLNSDASNLKSKGITAVWIPPAWKGASQNDVGYGAYDLYDLGEFNQKGTVRTKYGTRSQLQAAVTSLKNNGIQVYGDVVMNHKGGADATEMVRAVEVNPNNRNQEVTGEYTIEAWTRFDFPGRGNTHSSFKWRWQHFDGVDWDQSRRLNNRIYKFRGKAWDWEVDTEFGNYDYLMYADYDMDHPEVVNELRNWGVWYTNTLGLDGFRIDAVKHIKYSFTRDWINHVRSATGKNMFAVAEFWKNDLGAIENYLQKTNWNHSVFDVPLHYNLYNASKSGGNYDMRNIFNGTVVQRHPSHAVTFVDNHDSQPEEALESFVEEWFKPLAYALTLTREQGYPSVFYGDYYGIPTHGVPAMRSKIDPILEARQKYAYGPQHDYLDHPDVIGWTREGDSSHPKSGLATLITDGPGGSKRMYAGLKNAGETWYDITGNRSDTVKIGSDGWGEFHVNDGSVSIYVQK

SEQ ID NO: 28957 - protein, 485 aa, Bacillus sp.
HHNGTNGTVMQYFEWYLPNDGNHWNRLNSDASNLKSKGITAVWIPPAWKGASQNDVGYGAYDLYDLGEFNQKGTVRTKYGTRSQLQAAVTSLKNNGIQVYGDVVMNHKGGADATEMVRAVEVNPNNRNQEVTGEYTIEAWTRFDFPGRGNTHSSFKWRWYHFDGVDWDQSRRLNNRIYKFRGHGKAWDWEVDTEFGNYDYLMYADYDMDHPEVVNELRNWGVWYTNTLGLDGFRIDAVKHIKYSFTRDWINHVRSATGKNMFAVAEFWKNDLGAIENYLQKTNWNHSVFDVPLHYNLYNASKSGGNYDMRNIFNGTVVQRHPSHAVTFVDNHDSQPEEALESFVEEWFKPLAYALTLTREQGYPSVFYGDYYGIPTHGVPAMRSKIDPILEARQKYAYGPQHDYLDHPDVIGWTREGDSSHPKSGLATLITDGPGGSKRMYAGLKNAGETWYDITGNRSDTVKIGSDGWGEFHVNDGSVSIYVQK

SEQ ID NO: 28958 - protein, 483 aa, Bacillus sp.
HHNGTNGTMMQYFEWYLPNDGNHWNRLNSDASNLKSKGITAVWIPPAWKGASQNDVGYGAYDLYDLGEFNQKGTVRTKYGTRSQLQAAVTSLKNNGIQVYGDVVMNHKGGADATEMVRAVEVNPNNRNQEVTGEYTIEAWTRFDFPGRGNTHSSFKWRWYHFDGVDWDQSRRLNNRIYKFRGKAWDWEVDTEFGNYDYLMYADYDMDHPEVVNELRNWGVWYTNTLGLDGFRIDAVKHIKYSFTRDWINHVRSATGKNMFAVAEFWKNDLGAIENYLQKTNWNHSVFDVPLHYNLYNASKSGGNYDMRNIFNGTVVQRHPSHAVTFVDNHDSQPEEALESFVEEWFKPLAYALTLTREQGYPSVFYGDYYGIPTHGVPAMRSKIDPILHARQKYAYGPQHDYLDHPDVIGWTREGDSSHPKSGLATLITDGPGGSKRMYAGLKNAGETWYDITGNRSDTVKIGSDGWGEFHVNDGSVSIYVQK

SEQ ID NO: 28959 - protein, 483 aa, Bacillus sp.
HHNGTNGTMMQYFEWYLPNDGNHWNRLNSDASNLKSKGITAVWIPPAWKGASQNDVGYGAYDLYDLGEFNQKGTVRTKYGTRSQLQAAVTSLKNNGIQVYGDVVMNHKGGADATEMVRAVEVNPNNRNQEVTGEYTIEAWTRFDFPGRGNTHSSFKWRWYHFDGVDWDQSRRLNNRIYKFRGKAWDWEVDTEFGNYDYLMYADYDMDHPEVVNELRNWGVWYTNTLGLDGFRIDAVKHIKYSFTRDWINHVRSATGKNMFAVAEFWKNDLGAIENYLQKTNWNHSVFDVPLHYNLYNASKSGGNYDMRNIFNGTVVQRHPSHAVTFVDNHDSQPEEALESFVETWFKPLAYALTLTREQGYPSVFYGDYYGIPTHGVPAMRSKIDPILEARQKYAYGPQHDYLDHPDVIGWTREGDSSHPKSGLATLITDGPGGSKRMYAGLKNAGETWYDITGNRSDTVKIGSDGWGEFHVNQGSVSIYVQK

SEQ ID NO: 28960 - protein, 483 aa, Bacillus sp.
HHNGTNGTMMQYFEWYLPNDGNHWNRLNSDASNLKSKGITAVWIPPAWKGASQNDVGYGAYDLYDLGEFNQKGTVRTKYGTRSQLQAAVTSLKNNGIQVYGDVVMNHKGGADATEMVRAVEVNPNNRNQEVTGEYTIEAWTRFDFPGRGNTHSSFKWRWYHFDGVDWDQSRRLNNRIYKFRGKAWDWEVDTEFGNYDYLMYADYDMDHPEVVNELRNWGVWYTNTLGLDGFRIDAVKHIKYSFTRDWINHVRSATGKNMFAVAEFWKNDLGAIENYLQKTNWNHSVFDVPLHYNLYNASKSGGNYDMRNIFNGTVVQRHPSHAVTFVDNHDSQPEEALESFVEAWFKPLAYALTLTREQGYPSVFYGDYYGIPTHGVPAMRSKIDPILEARQKYAYGPQHDYLDHPDVIGWTREGDSSHPKSGLATLITDGPGGSKRMYAGLKNAGETWYDITGNRSDTVKIGSDGWGEFHVNDGSVSIYVQK

SEQ ID NO: 28961 - protein, 483 aa, Bacillus sp.
HHNGTNGTMMQYFEWYLPNDGNHWNRLNSDASNLKSKGITAVWIPPAWKGASQNDVGYGAYDLYDLGEFNQKGTVRTKYGTRSQLQAAVTSLKNNGIQVYGDVVMNHKGGADATEMVRAVEVNPNNRNQEVTGEYTIEAWTRFDFPGRGNTHSSFKWRWYHFDGVDWDQSRRLNNRIYKFRGKAWDWEVDTEFGNYDYLMYADYDMDHPEVVNELRNWGVWYTNTLGLDGFRIDAVKHIKYSFTRDWINHVRSATGKNMFAVAEFWKNDLGAINNYLQKTNWNHSVFDVPLHYNLYNASKSGGNYDMRNIFNGTVVQRHPSHAVTFVDNHDSQPEEALESFVEEWFKPLAYALTLTREQGYPSVFYGDYYGIPTHGVPAMRSKIDPILEARQKYAYGPQHDYLDHPDVIGWTREGDSSHPKSGLATLITDGPGGSKRMYAGLKNAGETWYDITGNRSDTVKIGSDGWGEFHVNDGSVSIYVQK

SEQ ID NO: 28962 - protein, 483 aa, Bacillus sp.
HHNGTNKTMMQYFEWYLPNDGNHWNRLNSDASNLKSKGITAVWIPPAWKGASQNDVGYGAYDLYDLGEFNQKGTVRTKYGTRSQLQAAVTSLKNNGIQVYGDVVMNHKGGADATEMVRAVEVNPNNRNQEVTGEYTIEAWTRFDFPGRGNTHSSFKWRWYHFDGVDWDQSRRLNNRIYKFRGKAWDWEVDTEFGNYDYLMYADYDMDHPEVVNELRNWGVWYTNTLGLDGFRIDAVKHIKYSFMRDWINHVRSATGKNMFAVAEFWKNDLGAIENYLQKTNWNHSVFDVPLHYNLYNASKSGGNYDMRNIFNGTVVQAHPMHAVTFVDNHDSQPEEALESFVEEWFKPLAYALTLTREQGYPSVFYGDYYGIPTHGVPAMRSKIDPILEARQKYAYGPQHDYLDHPDVIGWTREGDSSHPKSGLATLITDGPGGSKRMYAGLKNAGETWYDITGNRSDTVKIGSDGWGEFHVNDGSVSIYVQK

SEQ ID NO: 28963 - protein, 485 aa, Bacillus sp.
HHNGTNGTMMQYFEWYLPNDGNHWNRLNSDASNLKSKGITAVWIPPAWKGASQNDVGYGAYDLYDLGEFNQKGTVRTKYGTRSQLQAAVTSLKNNGIQVYGDVVMNHKGGADATEMVRAVEVNPNNRNQEVTGEYTIEAWTRFDFPGRGNTHSSFKWRWYHFDGVDWDQSRRLNNRIYKFRGHGKAWDWEVDTEFGNYDYLMYADYDMDHPEVVNELRNWGVWYTNTLGLDGFRIDAVKHIKYSFTRDWINHVRSATGKNMFAVAEFWKNDLGTIENYLQKTNWNHSVFDVPLHYNLYNASKSGGNYDMRNIFNGTVVQRHPSHAVTFVDNHDSQPEEALESFVEEWFKPLAYALTLTREQGYPSVFYGDYYGIPTHGVPAMRSKIDPILEARQKYAYGPQHDYLDHPDVIGWTREGDSSHPKSGLATLITDGPGGSKRMYAGLKNAGETWYDITGNRSDTVKIGSDGWGEFHVNDGSVSIYVQK

SEQ ID NO: 28964 - protein, 485 aa, Bacillus sp.
HHNGTNGTMMQYFEWYLPNDGNHWNRLNSDASNLKSKGITAVWIPPAWKAVSQNDVGYGAYDLYDLGEFNQKGTVRTKYGTRSQLQAAVTSLKNNGIQVYGDVVMNHKGGADATEMVRAVEVNPNNRNQEVTGEYTIEAWTRFDFPGRGNTHSSFKWRWYHFDGVDWDQSRRLSNRIYKFRGHGKAWDWEVDTEFGNYDYLMYADYDMDHPEVVNELRNWGVWYTNTLGLDGFRIDAVKHIKYSFTRDWINHVRSATGKNMFAVAEFWKNDLGAIENYLQKTNWNHSVFDVPLHYNLYNASKSGGNYDMRNIFNGTVVQVHPSHAVTFVDNHDSQPEEALESFVEEWFKPLAYALTLTREQGYPSVFYGDYYGIPTHGVPAMRSKIDPILEARQKYAYGPQHDYLDHPDVIGWTREGDSSHPKSGLATLITDGPGGSKRMYAGLKNAGETWYDITGNRSDTVKIGSDGWGEFHVNYGSVSIYVQK

SEQ ID NO: 28965 - protein, 485 aa, Bacillus sp.
HHNGTNGTMMQYFEWYLPNDGNHWNRLNSDASNLKSKGITAVWIPPAWKAASQNDVGYGAYDLYDLGEFNQKGTVRTKYGTRSQLQAAVTSLKNNGIQVYGDVVMNHKGGADATEMVRAVEVNPNNRNQEVTGEYTIEAWTRFDFPGRGNTHSSFKWRWYHFDGVDWDQSRQITNRIYKFRGHGKAWDWEVDTEFGNYDYLMYTDYDMDHPEVVNELRNWGVWYTNTLGLDGFRIDAVKHIKYSFTRDWINHVRSATGKNMFAVAEFWKNDLGAIENYLQKTNWNHSVFDVPLHYNLYNASKSGGNYDMRNIFNGTVVQRHPSHAVTFVDNHDSQPEEALESFVEEWFKPLAYALTLTREQGYPSVFYGDYYGIPTHGVPAMRSKIDPILEARQKYAYGPQHDYLDHPDVIGWTREGDSSHPKSGLATLITDGPGGSKRMYAGLKNAGETWYDITGNRSDTVKIGSDGWGEFHVNDGSVSIYVQK

SEQ ID NO: 28966 - protein, 485 aa, Bacillus sp.
HHNGTNGTMMQYFEWYLPNDGNHWNRLNSDASNLKSKGITAVWIPPAWKGASQNDVGYGAYDLYDLGEFNQKGTVRTKYGTRSQLQAAVTSLKNNGIQVYGDVVMNHKGGADATEMVRAVEVNPNNRNQEVTVEYTIEAWTRFDFPGRGNTHSSFKWRWYHFDGVDWDQSRRLNNRIYKFRGHGKAWDWEVDTEFGNYDYLMYADYDMDHPEVVNELRNWGVWYTNTLGLDGFRIDAVKHIKYSFTRDWINHVRSATGKNMFAVAEFWKNDLGAIENYLQKTNWNHSVFDVPLHYNLYNASKSGGNYDMRNIFNGTVVQRHPSHAVTFVDNHDSQPEEALESFVEEWFKPLAYALTLTREQGYPSVFYGDYYGIPTHGVPAMRSKIDPILEARQKYAYGPQHDYLDHPDVIGWTREGDSSHPKSGLATLITDGPGGSKRMYAGLKNAGETWYDITGNRSDTVKIGSDGWGEFHVNDGSVSIYVQK

SEQ ID NO: 28967 - protein, 485 aa, Synthetic construct
HHNGTNGTMMQYFEWYLPNDGNHWNRLNSDASNLKSKGITAVWIPPAWKGASQNDVGYGAYDLYDLGEFNQKGTVRTKYGTRSQLQAAVTSLKNNGIQVYGDVVMNHKGGADATEMVRAVEVNPNNRNQEVTGEYTIEAWTRFDFPGRGNTHSSFKWRWYHFDGVDWDQSRRLNNRIYKFRGHGKAWDWEVDTENGNYDYLMYADFDYDHPEVVNEVRNWGVWYTNTLGLDGFRIDAVKHIKYSFTRDWINHVRSATGKNMFAVAEFWKNDLGAIENYLQKTNWNHSVFDVPLHYNLYNASKSGGNYDMRNIFNGTVVQRHPSHAVTFVDNHDSQPEEALESFVEEWFKPLAYALTLTREQGYPSVFYGDYYGIPTHGVPAMRSKIDPILEARQKYAYGPQHDYLDHPDVIGWTREGDSSHPKSGLATLITDGPGGSKRMYAGLKNAGETWYDITGNRSDTVKIGSDGWGEFHVNDGSVSIYVQK

SEQ ID NO: 28968 - protein, 483 aa, Bacillus sp.
HHNGTNGTMMQYFEWYLPNDGNHWNRLNSDASNLKSKGITAVWIPPAWKATSQNDVGYGAYDLYDLGEFNQKGTVRTKYGTRSQLQAAVTSLKNNGIQVYGDVVMNHKGGADATEMVRAVEVNPNNRNQEVTGEYTIEAYTRFDFPGRGNTHSSFKWRWYHFDGVDWDQSRDLNNRIYKFRGKAWDWEVDTEFGNYDYLMYADYDMDHPEVVNELRNWGVWYTNTLGLDGFRIDAVKHIKYSFTRDWINHVRSATGKNMFAVAEFWKNDLGAIENYLQKTNWNHSVFDVPLHYNLYNASKSGGNYDMRNIFNGTVVQRHPSHAVTFVDNHDSQPEEALESFVEEWFKPLAYALTLTREQGYPSVFYGDYYGIPTHGVPAMRSKIDPILEARQKYAYGPQHDYLDHPDVIGWTREGDSSHPKSGLATLITDGPGGSKRMYAGLKNAGETWYDITGNRSDTVKIGSDGWGEFHVNDGSVSIYVQK

SEQ ID NO: 28969 - protein, 483 aa, Bacillus sp.
HHNGTNGTMMQYFEWYLPNDGNHWNRLNSDASNLKSKGITAVWIPPAWKGASQNDVGYGAYDLYDLGEFNQKGTVRTKYGTRSQLQAAVTSLKNNGIQVYGDVVMNHKGGADATEMVRAVEVNPNNRNQEVTGEYTIEAWTRFDFPGRGNTHSSFKWRWYHFDGVDWDQSRRLNNRIYKFRGKAWDWEVDTEFGNYDYLMYADYDMDHPEVVNELRNWGVWYTNTLGLDGFRIDAVKHIKYSFTRDWINHVRSATGKNMFAVAEFWKNDLGAIENYLQKTNWNHSVFDVPLHYNLYNASKSGGNYDMRNIFNGTVVQRHPSHAVTFVDNHDSQPEEALESFVDPWFKPLAYALTLTREQGYPSVFYGDYYGIPTHGVPAMRSKIDPILEARQKYAYGPQHDYLDHPDVIGWTREGDSSHPKSGLATLITDGPGGSKRMYAGLKNAGETWYDITGNRSDTVKIGSDGWGEFHVNQGSVSIYVQK

SEQ ID NO: 28970 - protein, 485 aa, Bacillus sp.
HHNGTNGTMMQYFEWYLPNDGNHWNRLNSDASNLKSKGITAVWIPPAWKGASQNDVGYGAYDLYDLGEFNQKGTVRTKYGTRSQLQAAVTSLKNNGIQVYGDVVMNHKGGADATEMVRAVEVNPNNRNQEVTGEYTIEAWTRFDFPGRGNTHSSFKWRWYHFDGVDWDQSRRLNNRIYKFRGHGKAWDWEVDTEFGNYDYLMYADYDMDHPEVVNELRNWGVWYTNTLGLDGFRIDAVKHIKYSFTRDWINHVRSATGKNMFAVAEFWKNDLGAIENYLQKTNWNHSVFDVPLHYNLYNASQSGGNYDMRNIFNGTVVQRHPSHAVTFVDNHDSQPEEALESFVEEWFKPLAYALTLTREQGYPSVFYGDYYGIPTHGVPAMRSKIDPILEARQKYAYGPQHDYLDHPDVIGWTREGDSSHPKSGLATLITDGPGGSKRMYAGLKNAGETWYDITGNRSDTVKIGSDGWGEFHVNQSSVSIYVQK

SEQ ID NO: 28971 - protein, 483 aa, Bacillus sp.
HHNGTNGTMMQYFEWYLPNDGNHWNRLNSDASNLKSKGITAVWIPPAWKGASQNDVGYGAYDLYDLGEFNQKGTVRTKYGTRSQLQAAVTSLKNNGIQVYGDVVMNHKGGADATEMVRAVEVNPNNRNQEVTGEYTIEAWTRFDFPGRGNTHSSFKWRWYHFDGVDWDQSRRLNNRIYKFRVKAWKWEVDTENGNYDYLMYADIDMDHPEVVNELRNWGVWYTNTLGLDGFRIDAVKHIKYSFTRDWINHVRSATGKNMFAVAEFWKNDLGAIENYLQKTNWNHSVFDVPLHYNLYNASKSGGNYDMRNIFNGTVVQRHPSHAVTFVDNHDSQPEEALESFVEEWFKPLAYALTLTREQGYPSVFYGDYYGIPTHGVPAMRSKIDPILEARQKYAYGPQHDYLDHPDVIGWTREGDSSHPKSGLATLITDGPGGSKRMYAGLKNAGETWYDITGNRSDTVKIGSDGWGEFHVNDGSVSIYVQK

SEQ ID NO: 28972 - protein, 485 aa, Bacillus sp.
HHNGTNGTMMQYFEWYLPNDGNHWNRLNSDASNLKSKGITAVWIPPAWKGASQNDVGYGAYDLYDLGEFNQKGTVRTKYGTRSQLQAAVTSLKNNGIQVYGDVVMNHKGGADATEMVRAVEVNPNNRNQEVTGEYTIEAWTRFDFPGRGNTHSSFKWRWYHFDGVDWDQSRDLQNRIYKFRGHGKAWDWEVDTEFGNYDYLMYADYDMDHPEVVNELRNWGVWYTNTLGLDGFRIDAVKHIKYSFTRDWINHVRSATGKNMFAVAEFWKNDLGAIENYLQKTNWNHSVFDVPLHYNLYNASKSGGNYDMRNIFNGTVVQRHPSHAVTFVDNHDSQPEEALESFVETWFKPLAYALTLTREQGYPSVFYGDYYGIPTHGVPAMRSKIDPILEARQKYAYGPQHDYLDHPDVIGWTREGDSSHPKSGLATLITDGPGGSKRMYAGLKNAGETWYDITGNRSDTVKIGSDGWGEFHVNKASVSIYVQK

SEQ ID NO: 28973 - protein, 483 aa, Bacillus sp.
HHNGTNGTMMQYFEWYLPNDGNHWNRLNSDASNLKSKGITAVWIPPAWKGASQNDVGYGAYDLYDLGEFNQKGTVRTKYGTRSQLQAAVTSLKNNGIQVYGDVVMNHKGGADATEMVRAVEVNPNNRNQEVTGEYTIEAWTRFDFPGRGNTHSSFKWRWYHFDGVDWDQSRRLNNRIYKFRGKAWDWEVDTEFGNYDYLMYADYDMDHPEVVNELRNWGVWYTNTLGLDGFRIDAVKHIKYSFTRDWINHVRSATGKNMFAVAEFWKNDLGAIENYLQKTNWNHSVFDVPLHYNLYNASKSGGNYDMRNIFNGTVVQRHPSQAVTFVDNHDSQPEEALESFVEEWFKPLAYALTLTREQGYPSVFYGDYYGIPTHGVPAMRSKIDPILEARQKYAYGPQHDYLDHPDVIGWTREGDSSHPKSGLATLITDGPGGSKRMYAGLKNAGETWYDITGNRSDTVKIGSDGWGEFHVNDGSVSIYVQK

SEQ ID NO: 28974 - protein, 485 aa, Bacillus sp.
HHNGTNGTMMQYFEWYLPNDGNHWNRLNSDASNLKSKGITAVWIPPAWKAASQNDVGYGAYDLYDLGEFNQKGTVRTKYGTRSQLQAAVTSLKNNGIQVYGDVVMNHKGGADATEMVRAVEVNPNNRNQEVTGEYTIEAWTRFDFPGRGNTHSSFKWRWYHFDGVDWDQSRNLTNRIYKFRGHGKAWDWEVDTEFGNYDYLMYADYDMDHPEVVNELRNWGVWYTNTLGLDGFRIDAVKHIKYSFTRDWINHVRSATGKNMFAVAEFWKNDLGAIENYLQKTNWNHSVFDVPLHYNLYNASKSGGNYDMRNIFNGTVVQRHPSHAVTFVDNHDSQPEEALESFVDPWFKPLAYALTLTREQGYPSVFYGDYYGIPTHGVPAMRSKIDPILEARQKYAYGPQHDYLDHPDVIGWTREGDSSHPKSGLATLITDGPGGSKRMYAGLKNAGETWYDITGNRSDTVKIGSDGWGEFHVNGGSVSIYVQK

SEQ ID NO: 28975 - protein, 485 aa, Bacillus sp.
HHNGTNGTMMQYFEWYLPNDGNHWNRLNSDASNLKSKGITAVWIPPAWKGASQNDVGYGAYDLYDLGEFNQKGTVRTKYGTRSQLQAAVTSLKNNGIQVYGDVVMNHKGGADATEMVRAVEVNPNNRNQEVTGEYTIEAWTRFDFPGRGNTHSSFKWRWHHFDGVDWDQSRRLNNRIYKFRGHGKAWDWEVDTEFGNYDYLMYADYDMDHPEVVNELRNWGVWYTNTLGLDGFRIDAVKHIKYSFTRDWINHVRSATGKNMFAVAEFWKNDLGAIENYLQKTNWNHSVFDVPLHYNLYNASKSGGNYDMRNIFNGTVVQRHPSHAVTFVDNHDSQPEEALESFVEEWFKPLAYALTLTREQGYPSVFYGDYYGIPTHGVPAMRSKIDPILEARQKYAYGPQHDYLDHPDVIGWTREGDSSHPKSGLATLITDGPGGSKRMYAGLKNAGETWYDITGNRSDTVKIGSDGWGEFHVNDGSVSIYVQK

SEQ ID NO: 28976 - protein, 485 aa, Bacillus sp.
HHNGTNGTMMQYFEWYLPNDGNHWNRLNSDASNLKSKGITAVWIPPAWKGASQNDVGYGAYDLYDLGEFNQKGTVRTKYGTRSQLQAAVTSLKNNGIQVYGDVVMNHKGGADATEMVRAVEVNPNNRNQEVTGEYTIEAWTRFDFPGRGNTHSSFKWRWYHFDGVDWDQSRRLNNRIYKFRGHGKAWDWEVDTEFGNYDYLMYADYDMDHPEVINELRNWGVWYTNTLGLDGFRIDAVKHIKYSFTRDWINHVRSATGKNMFAVAEFWKNDLGAIENYLQKTNWNHSVFDVPLHYNLYNASKSGGNYDMRNIFNGTVVQRHPSHAVTFVDNHDSQPEEALESFVEEWFKPLAYALTLTREQGYPSVFYGDYYGIPTHGVPAMRSKIDPILEARQKYAYGPQHDYLDHPDVIGWTREGDSSHPKSGLATLITDGPGGSKRMYAGLKNAGETWYDITGNRSDTVKIGSDGWGEFHVNDGSVSIYVQK

SEQ ID NO: 28977 - protein, 483 aa, Bacillus sp.
HHNGTNGTMMQYFEWYLPNDGNHWNRLNSDASNLKSKGITAVWIPPAWKGASQNDVGYGAYDLYDLGEFNQKGTVRTKYGTRSQLQAAVTSLKNNGIQVYGDVVMNHKGGADATEMVRAVEVNPNNRNQEVTGEYTIEAWTRFDFPGRGNTHSSFKWRWYHFDGMDWDQSRRLNNRIYKFRGKAWDWEVDTEFGNYDYLMYADYDMDHPEVVNELRNWGVWYTNTLGLDGFRIDAVKHIKYSFTRDWINHVRSATGKNMFAVAEFWKNDLGAIENYLQKTNWNHSVFDVPLHYNLYNASKSGGNYDMRNIFNGTVVQRHPSHAVTFVDNHDSQPEEALESFVEEWFKPLAYALTLTREQGYPSVFYGDYYGIPTHGVPAMRSKIDPILEARQKYAYGPQHDYLDHPDVIGWTREGDSSHPKSGLATLITDGPGGSKRMYAGLKNAGETWYDITGNRSDTVKIGSDGWGEFHVNDGSVSIYVQK

SEQ ID NO: 28978 - protein, 485 aa, Bacillus sp.
HHNGTNGTMMQYFEWYLPNDGNHWNRLNSDASNLKSKGITAVWIPPAWKGASQNDVGYGAYDLYDLGEFNQKGTVRTKYGTRSQLQAAVTSLKNNGIQVYGDVVMNHKGGADATEMVRAVEVNPNNRNQEVTGEYTIEAWTRFDFPGRGNTHSSFKWRWYHFDGVDWDQSRRLNNRIYKFRGHGKAWDWEVDTEFGNYDYLMYADYDMDHPEVVNELRNWGVWYTNTLGLDGFRIDAVKHIKYSFTRDWINHVRSATGKNMFAVAEFWKNDLGAIENYLQKTDWNHSVFDVPLHYNLYNASKSGGNYDMRNIFNGTVVQRHPSHAVTFVDNHDSQPEEALESFVEEWFKPLAYALTLTREQGYPSVFYGDYYGIPTHGVPAMRSKIDPILEARQKYAYGPQHDYLDHPDVIGWTREGDSSHPKSGLATLITDGPGGSKRMYAGLKNAGETWYDITGNRSDTVKIGSDGWGEFHVNDGSVSIYVQK

SEQ ID NO: 28979 - protein, 485 aa, Bacillus sp.
HHNGTNGTMMQYFEWYLPNDGNHWNRLNSDASNLKSKGITAVWIPPAWKGASQNDVGYGAYDLYDLGEFNQKGTVRTKYGTRSQLQAAVTSLKNNGIQVYGDVVMNHKSGADATEMVRAVEVNPNNRNQEVTGEYTIEAWTRFDFPGRGNTHSSFKWRWYHFDGVDWDQSRRLNNRIYKFRGHGKAWDWEVDTEFGNYDYLMYADYDMDHPEVVNELRNWGVWYTNTLGLDGFRIDAVKHIKYSFTRDWINHVRSATGKNMFAVAEFWKNDLGAIENYLQKTNWNHSVFDVPLHYNLYNASKSGGNYDMRNIFNGTVVQRHPSHAVTFVDNHDSQPEEALESFVEEWFKPLAYALTLTREQGYPSVFYGDYYGIPTHGVPAMRSKIDPILEARQKYAYGPQHDYLDHPDVIGWTREGDSSHPKSGLATLITDGPGGSKRMYAGLKNAGETWYDITGNRSDTVKIGSDGWGEFHVNDGSVSIYVQK

SEQ ID NO: 28980 - protein, 485 aa, Bacillus sp.
HHNGTNGTMMQYFEWYLPNDGNHWNRLNSDASNLKSKGITAVWIPPAWKGASQNDVGYGAYDLYDLGEFNQKGTVRTKYGTRSQLQAAVTSLKNNGIQVYGDVVMNHKGGADATEMVRAVEVNPNNRNQEVTGEYTIEAWTRFDFPGRGNTHSSFKWRWYHFDGVDWDQSRRLNNRIYKFRGHGKAWDWEVDTEFGNYDYLMYADYDMDHPEVVNELRNWGVWYTNTLGLDGFRIDAVKHIKYSFTRDWINHVRSATGKNMFAVAEFWKNDLGAIENYLQKTNWNHSVFDVPLHYNLYNASKSGGNYDMRNIFNGTVVQRHPSHAVTFVDNHDSQPEEALESFVDPWFKPLAYALTLTREQGYPSVFYGDYYGIPTHGVPAMRSKIDPILEARQKYAYGPQHDYLDHPDVIGWTREGDSSHPKSGLATLITDGPGGSKRMYAGLKNAGETWYDITGNRSDTVKIGSDGWGEFHVNGASVSIYVQK

SEQ ID NO: 28981 - protein, 483 aa, Bacillus sp.
HHNGTNGTMMQYFEWYLPNDGNHWNRLNSDASNLKSKGITAVWIPPAWKGASQNDVGYGAYDLYDLGEFNQKGTVRTKYGTRSQLQAAVTSLKNNGIQVYGDVVMNHKGGADATEMVRAVEVNPNNRNQEVTGEYTIEAWTRFDFPGRGNTHSSFKWRWYHFDGVDWDQSREFDNRIYKFRGKAWDWEVDTEFGNYDYLMYADYDMDHPEVVNELRNWGVWYTNTLGLDGFRIDAVKHIKYSFTRDWINHVRSATGKNMFAVAEFWKNDLGAIENYLQKTNWNHSVFDVPLHYNLYNASKSSGNYDMRNIFNGTVVQRHPSHAVTFVDNHDSQPEEALESFVDEWFKPLAYALTLTREQGYPSVFYGDYYGIPTHGVPAMRSKIDPILEARQKYAYGPQHDYLDHPDVIGWTREGDSSHPKSGLATLITDGPGGSKRMYAGLKNAGETWYDITGNRSDTVKIGSDGWGEFHVNKQSVSIYVQK

SEQ ID NO: 28982 - protein, 483 aa, Bacillus sp.
HHNGTNGTMMQYFEWYLPNDGNHWNRLNSDASNLKSKGITAVWIPPAWKGASQNDVGYGAYDLYDLGEFNQKGTVRTKYGTRSQLQAAVTSLKNNGIQVYGDVVMNHKGGADATEMVRAVEVNPNNRNQEVTGEYTIEAWTRFDFPGRGNTHSSFKWRWYHFDGVDWDQSRRLNNRIYKFRGKAWDWEVDTEFGNYDYLMYADYDMDHPEVVNELRNWGVWYTNTLGLDGFRIDAVKHIKYSFTRDWINHVRSATGKNMFAVAEFWKNDLGAIENYLQKTNWNHSVFDVPLHYNLYNASKSGGNYDMRNIFNGTVVQRHPSHAVTFVDNHDSQPEEALESFVDEWFKPLAYALTLTREQGYPSVFYGDYYGIPTHGVPAMRSKIDPILEARQKYAYGPQHDYLDHPDVIGWTREGDSSHPKSGLATLITDGPGGSKRMYAGLKNAGETWYDITGNRSDTVKIGSDGWGEFHVNKQSVSIYVQK

SEQ ID NO: 28983 - protein, 485 aa, Bacillus sp.
HHNGTNGTMMQYFEWYLPNDGNHWNRLNSDASNLKSKGITAVWIPPAWKGASQNDVGYGAYDLYDLGEFNQKGTVRTKYGTRSQLQAAVTSLKNNGIQVYGDVVMNHKGGADATEMVRAVEVNPNNRNQEVTGEYTIEAWTRFDFPGRGNTHSSFKWRWYHFDGVDWDQSRRLNNRIYKFRGHGKAWDWEVDTEFGNYDYLMYADYDMDHPEVVNELRNWGVWYTNTLGLDGFRIDAVKHIKGSFTRDWINHVRSATGKNMFAVAEFWKNDLGAIENYLQKTNWNHSVFDVPLHYNLYNASKSGGNYDMRNIFNGTVVQRHPSHAVTFVDNHDSQPEEALESFVEEWFKPLAYALTLTREQGYPSVFYGDYYGIPTHGVPAMRSKIDPILEARQKYAYGPQHDYLDHPDVIGWTREGDSSHPKSGLATLITDGPGGSKRMYAGLKNAGETWYDITGNRSDTVKIGSDGWGEFHVNDGSVSIYVQK

SEQ ID NO: 28984 - protein, 485 aa, Bacillus sp.
HHNGTNGTMMQYFEWYLPNDGNHWNRLNSDASNLKSKGITAVWIPPAWKGASQNDVGYGAYDLYDLGEFNQKGTVRTKYGTRSQLQAAVTSLKNNGIQVYGDVVMNHKGGADATEMVRAVEVNPNNRNQEVTGEYTIEAWTRFDFPGRGNTHSSFKWRWYHFDGVDWDQSRDFDNRIYKFRGHGKAWDWEVDTEFGNYDYLMYADYDMDHPEVVNELRNWGVWYTNTLGLDGFRIDAVKHIKYSFTRDWINHVRSATGKNMFAVAEFWKNDLGAIENYLQKTNWNHSVFDVPLHYNLYNASKSGGNYDMRNIFNGTVVQRHPSHAVTFVDNHDSQPEEALESFVDPWFKPLAYALTLTREQGYPSVFYGDYYGIPTHGVPAMRSKIDPILEARQKYAYGPQHDYLDHPDVIGWTREGDSSHPKSGLATLITDGPGGSKRMYAGLKNAGETWYDITGNRSDTVKIGSDGLGEFHVNDGSVSIYVQK

SEQ ID NO: 28985 - protein, 485 aa, Bacillus sp.
HHNGTNGTMMQYFEWYLPNDGNHWNRLNSDASNLKSKGITAVWIPPAWKGASQNDVGYGAYDLYDLGEFNQKGTVRTKYGTRSQLQAAVTSLKNNGIQVYGDVVMNHKGGADATEMVRAVEVNPNNRNQEVTGEYTIEAWTRFDFPGRGNTHSSFKWRWYHFDGVDWDQSRRLNNRIYKFRGHGKAWDWEVDTEFGNYDYLMYGDYDMDHPEVVNELRNWGVWYTNTLGLDGFRIDAVKHIKYSFTRDWINHVRSATGKNMFAVAEFWKNDLGAIENYLQKTNWNHSVFDVPLHYNLYNASKSGGNYDMRNIFNGTVVQRHPSHAVTFVDNHDSQPEEALESFVEEWFKPLAYALTLTREQGYPSVFYGDYYGIPTHGVPAMRSKIDPILEARQKYAYGPQHDYLDHPDVIGWTREGDSSHPKSGLATLITDGPGGSKRMYAGLKNAGETWYDITGNRSDTVKIGSDGWGEFHVNDGSVSIYVQK

SEQ ID NO: 28986 - protein, 485 aa, Bacillus sp.
HHNGTNGTMMQYFEWYLPNDGNHWNRLNSDASNLKSKGITAVWIPPAWKGASQNDVGYGAYDLYDLGEFNQKGTVRTKYGTRSQLQAAVTSLKNNGIQVYGDVVMNHKGGADATEMVRAVEVNPNNRNQEVTGEYTIEAWTRFDFPGRGNTHSSFKWRWYHFDGVDWDQSRRLNNRIYKFRGHGKAWDWEVDTEFGNYDYLMYADYDMDHPEVVNELRNWGVWYTNTLGLDGFRIDAVKHIKYSFTRDWINHVRSATGKNMFAVAEFWKNDLGAIENYLQKTNWNHSVFDVPLHYNLYNASKSGANYDMRNIFNGTVVQRHPSHAVTFVDNHDSQPEEALESFVDEWFKPLAYALTLTREQGYPSVFYGDYYGIPTHGVPAMRSKIDPILEARQKYAYGPQHDYLDHPDVIGWTREGDSSHPKSGLATLITDGPGGSKRMYAGLKNAGETWYDITGNRSDTVKIGSDGWGEFHVNDGSVSIYVQK

SEQ ID NO: 28987 - protein, 485 aa, Bacillus sp.
HHNGTNGTMMQYFEWYLPNDGNHWNRLNSDASNLKSKGITAVWIPPAWKGASQNDVGYGAYDLYDLGEFNQKGTVRTKYGTRSQLQAAVTSLKNNGIQVYGDVVMNHKGGADATEMVRAVEVNPNNRNQEVTGEYTIEAWTRFDFPGRGNTHSSFKWRWYHFDGVDWDQSRRLNNRIYKFRGHGKAWDWEVDTEFGNYDYLMYADYDMDHPEVVNELRNWGVWYTNTLGLDGFRIDAVKHIKYSFTRDWINHVRSATGKNMFAVAEFWKNDLGAIENYLQKTNWNHSVFDVPLHYNLYNASKSGGNYDMRNIFNGTVVQRHPSNAVTFVDNHDSQPEEALESFVEEWFKPLAYALTLTREQGYPSVFYGDYYGIPTHGVPAMRSKIDPILEARQKYAYGPQHDYLDHPDVIGWTREGDSSHPKSGLATLITDGPGGSKRMYAGLKNAGETWYDITGNRSDTVKIGSDGWGEFHVNDGSVSIYVQK

SEQ ID NO: 28988 - protein, 485 aa, Bacillus sp.
HHNGTNGTMMQYFEWYLPNDGNHWNRLNSDASNLKSKGITAVWIPPAWKAVSQNDVGYGAYDLYDLGEFNQKGTVRTKYGTRSQLQAAVTSLKNNGIQVYGDVVMNHKGGADATEMVDAVEVNPNNRNQEVTGEYTIEAWTRFDFPGRGNTHSSFKWRWYHFDGVDWDQSREFTNRIYKFRGHGKAWDWEVDTEFGNYDYLMYVDYDMDHPEVVNELRNWGVWYTNTLGLDGFRIDAVKHIKYSFTRDWINHVRSATGKNMFAVAEFWKNDLGAIENYLQKTNWNHSVFDVPLHYNLYNASKSGGNYDMRNIFNGTVVQRHPSHAVTFVDNHDSQPEEALESFVEEWFKPLAYALTLTREQGYPSVFYGDYYGIPTHGVPAMRSKIDPILEARQKYAYGPQHDYLDHPDVIGWTREGDSSHPKSGLATLITDGPGGSKRMYAGLKNAGETWYDITGNRSDTVKIGSDGWGEFHVNDGSVSIYVQK

SEQ ID NO: 28989 - protein, 483 aa, Bacillus sp.
HHNGTNGTMMQYFEWYLPNDGNHWNRLNSDASNLKSKGITAVWIPPAWKGASQNDVGYGAYDLYDLGEFNQKGTVRTKYGTRSQLQAAVTSLKNNGIQVYGDVVMNHKGGADATEMVRAVEVNPNNRNQEVTGEYTIEAWTRFDFPGRGNTHSSFKWRWYHFDGVDWDQSRKVSNRIYKFRGKAWDWEVDTEFGNYDYLMYTDYDMDHPEVVNELRNWGVWYTNTLGLDGFRIDAVKHIKYSFTRDWINHVRSATGKNMFAVAEFWKNDLGAIENYLQKTNWNHSVFDVPLHYNLYNASKSGGNYDMRNIFNGTVVQRHPSHAVTFVDNHDSQPEEALESFVEEWFKPLAYALTLTREQGYPSVFYGDYYGIPTHGVPAMRSKIDPILEARQKYAYGPQHDYLDHPDVIGWTREGDSSHPKSGLATLITDGPGGSKRMYAGLKNAGETWYDITGNRSDTVKIGSDGWGEFHVNDGSVSIYVQK

SEQ ID NO: 28990 - protein, 483 aa, Bacillus sp.
HHNGTNGTMMQYFEWYLPNDGNHWNRLNSDASNLKSKGITAVWIPPAWKGASQNDVGYGAYDLYDLGEFNQKGTVRTKYGTRSQLQAAVTSLKNNGIQVYGDVVMNHKGGADATEMVRAVEVNPNNRNQEVTGEYTIEAYTRFDFPGRGNTHSSFKWRWYHFDGVDWDQSRNFQNRIYKFRGKAWDWEVDTEFGNYDYLMYADYDMDHPEVVNELRNWGVWYTNTLGLDGFRIDAVKHIKYSFTRDWINHVRSATGKNMFAVAEFWKNDLGAIENYLQKTNWNHSVFDVPLHYNLYNASKSQGNYDMRNIFNGTVVQRHPSHAVTFVDNHDSQPEEALESFVDTWFKPLAYALTLTREQGYPSVFYGDYYGIPTHGVPAMRSKIDPILEARQKYAYGPQHDYLDHPDVIGWTREGDSSHPKSGLATLITDGPGGSKRMYAGLKNAGETWYDITGNRSDTVKIGSDGWGEFHVNGSSVSIYVQK

SEQ ID NO: 28991 - protein, 485 aa, Bacillus sp.
HHNGTNGTMMQYFEWYLPNDGNHWNRLNSDASNLKSKGITAVWIPPAWKGASQNDVGYGAYDLYDLGEFNQKGTVRTKYGTRSQLQAAVTSLKNNGIQVYGDVVMNHKGGADATEMVRAVEVNPNNRNQEVTGEYTIEAWTRFDFPGRGNTHSSFKWRWYHFDGVDWDQSRELNNRIYKFRGHGKAWDWEVDTEFGNYDYLMYVDYDMDHPEVVNELRNWGVWYTNTLGLDGFRIDAVKHIKYSFTRDWINHVRSATGKNMFAVAEFWKNDLGAIENYLQKTNWNHSVFDVPLHYNLYNASKSGGNYDMRNIFNGTVVQRHPSHAVTFVDNHDSQPEEALESFVEEWFKPLAYALTLTREQGYPSVFYGDYYGIPTHGVPAMRSKIDPILEARQKYAYGPQHDYLDHPDVIGWTREGDSSHPKSGLATLITDGPGGSKRMYAGLKNAGETWYDITGNRSDTVKIGSDGWGEFHVNDGSVSIYVQK

SEQ ID NO: 28992 - protein, 485 aa, Bacillus sp.
HHNGTNGTMMQYFEWYLPNDGNHWNRLNSDASNLKSKGITAVWIPPAWKGASQNDVGYGAYDLYDLGEFNQKGTVRTKYGTRSQLQAAVTSLKNNGIQVYGDVVMNHKGGADATEMVRAVEVNPNNRNQEVTGEYTIEAWTRFDFPGRGNTHSSFKWRWYHFDGVDWDQSRRLNNRIYKFRGHGKAWDWEVDTEFGNYDYLMYADYDMDHPEVVNELRNWGVWYTNTLGLDGFRIDAVKHIKYSFTRDWINHVRSATGKNMFAVAEFWKNDLGAIENYLQKTNWNHSVFDVPLHYNLYNASKSGGNYDMRNIFNGTVVQRHPSHAVTFVSNHDSQPEEALESFVEEWFKPLAYALTLTREQGYPSVFYGDYYGIPTHGVPAMRSKIDPILEARQKYAYGPQHDYLDHPDVIGWTREGDSSHPKSGLATLITDGPGGSKRMYAGLKNAGETWYDITGNRSDTVKIGSDGWGEFHVNDGSVSIYVQK

SEQ ID NO: 28993 - protein, 485 aa, Bacillus sp.
HHNGTNGTMMQYFEWYLPNDGNHWNRLNSDASNLKSKGITAVWIPPAWKASSQNDVGYGAYDLYDLGEFNQKGTVRTKYGTRSQLQAAVTSLKNNGIQVYGDVVMNHKGGADLTEMVDAVEVNPNNRNQEVTGEYTIEAWTRFDFPGRGNTHSSFKWRWYHFDGVDWDQSRDLQNRIYKFRGHGKAWDWEVDTEFGNYDYLMYADYDMDHPEVVNELRNWGVWYTNTLGLDGFRIDAVKHIKYSFTRDWINHVRSATGKNMFAVAEFWKNDLGAIENYLQKTNWNHSVFDVPLHYNLYNASKSGGNYDMRNIFNGTVVQRHPSHAVTFVDNHDSQPEEALESFVEEWFKPLAYALTLTREQGYPSVFYGDYYGIPTHGVPAMRSKIDPILEARQKYAYGPQHDYLDHPDVIGWTREGDSSHPKSGLATLITDGPGGSKRMYAGLKNAGETWYDITGNRSDTVKIGSDGWGEFHVNDGSVSIYVQK

SEQ ID NO: 28994 - protein, 483 aa, Bacillus sp.
HHNGTNGTMMQYFEWYLPNDGNHWNRLNSDASNLKSKGITAVWIPPAWKGASQNDVGYGAYDLYDLGEFNQKGTVRTKYGTRSQLQAAVTSLKNNGIQVYGDVVMNHKGGADATEMVRAVEVNPNNRNQEVTGEYTIEAWTRFDFPGRGNTHSSFKWRWYHFDGVDWDQSRRLNNRIYKFRGKAWDWEVDTEFGNYDYLMYADYDMDHPEVVNELRNWGVWYTNTLGLDGFRIDAVKHIKYSFTRDWINHVRSATGKNMFAVAEFWKNDLGAIENYLQKTNWNHSVFDVPLHYNLYNASKSGGNYDMRNIFNGTVVQRHPSHAVTFVDNHDSQPEEALESFVEEWFKPSAYALTLTREQGYPSVFYGDYYGIPTHGVPAMRSKIDPILEARQKYAYGPQHDYLDHPDVIGWTREGDSSHPKSGLATLITDGPGGSKRMYAGLKNAGETWYDITGNRSDTVKIGSDGWGEFHVNDGSVSIYVQK

SEQ ID NO: 28995 - protein, 483 aa, Bacillus sp.
HHNGTNGTMMQYFEWYLPNDGNHWNRLNSDASNLKSKGITAVWIPPAWKGVSQNDVGYGAYDLYDLGEFNQKGTVRTKYGTRSQLQAAVTSLKNNGIQVYGDVVMNHKGGADATEMVRAVEVNPNNRNQEVTGEYTIEAWTRFDFPGRGNTHSSFKWRWYHFDGVDWDQSRRVNNRIYKFRGKAWDWEVDTEFGNYDYLMYVDYDMDHPEVVNELRNWGVWYTNTLGLDGFRIDAVKHIKYSFTRDWINHVRSATGKNMFAVAEFWKNDLGAIENYLQKTNWNHSVFDVPLHYNLYNASKSGGNYDMRNIFNGTVVQRHPSHAVTFVDNHDSQPEEALESFVEEWFKPLAYALTLTREQGYPSVFYGDYYGIPTHGVPAMRSKIDPILEARQKYAYGPQHDYLDHPDVIGWTREGDSSHPKSGLATLITDGPGGSKRMYAGLKNAGETWYDITGNRSDTVKIGSDGWGEFHVNDGSVSIYVQK

SEQ ID NO: 28996 - protein, 485 aa, Bacillus sp.
HHNGTNGTMMQYFEWYLPNDGNHWNRLNSDASNLKSKGITAVWIPPAWKGASQNDVGYGAYDLYDLGEFNQKGTVRTKYGTRSQLQAAVTSLKNNGIQVYGDVVMNHKGGADATEMVRAVEVNPNNRNQEVTGEYTIEAWTRFDFPGRGNTHSSFKWRWYHFDGVDHDQSRRLNNRIYKFRGHGKAWDWEVDTEFGNYDYLMYADYDMDHPEVVNELRNWGVWYTNTLGLDGFRIDAVKHIKYSFTRDWINHVRSATGKNMFAVAEFWKNDLGAIENYLQKTNWNHSVFDVPLHYNLYNASKSGGNYDMRNIFNGTVVQRHPSHAVTFVDNHDSQPEEALESFVEEWFKPLAYALTLTREQGYPSVFYGDYYGIPTHGVPAMRSKIDPILEARQKYAYGPQHDYLDHPDVIGWTREGDSSHPKSGLATLITDGPGGSKRMYAGLKNAGETWYDITGNRSDTVKIGSDGWGEFHVNDGSVSIYVQK

SEQ ID NO: 28997 - protein, 485 aa, Bacillus sp.
HHNGTNGTMMQYFEWYLPNDGNHWNRLNSDASNLKSKGITAVWIPPAWKAVSQNDVGYGAYDLYDLGEFNQKGTVRTKYGTRSQLQAAVTSLKNNGIQVYGDVVMNHKGGADATEMVRAVEVNPNNRNQEVTGEYTIEAWTRFDFPGRGNTHSSFKWRWYHFDGVDWDQSRDFNNRIYKFRGHGKAWDWEVDTEFGNYDYLMYVDYDMDHPEVVNELRNWGVWYTNTLGLDGFRIDAVKHIKYSFTRDWINHVRSATGKNMFAVAEFWKNDLGAIENYLQKTNWNHSVFDVPLHYNLYNASQSGGNYDMRNIFNGTVVQRHPSHAVTFVDNHDSQPEEALESFVEEWFKPLAYALTLTREQGYPSVFYGDYYGIPTHGVPAMRSKIDPILEARQKYAYGPQHDYLDHPDVIGWTREGDSSHPKSGLATLITDGPGGSKRMYAGLKNAGETWYDITGNRSDTVKIGSDGWGEFHVNGSSVSIYVQK

SEQ ID NO: 28998 - protein, 483 aa, Bacillus sp.
HHNGTNGTMMQYFEWYLPNDGNHWNRLNSDASNLKSKGITAVWIPPAWKGASQNDVGYGAYDLYDLGEFNQKGTVRTKYGTRSQLQAAVTSLKNNGIQVYGDVVMNHKGGADATEMVRAVEVNPNNRNQEVTGEYTIEAWTRFDFPGRGNTHSSFKWRWYHFDGVDWDQSRRLNNRIYKFRGKAWDWEVDTESGFYDYLMYADIDMDHPEVVNELRNWGVWYTNTLGLDGFRIDAVKHIKYSFTRDWINHVRSATGKNMFAVAEFWKNDLGAIENYLQKTNWNHSVFDVPLHYNLYNASKSGGNYDMRNIFNGTVVQRHPSHAVTFVDNHDSQPEEALESFVEEWFKPLAYALTLTREQGYPSVFYGDYYGIPTHGVPAMRSKIDPILEARQKYAYGPQHDYLDHPDVIGWTREGDSSHPKSGLATLITDGPGGSKRMYAGLKNAGETWYDITGNRSDTVKIGSDGWGEFHVNDGSVSIYVQK

SEQ ID NO: 28999 - protein, 483 aa, Bacillus sp.
HHNGTNGTMMQYFEWYLPNDGNHWNRLNSDASNLKSKGITAVWIPPAWKGASQNDVGYGAYDLYDLGEFNQKGTVRTKYGTRSQLQAAVTSLKNNGIQVYGDVVMNHKGGADATEMVRAVEVNPNNRNQEVTGEYTIEAWTRFDFPGRGNTHSSFKWRWYHFDGVDWDQSRRLNNRIYKFRGKAWDWEVDTEFGNYDYLMYADYDMDHPEVVNEMRNWGVWYTNTLGLDGFRIDAVKHIKYSFTRDWINHVRSATGKNMFAVAEFWKNDLGAIENYLQKTNWNHSVFDVPLHYNLYNASKSGGNYDMRNIFNGTVVQRHPSHAVTFVDNHDSQPEEALESFVEEWFKPLAYALTLTREQGYPSVFYGDYYGIPTHGVPAMRSKIDPILEARQKYAYGPQHDYLDHPDVIGWTREGDSSHPKSGLATLITDGPGGSKRMYAGLKNAGETWYDITGNRSDTVKIGSDGWGEFHVNDGSVSIYVQK

SEQ ID NO: 29000 - protein, 485 aa, Bacillus sp.
HHNGTNGTMMQYFEWYLPNDGNHWNRLNSDASNLKSKGITAVWIPPAWKGASQNDVGYGAYDLYDLGEFNQKGTVRTKYGTRSQLQAAVTSLKNNGIQVYGDVVMNHKGGADATEMVRAVEVNPNNRNQEVTGEYTIEAWTRFDFPGRGNTHSSFKWRWYHFDGVDWDQSRRVNNRIYKFRGHGKAWDWEVDTEFGNYDYLMYVDYDMDHPEVVNELRNWGVWYTNTLGLDGFRIDAVKHIKYSFTRDWINHVRSATGKNMFAVAEFWKNDLGAIENYLQKTNWNHSVFDVPLHYNLYNASKSGGNYDMRNIFNGTVVQRHPSHAVTFVDNHDSQPEEALESFVEEWFKPLAYALTLTREQGYPSVFYGDYYGIPTHGVPAMRSKIDPILEARQKYAYGPQHDYLDHPDVIGWTREGDSSHPKSGLATLITDGPGGSKRMYAGLKNAGETWYDITGNRSDTVKIGSDGWGEFHVNDGSVSIYVQK

SEQ ID NO: 29001 - protein, 485 aa, Bacillus sp.
HHNGTNGTMMQYFEWYLPNDGNHWNRLNSDASNLKSKGITAVWIPPAWKGASQNDVGYGAYDLYDLGEFNQKGTVRTKYGTRSQLQAAVTSLKNNGIQVYGDVVMNHKGGADATEMVRAVEVNPNNRNQEVTGEYTIEAWTRFDFPGRGNTHSSFKWRWYHFDGVDWDQSRRLNNRIYKFRGHGKAWDWEVDTEFGNYDYLMYADYDMDHPEVVNELRNWGVWYTNTLGLDGFRIDAVKHIKYSFTRDWINHVRSATGKNMFAVAEFWKNDLGAIENYLQKTNWNHSVFDVPLHYNLYNASKSGGNYDMRNIFNGTVVQRHPSHAVTFVDNHDSQPEEALESFVEPWFKPLAYALTLTREQGYPSVFYGDYYGIPTHGVPAMRSKIDPILEARQKYAYGPQHDYLDHPDVIGWTREGDSSHPKSGLATLITDGPGGSKRMYAGLKNAGETWYDITGNRSDTVKIGSDGWGEFHVNDGSVSIYVQK

SEQ ID NO: 29002 - protein, 485 aa, Bacillus sp.
HHNGTNGTMMQYFEWYLPNDGNHWNRLNSDASNLKSKGITAVWIPPAWKGASQNDVGYGAYDLYDLGEFNQKGTVRTKYGTRSQLQAAVTSLKNNGIQVYGDVVMNHKGGADATEMVRAVEVNPNNRNQEVTGEYTIEAWTRFDFPGRGNTHSSFKWRWYHFDGADWDQSRRLNNRIYKFRGHGKAWDWEVDTEFGNYDYLMYADYDMDHPEVVNELRNWGVWYTNTLGLDGFRIDAVKHIKYSFTRDWINHVRSATGKNMFAVAEFWKNDLGAIENYLQKTNWNHSVFDVPLHYNLYNASKSGGNYDMRNIFNGTVVQRHPSHAVTFVDNHDSQPEEALESFVEEWFKPLAYALTLTREQGYPSVFYGDYYGIPTHGVPAMRSKIDPILEARQKYAYGPQHDYLDHPDVIGWTREGDSSHPKSGLATLITDGPGGSKRMYAGLKNAGETWYDITGNRSDTVKIGSDGWGEFHVNDGSVSIYVQK

SEQ ID NO: 29003 - protein, 483 aa, Bacillus sp.
HHNGTNGTMMQYFEWYLPNDGNHWNRLNSDASNLKSKGITAVWIPPAWKGASQNDVGYGAYDLYDLGEFNQKGTVRTKYGTRSQLQAAVTSLKNNGIQVYGDVVMNHKGGADATEMVRAVEVNPNNRNQEVTGEYTIEAWTRFDFPGRGNTHSSFKWRWYHFDGVDWDQSRRLNNRIYKFRGKAWDWEVDTEFGNYDYLMYADYDMDHPEVVNELRNWGVWYTNTLGLDGFRIDAVKHIKYSFTRDWINHVRSATGKNMFAVAEFWKNDLGAIENYLQKTNWNHSVFDVPLHYNLYNASNSQGNYDMRNIFNGTVVQRHPSHAVTFVDNHDSQPEEALESFVEPWFKPLAYALTLTREQGYPSVFYGDYYGIPTHGVPAMRSKIDPILEARQKYAYGPQHDYLDHPDVIGWTREGDSSHPKSGLATLITDGPGGSKRMYAGLKNAGETWYDITGNRSDTVKIGSDGWGEFHVNKGSVSIYVQK

SEQ ID NO: 29004 - protein, 483 aa, Bacillus sp.
HHNGTNGTMMQYFEWYLPNDGNHWNRLNSDASNLKSKGITAVWIPPAWKAASQNDVGYGAYDLYDLGEFNQKGTVRTKYGTRSQLQAAVTSLKNNGIQVYGDVVMNHKGGADATEMVRAVEVNPNNRNQEVTGEYTIEAWTRFDFPGRGNTHSSFKWRWYHFDGVDWDQSRRLTNRIYKFRGKAWDWEVDTEFGNYDYLMYADYDMDHPEVVNELRNWGVWYTNTLGLDGFRIDAVKHIKYSFTRDWINHVRSATGKNMFAVAEFWKNDLGAIENYLQKTNWNHSVFDVPLHYNLYNASKSGGNYDMRNIFNGTVVQRHPSHAVTFVDNHDSQPEEALESFVDPWFKPLAYALTLTREQGYPSVFYGDYYGIPTHGVPAMRSKIDPILEARQKYAYGPQHDYLDHPDVIGWTREGDSSHPKSGLATLITDGPGGSKRMYAGLKNAGETWYDITGNRSDTVKIGSDGWGEFHVNGGSVSIYVQK

SEQ ID NO: 29005 - protein, 483 aa, Bacillus sp.
HHNGTNGTMMQYFEWYLPNDGNHWNRLNSDASNLKSKGITAVWIPPAWKAVSQNDVGYGAYDLYDLGEFNQKGTVRTKYGTRSQLQAAVTSLKNNGIQVYGDVVMNHKGGADATEMVRAVEVNPNNRNQEVTGEYTIEAWTRFDFPGRGNTHSSFKWRWYHFDGVDWDQSRQLNNRIYKFRGKAWDWEVDTEFGNYDYLMYVDYDMDHPEVVNELRNWGVWYTNTLGLDGFRIDAVKHIKYSFTRDWINHVRSATGKNMFAVAEFWKNDLGAIENYLQKTNWNHSVFDVPLHYNLYNASKSGGNYDMRNIFNGTVVQRHPSHAVTFVDNHDSQPEEALESFVEEWFKPLAYALTLTREQGYPSVFYGDYYGIPTHGVPAMRSKIDPILEARQKYAYGPQHDYLDHPDVIGWTREGDSSHPKSGLATLITDGPGGSKRMYAGLKNAGETWYDITGNRSDTVKIGSDGWGEFHVNDGSVSIYVQK

SEQ ID NO: 29006 - protein, 483 aa, Bacillus sp.
HHNGTNGTMMQYFEWYLPNDGNHWNRLNSDASNLKSKGITAVWIPPAWKGASQNDVGYGAYDLYDLGEFNQKGTVRTKYGTRSQLQAAVTSLKNNGIQVYGDVVMNHKGGADATEMVRAVEVNPNNRNQEVTGEYTIEAWTRFDFPGRGNTHSSFKWRWYHFDGVDWDQSERLNNRIYKFRGKAWDWEVDTEFGNYDYLMYADYDMDHPEVVNELRNWGVWYTNTLGLDGFRIDAVKHIKYSFTRDWINHVRSATGKNMFAVAEFWKNDLGAIENYLQKTNWNHSVFDVPLHYNLYNASKSGGNYDMRNIFNGTVVQRHPSHAVTFVDNHDSQPEEALESFVEEWFKPLAYALTLTREQGYPSVFYGDYYGIPTHGVPAMRSKIDPILEARQKYAYGPQHDYLDHPDVIGWTREGDSSHPKSGLATLITDGPGGSKRMYAGLKNAGETWYDITGNRSDTVKIGSDGWGEFHVNDGSVSIYVQK

SEQ ID NO: 29007 - protein, 485 aa, Bacillus sp.
HHNGTNGTMMQYFEWYLPNDGNHWNRLNSDASNLKSKGITAVWIPPAWKGASQNDVGYGAYDLYDLGEFNQKGTVRTKYGTRSQLQAAVTSLKNNGIQVYGDVVMNHKGGANATEMVRAVEVNPNNRNQEVTGEYTIEAWTRFDFPGRGNTHSSFKWRWYHFDGVDWDQSRRLNNRIYKFRGHGKAWDWEVDTEFGNYDYLMYADYDMDHPEVVNELRNWGVWYTNTLGLDGFRIDAVKHIKYSFTRDWINHVRSATGKNMFAVAEFWKNDLGAIENYLQKTNWNHSVFDVPLHYNLYNASKSGGNYDMRNIFNGTVVQRHPSHAVTFVDNHDSQPEEALESFVEEWFKPLAYALTLTREQGYPSVFYGDYYGIPTHGVPAMRSKIDPILEARQKYAYGPQHDYLDHPDVIGWTREGDSSHPKSGLATLITDGPGGSKRMYAGLKNAGETWYDITGNRSDTVKIGSDGWGEFHVNDGSVSIYVQK

SEQ ID NO: 29008 - protein, 485 aa, Bacillus sp.
HHNGTNGTMMQYFEWYLPNDGNHWNRLNSDASNLKSKGITAVWIPPAWKGASQNDVGYGAYDLYDLGEFNQSGTVRTKYGTRSQLQAAVTSLKNNGIQVYGDVVMNHKGGADATEMVRAVEVNPNNRNQEVTGEYTIEAWTRFDFPGRGNTHSSFKWRWYHFDGVDWDQSRRLNNRIYKFRGHGKAWDWEVDTEFGNYDYLMYADYDMDHPEVVNELRNWGVWYTNTLGLDGFRIDAVKHIKYSFTRDWINHVRSATGKNMFAVAEFWKNDLGAIENYLQKTNWNHSVFDVPLHYNLYNASKSGGNYDMRNIFNGTVVQRHPSHAVTFVDNHDSQPEEALESFVEEWFKPLAYALTLTREQGYPSVFYGDYYGIPTHGVPAMRSKIDPILEARQKYAYGPQHDYLDHPDVIGWTREGDSSHPKSGLATLITDGPGGSKRMYAGLKNAGETWYDITGNRSDTVKIGSDGWGEFHVNDGSVSIYVQK

SEQ ID NO: 29009 - protein, 483 aa, Bacillus sp.
HHNGTNGTMMQYFEWYLPNDGNHWNRLNSDASNLKSKGITAVWIPPAWKGASQNDVGYGAYDLYDLGEFNQKGTVRTKYGTRSQLQAAVTSLKNNGIQVYGDVVMNHKGGADATEMVRAVEVNPNNRNQEVTGEYTIEAWTRFDFPGRGNTHSSFKWRWYHFDGVDWDQSRRLNNRIYKFRGKAWDWEVDTEFGNYDYLMYADYDMDHPEVVNELRNWGVWYTNTLGLDGFRIDAVKHIKYSFTRDWINHVRSATGKNMFAVAEFWVNDLGAIENYLQKTNWNHSVFDVPLHYNLYNASKSGGNYDMRNIFNGTVVQRHPSHAVTFVDNHDSQPEEALESFVEEWFKPLAYALTLTREQGYPSVFYGDYYGIPTHGVPAMRSKIDPILEARQKYAYGPQHDYLDHPDVIGWTREGDSSHPKSGLATLITDGPGGSKRMYAGLKNAGETWYDITGNRSDTVKIGSDGWGEFHVNDGSVSIYVQK

SEQ ID NO: 29010 - protein, 485 aa, Bacillus sp.
HHNGTNGTMMQYFEWYLPNDGNHWNRLNSDASNLKSKGITAVWIPPAWKGASQNDVGYGAYDLYDLGEFNQKGTVRTKYGTRSQLQAAVTSLKNNGIQVYGDVVMNHKGGADATEMVRAVEVNPNNRNQEVTGEYTIEAWTRFDFPGRGNTHSSFKWRWYHFDGVDWDQSRRLNNRIYKFRGHGKAWDWEVDTEFGNYDYLMYADYDMDHPEVVNELRNWGVWYTNTLGLDGFRIDAVKHIKYSFTRDWINHVRSATGKNMFAVAEFWKNDLGAIENYLQKTNWNHSVFDVPLHYNLYNASKSGGNYDMRNIFNGTVVQRHPSHAVTFVDNHDSQPEEALESFVEEWFKPLAYALTLTREQGYPSVFYGDYYGIPTHGVPAMRSKIDPILLARQKYAYGPQHDYLDHPDVIGWTREGDSSHPKSGLATLITDGPGGSKRMYAGLKNAGETWYDITGNRSDTVKIGSDGWGEFHVNDGSVSIYVQK

SEQ ID NO: 29011 - protein, 485 aa, Bacillus sp.
HHNGTNKTMMQYFEWYLPNDGNHWNRLNSDASNLKSKGITAVWIPPAWKGASQNDVGYGAYDLYDLGEFNQKGTVRTKYGTRSQLQAAVTSLKNNGIQVYGDVVMNHKGGADATEMVRAVEVNPNNRNQEVTGEYTIEAWTRFDFPGRGNTHSSFKWRWYHFDGVDWDQSRRLNNRIYKFRGHGKAWDWEVDTEFGNYDYLMYADYDMDHPEVVNELRNWGVWYTNTLGLDGFRIDAVKHIKYSFTRDWINHVRSATGKNMFAVAEFWKNDLGAIENYLQKTNWNHSVFDVPLHYNLYNASKSGGNYDMRNIFNGTVVQRHPSHAVTFVDNHDSQPEEALESFVEEWFKPLAYALTLTREQGYPSVFYGDYYGIPTHGVPAMRSKIDPILEARQKYAYGPQHDYLDHPDVIGWTREGDSSHPKSGLATLITDGPGGSKRMYAGLKNAGETWYDITGNRSDTVKIGSDGWGEFHVNDGSVSIYVQK

SEQ ID NO: 29012 - protein, 485 aa, Bacillus sp.
HHNGTNGTMMQYFEWYLPNDGNHWNRLNSDASNLKSKGITAVWIPPSWKAASQNDVGYGAYDLYDLGEFNQKGTVRTKYGTRSQLQAAVTSLKNNGIQVYGDVVMNHKGGADATEMVRAVEVNPNNRNQEVTGEYTIEAWTRFDFPGRGNTHSSFKWRWYHFDGVDWDQSRKFDNRIYKFRGHGKAWDWEVDTEFGNYDYLMYADYDMDHPEVVNELRNWGVWYTNTLGLDGFRIDAVKHIKYSFTRDWINHVRSATGKNMFAVAEFWKNDLGAIENYLQKTNWNHSVFDVPLHYNLYNASKSGGNYDMRNIFNGTVVQRHPSHAVTFVDNHDSQPEEALESFVEEWFKPLAYALTLTREQGYPSVFYGDYYGIPTHGVPAMRSKIDPILEARQKYAYGPQHDYLDHPDVIGWTREGDSSHPKSGLATLITDGPGGSKRMYAGLKNAGETWYDITGNRSDTVKIGSDGWGEFHVNDGSVSIYVQK

SEQ ID NO: 29013 - protein, 483 aa, Bacillus sp.
HHNGTNGTMMQYFEWYLPNDGNHWNRLNSDASNLKSKGITAVWIPPAWKGASQNDVGYGAYDLYDLGEFNQKGTVRTKYGTRSQLQAAVTSLKNNGIQVYGDVVMNHKGGADATEMVRAVEVNPNNRNQEVTGEYTIEAYTRFDFPGRGNTHSSFKWRWYHFDGVDWDQSRDLTNRIYKFRGKAWDWEVDTEFGNYDYLMYADYDMDHPEVVNELRNWGVWYTNTLGLDGFRIDAVKHIKYSFTRDWINHVRSATGKNMFAVAEFWKNDLGAIENYLQKTNWNHSVFDVPLHYNLYNASKSGGNYDMRNIFNGTVVQRHPSHAVTFVDNHDSQPEEALESFVEEWFKPLAYALTLTREQGYPSVFYGDYYGIPTHGVPAMRSKIDPILEARQKYAYGPQHDYLDHPDVIGWTREGDSSHPKSGLATLITDGPGGSKRMYAGLKNAGETWYDITGNRSDTVKIGSDGWGEFHVNDGSVSIYVQK

SEQ ID NO: 29014 - protein, 485 aa, Bacillus sp.
HHNGTNGTMMQYFEWYLPNDGNHWNRLNSDASNLKSKGITAVWIPPAWKAASQNDVGYGAYDLYDLGEFNQKGTVRTKYGTRSQLQAAVTSLKNNGIQVYGDVVMNHKGGADATEMVRAVEVNPNNRNQEVTGEYTIEAWTRFDFPGRGNTHSSFKWRWYHFDGVDWDQSRRTNNRIYKFRGHGKAWDWEVDTEFGNYDYLMYADYDMDHPEVVNELRNWGVWYTNTLGLDGFRIDAVKHIKYSFTRDWINHVRSATGKNMFAVAEFWKNDLGAIENYLQKTNWNHSVFDVPLHYNLYNASKSGGNYDMRNIFNGTVVQRHPSHAVTFVDNHDSQPEEALESFVEEWFKPLAYALTLTREQGYPSVFYGDYYGIPTHGVPAMRSKIDPILEARQKYAYGPQHDYLDHPDVIGWTREGDSSHPKSGLATLITDGPGGSKRMYAGLKNAGETWYDITGNRSDTVKIGSDGWGEFHVNDGSVSIYVQK

SEQ ID NO: 29015 - protein, 483 aa, Bacillus sp.
HHNGTNGTMMQYFEWYLPNDGNHWNRLNSDASNLKSKGITAVWIPPAWKGASQNDVGYGAYDLYDLGEFNQKGTVRTKYGTRSQLQAAVTSLKNNGIQVYGDVVMNHKGGADATEMVRAVEVNPNNRNQEVTGEYTIEAWTRFDFPGRGNTHSSFKWRWYHFDGVDWDQSRRLNNRIYRFRGKAWDWEVDTEFGNYDYLMYADYDMDHPEVVNELRNWGVWYTNTLGLDGFRIDAVKHIKYSFTRDWINHVRSATGKNMFAVAEFWKNDLGAIENYLQKTNWNHSVFDVPLHYNLYNASKSGGNYDMRNIFNGTVVQRHPSHAVTFVDNHDSQPEEALESFVEEWFKPLAYALTLTREQGYPSVFYGDYYGIPTHGVPAMRSKIDPILEARQKYAYGPQHDYLDHPDVIGWTREGDSSHPKSGLATLITDGPGGSKRMYAGLKNAGETWYDITGNRSDTVKIGSDGWGEFHVNDGSVSIYVQK

SEQ ID NO: 29016 - protein, 485 aa, Bacillus sp.
HHNGTNGTMMQYFEWYLPNDGNHWNRLNSDASNLKSKGITAVWIPPAWKAASQNDVGYGAYDLYDLGEFNQKGTVRTKYGTRSQLQAAVTSLKNNGIQVYGDVVMNHKGGADATEMVRAVEVNPNNRNQEVTGEYTIEAWTRFDFPGRGNTHSSFKWRWYHFDGVDWDQSRDLQNRIYKFRGHGKAWDWEVDTEFGNYDYLMYADYDMDHPEVVNELRNWGVWYTNTLGLDGFRIDAVKHIKYSFTRDWINHVRSATGKNMFAVAEFWKNDLGAIENYLQKTNWNHSVFDVPLHYNLYNASKSGGNYDMRNIFNGTVVQRHPSHAVTFVDNHDSQPEEALESFVETWFKPLAYALTLTREQGYPSVFYGDYYGIPTHGVPAMRSKIDPILEARQKYAYGPQHDYLDHPDVIGWTREGDSSHPKSGLATLITDGPGGSKRMYAGLKNAGETWYDITGNRSDTVKIGSDGWGEFHVNDGSVSIYVQK

SEQ ID NO: 29017 - protein, 483 aa, Bacillus sp.
HHNGTNGTMMQYFEWYLPNDGNHWNRLNSDASNLKSKGITAVWIPPAWKGASQNDVGYGAYDLYDLGEFNQKGTVRTKYGTRSQLQAAVTSLKNNGIQVYGDVVMNHKGGADATEMVRAVEVNPNNRNQEVTGEYTIEAWTRFDFPGRGNTHSSFKWRWYHFDGVDWDQSRRLNNRIYKFRGKAWDWEVDTEFGNYDYLMYADYDMDSPEVVNELRNWGVWYTNTLGLDGFRIDAVKHIKYSFTRDWINHVRSATGKNMFAVAEFWKNDLGAIENYLQKTNWNHSVFDVPLHYNLYNASKSGGNYDMRNIFNGTVVQRHPSHAVTFVDNHDSQPEEALESFVEEWFKPLAYALTLTREQGYPSVFYGDYYGIPTHGVPAMRSKIDPILEARQKYAYGPQHDYLDHQDVIGWTREGDSSHPKSGLATLITDGPGGSKRMYAGLKNAGETWYDITGNRSDTVKIGSDGWGEFHVNDGSVSIYVQK

SEQ ID NO: 29018 - protein, 485 aa, Bacillus sp.
HHNGTNGTMMQYFEWYLPNDGNHWNRLNSDASNLKSKGITAVWIPPAWKGASQNDVGYGAYDLYDLGEFNQKGTVRTKYGTRSQLQAAVTSLKNNGIQVYGDVVMNHKGGADATEMVRAVEVNPNNRNQEVTGEYTIEAWTRFDFPGRGNTHSSFKWRWYHFDGVDWDQSRRLNNRIYKFRGHGKAWDWEVDTEFGNYDYLMYADYDMDHPEVVNELRNWGVWYTNTLGLDGFRIDAVKHIKYSFTRDWINHVRSATGKNMFAVAEFWKNDLGAIENYLQKTNWNHSVFDVPLHYNLYNASKSGSNYDMRNIFNGTVVQRHPSHAVTFVDNHDSQPEEALESFVEEWFKPLAYALTLTREQGYPSVFYGDYYGIPTHGVPAMRSKIDPILEARQKYAYGPQHDYLDHPDVIGWTREGDSSHPKSGLATLITDGPGGSKRMYAGLKNAGETWYDITGNRSDTVKIGSDGWGEFHVNDGSVSIYVQK

SEQ ID NO: 29019 - protein, 485 aa, Bacillus sp.
HHNGTNQTMMQYFEWYLPNDGNHWNRLNSDASNLKSKGITAVWIPPAWKGASQNDVGYGAYDLYDLGEFNQKGTVRTKYGTRSQLQAAVTSLKNNGITVYGDVVMNHKGGADATEMVRAVEVNPNNRNQEVTGEYTIEAWTRFDFPGRGNTHSSFKWRWYHFDGVDWDQSRRLNNRIYKFRGHGKAWDWEVDTEFGNYDYLMYADYDMDHPEVVNELRNWGVWYTNTLGLDGFRIDAVKHIKYSFTRDWINHVRSATGKNMFAVAEFWKNDLGAIENYLQKTNWNHSVFDVPLHYNLYNASKSGGNYDMRNIFNGTVVQAHPMHAVTFVDNHDSQPEEALESFVEEWFKPLAYALTLTREQGYPSVFYGDYYGIPTHGVPAMRSKIDPILEARQKYAYGPQHDYLDHPDVIGWTREGDSSHPKSGLATLITDGPGGSKRMYAGLKNAGETWYDITGNRSDTVKIGSDGWGEFHVNDGSVSIYVQK

SEQ ID NO: 29020 - protein, 485 aa, Bacillus sp.
HHNGTNGTMMQYFEWYLPNDGNHWNRLNSDASNLKSKGITAVWIPPAWKGASQNDVGYGAYDLYDLGEFNQKGTVRTKYGTRSQLQAAVTSLKNNGIQVYGDVVMNHKGGADATEMVRAVEVNPNNRNQEVTGEYTIEAWTRFDFPGRGNTHSSFKWRWYHFDGVDWDQSRRLNNRIYKFRGHGKAWDWEVDTEFGNYDYLMYADYDGDHPEVVNELRNWGVWYTNTLGLDGFRIDAVKHIKYSFTRDWINHVRSATGKNMFAVAEFWKNDLGAIENYLQKTNWNHSVFDVPLHYNLYNASKSGGNYDMRNIFNGTVVQRHPSHAVTFVDNHDSQPEEALESFVEEWFKPLAYALTLTREQGYPSVFYGDYYGIPTHGVPAMRSKIDPILEARQKYAYGPQHDYLDHPDVIGWTREGDSSHPKSGLATLITDGPGGSKRMYAGLKNAGETWYDITGNRSDTVKIGSDGWGEFHVNDGSVSIYVQK

SEQ ID NO: 29021 - protein, 485 aa, Bacillus sp.
HHNGTNGTMMQYFEWYLPNDGNHWNRLNSDASNLKSKGITAVWIPPAWKATSQNDVGYGAYDLYDLGEFNQKGTVRTKYGTRSQLQAAVTSLKNNGIQVYGDVVMNHKGGADATEMVRAVEVNPNNRNQEVTGEYTIEAWTRFDFPGRGNTHSSFKWRWYHFDGVDWDQSRELNNRIYKFRGHGKAWDWEVDTEFGNYDYLMYTDYDMDHPEVVNELRNWGVWYTNTLGLDGFRIDAVKHIKYSFTRDWINHVRSATGKNMFAVAEFWKNDLGAIENYLQKTNWNHSVFDVPLHYNLYNASKSGGNYDMRNIFNGTVVQVHPSHAVTFVDNHDSQPEEALESFVEEWFKPLAYALTLTREQGYPSVFYGDYYGIPTHGVPAMRSKIDPILEARQKYAYGPQHDYLDHPDVIGWTREGDSSHPKSGLATLITDGPGGSKRMYAGLKNAGETWYDITGNRSDTVKIGSDGWGEFHVNYGSVSIYVQK

SEQ ID NO: 29022 - protein, 485 aa, Bacillus sp.
HHNGTNGTMMQYFEWYLPNDGNHWNRLNSDASNLKSKGITAVWIPPAWKGASQNDVGYGAYDLYDLGEFNQKGTVRTKYGTRSQLQAAVTSLKNNGIQVYGDVVMNHKGGADATEMVRAVEVNPNNRNQEVTGEYTIEAWTRFDFPGRGNTHSSFKWRWYHFDGVDWDQSRRLNNRIYKFRGHGKAWDWEVDTEFGNYDYLMYADYDMDHPEVVNELRNWGVWYTNTLGLDGFRIDAVKHIKYSFMRDWINHVRSATGKNMFAVAEFWKNDLGAIENYLQKTNWNHSVFDVPLHYNLYNASKSGGNYDMRNIFNGTVVQRHPSHAVTFVDNHDSQPEEALESFVEEWFKPLAYALTLTREQGYPSVFYGDYYGIPTHGVPAMRSKIDPILEARQKYAYGPQHDYLDHPDVIGWTREGDSSHPKSGLATLITDGPGGSKRMYAGLKNAGETWYDITGNRSDTVKIGSDGWGEFHVNDGSVSIYVQK

SEQ ID NO: 29023 - protein, 483 aa, Bacillus sp.
HHNGTNGTMMQYFEWYLPNDGNHWNRLNSDASNLKSKGITAVWIPPAWKGASQNDVGYGAYDLYDLGEFNQKGTVRTKYGTRSQLQAAVTSLKNNGIQVYGDVVMNHKGGADATEMVRAVEVNPNNRNQEVTGEYTIEAWTRFDFPGRGNTHSSFKWRWYHFDGVDWDQSRRLNNRIYKFRGKAWDWEVDTEFGNYDYLMYADYDMDHPEVVNELRNWGVWYTNTLGLDGFRIDAVKHIKYSFTRDWINHVRSATGKNMFAVAEFWKNDLGAIENYLQKTNWNHSVFDVPLHYNLYNASKSGGNYDMRNIFNGTVVQRHPSHAVTFVDNHDSQPEEALESFVEEWFKPLAYALTLTREQGYPSVFYGDYYGIPTHGVPAMRSKIDPILTARQKYAYGPQHDYLDHPDVIGWTREGDSSHPKSGLATLITDGPGGSKRMYAGLKNAGETWYDITGNRSDTVKIGSDGWGEFHVNDGSVSIYVQK

SEQ ID NO: 29024 - protein, 483 aa, Bacillus sp.
HHNGTNGTMMQYFEWYLPNDGNHWNRLNSDASNLKSKGITAVWIPPAWKGASQNDVGYGAYDLYDLGEFNQKGTVRTKYGTRSQLQAAVTSLKNNGIQVYGDVVMNHKGGADATEMVRAVEVNPNNRVQEVTGEYTIEAWTRFDFPGRGNTHSSFKWRWYHFDGVDWDQSRRLNNRIYKFRGKAWDWEVDTEFGNYDYLMYADYDMDHPEVVNELRNWGVWYTNTLGLDGFRIDAVKHIKYSFTRDWINHVRSATGKNMFAVAEFWKNDLGAIENYLQKTNWNHSVFDVPLHYNLYNASKSGGNYDMRNIFNGTVVQRHPSHAVTFVDNHDSQPEEALESFVEEWFKPLAYALTLTREQGYPSVFYGDYYGIPTHGVPAMRSKIDPILEARQKYAYGPQHDYLDHPDVIGWTREGDSSHPKSGLATLITDGPGGSKRMYAGLKNAGETWYDITGNRSDTVKIGSDGWGEFHVNDGSVSIYVQK

SEQ ID NO: 29025 - protein, 485 aa, Bacillus sp.
HHNGTNGTMMQYFEWYLPNDGNHWNRLNSDASNLKSKGITAVWIPPAWKGASQNDVGYGAYDLYDLGEFNQKGTVRTKYGTRSQLQAAVTSLKNNGIQVYGDVVMNHKGGADATEMVRAVEVNPNNRNQEVTGEYTIEAWTRFDFPGRGNTHSSFKWRWYHFDGVDWDQSRRLNNRIYKFRGHGKAWDWEVDTEFGNYDYLMYADYDMDHPEVVNELRNWGVWYTNTLGLDGFRIDAVKHIKYSFTRDWINHVRSATGKNMFAVAEFWKNDLGAIENYLQKTNWNHSVFDVPLHYNLYNASKSGTNYDMRNIFNGTVVQRHPSHAVTFVDNHDSQPEEALESFVEEWFKPLAYALTLTREQGYPSVFYGDYYGIPTHGVPAMRSKIDPILEARQKYAYGPQHDYLDHPDVIGWTREGDSSHPKSGLATLITDGPGGSKRMYAGLKNAGETWYDITGNRSDTVKIGSDGWGEFHVNDGSVSIYVQK

SEQ ID NO: 29026 - protein, 485 aa, Bacillus sp.
HHNGTNGTMMQYFEWYLPNDGNHWNRLNSDASNLKSKGITAVWIPPAWKGASQNDVGYGAYDLYDLGEFNQKGTVRTKYGTRSQLQAAVTSLKNNGIQVYGDVVMNHKGGADATEMVRAVEVNPNNRNQEVTGEYTIEAWTRFDFPGRGNTHSSFKWRWYHFDGVDWDQSRRLNNRIYKFRGHGKAWDWEVDTEFGNYDYLMYADYDMDHPEVVNELRNWGVWYTNTLGLDGFRIDAVKHIKYSFTRDWINHVRSATGKNMFAVAEFWKNDLGAIENYLQKTNWNHSVFDVPLHYNLYNASKSGGNYDMRNIFNGTVVQRHPSHAVTFVDNHDSQPEEALESFVEEWFKPLAYALTLTREQGYPSVFYGDYYGIPTHGVPAMRSKIDPILEARQKYAYGPQHDYLDHPDVIGWTREGDSSHPKSGLATLITDGPGGSKRMYAGLKNAGETWYDITGNRSDTVKSGSDGWGEFHVNDGSVSIYVQK

SEQ ID NO: 29027 - protein, 485 aa, Bacillus sp.
HHNGTNGTMMQYFEWYLPNDGNHWNRLNSDASNLKSKGITAVWIPPAWKGASQNDVGYGAYDLYDLGEFNQKGTVRTKYGTRSQLQAAVTSLKNNGIQVYGDVVMNHKGGADATEMVRAVEVNPNNRNQEVTGEYTIEAWTRFDFPGRGNTHSSFKWRWYHFDGVDWDQSRNLNNRIYKFRGHGKAWDWEVDTEFGNYDYLMYVDYDMDHPEVVNELRNWGVWYTNTLGLDGFRIDAVKHIKYSFTRDWINHVRSATGKNMFAVAEFWKNDLGAIENYLQKTNWNHSVFDVPLHYNLYNASKSGGNYDMRNIFNGTVVQRHPSHAVTFVDNHDSQPEEALESFVEEWFKPLAYALTLTREQGYPSVFYGDYYGIPTHGVPAMRSKIDPILEARQKYAYGPQHDYLDHPDVIGWTREGDSSHPKSGLATLITDGPGGSKRMYAGLKNAGETWYDITGNRSDTVKIGSDGWGEFHVNDGSVSIYVQK

SEQ ID NO: 29028 - protein, 483 aa, Bacillus sp.
HHNGTNGTMMQYFEWYLPNDGNHWNRLNSDASNLKSKGITAVWIPPAWKGASQNDVGYGAYDLYDLGEFNQKGTVRTKYGTRSQLQAAVTSLKNNGIQVYGDVVMNHKGGADATEMVRAVEVNPNNRNQEVTGEYTIEAWTRFDFPGRGNTHSSFKWRWYHFDGVDWDQSRRLDNRIYKFRGKAWDWEVDTEFGNYDYLMYVDYDMDHPEVVNELRNWGVWYTNTLGLDGFRIDAVKHIKYSFTRDWINHVRSATGKNMFAVAEFWKNDLGAIENYLQKTNWNHSVFDVPLHYNLYNASKSGGNYDMRNIFNGTVVQRHPSHAVTFVDNHDSQPEEALESFVEEWFKPLAYALTLTREQGYPSVFYGDYYGIPTHGVPAMRSKIDPILEARQKYAYGPQHDYLDHPDVIGWTREGDSSHPKSGLATLITDGPGGSKRMYAGLKNAGETWYDITGNRSDTVKIGSDGWGEFHVNDGSVSIYVQK

SEQ ID NO: 29029 - protein, 482 aa, Bacillus sp.
HHNGTNKTMMQYFEWYLPNDGNHWNRLNSDASNLKSKGITAVWIPPAWKGASQNDVGYGAYDLYDLGEFNQKGTVRTKYGTRSQLQAAVTSLKNNGIQVYGDVVMNHKGGADATEMVRAVEVNPNNRNQEVTGEYTIEAWTRFDFPGRGNTHSSFKWRWYHFDGVDWDQSRRLNNRIYKFRGKAWDWEVDTEFGNYDYLMYADYDMDHPEVVNELRNWGVWYTNTLGLDGFRIDAVKHIKYSFTRDWINHVRSATGKNMFAVAEFWKNDLGAIENYLQKTNWNHSVFDVPLHYNLYNASKSGGNYDMRNIFNGTVVQAHPNHAVTFVDNHDSQPEEALESFVEEWFKPLAYALTLTREQGYSVFYGDYYGIPTHGVPAMRSKIDPILEARQKYAYGPQHDYLDHPDVIGWTREGDSSHPKSGLATLITDGPGGSKRMYAGLKNAGETWYDITGNRSDTVKIGSDGWGEFHVNDGSVSIYVQK

SEQ ID NO: 29030 - protein, 482 aa, Bacillus sp.
HAGTNGTMMQYFEWYLPNDGNHWNRLNSDASNLKSKGITAVWIPPAWKGASQNDVGYGAYDLYDLGEFNQKGTVRTKYGTRSQLQAAVTSLKNNGIQVYGDVVMNHKGGADATEMVRAVEVNPNNRNQEVTGEYTIEAWTRFDFPGRGNTHSSFKWRWYHFDGVDWDQSRRLNNRIYKFRGKAWDWEVDTEFGNYDYLMYADYDMDHPEVVNELRNWGVWYTNTLGLDGFRIDAVKHIKYSFTRDWINHVRSATGKNMFAVAEFWKNDLGAIENYLQKTNWNHSVFDVPLHYNLYNASKSGGNYDMRNIFNGTVVQRHPSHAVTFVDNHDSQPEEALESFVEEWFKPLAYALTLTREQGYPSVFYGDYYGIPTHGVPAMRSKIDPILEARQKYAYGPQHDYLDHPDVIGWTREGDSSHPKSGLATLITDGPGGSKRMYAGLKNAGETWYDITGNRSDTVKIGSDGWGEFHVNDGSVSIYVQK

SEQ ID NO: 29031 - protein, 482 aa, Bacillus sp.
HHNGTNGTMMQYFEWYLPNDGNHWNRLNSDASNLKSKGITAVWIPPAWKAASQNDVGYGAYDLYDLGEFNQKGTVRTKYGTRSQLQAAVTSLKNNGIQVYGDVVMNHKGADATEMVRAVEVNPNNRNQEVTGEYTIEAWTRFDFPGRGNTHSSFKWRWYHFDGVDFDQSRQLNNRIYKFRGKAWDWEVDTEFGNYDYLMYADYDMDHPEVVNELRNWGVWYTNTLGLDGFRIDAVKHIKYSFTRDWINHVRSATGKNMFAVAEFWKNDLGAIENYLQKTNWNHSVFDVPLHYNLYNASKSGGNYDMRNIFNGTVVQRHPSHAVTFVDNHDSQPEEALESFVEEWFKPLAYALTLTREQGYPSVFYGDYYGIPTHGVPAMRSKIDPILEARQKYAYGPQHDYLDHPDVIGWTREGDSSHPKSGLATLITDGPGGSKRMYAGLKNAGETWYDITGNRSDTVKIGSDGWGEFHVNDGSVSIYVQK

SEQ ID NO: 29032 - protein, 482 aa, Bacillus sp.
HRGTNGTMMQYFEWYLPNDGNHWNRLNSDASNLKSKGITAVWIPPAWKGASQNDVGYGAYDLYDLGEFNQKGTVRTKYGTRSQLQAAVTSLKNNGIQVYGDVVMNHKGGADATEMVRAVEVNPNNRNQEVTGEYTIEAWTRFDFPGRGNTHSSFKWRWYHFDGVDWDQSRRLNNRIYKFRGKAWDWEVDTEFGNYDYLMYADYDMDHPEVVNELRNWGVWYTNTLGLDGFRIDAVKHIKYSFTRDWINHVRSATGKNMFAVAEFWKNDLGAIENYLQKTNWNHSVFDVPLHYNLYNASKSGGNYDMRNIFNGTVVQRHPSHAVTFVDNHDSQPEEALESFVEEWFKPLAYALTLTREQGYPSVFYGDYYGIPTHGVPAMRSKIDPILEARQKYAYGPQHDYLDHPDVIGWTREGDSSHPKSGLATLITDGPGGSKRMYAGLKNAGETWYDITGNRSDTVKIGSDGWGEFHVNDGSVSIYVQK

SEQ ID NO: 29033 - protein, 482 aa, Bacillus sp.
HGGTNGTMMQYFEWYLPNDGNHWNRLNSDASNLKSKGITAVWIPPAWKGASQNDVGYGAYDLYDLGEFNQKGTVRTKYGTRSQLQAAVTSLKNNGIQVYGDVVMNHKGGADATEMVRAVEVNPNNRNQEVTGEYTIEAWTRFDFPGRGNTHSSFKWRWYHFDGVDWDQSRRLNNRIYKFRGKAWDWEVDTEFGNYDYLMYADYDMDHPEVVNELRNWGVWYTNTLGLDGFRIDAVKHIKYSFTRDWINHVRSATGKNMFAVAEFWKNDLGAIENYLQKTNWNHSVFDVPLHYNLYNASKSGGNYDMRNIFNGTVVQRHPSHAVTFVDNHDSQPEEALESFVEEWFKPLAYALTLTREQGYPSVFYGDYYGIPTHGVPAMRSKIDPILEARQKYAYGPQHDYLDHPDVIGWTREGDSSHPKSGLATLITDGPGGSKRMYAGLKNAGETWYDITGNRSDTVKIGSDGWGEFHVNDGSVSIYVQK

SEQ ID NO: 29034 - protein, 482 aa, Bacillus sp.
HPGTNGTMMQYFEWYLPNDGNHWNRLNSDASNLKSKGITAVWIPPAWKGASQNDVGYGAYDLYDLGEFNQKGTVRTKYGTRSQLQAAVTSLKNNGIQVYGDVVMNHKGGADATEMVRAVEVNPNNRNQEVTGEYTIEAWTRFDFPGRGNTHSSFKWRWYHFDGVDWDQSRRLNNRIYKFRGKAWDWEVDTEFGNYDYLMYADYDMDHPEVVNELRNWGVWYTNTLGLDGFRIDAVKHIKYSFTRDWINHVRSATGKNMFAVAEFWKNDLGAIENYLQKTNWNHSVFDVPLHYNLYNASKSGGNYDMRNIFNGTVVQRHPSHAVTFVDNHDSQPEEALESFVEEWFKPLAYALTLTREQGYPSVFYGDYYGIPTHGVPAMRSKIDPILEARQKYAYGPQHDYLDHPDVIGWTREGDSSHPKSGLATLITDGPGGSKRMYAGLKNAGETWYDITGNRSDTVKIGSDGWGEFHVNDGSVSIYVQK

SEQ ID NO: 29035 - protein, 482 aa, Bacillus sp.
HCGTNGTMMQYFEWYLPNDGNHWNRLNSDASNLKSKGITAVWIPPAWKGASQNDVGYGAYDLYDLGEFNQKGTVRTKYGTRSQLQAAVTSLKNNGIQVYGDVVMNHKGGADATEMVRAVEVNPNNRNQEVTGEYTIEAWTRFDFPGRGNTHSSFKWRWYHFDGVDWDQSRRLNNRIYKFRGKAWDWEVDTEFGNYDYLMYADYDMDHPEVVNELRNWGVWYTNTLGLDGFRIDAVKHIKYSFTRDWINHVRSATGKNMFAVAEFWKNDLGAIENYLQKTNWNHSVFDVPLHYNLYNASKSGGNYDMRNIFNGTVVQRHPSHAVTFVDNHDSQPEEALESFVEEWFKPLAYALTLTREQGYPSVFYGDYYGIPTHGVPAMRSKIDPILEARQKYAYGPQHDYLDHPDVIGWTREGDSSHPKSGLATLITDGPGGSKRMYAGLKNAGETWYDITGNRSDTVKIGSDGWGEFHVNDGSVSIYVQK

SEQ ID NO: 29036 - protein, 484 aa, Bacillus sp.
HHGTNGTMMQYFEWYLPNDGNHWNRLNSDASNLKSKGITAVWIPPAWKGASQNDVGYGAYDLYDLGEFNQKGTVRTKYGTRSQLQAAVTSLKNNGIQVYGDVVMNHKGGADATEMVRAVEVNPNNRNQEVTGEYTIEAWTRFDFPGRGNTHSSFKWRWYHFDGVDWDQSRRLNNRIYKFRGHGKAWDWEVDTEFGNYDYLMYADYDMDHPEVVNELRNWGVWYTNTLGLDGFRIDAVKHIKYSFTRDWINHVRSATGKNMFAVAEFWKNDLGAIENYLQKTNWNHSVFDVPLHYNLYNASKSGGNYDMRNIFNGTVVQRHPSHAVTFVDNHDSQPEEALESFVEEWFKPLAYALTLTREQGYPSVFYGDYYGIPTHGVPAMRSKIDPILEARQKYAYGPQHDYLDHPDVIGWTREGDSSHPKSGLATLITDGPGGSKRMYAGLKNAGETWYDITGNRSDTVKIGSDGWGEFHVNDGSVSIYVQK

SEQ ID NO: 29037 - protein, 484 aa, Bacillus sp.
HCGTNGTMMQYFEWYLPNDGNHWNRLNSDASNLKSKGITAVWIPPAWKGASQNDVGYGAYDLYDLGEFNQKGTVRTKYGTRSQLQAAVTSLKNNGIQVYGDVVMNHKGGADATEMVRAVEVNPNNRNQEVTGEYTIEAWTRFDFPGRGNTHSSFKWRWYHFDGVDWDQSRRLNNRIYKFRGHGKAWDWEVDTEFGNYDYLMYADYDMDHPEVVNELRNWGVWYTNTLGLDGFRIDAVKHIKYSFTRDWINHVRSATGKNMFAVAEFWKNDLGAIENYLQKTNWNHSVFDVPLHYNLYNASKSGGNYDMRNIFNGTVVQRHPSHAVTFVDNHDSQPEEALESFVEEWFKPLAYALTLTREQGYPSVFYGDYYGIPTHGVPAMRSKIDPILEARQKYAYGPQHDYLDHPDVIGWTREGDSSHPKSGLATLITDGPGGSKRMYAGLKNAGETWYDITGNRSDTVKIGSDGWGEFHVNDGSVSIYVQK

SEQ ID NO: 29038 - protein, 481 aa, Bacillus amyloliquefaciens
VNGTLMQYFEWYTPNDGQHWKRLQNDAEHLSDIGITAVWIPPAYKGTSQADVGYGAYDLYDLGEFHQKGTVRTKYGTKGELQSAIKSLHSRDINVYGDVVINHKGGADATEDVTAVEVDPADRNRVISGEHLIKAWTHFHFPGRGSTYSDFKWYWYHFDGTDWDESRKLNRIYKFQGKTWDWEVSNEFGNYDYLMYADFDYDHPDVVAEIKRWGTWYANELQLDGFRLDAVKHIKFSFLRDWVNHVREKTGKEMFTVAEYWSNDLGALENYLNKTNFNHSVFDVPLHYQFHAASTQGGGYDMRKLLNGTVVSKHPLKSVTFVDNHDTQPGQSLESTVQTWFKPLAYAFILTRESGYPQVFYGDMYGTKGDSQREIPALKHKIEPILKARKQYAYGAQHDYFDHHDIVGWTREGDSSVANSGLAALITDGPGGAKRMYVGRQNAGETWHDITGNRSEPVVINSEGWGNFHVNGGSVSIYVQR

SEQ ID NO: 29039 - protein, 481 aa, Bacillus amyloliquefaciens
VNGTLMQYFEWYTPNDGQHWKRLQNDAEHLSDIGITAVWIPPAYKGTSQADVGYGAYDLYDLGEFHQKGTVRTKYGTKGELQSAIKSLHSRDINVYGDVVINHKGGADATEDVTAVEVDPADRNRVISGEHLIKAWTHFHFPGRGSTYSDFKWYWYHFDGTDWDESRKLNRIYKFQGKTWDWEVSNENGFYDYLMYADIDYDHPDVVAEIKRWGTWYANELQLDGFRLDAVKHIKFSFLRDWVNHVREKTGKEMFTVAEYWSNDLGALENYLNKTNFNHSVFDVPLHYQFHAASTQGGGYDMRKLLNGTVVSKHPLKSVTFVDNHDTQPGQSLESTVQTWFKPLAYAFILTRESGYPQVFYGDMYGTKGDSQREIPALKHKIEPILKARKQYAYGAQHDYFDHHDIVGWTREGDSSVANSGLAALITDGPGGAKRMYVGRQNAGETWHDITGNRSEPVVINSEGWGNFHVNGGSVSIYVQR

SEQ ID NO: 29040 - protein, 481 aa, Bacillus amyloliquefaciens
VNGTLMQYFEWYTPNDGQHWKRLQNDAEHLSDIGITAVWIPPAYKGTSQADVGYGAYDLYDLGEFHQKGTVRTKYGTKGELQSAIKSLHSRDINVYGDVVINHKGGADATEDVTAVEVDPADRNRVISGEHLIKAWTHFHFPGRGSTYSDFKWHWYHFDGTDWDESRKLNRIYRFQGKAWDWEVSNENGNYDYLMYADFDYDNPDVAAEIKRWGTWYANELQLDGFRLDAVKHIKFSFLRDWVNHVREKTGKEMFTVAEYWQNDLGALENYLNKTNFNHSVFDVPLHYQFHAASTQGGGYDMRKLLNGTVVSKHPLKSVTFVDNHDTQPGQSLESTVQTWFKPLAYAFILTRESGYPQVFYGDMYGTKGDSQREIPALKHKIEPILKARKQYAYGAQHDYFDHHDIVGWTREGDTSVQNSGLAALITDGPGGAKRMYVGRQNAGETWHDITGNRSEPVVINSEGWGEFHVNGGSVSIYVQR

SEQ ID NO: 29041 - protein, 481 aa, Bacillus amyloliquefaciens
VNGTLMQYFEWYTPNDGQHWKRLQNDAEHLSDIGITAVWIPPAYKGTSQADVGYGAYDLYDLGEFHQKGTVRTKYGTKGELQSAIKSLHSRDINVYGDVVINHKGGADATEDVTAVEVDPADRNRVISGEHLIKAWTHFHFPGRGSTYSDFKWHWYHFDGTDWDESRKLNRIYRFQGKAWDWEVSNENGNYDYLMYADFDYDNPDVAAEIKRWGTWYANELQLDGFRLDAVKHIKFSFLRDWVNHVREKTGKEMFTVAEYWQNDLGALENYLNKTNFNHSVFDVPLHYQFHAASTQGGGYDMRKLLNGTVVSKHPLKSVTFVDNHDTQPGQSLESTVQTWFKPLAYAFILTRESGYPQVFYGDMYGTKGDSQRKIPALKHKIEPILKARKQYAYGAQHDYFDHHDIVGWTREGDSSVRNSGLAALITDGPGGAKRMYVGRQNAGETWHDITGNRSEPVVINSEGWGEFHVNGGSVSIYVQR

SEQ ID NO: 29042 - protein, 481 aa, Bacillus amyloliquefaciens
VNGTLMQYFEWYTPNDGQHWKRLQNDAEHLSDIGITAVWIPPAYKGTSQADVGYGAYDLYDLGEFHQKGTVRTKYGTKGELQSAIKSLHSRDINVYGDVVINHKGGADATEDVTAVEVDPADRNRVISGEHLIKAWTHFHFPGRGSTYSDFKWHWYHFDGTDWDESRKLNRIYRFQGKAWDWEVSNENGNYDYLMYADFDYDNPDVAAEIKRWGTWYANELQLDGFRLDAVKHIKFSFLRDWVNHVREKTGKEMFTVAEYWQNDLGALENYLNKTNFNHSVFDVPLHYQFHAASTQGGGYDMRKLLNGTVVSKHPLKSVTFVDNHDTQPGQSLESTVQTWFKPLAYAFILTRESGYPQVFYGDMYGTKGDSQRKIPALKHKIEPILKARKQYAYGAQHDYFDHHDIVGWTREGDSSVQNSGLAALITDGPGGAKRMYVGRQNAGETWHDITGNRSEPVVINSEGWGEFHVNGGSVSIYVQR

SEQ ID NO: 29043 - protein, 481 aa, Bacillus licheniformis
VNGTLMQYFEWYTPNDGQHWKRLQNDAEHLSDIGITAVWIPPAYKAISQADVGYGAYDLYDLGEFHQKGTVRTKYGTKGELQSAIKSLHSRDINVYGDVVINHKAGADATEDVTAVEVDPADRNRVISGEHLIKAWTHFHFPGRGSTYSDFKWYWYHFDGTDWDESRKLNRIYKFQGKTWDWEVSNEFGNYDYLMYADFDYDHPDVVAEIKRWGTWYANELQLDGFRLDAVKHIKFAFLRDWVNHVREKTGKEMFTVAEYWSNDLGALENYLNKTNFNHSVFDVPLHYQFHAASTQGGGYDMRKLLNGTVVSKHPLKSVTFVDNHDTQPGQSLESTVQTWFKPLAYAFILTRESGYPQVFYGDMYGTKGDSQREIPALKHKIEPILKARKQYAYGAQHDYFDHHDIVGWTREGDSSVANSGLAALITDGPGGAKRMYVGRQNAGETWHDITGNRSEPVVINSEGWGEFHVNGGSVSIYVQR

SEQ ID NO: 29044 - protein, 481 aa, Bacillus licheniformis
VNGTLMQYFEWYTPNDGQHWKRLQNDAEHLSDIGITAVWIPPAYKAISQADVGYGAYDLYDLGEFHQKGTVRTKYGTKGELQSAIKSLHSRDINVYGDVVINHKAGADATEDVTAVEVDPADRNRVISGEHLIKAWTHFHFPGRGSTYSDFKWYWYHFDGTDWDESRKLNRIYKFQGKTWDWPVSNEFGNYDYLMYADFDYDHPDVVAEIKRWGTWYANELQLDGFRLDAVKHIKFSFLRDWVNHVREKTGKEMFTVAEYWSNDLGALENYLNKTNFNHSVFDVPLHYQFHAASTQGGGYDMRKLLNGTVVSKHPLKSVTFVDNHDTQPGQSLESTVQTWFKPLAYAFILTRESGYPQVFYGDMYGTKGDSQREIPALKHKIEPILKARKQYAYGAQHDYFDHHDIVGWTREGDSSVANSGLAALITDGPGGAKRMYVGRQNAGETWHDITGNRSEPVVINSEGWGEFHVNGGSVSIYVQR

SEQ ID NO: 29045 - protein, 481 aa, Bacillus licheniformis
VNGTLMQYFEWYTPNDGQHWKRLQNDAEHLSDIGITAVWIPPAYKGTSQADVGYGAYDLYDLGEFHQKGTVRTKYGTKGELQSAIKSLHSRDINVYGDVVINHKGGADATEDVTAVEVDPADRNRVISGEHLIKAWTHFHFPGRGSTYSDFKWHWYHFDGTDWDESRKLNRIYRFQGKAWDWEVSNENGNYDYLMYADFDYDNPDVAAEIKRWGTWYANELQLDGFRLDAVKHIKFSFLRDWVNHVREKTGKEMFTVAEYWQNDLGALENYLNKTNFNHSVFDVPLHYQFHAASTQGGGYDMRKLLNGTVVSKHPLKSVTFVDNHDTQPGQSLESTVQTWFKPLAYAFILTREAGFPQVFYGDMYGTKGDSQREIPALKHKIEPILKARKQYAYGAQHDYFDHHDIVGWTREGDSSVANSGLAALITDGPGGAKRMYVGRQNAGETWHDITGNRSEPVVINSEGWGEFHVNGGSVSIYVQR

SEQ ID NO: 29046 - protein, 481 aa, Bacillus amyloliquefaciens
VNGTLMQYFEWYTPNDGQHWKRLQNDAEHLSDIGITAVWIPPAYKAISQADVGYGAYDLYDLGEFHQKGTVRTKYGTKGELQSAIKSLHSRDINVYGDVVINHKAGADATEDVTAVEVDPADRNRVISGEHLIKAWTHFHFPGRGSTYSDFKWYWYHFDGTDWDESRKLNRIYLFQGKTWDWEVSNEFGNYDYLMYADFDYDHPDVVAEIKRWGTWYANELQLDGFRLDAVKHIKFSFLRDWVNHVREKTGKEMFTVAEYWSNDLGALENYLNKTNFNHSVFDVPLHYQFHAASTQGGGYDMRKLLNGTVVSKHPLKSVTFVDNHDTQPGQSLESTVQTWFKPLAYAFILTRESGYPQVFYGDMYGTKGDSQREIPALKHKIEPILKARKQYAYGAQHDYFDHHDIVGWTREGDSSVANSGLAALITDGPGGAKRMYVGRQNAGETWHDITGNRSEPVVINSEGWGEFHVNGGSVSIYVQR

SEQ ID NO: 29047 - protein, 481 aa, Bacillus licheniformis
VNGTLMQYFEWYTPNDGQHWKRLQNDAEHLSDIGITAVWIPPAYKAISQADVGYGAYDLYDLGEFWQKGTVRTKYGTKGELQSAIKSLHSRDINVYGDVVINHKAGADATEDVTAVEVDPADRNRVISGEYLIKAWTHFHFPGRGSTYSDFKWYWYHFDGTDWDESRKLNRIYLFQGKTWDWPVSNEFGNYDYLMYADFDYDHPDVVAEIKRWGTWYANELQLDGFRLDAVKHIKFSFLRDWVNHVREKTGKEMFTVAEYWSNDLGALENYLNKTNFNHSVFDVPLHYQFHAASTQGGGYDMRKLLNGTVVSKHPLKSVTFVDNHDTQPGQSLESTVQTWFKPLAYAFILTRESGYPQVFYGDMYGTKGDSQREIPALKHKIEPILKARKQYAYGAQHDYFDHHDIVGWTREGDSSVANSGLAALITDGPGGAKRMYVGRQNAGETWHDITGNRSEPVVINSEGWGEFHVNGGSVSIYVQR

SEQ ID NO: 29048 - protein, 483 aa, Bacillus sp.
NGTNSTMMQYFEWYLPNDGNHWNRLNSDASNLKSKGITAVWIPPAWKGASQNDVGYGAYDLYDLGEFNQKGTVRTKYGTRSQLQAAVTSLKNNGIQVYGDVVMNHKGGADATEMVRAVEVNPNNRNQEVTGEYTIEAWTRFDFPGRGNTHSSFKWRWYHFDGVDWDQSRRLNNRIYKFRGHGKAWDWEVDTEFGNYDYLMYADYDMDHPEVVNELRNWGVWYTNTLGLDGFRIDAVKHIKYSFTRDWINHVRSATGKNMFAVAEFWKNDLGAIENYLQKTNWNHSVFDVPLHYNLYNASKSGGNYDMRNIFNGTVVQRHPSHAVTFVDNHDSQPEEALESFVEEWFKPLAYALTLTREQGYPSVFYGDYYGIPTHGVPAMRSKIDPILEARQKYAYGPQHDYLDHPDVIGWTREGDSSHPKSGLATLITDGPGGSKRMYAGLKNAGETWYDITGNRSDTVKIGSDGWGEFHVNDGSVSIYVQK

SEQ ID NO: 29049 - protein, 481 aa, Bacillus licheniformis
LNGTLMQYFEWYTPNDGQHWKRLQNDSAYLAEHGITAVWIPPAYKGTSQADVGYGAYDLYDLGEFHQKGTVRTKYGTKGELQSAIKSLHSRDIQVYGDVVINHKGGADATEDVTAVEVDPADRNRVISGEYLIKAWTHFHFPGRGSTYSDFKWHWYHFDGTDWDESRKLNRIYKFQGKAWDWEVSSENGNYDYLMYADIDYDHPDVVAEIKRWGTWYANELQLDGFRLDAVKHIKFSFLRDWVNHVREKTGKEMFTVAEYWQNDLGALENYLNKTNFNHSVFDVPLHYQFHAASTQGGGYDMRKLLNGTVVSKHPLKSVTFVDNHDTQPGQSLESTVQTWFKPLAYAFILTRESGYPQVFYGDMYGTKGDSQREIPALKHKIEPILKARKQYAYGAQHDYFDHHDIVGWTREGDSSVANSGLAALITDGPGGAKRMYVGRQNAGETWHDITGNRSEPVVINSEGWGEFHVNGGSVSTYVQR

SEQ ID NO: 29050 - protein, 481 aa, Bacillus licheniformis
LNGTLMQYFEWYTPNDGQHWKRLQNDSAYLAEHGITAVWIPPAYKGTSQADVGYGAYDLYDLGEFHQKGTVRTKYGTKGELQSAIKSLHSRDINVYGDVVINHKGGADATEDVTAVEVDPADRNRVISGEYLIKAWTHFHFPGRGSTYSDFKWHWYHFDGTDWDESRKLNRIYKFQGKAWDWEVSSENGNYDYLMYADIDYDHPDVVAEIKRWGTWYANELQLDGFRLDAVKHIKFSFLRDWVNHVREKTGKEMFTVAEYWQNDLGALENYLNKTNFNHSVFDVPLHYQFHAASTQGGGYDMRKLLNGTVVSKHPLKSVTFVDNHDTQPGQSLESTVQTWFKPLAYAFILTRESGYPQVFYGDMYGTKGDSQREIPALKHKIEPILKARKQYAYGAQHDYFDHHDIVGWTREGDSSVANSGLAALITDGPGGAKRMYVGRQNAGETWHDITGNRSEPVVINSEGWGEFHVNGGSVSIYVQR

SEQ ID NO: 29051 - protein, 481 aa, Bacillus licheniformis
LNGTLMQYFEWYTPNDGQHWKRLQNDSAYLAEHGITAVWIPPAYKGTSQADVGYGAYDLYDLGEFHQKGTVRTKYGTKGELQSAIKSLHSRDINVYGDVVINHKGGADATEDVTAVEVDPADRNRVISGEYLIKAWTHFHFPGRGNTYSDFKWHWYHFDGTDWDESRKLNRIYKFQGKAWDWEVSSENGNYDYLMYADIDYDHPDVVAEIKRWGTWYANELQLDGFRLDAVKHIKFSFLRDWVNHVREKTGKEMFTVAEYWQNDLGALENYLNKTNFNHSVFDVPLHYQFHAASTQGGGYDMRKLLNGTVVSKHPLKSVTFVDNHDTQPGQSLESTVQTWFKPLAYAFILTRESGYPQVFYGDMYGTKGDSQREIPALKHKIEPILKARKQYAYGAQHDYFDHHDIVGWTREGDSSVANSGLAALITDGPDGAKRMYVGRQNAGETWHDITGNRSEPVVINSEGWGEFHVNGGSVSIYVQR

SEQ ID NO: 29052 - protein, 481 aa, Bacillus licheniformis
LNGTLMQYFEWYTPNDGQHWKRLQNDSAYLAEHGITAVWIPPAYKGTSQADVGYGAYDLYDLGEFHQKGTVRTKYGTKGELQSAIKSLHSRDINVYGDVVINHKGGADATEDVTAVEVDPADRNRVISGEYLIKAWTHFHFPGRGNTYSDFKWHWYHFDGTDWDESRKLNRIYKFQGKAWDWEVSSENGNYDYLMYADIDYDHPDVVAEIKRWGTWYANELQLDGFRLDAVKHIKFSFLRDWVNHVREKTGKEMFTVAEYWQNDLGALENYLNKTNFNHSVFDVPLHYQFHAASTQGGGYDMRKLLNGTVVSKHPLKSVTFVDNHDTQPGQSLESTVQTWFKPLAYAFILTRESGYPQVFYGDMYGTKGDSQREIPALKHKIEPILKARKQYAYGAQHDYFDHHDIVGWTREGDSSVANSDLAALITDGPGGAKRMYVGRQNAGETWHDITGNRSEPVVINSEGWGEFHVNGGSVSIYVQR

SEQ ID NO: 29053 - protein, 481 aa, Bacillus licheniformis
LNGTLMQYFEWYTPNDGQHWKRLQNDSAYLAEHGITAVWIPPAYKGTSQADVGYGAYDLYDLGEFHQKGTVRTKYGTKGELQSAIKSLHSRDINVYGDVVINHKGGADATEDVTAVEVDPADRNREISGEYLIKAWTHFHFPGRGSTYSDFKWHWYHFDGTDWDESRKLNRIYKFQGKAWDWEVSSENGNYDYLMYADIDYDHPDVAAEIKRWGTWYANELQLDGFRLDAVKHIKFSFLRDWVNHVREKTGKEMFTVAEYWQNDLGALENYLNKTNFNHSVFDVPLHYQFHAASTQGGGYDMRKLLNGTVVSKHPLKSVTFVDNHDTQPGQSLESTVQTWFKPLAYAFILTRESGYPQVFYGDMYGTKGDSQREIPALKHKIEPILKARKQYAYGAQHDYFDHHDIVGWTREGDSSVANSGLAALITDGPGGAKRMYVGRQNAGETWHDITGNRSEPVVINSEGWGEFHVNGGSVSIYVQR

SEQ ID NO: 29054 - protein, 481 aa, Bacillus licheniformis
LNGTLMQYFEWYTPNDGQHWKRLQNNSAYLSEHGITAVWIPPAYKGTSQADVGYGAYDLYDLGEFHQKGTVRTKYGTKGELQSAIKSLHSRDINVYGDVVINHKGGADATEDVTAVEVDPADRNRVISGEYLIKAWTHFHFPGRGSTYSDFKWHWYHFDGTDWDESRKLNRIYKFQGKAWDWEVSSENGNYDYLMYADIDYDHPDVVAEIKRWGTWYANELQLDGFRLDAVKHIKFSFLRDWVNHVREKTGKEMFTVAEYWQNDLGALENYLNKTNFNHSVFDVPLHYQFHAASTQGGGYDMRKLLNGTVVSKHPLKSVTFVDNHDTQPGQSLESTVQTWFKPLAYAFILTRESGYPQVFYGDMYGTKGDSQREIPALKHKIEPILKARKQYAYGAQHDYFDHHDIVGWTREGDSSVANSGLAALITDGPGGAKRMYVGRQNAGETWHDITGNRSEPVVINSEGWGEFHVNGGSVSIYVQR

SEQ ID NO: 29055 - protein, 481 aa, Bacillus licheniformis
VNGTLMQYFEWYTPNDGQHWKRLQNDAEHLSDIGITAVWIPPAYKAISQADVGYGAYDLYDLGEFHQKGTVRTKYGTKGELQSAIKSLHSRDINVYGDVVINHKAGADATEDVTAVEVDPADRNRVISGEHLIKAWTHFHFPGRGSTYSDFKWYWYHFDGTDWDESRKLNRIYKFQGKTWDWEVSNEFGNYDYLMYADFDYDHPDVVAEIKRWGTWYANELQLDGFRLDAVKHIKFSFLRDWVNHVREKTGKEMFTVAEYWSNDLGALENYLNKTNFNHSVFDVPLHYQFHAASTQGGGYDMRKLLNGTVVSKHPLKSVTFVDNHDTQPGQSLESTVQTWFKPLAYAFILTRESGYPQVFYGDMYGTKGDSQREIPALKHKIEPILKARKQYAYGAQHDYFDHHDIVGWTREGDSSVANSGLAALITDGPGGAKRMYVGRNHAGETWHDITGNRSEPVVINSEGWGEFHVNGGSVSIYVQR

SEQ ID NO: 29056 - protein, 480 aa, Geobacillus stearothermophilus
NGTLMQYFEWYTPNDGQHWKRLQNDSAYLAEHGITAVWIPPAYKGTSQADVGYGAYDLYDLGEFHQKGTVRTKYGTKGELQSAIKSLHSRDINVYGDVVINHKGGADATEDVTAVEVDPADRNRVISGEYLIKAWTHFHFPGRGSTYSDFKWHWYHFDGTDWDESRKLNRIYKFQGKAWDWEVSSENGNYDYLMYADIDYDHPDVVAEIKRWGTWYANELQLDGFRLDAVKHIKFSFLRDWVNHVREKTGKPLFTVGEYWSYDINKLHNYITKTNGTMSLFDAPLHNKFYTASKSGGAFDMRTLMTNTLMKDQPTLAVTFVDNHDTEPGQALQSWVDPWFKPLAYAFILTRQEGYPCVFYGDYYGIPQYNIPSLKSKIDPLLIARRDYAYGTQHDYLDHSDIIGWTREGVTEKPGSGLAALITDGPGGSKWMYVGKQHAGKVFYDLTGNRSDTVTINSDGWGEFKVNGGSVSVWVPRKTT

SEQ ID NO: 29057 - protein, 484 aa, Aspergillus niger
AATALAATPAEWRSQSIYFLLTDRFARTDGSTTAACDTSDRKYCGGTWQGIINHLDYIQGMGFTAIWISPVTEQLPQDTGYGEAYHGYWQQDIYSLNSNFGTADDLKALSSALHARGMYLMVDVVANHMGYAGAGSSVDYSVFNPFNSQSYFHPYCLITDYNNQTNVEDCWLGDNTVSLPDLRTEDSDVQNIWYDWIKELVSNYSIDGLRIDTVKHVQKDFWPGYNDAAGVYCVGEVFDGDPAYTCPYQNYLDGVLNYPIYYPLLRAFQSTSGSISDLYNMINTVKSDCADPTLLGTFIENHDNPRFASYTSDISLAKNAIAFTILSDGIPIIYYGQEQHYSGGNDPANREALWLSGYSTTSELYKLIATLNKIRNHAISKDSGYLTYKNYPIYQDSNTIAMRKGTDGSQVITVLSNLGASGSSYTLSLSGTGYTAGQKLTEIYTCTTVTVDSSGNVPVPMASGLPRVLYPASKLSGSGLCSSS

SEQ ID NO: 29058 - protein, 485 aa, Bacillus sp.
HHNGTNGTMMQYFEWYLPNDGNHWNRLNSDASNLKSKGITAVWIPPAWKATSQNDVGYGAYDLYDLGEFNQKGTVRTKYGTRSQLQAAVTSLKNNGIQVYGDVVMNHKGGADATEMVRAVEVNPNNRNQEVTGEYTIEAWTRFDFPGRGNTHSSFKWRWYHFDGVDWDQSRNVNNRIYKFRGHGKAWDWEVDTEFGNYDYLMYADYDMDHPEVVNELRNWGVWYTNTLGLDGFRIDAVKHIKYSFTRDWINHVRSATGKNMFAVAEFWKNDLGAIENYLQKTNWNHSVFDVPLHYNLYNASKSQGNYDMRNIFNGTVVQRHPSHAVTFVDNHDSQPEEALESFVDTWFKPLAYALTLTREQGYPSVFYGDYYGIPTHGVPAMRSKIDPILEARQKYAYGPQHDYLDHPDVIGWTREGDSSHPKSGLATLITDGPGGSKRMYAGLKNAGETWYDITGNRSDTVKIGSDGWGEFHVNGTSVSIYVQK

SEQ ID NO: 29059 - protein, 485 aa, Bacillus sp.
HHNGTNGTMMQYFEWYLPNDGNHWNRLNSDASNLKSKGITAVWIPPAWKAASQNDVGYGAYDLYDLGEFNQKGTVRTKYGTRSQLQAAVTSLKNNGIQVYGDVVMNHKGGADATEMVRAVEVNPNNRNQEVTGEYTIEAWTRFDFPGRGNTHSSFKWRWYHFDGVDWDQSRRLTNRIYKFRGHGKAWDWEVDTEFGNYDYLMYADYDMDHPEVVNELRNWGVWYTNTLGLDGFRIDAVKHIKYSFTRDWINHVRSATGKNMFAVAEFWKNDLGAIENYLQKTNWNHSVFDVPLHYNLYNASKSGGNYDMRNIFNGTVVQANPNHAVTFVDNHDSQPEEALESFVEEWFKPLAYALTLTREQGYPSVFYGDYYGIPTHGVPAMRSKIDPILEARQKYAYGPQHDYLDHPDVIGWTREGDSSHPKSGLATLITDGPGGSKRMYAGLKNAGETWYDITGNRSDTVKIGSDGWGEFHVNDGSVSIYVQK

SEQ ID NO: 29060 - protein, 483 aa, Bacillus sp.
HHNGTNGTMMQYFEWYLPNDGNHWNRLNSDASNLKSKGITAVWIPPAWKAVSQNDVGYGAYDLYDLGEFNQKGTVRTKYGTRSQLQAAVTSLKNNGIQVYGDVVMNHKGGADATEMVRAVEVNPNNRNQEVTGEYTIEAWTRFDFPGRGNTHSSFKWRWYHFDGVDFDQSREFTNRIYKFRGKAWDWEVDTEFGNYDYLMYVDYDMDHPEVVNELRNWGVWYTNTLGLDGFRIDAVKHIKYSFTRDWINHVRSATGKNMFAVAEFWKNDLGAIENYLQKTNWNHSVFDVPLHYNLYNASKSGGNYDMRNIFNGTVVQRHPSHAVTFVDNHDSQPEEALESFVEEWFKPLAYALTLTREQGYPSVFYGDYYGIPTHGVPAMRSKIDPILEARQKYAYGPQHDYLDHPDVIGWTREGDSSHPKSGLATLITDGPGGSKRMYAGLKNAGETWYDITGNRSDTVKIGSDGWGEFHVNDGSVSIYVQK

SEQ ID NO: 29061 - protein, 483 aa, Synthetic construct
HHNGTNGTMMQYFEWYLPNDGNHWNRLNSDASNLKSKGITAVWIPPAWKGASQNDVGYGAYDLYDLGEFNQKGTVRTKYGTRSQLQAAVTSLKNNGIQVYGDVVMNHKGGADATEMVRAVEVNPNNRNQEVTGEYTIEAWTRFDFPGRGNTHSSFKWRWYHFDGVDWDQSRRLNNRIYKFRGKAWDWEVDTEFGNYDYLMYADYDMDHPEPTNELRNWGVWYTNTLGLDGFRIDAVKHIKYSFTRDWINHVRSATGKNMFAVAEFWKNDLGAIENYLQKTNWNHSVFDVPLHYNLYNASKSGGNYDMRNIFNGTVVQRHPSHAVTFVDNHDSQPEEALESFVEEWFKPLAYALTLTREQGYPSVFYGDYYGIPTHGVPAMRSKIDPILEARQKYAYGPQHDYLDHPDVIGWTREGDSSHPKSGLATLITDGPGGSKRMYAGLKNAGETWYDITGNRSDTVKIGSDGWGEFHVNDGSVSIYVQK

SEQ ID NO: 29062 - protein, 485 aa, Bacillus sp.
HHNGTNGTMMQYFEWYLPNDGNHWNRLNSDASNLKSKGITAVWIPPAWKGASQNDVGYGAYDLYDLGEFNQKGTVRTKYGTRSQLQAAVTSLKNNGIQVYGDVVMNHKGGADATEMVRAVEVNPNNRNQEVTGEYTIEAWTRFDFPGRGNTHSSFKWRWYHFDGVDWDQSRRLNNRIYKFRGHGKAWDWEVDTEFGNYDYLMYADYDMDSPEVTNELRNWGVWYTNTLGLDGFRIDAVKHIKYSFTRDWINHVRSATGKNMFAVAEFWKNDLGAIENYLQKTNWNHSVFDVPLHYNLYNASKSGGNYDMRNIFNGTVVQRHPSHAVTFVDNHDSQPEEALESFVEEWFKPLAYALTLTREQGYPSVFYGDYYGIPTHGVPAMRSKIDPILEARQKYAYGPQHDYLDHPDVIGWTREGDSSHPKSGLATLITDGPGGSKRMYAGLKNAGETWYDITGNRSDTVKIGSDGWGEFHVNDGSVSIYVQK

SEQ ID NO: 29063 - protein, 485 aa, Bacillus sp.
HHNGTNGTMMQYFEWYLPNDGNHWNRLNSDASNLKSKGITAVWIPPAWKGASQNDVGYGAYDLYDLGEFNQKGTVRTKYGTRSQLQAAVTSLKNNGIQVYGDVVMNHKGGADATEMVRAVEVNPNNRNQEVTGEYTIEAWTRFDFPGRGNTHSSFKWRWYHFDGVDWDQSRRLNNRIYKFRGHGKAWDWEVDTEFGNYDYLMYADYDMDHPEVVNELRNWGVWYTNTLGLDGFRIDAVKHIKYSFTRDWINHVRSATGKNMFAVAEFWKNDLGAIENYLQKTNWNHSVFDVPLHYNLYNASKSSGNYDMRNIFNGTVVQRHPSHAVTFVDNHDSQPEEALESFVDEWFKPLAYALTLTREQGYPSVFYGDYYGIPTHGVPAMRSKIDPILEARQKYAYGPQHDYLDHPDVIGWTREGDSSHPKSGLATLITDGPGGSKRMYAGLKNAGETWYDITGNRSDTVKIGSDGWGEFHVNKQSVSIYVQK

SEQ ID NO: 29064 - protein, 485 aa, Bacillus sp.
HHNGTNGTMMQYFEWYLPNDGNHWNRLNSDASNLKSKGITAVWIPPAWKAASQNDVGYGAYDLYDLGEFNQKGTVRTKYGTRSQLQAAVTSLKNNGIQVYGDVVMNHKGGADATEMVRAVEVNPNNRNQEVTGEYTIEAWTRFDFPGRGNTHSSFKWRWYHFDGVDWDQSRNLTNRIYKFRGHGKAWDWEVDTEFGNYDYLMYADYDMDHPEVVNELRNWGVWYTNTLGLDGFRIDAVKHIKYSFTRDWINHVRIATGKNMFAVAEFWKNDLGAIENYLQKTNWNHSVFDVPLHYNLYNASKSGGNYDMRNIFNGTVVQRHPSHAVTFVDNHDSQPEEALESFVDEWFKPLAYALTLTREQGYPSVFYGDYYGIPTHGVPAMRSKIDPILEARQKYAYGPQHDYLDHPDVIGWTREGDSSHPKSGLATLITDGPGGSKRMYAGLKNAGETWYDITGNRSDTVKIGSDGWGEFHVNDQSVSIYVQK

SEQ ID NO: 29065 - protein, 485 aa, Bacillus sp.
HHNGTNGTMMQYFEWYLPNDGNHWNRLNSDASNLKSKGITAVWIPPAWKGASQNDVGYGAYDLYDLGEFNQKGTVRTKYGTRSQLQAAVTSLKNNGIQVYGDVVMNHKGGADATEMVRAVEVNPNNRNQEVTGEYTIEAWTRFDFPGRGNTHSSFKWRWYHFDGVDWDQSRRLNNRIYKFRGHGKAWDWEVDTEFGNYDYLMYADYDMDHPEVVNELRNWGVWYTNTLGLDGFRIDAVKHIKYSFTRDWINHVRSATGKNMFAVAEFWKNDLGAIENYLQKTNWNHSVFDVPLHNNLYTASKSGGNYDMRNIFNGTVVQRHPSHAVTFVDNHDSQPEEALESFVEEWFKPLAYALTLTREQGYPSVFYGDYYGIPTHGVPAMRSKIDPILEARQKYAYGPQHDYLDHPDVIGWTREGDSSHPKSGLATLITDGPGGSKRMYAGLKNAGETWYDITGNRSDTVKIGSDGWGEFHVNDGSVSIYVQK

SEQ ID NO: 29066 - protein, 483 aa, Bacillus sp.
HHNGTNGTMMQYFEWYLPNDGNHWNRLNSDASNLKSKGITAVWIPPAWKGASQNDVGYGAYDLYDLGEFNQKGTVRTKYGTRSQLQAAVTSLKNNGIQVYGDVVMNHKGGADATEMVDAVEVNPNNRNQEVTGEYTIEAWTRFDFPGRGNTHSSFKWRWYHFDGVDFDQSRRLNNRIYKFRGKAWDWEVDTEFGNYDYLMYADYDMDHPEVVNELRNWGVWYTNTLGLDGFRIDAVKHIKYSFTRDWINHVRIATGKNMFAVAEFWKNDLGAIENYLQKTNWNHSVFDVPLHYNLYNASKSGGNYDMRNIFNGTVVQRHPSHAVTFVDNHDSQPEEALESFVDEWFKPLAYALTLTREQGYPSVFYGDYYGIPTHGVPAMRSKIDPILEARQKYAYGPQHDYLDHPDVIGWTREGDSSHPKSGLATLITDGPGGSKRMYAGLKNAGETWYDITGNRSDTVKIGSDGWGEFHVNDQSVSIYVQK

SEQ ID NO: 29067 - protein, 483 aa, Bacillus sp.
HHNGTNGTMMQYFEWYLPNDGNHWNRLNSDASNLKSKGITAVWIPPAWKGASQNDVGYGAYDLYDLGEFNQKGTVRTKYGTRSQLQAAVTSLKNNGIQVYGDVVMNHKGGADATEMVRAVEVNPNNRNQEVTGEYTIEAWTRFDFPGRGNTHSSFKWRWYHFDGVDWDQSRRLNNRIYKFRGKAWDWEVDTENGFYDYLMYADIDYDYPEVVNELRNWGVWYTNTLGLDGFRIDAVKHIKYSFTRDWINHVRSATGKNMFAVAEFWKNDLGAIENYLQKTNWNHSVFDVPLHYNLYNASKSGGNYDMRNIFNGTVVQRHPSHAVTFVDNHDSQPEEALESFVEEWFKPLAYALTLTREQGYPSVFYGDYYGIPTHGVPAMRSKIDPILEARQKYAYGPQHDYLDHPDVIGWTREGDSSHPKSGLATLITDGPGGSKRMYAGLKNAGETWYDITGNRSDTVKIGSDGWGEFHVNDGSVSIYVQK

SEQ ID NO: 29068 - protein, 483 aa, Bacillus sp.
HHNGTNGTMMQYFEWYLPNDGNHWNRLNSDASNLKSKGITAVWIPPAWKAASQNDVGYGAYDLYDLGEFNQKGTVRTKYGTRSQLQAAVTSLKNNGIQVYGDVVMNHKGGADATEMVRAVEVNPNNRNQEVTGEYTIEAWTRFDFPGRGNTHSSFKWRWYHFDGVDWDQSRNLNNRIYKFRGKAWDWEVDTEFGNYDYLMYTDYDMDHPEVVNELRNWGVWYTNTLGLDGFRIDAVKHIKYSFTRDWINHVRSATGKNMFAVAEFWKNDLGAIENYLQKTNWNHSVFDVPLHYNLYNASKSGGNYDMRNIFNGTVVQRHPSHAVTFVDNHDSQPEEALESFVEEWFKPLAYALTLTREQGYPSVFYGDYYGIPTHGVPAMRSKIDPILEARQKYAYGPQHDYLDHPDVIGWTREGDSSHPKSGLATLITDGPGGSKRMYAGLKNAGETWYDITGNRSDTVKIGSDGWGEFHVNDGSVSIYVQK

SEQ ID NO: 29069 - protein, 485 aa, Bacillus sp.
HHNGTNGTMMQYFEWYLPNDGNHWNRLNSDASNLKSKGITAVWIPPAWKAASQNDVGYGAYDLYDLGEFNQKGTVRTKYGTRSQLQAAVTSLKNNGIQVYGDVVMNHKGGADATEMVRAVEVNPNNRNQEVTGEYTIEAWTRFDFPGRGNTHSSFKWRWYHFDGVDWDQSRDLTNRIYKFRGHGKAWDWEVDTEFGNYDYLMYADYDMDHPEVVNELRNWGVWYTNTLGLDGFRIDAVKHIKYSFTRDWINHVRIATGKNMFAVAEFWKNDLGAIENYLQKTNWNHSVFDVPLHYNLYNASKSGGNYDMRNIFNGTVVQRHPSHAVTFVDNHDSQPEEALESFVDEWFKPLAYALTLTREQGYPSVFYGDYYGIPTHGVPAMRSKIDPILEARQKYAYGPQHDYLDHPDVIGWTREGDSSHPKSGLATLITDGPGGSKRMYAGLKNAGETWYDITGNRSDTVKIGSDGWGEFHVNDQSVSIYVQK

SEQ ID NO: 29070 - protein, 483 aa, Bacillus sp.
HHNGTNGTMMQYFEWYLPNDGNHWNRLNSDASNLKSKGITAVWIPPAWKGASQNDVGYGAYDLYDLGEFNQKGTVRTKYGTRSQLQAAVTSLKNNGIQVYGDVVMNHKGGADATEMVRAVEVNPNNRNQEVTGEYTIEAWTRFDFPGRGNTHSSFKWRWYHFDGVDWDQSRRLNNRIYLFRGKAWRWEVPTENGNYDYLMYADIDMDHPEVVNELRNWGVWYTNTLGLDGFRIDAVKHIKYSFTRDWINHVRSATGKNMFAVAEFWKNDLGAIENYLQKTNWNHSVFDVPLHYNLYNASKSGGNYDMRNIFNGTVVQRHPSHAVTFVDNHDSQPEEALESFVEEWFKPLAYALTLTREQGYPSVFYGDYYGIPTHGVPAMRSKIDPILEARQKYAYGPQHDYLDHPDVIGWTREGDSSHPKSGLATLITDGPGGSKRMYAGLKNAGETWYDITGNRSDTVKIGSDGWGEFHVNDGSVSIYVQK

SEQ ID NO: 29071 - protein, 483 aa, Bacillus sp.
HHNGTNGTMMQYFEWYLPNDGNHWNRLNSDASNLKSKGITAVWIPPAWKGASQNDVGYGAYDLYDLGEFNQKGTVRTKYGTRSQLQAAVTSLKNNGIQVYGDVVMNHKGGADATEMVRAVEVNPNNRNQEVTGEYTIEAWTRFDFPGRGNTHSSFKWRWYHFDGVDWDQSRRLNNRIYKFRGKAWDWEVDTEFGNYDYLMYADYDMDHPEVVNELRNWGVWYTNTLGLDGFRIDAVKHIKYSFTRDWINHVRSATGKNMFAVAEFWKNDLGAIENYLQKTNWNHSVFDVPLHYNLYNASKSGGNYDMRNIFNGTVVQRHPSHAVTFVDNHDSQPEEALESFVDPWFKPLAYALTLTREQGYPSVFYGDYYGIPTHGVPAMRSKIDPILEARQKYAYGPQHDYLDHPDVIGWTREGDSSHPKSGLATLITDGPGGSKRMYAGLKNAGETWYDITGNRSDTVKIGSDGWGEFHVNDQSVSIYVQK

SEQ ID NO: 29072 - protein, 485 aa, Bacillus sp.
HHNGTNGTMMQYFEWYLPNDGNHWNRLNSDASNLKSKGITAVWIPPAWKGASQNDVGYGAYDLYDLGEFNQKGTVRTKYGTRSQLQAAVTSLKNNGIQVYGDVVMNHKGGADATEMVRAVEVNPNNRNQEVTGEYTIEAWTRFDFPGRGNTHSSFKWRWYHFDGVDWDQSRRLNNRIYKFRGHGKAWDWEVDTEFGNYDYLMYADYDMDHPEVVNELRNWGVWYTNTLGLDGFRIDAVKHIKYSFTRDWINHVRSATGKNMFAVAEFWQNDLGMIENYLQKTNWNHSVFDVPLHYNLYNASKSGGNYDMRNIFNGTVVQRHPSHAVTFVDNHDSQPEEALESFVEEWFKPLAYALTLTREQGYPSVFYGDYYGIPTHGVPAMRSKIDPILEARQKYAYGPQHDYLDHPDVIGWTREGDSSHPKSGLATLITDGPGGSKRMYAGLKNAGETWYDITGNRSDTVKIGSDGWGEFHVNDGSVSIYVQK

SEQ ID NO: 29073 - protein, 485 aa, Bacillus sp.
HHNGTNGTMMQYFEWYLPNDGNHWNRLNSDASNLKSKGITAVWIPPAWKGASQNDVGYGAYDLYDLGEFNQKGTVRTKYGTRSQLQAAVTSLKNNGIQVYGDVVMNHKGGADTTEMVRAVEVNPNNRNQEVTGEYTIEAWTRFDFPGRGNTHSSFKWRWYHFDGVDWDQSRRLNNRIYKFRGHGKAWDWEVDTEFGNYDYLMYADYDMDHPEVVNELRNWGVWYTNTLGLDGFRIDAVKHIKYSFTRDWINHVRSATGKNMFAVAEFWKNDLGAIENYLQKTNWNHSVFDVPLHYNLYNASQSGGNYDMRNIFNGTVVQRHPSHAVTFVDNHDSQPEEALESFVETWFKPLAYALTLTREQGYPSVFYGDYYGIPTHGVPAMRSKIDPILEARQKYAYGPQHDYLDHPDVIGWTREGDSSHPKSGLATLITDGPGGSKRMYAGLKNAGETWYDITGNRSDTVKIGSDGWGEFHVNGKSVSIYVQK

SEQ ID NO: 29074 - protein, 485 aa, Bacillus sp.
HHNGKNGTMMQYFEWYLPNDGNHWNRLNSDASNLKSKGITAVWIPPAWKGASQNDVGYGAYDLYDLGEFNQKGTVRTKYGTRSQLQAAVTSLKNNGIQVYGDVVMNHKGGADATEMVRAVEVNPNNRNQEVTGEYTIEAWTRFDFPGRGNTHSSFKWRWYHFDGVDWDQSREFNNRIYKFRGHGKAWDWEVDTEFGNYDYLMYADYDMDHPEVVNELRNWGVWYTNTLGLDGFRIDAVKHIKYSFTRDWINHVRSATGKNMFAVAEFWKNDLGAIENYLQKTNWNHSVFDVPLHYNLYNASQSGGNYDMRNIFNGTVVQRHPSHAVTFVDNHDSQPEEALESFVEPWFKPLAYALTLTREQGYPSVFYGDYYGIPTHGVPAMRSKIDPILEARQKYAYGPQHDYLDHPDVIGWTREGDSSHPKSGLATLITDGPGGSKRMYAGLKNAGETWYDITGNRSDTVKIGSDGWGEFHVNKSSVSIYVQK

SEQ ID NO: 29075 - protein, 485 aa, Bacillus sp.
HHNGTNGTMMQYFEWYLPNDGNHWNRLNSDASNLKSKGIKAVWIPPAWKGASQNDVGYGAYDLYDLGEFNQRGTVRTKYGTRSQLQAAVTSLKNNGIQVYGDVVMNHKGGADATEMVRAVEVNPNNRNQEVTGEYTIEAWTRFDFPGRGNTHSSFKWRWYHFDGVDFDQSRNFQNRIYKFRGHGKAWDWEVDTEFGNYDYLMYADYDMDHPEVVNELRNWGVWYTNTLGLDGFRIDAVKHIKYSFTRDWINHVRSATGKNMFAVAEFWKNDLGAIENYLQKTNWNHSVFDVPLHYNLYNASKSQGNYDMRNIFNGTVVQRHPSHAVTFVDNHDSQPEEALESFVDTWFKPLAYALTLTREQGYPSVFYGDYYGIPTHGVPAMRSKIDPILEARQKYAYGPQHDYLDHPDVIGWTREGDSSHPKSGLATLITDGPGGSKRMYAGLKNAGETWYDITGNRSDTVKIKSDGWGEFHVNGGSVSIYVQK

SEQ ID NO: 29076 - protein, 485 aa, Bacillus sp.
HHNGTNGTMMQYFEWYLPNDGNHWNRLNSDASNLKSKGITAVWIPPAWKATSQNDVGYGAYDLYDLGEFNQKGTVRTKYGTRSQLQAAVTSLKNNGIQVYGDVVMNHKGGADATEMVRAVEVNPNNRNQEVTGEYTIEAYTRFDFSGRGNTHSSFKWRWYHFDGVDWDQSRDLNNRIYKFRGHGKAWDWEVDTEFGNYDYLMYADYDMDHPEVVNELRNWGVWYTNTLGLDGFRIDAVKHIKYSFTRDWINHVRSATGKNMFAVAEFWKNDLGAIENYLQKTNWNHSVFDVPLHYNLYNASKSGGNYDMRNIFNGTVVQRHPSHAVTFVDNHDSQPEEALESFVEEWFKPLAYALTLTREQGYPSVFYGDYYGIPTHGVPAMRSKIDPILEARQKYAYGPQHDYLDHPDVIGWTREGDSSHPKSGLATLITDGPGGSKRMYAGLKNAGETWYDITGNRSDTVKIGSDGWGEFHVNDGSVSIYVQK

SEQ ID NO: 29077 - protein, 483 aa, Bacillus sp.
HHNGTNGTMMQYFEWYLPNDGNHWNRLNSDASNLKSKGITAVWIPPAWKGASQNDVGYGAYDLYDLGEFNQKGTVRTKYGTRSQLQAAVTSLKNNGIQVYGDVVMNHKGGADATEMVRAVEVNPNNRNQEVTGEYTIEAWTRFDFPGRGNTHSSFKWRWYHFDGVDWDQSRKLNNRIYKFRGKAWDWEVDTEFGNYDYLMYVDYDMDHPEVVNELRNWGVWYTNTLGLDGFRIDAVKHIKYSFTRDWINHVRIATGKNMFAVAEFWKNDLGAIENYLQKTNWNHSVFDVPLHYNLYNASKSGGNYDMRNIFNGTVVQRHPSHAVTFVDNHDSQPEEALESFVDEWFKPLAYALTLTREQGYPSVFYGDYYGIPTHGVPAMRSKIDPILEARQKYAYGPQHDYLDHPDVIGWTREGDSSHPKSGLATLITDGPGGSKRMYAGLKNAGETWYDITGNRSDTVKIGSDGWGEFHVNDQSVSIYVQK

SEQ ID NO: 29078 - protein, 485 aa, Bacillus sp.
HHNGTNGTMMQYFEWYLPNDGNHWNRLNSDASNLKSKGITAVWIPPAWKGASQNDVGYGAYDLYDLGEFNQKGTVRTKYGTRSQLQAAVTSLKNNGIQVYGDVVMNHKGGADLTEMVRAVEVNPNNRNQEVTGEYTIEAWTRFDFPGRGNTHSSFKWRWYHFDGVDFDQSRQLNNRIYKFRGHGKAWDWEVDTEFGNYDYLMYADYDMDHPEVVNELRNWGVWYTNTLGLDGFRIDAVKHIKYSFTRDWINHVRSATGKNMFAVAEFWKNDLGAIENYLQKTNWNHSVFDVPLHYNLYNASKSGGNYDMRNIFNGTVVQRHPSHAVTFVDNHDSQPEEALESFVEEWFKPLAYALTLTREQGLPSVFYGDYYGIPTHGVPAMRSKIDPILEARQKYAYGPQHDYLDHPDVIGWTREGDSSHPKSGLATLITDGPGGSKRMYAGLKNAGETWYDITGNRSDTVKIGSDGWGEFHVNDGSVSIYVQK

SEQ ID NO: 29079 - protein, 485 aa, Bacillus sp.
HHNGTNGTMMQYFEWYLPNDGNHWNRLNSDASNLKSKGITAVWIPPAWKATSQNDVGYGAYDLYDLGEFNQKGTVRTKYGTRSQLQAAVTSLKNNGIQVYGDVVMNHKGGADATEMVRAVEVNPNNRNQEVTGEYTIEAWTRFDFPGRGNTHSSFKWRWYHFDGVDWDQSRELNNRIYKFRGHGKAWDWEVDTEFGNYDYLMYTDYDMDHPEVVNELRNWGVWYTNTLGLDGFRIDAVKHIKYSFTRDWINHVRSATGKNMFAVAEFWKNDLGAIENYLQKTNWNHSVFDVPLHYNLYNASKSGGNYDMRNIFNGTVVQVHPSHAVTFVDNHDSQPEEALESFVEEWFKPLAYALTLTREQGYPSVFYGDYYGIPTHGVPAMRSKIDPILEARQKYAYGPQHDYLDHPDVIGWTREGDSSHPKSGLATLITDGPGGSKRMYAGLKNAGETWYDITGTRSDTVKIGSDGWGEFHVNYGSVSIYVQK

SEQ ID NO: 29080 - protein, 483 aa, Bacillus sp.
HHNGTNGTMMQYFEWYLPNDGNHWNRLNSDASNLKSKGITAVWIPPAWKAASQNDVGYGAYDLYDLGEFNQKGTVRTKYGTRSQLQAAVTSLKNNGIQVYGDVVMNHKGGADATEMVRAVEVNPNNRNQEVTGEYTIEAWTRFDFPGRGNTHSSFKWRWYHFDGVDWDQSRDLQNRIYKFRGKAWDWEVDTEFGNYDYLMYVDYDMDHPEVVNELRNWGVWYTNTLGLDGFRIDAVKHIKYSFTRDWINHVRSATGKNMFAVAEFWKNDLGAIENYLQKTNWNHSVFDVPLHYNLYNASKSGGNYDMRNIFNGTVVQRHPSHAVTFVDNHDSQPEEALESFVDEWFKPLAYALTLTREQGYPSVFYGDYYGIPTHGVPAMRSKIDPILEARQKYAYGPQHDYLDHPDVIGWTREGDSSHPKSGLATLITDGPGGSKRMYAGLKNAGETWYDITGNRSDTVKIGSDGWGEFHVNKSSVSIYVQK

SEQ ID NO: 29081 - protein, 485 aa, Bacillus sp.
HHNGTNGTMMQYFEWYLPNDGNHWNRLNSDASNLKSKGITAVWIPPAWKGASQNDVGYGAYDLYDLGEFNQKGTVRTKYGTRSQLQAAVTSLKNNGIQVYGDVVMNHKGGADATEMVRAVEVNPNNRNQEVTGEYTIEAWTRFDFPGRGNTHSSFKWRWYHFDGVDWDQSRRLNNRIYKFRGHGKAWDWEVDTEFGNYDYLMYADYDMDHPEVVNELRNWGVWYTNTLGLDGFRIDAVKHIKYSFTRDWINHVRSATGKNMFAVAEFWHNDLGRIENYLQKTNWNHSVFDVPLHYNLYNASKSGGNYDMRNIFNGTVVQRHPSHAVTFVDNHDSQPEEALESFVEEWFKPLAYALTLTREQGYPSVFYGDYYGIPTHGVPAMRSKIDPILEARQKYAYGPQHDYLDHPDVIGWTREGDSSHPKSGLATLITDGPGGSKRMYAGLKNAGETWYDITGNRSDTVKIGSDGWGEFHVNDGSVSIYVQK

SEQ ID NO: 29082 - protein, 485 aa, Bacillus sp.
HHNGTNGTMMQYFEWYLPNDGNHWNRLNSDASNLKSKGITAVWIPPAWKGASQNDVGYGAYDLYDLGEFNQKGTVRTKYGTRSQLQAAVTSLKNNGIQVYGDVVMNHKGGADATEMVRAVEVNPNNRNQEVTGEYTIEAWTRFDFPGRGNTHSSFKWRWYHFDGVDWDQSRRLNNRIYKFRGHGKAWDWEVDTEFGNYDYLMYADYDMDHPEVVNELRNWGVWYTNTLGLDGFRIDAVKHIKYSFTRDWINHVRSATGKNMFAVAEFWKNDLGAIENYLQKTNWNHSVFDVPLHYNLYNASKSGGNYDMRNIFNGTVVQRHPSHAVTFVDNHDSQPEEALESFVDPWFKPLAYALTLTREQGYPSVFYGDYYGIPTHGVPAMRSKIDPILEARQKYAYGPQHDYLDHPDVIGWTREGDSSHPKSGLATLITDGPGGSKRMYAGLKNAGETWYDITGNRSDTVKIGSDGWGEFHVNQASVSIYVQK

SEQ ID NO: 29083 - protein, 483 aa, Bacillus sp.
HHNGTNGTMMQYFEWYLPNDGNHWNRLNSDASNLKSKGITAVWIPPAWKGASQNDVGYGAYDLYDLGEFNQKGTVRTKYGTRSQLQAAVTSLKNNGIQVYGDVVMNHKGGADATEMVRAVEVNPNNRNQEVTGEYTIEAWTRFDFPGRGNTHSSFKWRWYHFDGVDWDQSERLNNRIYKFRGKAWDWEVETEFGNYDYLMYADYDMDHPEVVNELRNWGVWYTNTLGLDGFRIDAVKHIKYSFTRDWINHVRSATGKNMFAVAEFWKNDLGAIENYLQKTNWNHSVFDVPLHYNLYNASKSGGNYDMRNIFNGTVVQRHPSHAVTFVDNHDSQPEEALESFVDPWFKPLAYALTLTREQGYPSVFYGDYYGIPTHGVPAMRSKIDPILEARQKYAYGPQHDYLDHPDVIGWTREGDSSHPKSGLATLITDGPGGSKRMYAGLKNAGETWYDITGNRSDTVKIGSDGWGEFHVNGGSVSIYVQK

SEQ ID NO: 29084 - protein, 485 aa, Bacillus sp.
HHNGTNGTMMQYFEWYLPNDGNHWNRLNSDASNLKSKGITAVWIPPAWKGASQNDVGYGAYDLYDLGEFNQKGTVRTKYGTRSQLQAAVTSLKNNGIQVYGDVVMNHKGGADATEMVRAVEVNPNNRNQEVTGEYTIEAWTRFDFPGRGNTHSSFKWRWYHFDGVDWDQSRRLNNRIYKFRGHGKAWDWEVDTEFGNYDYLMYADYDMDHPEVVNELRNWGVWYTNTLGLDGFRIDAVKHIKYSFTRDWINHVRSATGKNMFAVAEFWKNDLGAIENYLQKTNWNHSVFDVPLHYNLYNASKSAGNYDMRNIFNGTVVQRHPSHAVTFVDNHDSQPEEALESFVDPWFKPLAYALTLTREQGYPSVFYGDYYGIPTHGVPAMRSKIDPILEARQKYAYGPQHDYLDHPDVIGWTREGDSSHPKSGLATLITDGPGGSKRMYAGLKNAGETWYDITGNRSDTVKIGSDGWGEFHVNGKSVSIYVQK

SEQ ID NO: 29085 - protein, 483 aa, Bacillus sp.
HHNGTNGTMMQYFEWYLPNDGNHWNRLNSDASNLKSKGITAVWIPPAWKAVSQNDVGYGAYDLYDLGEFNQKGTVRTKYGTRSQLQAAVTSLKNNGIQVYGDVVMNHKGGADATEMVRAVEVNPNNRNQEVTGEYTIEAWTRFDFPGRGNTHSSFKWRWYHFDGVDWDQSREFTNRIYKFRGKAWDWEVDTEFGNYDYLMYVDYDMDHPEVVNELRNWGVWYTNTLGLDGFRIDAVKHIKYSFTRDWINHVRIATGKNMFAVAEFWKNDLGAIENYLQKTNWNHSVFDVPLHYNLYNASKSGGNYDMRNIFNGTVVQRHPSHAVTFVDNHDSQPEEALESFVDEWFKPLAYALTLTREQGYPSVFYGDYYGIPTHGVPAMRSKIDPILEARQKYAYGPQHDYLDHPDVIGWTREGDSSHPKSGLATLITDGPGGSKRMYAGLKNAGETWYDITGNRSDTVKIGSDGWGEFHVNDQSVSIYVQK

SEQ ID NO: 29086 - protein, 485 aa, Bacillus sp.
HHNGTNGTMMQYFEWYLPNDGNHWNRLNSDASNLKSKGITAVWIPPAWKGASQNDVGYGAYDLYDLGEFNQKGTVRTKYGTRSQLQAAVTSLKNNGIQVYGDVVMNHKGGADATEMVRAVEVNPNNRNQEVTGEYTIEAWTRFDFPGRGNTHSSFKWRWYHFDGVDWDQSRRLNNRIYKFRGHGKAWDWEVDTEFGNYDYLMYADYDMDHPEVVNELRNWGVWYTNTLGLDGFRIDAVKHIKYSFTRDWINHVRSATGKNMFAVAEFWKNDLGAIENYLQKTNWNHSVFDVPLHYNLYNASQSGGNYDMRNIFNGTVVQRHPSHAVTFVDNHDSQPEEALESFVEPWFKPLAYALTLTREQGYPSVFYGDYYGIPTHGVPAMRSKIDPILEARQKYAYGPQHDYLDHPDVIGWTREGDSSHPKSGLATLITDGPGGSKRMYAGLKNAGETWYDITGNRSDTVKIGSDGWGEFHVNKTSVSIYVQK

SEQ ID NO: 29087 - protein, 483 aa, Bacillus sp.
HHNGTNGTMMQYFEWYLPNDGNHWNRLNSDASNLKSKGITAVWIPPAWKGASQNDVGYGAYDLYDLGEFNQKGTVRTKYGTRSQLQAAVTSLKNNGIQVYGDVVMNHKGGADATEMVRAVEVNPNNRNQEVTGEYTIEAWTRFDFPGRGNTHSSFKWRWYHFDGVDWDQSRRLNNRIYKFRGKAWDWEVDTEFGNYDYLMYADYDMDHPEVVNELRNWGVWYTNTLGLDGFRIDAVKHIKYSFTRDWINHVRSATGKNMFAVAEFWRNDLGWIENYLQKTNWNHSVFDVPLHYNLYNASKSGGNYDMRNIFNGTVVQRHPSHAVTFVDNHDSQPEEALESFVEEWFKPLAYALTLTREQGYPSVFYGDYYGIPTHGVPAMRSKIDPILEARQKYAYGPQHDYLDHPDVIGWTREGDSSHPKSGLATLITDGPGGSKRMYAGLKNAGETWYDITGNRSDTVKIGSDGWGEFHVNDGSVSIYVQK

SEQ ID NO: 29088 - protein, 483 aa, Bacillus sp.
HHNGTNGTMMQYFEWYLPNDGNHWNRLNSDASNLKSKGITAVWIPPAWKAASQNDVGYGAYDLYDLGEFNQKGTVRTKYGTRSQLQAAVTSLKNNGIQVYGDVVMNHKGGADATEMVRAVEVNPNNRNQEVTGEYTIEAWTRFDFPGRGNTHSSFKWRWYHFDGVDWDQSRRLTNRIYKFRGKAWDWEVDTEFGNYDYLMYADYDMDHPEVVNELRNWGVWYTNTLGLDGFRIDAVKHIKYSFTRDWINHVRSATGKNMFAVAEFWKNDLGAIENYLQKTNWNHSVFDVPLHYNLYNASKSGGNYDMRNIFNGTVVQANPNHAVTFVDNHDSQPEEALESFVEEWFKPLAYALTLTREQGYPSVFYGDYYGIPTHGVPAMRSKIDPILEARQKYAYGPQHDYLDHPDVIGWTREGDSSHPKSGLATLITDGPGGSKRMYAGLKNAGETWYDITGNRSDTVKIGSDGWGEFHVNDGSVSIYVQK

SEQ ID NO: 29089 - protein, 483 aa, Bacillus sp.
HHNGTNNTVMQYFEWYLPNDGNHWNRLNSDASNLKSKGITAVWIPPAWKGASQNDVGYGAYDLYDLGEFNQKGTVRTKYGTRSQLQAAVTSLKNNGIAVYGDVVMNHKGGADATEMVRAVEVNPNNRNQEVTGEYTIEAWTRFDFPGRGNTHSSFKWRWYHFDGVDWDQSRRLNNRIYKFRGKAWDWEVDTEFGNYDYLMYADYDMDHPEVVNELRNWGVWYTNTLGLDGFRIDAVKHIKYSFTRDWINHVRSATGKNMFAVAEFWKNDLGAIENYLQKTNWNHSVFDVPLHYNLYNASKSGGNYDMRNIFNGTVVQSHPMHAVTFVDNHDSQPEEALESFVEEWFKPLAYALTLTREQGYPSVFYGDYYGIPTHGVPAMRSKIDPILEARQKYAYGPQHDYLDHPDVIGWTREGDSSHPKSGLATLITDGPGGSKRMYAGLKNAGETWYDITGNRSDTVKIGSDGWGEFHVNDGSVSIYVQK

SEQ ID NO: 29090 - protein, 485 aa, Bacillus sp.
HHNGTNGTMMQYFEWYLPNDGNHWNRLNSDASNLKSKGITAVWIPPAWKAISQNDVGYGAYDLYDLGEFNQKGTVRTKYGTRSQLQAAVTSLKNNGIQVYGDVVMNHKGGADATEMIRAVEVNPNNRNQEVTGEYTIEAWTRFDFPGRGNTHSSFKWRWYHFDGVDWDQSRELNNRIYKFRGHGKAWDWEVDTEFGNYDYLMYADYDMDHPEVVNELRNWGVWYTNTLGLDGFRIDAVKHIKYSFTRDWINHVRSATGKNMFAVAEFWKNDLGAIENYLQKTNWNHSVFDVPLHYNLYNASKSGGNYDMRNIFNGTVVQRHPSHAVTFVDNHDSQPEEALESFVEEWFKPLAYALTLTREQGYPSVFYGDYYGIPTHGVPAMRSKIDPILEARQKYAYGPQHDYLDHPDVIGWTREGDSSHPKSGLATLITDGPGGSKRMYAGLKNAGETWYDITGNRSDTVKIGSDGWGEFHVNDGSVSIYVQK

SEQ ID NO: 29091 - protein, 485 aa, Bacillus sp.
HHNGTNGTMMQYFEWYLPNDGNHWNRLNSDASNLKSKGITAVWIPPAWKAVSQNDVGYGAYDLYDLGEFNQKGTVRTKYGTRSQLQAAVTSLKNNGIQVYGDVVMNHKGGADLTEMVDAVEVNPNNRNQEVTGEYTIEAWTRFDFPGRGNTHSSFKWRWYHFDGVDWDQSREFTNRIYKFRGHGKAWDWEVDTEFGNYDYLMYVDYDMDHPEVVNELRNWGVWYTNTLGLDGFRIDAVKHIKYSFTRDWINHVRSATGKNMFAVAEFWKNDLGAIENYLQKTNWNHSVFDVPLHYNLYNASKSGGNYDMRNIFNGTVVQRHPSHAVTFVDNHDSQPEEALESFVEEWFKPLAYALTLTREQGYPSVFYGDYYGIPTHGVPAMRSKIDPILEARQKYAYGPQHDYLDHPDVIGWTREGDSSHPKSGLATLITDGPGGSKRMYAGLKNAGETWYDITGNRSDTVKIGSDGWGEFHVNDGSVSIYVQK

SEQ ID NO: 29092 - protein, 485 aa, Bacillus sp.
HHNGTNGTMMQYFEWYLPNDGNHWNRLNSDASNLKSKGITAVWIPPAWKGISQNDVGYGAYDLYDLGEFNQKGTVRTKYGTRSQLQAAVTSLKNNGIQVYGDVVMNHKGGADATEMVRAVEVNPNNRNQEVTGEYTIEAWTRFDFPGRGNTHSSFKWRWYHFDGVDWDQSRRTNNRIYKFRGHGKAWDWEVDTEFGNYDYLMYTDYDMDHPEVVNELRNWGVWYTNTLGLDGFRIDAVKHIKYSFTRDWINHVRSATGKNMFAVAEFWKNDLGAIENYLQKTNWNHSVFDVPLHYNIYNASKSGGNYDMRNIFNGTVVQRHPSHAVTFVDNHDSQPEEALESFVEEWFKPLAYALTLTREQGYPSVFYGDYYGIPTHGVPAMRSKIDPILEARQKYAYGPQHDYLDHPDVIGWTREGDSSHPKSGLATLITDGPGGSKRMYAGLKNAGETWYDITGNRSDTVKIGSDGWGEFHVNDGSVSIYVQK

SEQ ID NO: 29093 - protein, 485 aa, Bacillus sp.
HHNGTNATMMQYFEWYLPNDGNHWNRLNSDASNLKSKGITAVWIPPAWKGASQNDVGYGAYDLYDLGEFNQKGTVRTKYGTRSQLQAAVTSLKNNGILVYGDVVMNHKGGADATEMVRAVEVNPNNRNQEVTGEYTIEAWTRFDFPGRGNTHSSFKWRWYHFDGVDWDQSRRLNNRIYKFRGHGKAWDWEVDTEFGNYDYLMYADYDMDHPEVVNELRNWGVWYTNTLGLDGFRIDAVKHIKYSFTRDWINHVRSATGKNMFAVAEFWKNDLGAIENYLQKTNWNHSVFDVPLHYNLYNASKSGGNYDMRNIFNGTVVQMHPSHAVTFVDNHDSQPEEALESFVEEWFKPLAYALTLTREQGYPSVFYGDYYGIPTHGVPAMRSKIDPILEARQKYAYGPQHDYLDHPDVIGWTREGDSSHPKSGLATLITDGPGGSKRMYAGLKNAGETWYDITGNRSDTVKIGSDGWGEFHVNDGSVSIYVQK

SEQ ID NO: 29094 - protein, 483 aa, Bacillus sp.
HHNGTNGTMMQYFEWYLPNDGNHWNRLNSDASNLKSKGITAVWIPPAWKGASQNDVGYGAYDLYDLGEFNQKGTVRTKYGTRSQLQAAVTSLKNNGIQVYGDVVMNHKGGADATEMVRAVEVNPNNRNQEVTGEYTIEAWTRFDFPGRGNTHSSFKWRWYHFDGVDWDQSRRLNNRIYKFRGKAWDWEVDTEFGNYDYLMYADYDMDHTETVNELRNWGVWYTNTLGLDGFRIDAVKHIKYSFTRDWINHVRSATGKNMFAVAEFWKNDLGAIENYLQKTNWNHSVFDVPLHYNLYNASKSGGNYDMRNIFNGTVVQRHPSHAVTFVDNHDSQPEEALESFVEEWFKPLAYALTLTREQGYPSVFYGDYYGIPTHGVPAMRSKIDPILEARQKYAYGPQHDYLDHPDVIGWTREGDSSHPKSGLATLITDGPGGSKRMYAGLKNAGETWYDITGNRSDTVKIGSDGWGEFHVNDGSVSIYVQK

SEQ ID NO: 29095 - protein, 485 aa, Bacillus sp.
HHNGTNGTMMQYFEWYLPNDGNHWNRLNSDASNLKSKGITAVWIPPAWKAASQNDVGYGAYDLYDLGEFNQKGTVRTKYGTRSQLQAAVTSLKNNGIQVYGDVVMNHKGGADATEMVPAVEVNPNNRNQEVTGEYTIEAWTRFDFPGRGNTHSSFKWRWYHFDGVDWDQSRELNNRIYKFRGHSKAWDWEVDTEFGNYDYLMYTDYDMDHPEVVNELRNWGVWYTNTLGLDGFRIDAVKHIKYSFTRDWINHVRSATGKNMFAVAEFWKNDLGAIENYLQKTNWNHSVFDVPLHYNLYNASKSGGNYDMRNIFNGTVVQRHPSHAVTFVDNHDSQPEEALESFVEEWFKPLAYALTLTREQGYPSVFYGDYYGIPTHGVPAMRSKIDPILEARQKYAYGPQHDYLDHPDVIGWTREGDSSHPKSGLATLITDGPGGSKRMYAGLKNAGETWYDITGNRSDTVKIGSDGWGEFHVNDGSVSIYVQK

SEQ ID NO: 29096 - protein, 483 aa, Bacillus sp.
HHNGTNGTMMQYFEWYLPNDGNHWNRLNSDASNLKSKGITAVWIPPAWKGASQNDVGYGAYDLYDLGEFNQKGTVRTKYGTRSQLQAAVTSLKNNGIQVYGDVVMNHKGGADATEMVRAVEVNPNNRNQEVTGEYTIEAWTRFDFPGRGNTHSSFKWRWYHFDGVDWDQSRRLNNRIYKFRGKAWDWEVDTEFGNYDYLMYADYDMDHPEVVNELRNWGVWYTNTLGLDGFRIDAVKHIKYSFTRDWINHVRSATGKNMFAVAEFWKNDLGAIENYLQKTNWNHSVFDVPLHYNLYNASKSGGNYDMRNIFNGTVVQRHPSHAVTFVDNHDSQPEEALESFVEPWFKPLAYALTLTREQGYPSVFYGDYYGIPTHGVPAMRSKIDPILEARQKYAYGPQHDYLDHPDVIGWTREGDSSHPKSGLATLITDGPGGSKRMYAGLKNAGETWYDITGNRSDTVKIGSDGWGEFHVNKSSVSIYVQK

SEQ ID NO: 29097 - protein, 485 aa, Bacillus sp.
HHNGTNGTMMQYFEWYLPNDGNHWNRLNSDASNLKSKGITAVWIPPAWKGASQNDVGYGAYDLYDLGEFNQKGTVRTKYGTRSQLQAAVTSLKNNGIQVYGDVVMNHKGGADATEMVRAVEVNPNNRNQEVTGEYTIEAWTRFDFPGRGNTHSSFKWRWYHFDGVDWDQSREFDNRIYKFRGHGKAWDWEVDTEFGNYDYLMYADYDMDHPETTNEMRNWGVWYTNTLGLDGFRIDAVKHIKYSFTRDWINHVRSATGKNMFAVAEFWKNDLGAIENYLQKTNWNHSVFDVPLHYNLYNASKSGGNYDMRNIFNGTVVQRHPSHAVTFVDNHDSQPEEALESFVEEWFKPLAYALTLTREQGYPSVFYGDYYGIPTHGVPAMRSKIDPILEARQKYAYGPQHDYLDHPDVIGWTREGDSSHPKSGLATLITDGPGGSKRMYAGLKNAGETWYDITGNRSDTVKIGSDGWGEFHVNDGSVSIYVQK

SEQ ID NO: 29098 - protein, 485 aa, Bacillus sp.
HHNGTNGTMMQYFEWYLPNDGNHWNRLNSDASNLKSKGITAVWIPPAWKGASQNDVGYGAYDLYDLGEFNQKGTVRTKYGTRSQLQAAVTSLKNNGIQVYGDVVMNHKGGADATEMVRAVEVNPNNRNQEVTGEYTIEAWTRFDFPGRGNTHSSFKWRWYHFDGVDWDQSRRLNNRIYKFRGHGKAWDWEVDTEFGNYDYLMYADYDMDHPEVVNELRNWGVWYTNTLGLDGFRIDAVKHIKYSFTRDWINHVRSATGKNMFAVAEFWKNDLGAIENYLQKTNWNHSVFDVPLHYNLYNASKSGGNYDMRNIFNGTVVQRHPSHAVTFVDNHDSQPEEALESFVDPWFKPLAYALTLTREQGYPSVFYGDYYGIPTHGVPAMRSKIDPILEARQKYAYGPQHDYLDHPDVIGWTREGDSSHPKSGLATLITDGPGGSKRMYAGLKNAGETWYDITGNRSDTVKIGSDGWGEFHVNKTSVSIYVQK

SEQ ID NO: 29099 - protein, 485 aa, Bacillus sp.
HHNGTNGTMMQYFEWYLPNDGNHWNRLNSDASNLKSKGITAVWIPPAWKAASQNDVGYGAYDLYDLGEFNQKGTVRTKYGTRSQLQAAVTSLKNNGIQVYGDVVMNHKGGADATEMVRAVEVNPNNRNQEVTGEYTIEAWTRFDFPGRGNTHSSFKWRWYHFDGVDWDQSRNLTNRIYKFRGHGKAWDWEVDTEFGNYDYLMYADYDMDHPEVVNELRNWGVWYTNTLGLDGFRIDAVKHIKYSFTRDWINHVRSATGKNMFAVAEFWKNDLGAIENYLQKTNWNHSVFDVPLHYNLYNASKSGGNYDMRNIFNGTVVQANPNHAVTFVDNHDSQPEEALESFVEEWFKPLAYALTLTREQGYPSVFYGDYYGIPTHGVPAMRSKIDPILEARQKYAYGPQHDYLDHPDVIGWTREGDSSHPKSGLATLITDGPGGSKRMYAGLKNAGETWYDITGNRSDTVKIGSDGWGEFHVNDGSVSIYVQK

SEQ ID NO: 29100 - protein, 485 aa, Bacillus sp.
HHNGTNGTMMQYFEWYLPNDGNHWNRLNSDASNLKSKGITAVWIPPAWKAVSQNDVGYGAYDLYDLGEFNQKGTVRTKYGTRSQLQAAVTSLKNNGIQVYGDVVMNHKGGADATEMVRAVEVNPNNRNQEVTGEYTIEAWTRFDFPGRGNTHSSFKWRWYHFDGVDWDQSRDLENRIYKFRGHGKAWDWEVDTEFGNYDYLMYADYDMDHPEVVNELRNWGVWYTNTLGLDGFRIDAVKHIKYSFTRDWINHVRSATGKNMFAVAEFWKNDLGAIENYLQKTNWNHSVFDVPLHYNLYNASKSGGNYDMRNIFNETVVQAHPNHAVTFVDNHDSQPEEALESFVEEWFKPLAYALTLTREQGYPSVFYGDYYGIPTHGVPAMRSKIDPILEARQKYAYGPQHDYLDHPDVIGWTREGDSSHPKSGLATLITDGPGGSKRMYAGLKNAGETWYDITGNRSDTVKIGSDGWGEFHVNDGSVSIYVQK

SEQ ID NO: 29101 - protein, 485 aa, Bacillus sp.
HHNGTNGTMMQYFEWYLPNDGNHWNRLNSDASNLKSKGITAVWIPPAWKGASQNDVGYGAYDLYDLGEFNQKGTVRTKYGTRSQLQAAVTSLKNNGIQVYGDVVMNHKGGADATEMVRAVEVNPNNRNQEVTGEYTIEAWTRFDFPGRGNTHSSFKWRWYHFDGVDWDQSRDLENRIYKFRGHGKAWDWEVDTEFGNYDYLMYADYDMDHPEVVNELRNWGVWYTNTLGLDGFRIDAVKHIKYSFTRDWINHVRSATGKNMFAVAEFWKNDLGAIENYLQKTNWNHSVFDVPLHYNLYNASQSGGNYDMRNIFNGTVVQRHPSHAVTFVDNHDSQPEEALESFVEPWFKPLAYALTLTREQGYPSVFYGDYYGIPTHGVPAMRSKIDPILEARQKYAYGPQHDYLDHPDVIGWTREGDSSHPKSGLATLITDGPGGSKRMYAGLKNAGETWYDITGNRSDTVKIGSDGWGEFHVNKSSVSIYVQK

SEQ ID NO: 29102 - protein, 485 aa, Bacillus sp.
HHNGTNGTMMQYFEWYLPNDGNHWNRLNSDASNLKSKGITAVWIPPAWKAASQNDVGYGAYDLYDLGEFNQKGTVRTKYGTRSQLQAAVTSLKNNGIQVYGDVVMNHKGGADATEMVRAVEVNPNNRNQEVTGEYTIEAWTRFDFPGRGNTHSSFKWRWYHFDGVDWDQSRQTNNRIYKFRGHGKAWDWEVDTEFGNYDYLMYADYDMDHPEVVNELRNWGVWYTNTLGLDGFRIDAVKHIKYSFTRDWINHVRSATGKNMFAVAEFWKNDLGAIENYLQKTNWNHSVFDVPLHYNLYNASKSGGNYDMRNIFNGTVVQRHPSHAVTFVDNHDSQPEEALESFVETWFKPLAYALTLTREQGYPSVFYGDYYGIPTHGVPAMRSKIDPILEARQKYAYGPQHDYLDHPDVIGWTREGDSSHPKSGLATLITDGPGGSKRMYAGLKNAGETWYDITGNRSDTVKIGSDGWGEFHVNDASVSIYVQK

SEQ ID NO: 29103 - protein, 485 aa, Synthetic construct
HHNGTNGTMMQYFEWYLPNDGNHWNRLNSDASNLKSKGITAVWIPPAWKGASQNDVGYGAYDLYDLGEFNQKGTVRTKYGTRSQLQAAVTSLKNNGIQVYGDVVMNHKGGADATEMVRAVEVNPNNRNQEVTGEYTIEAWTRFDFPGRGNTHSSFKWRWYHFDGVDWDQSRRLNNRIYKFRGHGKAWDWEVDTEFGNYDYLMYADYDMDHPESTNELRNWGVWYTNTLGLDGFRIDAVKHIKYSFTRDWINHVRSATGKNMFAVAEFWKNDLGAIENYLQKTNWNHSVFDVPLHYNLYNASKSGGNYDMRNIFNGTVVQRHPSHAVTFVDNHDSQPEEALESFVEEWFKPLAYALTLTREQGYPSVFYGDYYGIPTHGVPAMRSKIDPILEARQKYAYGPQHDYLDHPDVIGWTREGDSSHPKSGLATLITDGPGGSKRMYAGLKNAGETWYDITGNRSDTVKIGSDGWGEFHVNDGSVSIYVQK

SEQ ID NO: 29104 - protein, 485 aa, Bacillus sp.
HHNGTNGTMMQYFEWYLPNDGNHWNRLNSDASNLKSKGIKAVWIPPAWKGASQNDVGYGAYDLYDLGEFNQKGTVRTKYGTRSQLQAAVTSLKNNGIQVYGDVVMNHKGGADATEMVRAVEVNPNNRNQEVTGEYTIEAWTRFDFPGRGNTHSSFKWRWYHFDGVDWDQSRRLNNRIYSFRGHGKAWDWEVDTEFGNYDYLMYADYDMDHPEVVNELRNWGVWYTNTLGLDGFRIDAVKHIKYSFTRDWINHVRSATGKNMFAVAEFWKNDLGAIENYLQKTNWNHSVFDVPLHYNLYNASKSGGNYDMRNIFNGTVVQRHPSHAVTFVDNHDSQPEEALESFVEEWFKPLAYALTLTREQGYPSVFYGDYYGIPTHGVPAMRSKIDPILEARQKYAYGPQHDYLDHPDVIGWTREGDSSHPKSGLATLITDGPGGSKRMYAGLKNAGETWYDITGNRSDTVKIGSDGWGEFHVNDGSVSIYVQK

SEQ ID NO: 29105 - protein, 483 aa, Bacillus sp.
HHNGTNGTMMQYFEWYLPNDGNHWNRLNSDASNLKSKGITAVWIPPAWKGASQNDVGYGAYDLYDLGEFNQKGTVRTKYGTRSQLQAAVTSLKNNGIQVYGDVVMNHKGGADATEMVRAVEVNPNNRNQEVTGEYTIEAWTRFDFPGRGNTHSSFKWRWYHFDGVDWDQSRRLNNRIYKFRGKAWDWEVDTEFGNYDYLMYADYDMDHPEVVNELRNWGVWYTNTLGLDGFRIDAVKHIKYSFTRDWINHVRSATGKNMFAVAEFWKNDLGAIENYLQKTNWNHSVFDVPLHYNLYNASQSGGNYDMRNIFNGTVVQRHPSHAVTFVDNHDSQPEEALESFVEPWFKPLAYALTLTREQGYPSVFYGDYYGIPTHGVPAMRSKIDPILEARQKYAYGPQHDYLDHPDVIGWTREGDSSHPKSGLATLITDGPGGSKRMYAGLKNAGETWYDITGNRSDTVKIGSDGWGEFHVNDQSVSIYVQK

SEQ ID NO: 29106 - protein, 483 aa, Bacillus sp.
HHNGTNGTMMQYFEWYLPNDGNHWNRLNSDASNLKSKGITAVWIPPAWKGASQNDVGYGAYDLYDLGEFNQKGTVRTKYGTRSQLQAAVTSLKNNGIQVYGDVVMNHKGGADATEMVRAVEVNPNNRNQEVTGEYTIEAWTRFDFPGRGNTHSSFKWRWYHFDGVDWDQSRRLNNRIYKFRGKAWDWEVDTEFGNYDYLMYADYDMDHPEVVNELRNWGVWYTNTLGLDGFRIDAVKHIKYSFTRDWINHVRSATGKNMFAVAEFWKNDLGAIENYLQKTNWNHSVFDVPLHYNLYNASQSGGNYDMRNIFNGTVVQRHPSHAVTFVDNHDSQPEEALESFVEPWFKPLAYALTLTREQGYPSVFYGDYYGIPTHGVPAMRSKIDPILEARQKYAYGPQHDYLDHPDVIGWTREGDSSHPKSGLATLITDGPGGSKRMYAGLKNAGETWYDITGNRSDTVKIGSDGWGEFHVNKASVSIYVQK

SEQ ID NO: 29107 - protein, 485 aa, Bacillus sp.
HHNGTNGTMMQYFEWYLPNDGNHWNRLNSDASNLKSKGITAVWIPPAWKAASQNDVGYGAYDLYDLGEFNQKGTVRTKYGTRSQLQAAVTSLKNNGIQVYGDVVMNHKGGADATEMVRAVEVNPNNRNQEVTGEYTIEAWTRFDFPGRGNTHSSFKWRWYHFDGVDWDQSRDLDNRIYKFRGHGKAWDWEVDTEFGNYDYLMYADYDMDHPEVVNELRNWGVWYTNTLGLDGFRIDAVKHIKYSFTRDWINHVRSATGKNMFAVAEFWKNDLGAIENYLQKTNWNHSVFDVPLHYNLYNASKSGGNYDMRNIFNGTVVQRHPSHAVTFVDNHDSQPEEALESFVETWFKPLAYALTLTREQGYPSVFYGDYYGIPTHGVPAMRSKIDPILEARQKYAYGPQHDYLDHPDVIGWTREGDSSHPKSGLATLITDGPGGSKRMYAGLKNAGETWYDITGNRSDTVKIGSDGWGEFHVNKGSVSIYVQK

SEQ ID NO: 29108 - protein, 485 aa, Bacillus sp.
HHNGTNSTMMQYFEWYLPNDGNHWNRLNSDASNLKSKGITAVWIPPAWKGASQNDVGYGAYDLYDLGEFNQKGTVRTKYGTRSQLQAAVTSLKNNGIQVYGDVVMNHKGGADATEMVRAVEVNPNNRNQEVTGEYTIEAWTRFDFPGRGNTHSSFKWRWYHFDGVDWDQSRRLNNRIYKFRGHGKAWDWEVDTEFGNYDYLMYADYDMDHPEVVNELRNWGVWYTNTLGLDGFRIDAVKHIKYSFTRDWINHVRSATGKNMFAVAEFWKNDLGAIENYLQKTNWNHSVFDVPLHYNLYNASKSGGNYDMRNIFNGTVVQAHPNQAVTFVDNHDSQPEEALESFVEEWFKPLAYALTLTREQGYPSVFYGDYYGIPTHGVPAMRSKIDPILEARQKYAYGPQHDYLDHPDVIGWTREGDSSHPKSGLATLITDGPGGSKRMYAGLKNAGETWYDITGNRSDTVKIGSDGWGEFHVNDGSVSIYVQK

SEQ ID NO: 29109 - protein, 485 aa, Bacillus sp.
HHNGTNQTMMQYFEWYLPNDGNHWNRLNSDASNLKSKGITAVWIPPAWKGASQNDVGYGAYDLYDLGEFNQKGTVRTKYGTRSQLQAAVTSLKNNGIQVYGDVVMNHKGGADATEMVRAVEVNPNNRNQEVTGEYTIEAWTRFDFPGRGNTHSSFKWRWYHFDGVDWDQSRRLNNRIYKFRGHGKAWDWEVDTEFGNYDYLMYADYDMDHPEVVNELRNWGVWYTNTLGLDGFRIDAVKHIKYSFTRDWINHVRSATGKNMFAVAEFWKNDLGAIENYLQKTNWNHSVFDVPLHYNLYNASKSGGNYDMRNIFNGTVVQMHPNWAVTFVDNHDSQPEEALESFVEEWFKPLAYALTLTREQGYPSVFYGDYYGIPTHGVPAMRSKIDPILEARQKYAYGPQHDYLDHPDVIGWTREGDSSHPKSGLATLITDGPGGSKRMYAGLKNAGETWYDITGNRSDTVKIGSDGWGEFHVNDGSVSIYVQK

SEQ ID NO: 29110 - protein, 483 aa, Bacillus sp.
HHNGTNGTMMQYFEWYLPNDGNHWNRLNSDASNLKSKGITAVWIPPAWKGASQNDVGYGAYDLYDLGEFNQKGTVRTKYGTRSQLQAAVTSLKNNGIQVYGDVVMNHKGGADATEMVRAVEVNPNNRNQEVTGEYTIEAWTRFDFPGRGNTHSSFKWRWYHFDGVDWDQSRNVNNRIYKFRGKAWDWEVDTEFGNYDYLMYADYDMDHPEVVNELRNWGVWYTNTLGLDGFRIDAVKHIKYSFTRDWINHVRSATGKNMFAVAEFWKNDLGAIENYLQKTNWNHSVFDVPLHYNLYNASKSGGNYDMRNIFNGTVVQRHPSHAVTFVDNHDSQPEEALESFVETWFKPLAYALTLTREQGYPSVFYGDYYGIPTHGVPAMRSKIDPILEARQKYAYGPQHDYLDHPDVIGWTREGDSSHPKSGLATLITDGPGGSKRMYAGLKNAGETWYDITGNRSDTVKIGSDGWGEFHVNKASVSIYVQK

SEQ ID NO: 29111 - protein, 485 aa, Bacillus sp.
HHNGTNGTMMQYFEWYLPNDGNHWNRLNSDASNLKSKGITAVWIPPAWKAASQNDVGYGAYDLYDLGEFNQKGTVRTKYGTRSQLQAAVTSLKNNGIQVYGDVVMNHKGGADLTEMVRAVEVNPNNRNQEVTGEYTIEAWTRFDFPGRGNTHSSFKWRWYHFDGVDWDQSRQITNRIYKFRGHGKAWDWEVDTEFGNYDYLMYTDYDMDHPEVVNELRNWGVWYTNTLGLDGFRIDAVKHIKYSFTRDWINHVRSATGKNMFAVAEFWKNDLGAIENYLQKTNWNHSVFDVPLHYNLYNASKSGGNYDMRNIFNGTVVQRHPSHAVTFVDNHDSQPEEALESFVEEWFKPLAYALTLTREQGYPSVFYGDYYGIPTHGVPAMRSKIDPILEARQKYAYGPQHDYLDHPDVIGWTREGDSSHPKSGLATLITDGPGGSKRMYAGLKNAGETWYDITGNRSDTVKIGSDGWGEFHVNDGSVSIYVQK

SEQ ID NO: 29112 - protein, 485 aa, Bacillus sp.
HHNGTNGTMMQYFEWYLPNDGNHWNRLNSDASNLKSKGITAVWIPPAWKGASQNDVGYGAYDLYDLGEFNQKGTVRTKYGTRSQLQAAVTSLKNNGIQVYGDVVMNHKGGADATEMVRAVEVNPNNRNQEVTGEYTIEAWTRFDFPGRGNTHSSFKWRWYHFDGVDWDQSRRLNNRIYKFRGHGKAWDWEVDTEFGNYDYLMYADYDMDHPEVVNELRNWGVWYTNTLGLDGFRIDAVKHIKYSFTRDWINHVRSATGKNMFAVAEFWQNDLGVIENYLQKTNWNHSVFDVPLHYNLYNASKSGGNYDMRNIFNGTVVQRHPSHAVTFVDNHDSQPEEALESFVEEWFKPLAYALTLTREQGYPSVFYGDYYGIPTHGVPAMRSKIDPILEARQKYAYGPQHDYLDHPDVIGWTREGDSSHPKSGLATLITDGPGGSKRMYAGLKNAGETWYDITGNRSDTVKIGSDGWGEFHVNDGSVSIYVQK

SEQ ID NO: 29113 - protein, 483 aa, Bacillus sp.
HHNGTNGTMMQYFEWYLPNDGNHWNRLNSDASNLKSKGIKAVWIPPAWKGASQNDVGYGAYDLYDLGEFNQRGTVRTKYGTRSQLQAAVTSLKNNGIQVYGDVVMNHKGGADATEMVRAVEVNPNNRNQEVTGEYTIEAWTRFDFPGRGNTHSSFKWRWYHFDGVDWDQSRRLNNRIYKFRGKAWDWEVDTEFGNYDYLMYADYDMDHPEVVNELRNWGVWYTNTLGLDGFRIDAVKHIKYSFTRDWINHVRSATGKNMFAVAEFWKNDLGAIENYLQKTNWNHSVFDVPLHYNLYNASKSGGNYDMRNIFNGTVVQRHPSHAVTFVDNHDSQPEEALESFVEEWFKPLAYALTLTREQGYPSVFYGDYYGIPTHGVPAMRSKIDPILEARQKYAYGPQHDYLDHPDVIGWTREGDSSHPKSGLATLITDGPGGSKRMYAGLKNAGETWYDITGNRSDTVKIGSDGWGEFHVNDGSVSIYVQK

SEQ ID NO: 29114 - protein, 485 aa, Bacillus sp.
HHNGTNKTMMQYFEWYLPNDGNHWNRLNSDASNLKSKGITAVWIPPAWKGASQNDVGYGAYDLYDLGEFNQKGTVRTKYGTRSQLQAAVTSLKNNGIQVYGDVVMNHKGGADATEMVRAVEVNPNNRNQEVTGEYTIEAWTRFDFPGRGNTHSSFKWRWYHFDGVDWDQSRRLNNRIYKFRGHGKAWDWEVDTEFGNYDYLMYADYDMDHPEVVNELRNWGVWYTNTLGLDGFRIDAVKHIKYSFTRDWINHVRSATGKNMFAVAEFWKNDLGAIENYLQKTNWNHSVFDVPLHYNLYNASKSGGNYDMRNIFNGTVVQAHPNHAVTFVDNHDSQPEEALESFVEEWFKPLAYALTLTREQGYSSVFYGDYYGIPTHGVPAMRSKIDPILEARQKYAYGPQHDYLDHPDVIGWTREGDSSHPKSGLATLITDGPGGSKRMYAGLKNAGETWYDITGNRSDTVKIGSDGWGEFHVNDGSVSIYVQK

SEQ ID NO: 29115 - protein, 483 aa, Bacillus sp.
HHNGTNGTMMQYFEWYLPNDGNHWNRLNSDASNLKSKGITAVWIPPAWKAASQNDVGYGAYDLYDLGEFNQKGTVRTKYGTRSQLQAAVTSLKNNGIQVYGDVVMNHKGGADATEMVRAVEVNPNNRNQEVTGEYTIEAYTRFDFPGRGNTHSSFKWRWYHFDGVDWDQSRDLTNRIYKFRGKAWDWEVDTEFGNYDYLMYADYDMDHPEVVNELRNWGVWYTNTLGLDGFRIDAVKHIKYSFTRDWINHVRSATGKNMFAVAEFWKNDLGAIENYLQKTNWNHSVFDVPLHYNLYNASKSGGNYDMRNIFNGTVVQRHPSHAVTFVDNHDSQPEEALESFVDPWFKPLAYALTLTREQGYPSVFYGDYYGIPTHGVPAMRSKIDPILEARQKYAYGPQHDYLDHPDVIGWTREGDSSHPKSGLATLITDGPGGSKRMYAGLKNAGETWYDITGNRSDTVKIGSDGWGEFHVNGGSVSIYVQK

SEQ ID NO: 29116 - protein, 485 aa, Bacillus sp.
HHNGTNGTMMQYFEWYLPNDGNHWNRLNSDASNLKSKGITAVWIPPAWKGASQNDVGYGAYDLYDLGEFNQKGTVRTKYGTRSQLQAAVTSLKNNGIQVYGDVVMNHKGGADATEMVRAVEVNPNNRNQEVTGEYTIEAWTRFDFPGRGNTHSSFKWRWYHFDGVDWDQSRRTNNRIYKFRGHGKAWDWEVDTEFGNYDYLMYTDYDMDHPEVVNELRNWGVWYTNTLGLDGFRIDAVKHIKYSFTRDWINHVRSATGKNMFAVAEFWKNDLGAIENYLQKTNWNHSVFDVPLHYNLYNASKSGGNYDMRNIFNGTVVQRHPSHAVTFVDNHDSQPEEALESFVDEWFKPLAYALTLTREQGYPSVFYGDYYGIPTHGVPAMRSKIDPILEARQKYAYGPQHDYLDHPDVIGWTREGDSSHPKSGLATLITDGPGGSKRMYAGLKNAGETWYDITGNRSDTVKIGSDGWGEFHVNKSSVSIYVQK

SEQ ID NO: 29117 - protein, 483 aa, Bacillus sp.
HHNGTNGTMMQYFEWYLPNDGNHWNRLNSDASNLKSKGITAVWIPPAWKAVSQNDVGYGAYDLYDLGEFNQKGTVRTKYGTRSQLQAAVTSLKNNGIQVYGDVVMNHKGGADATEMVRAVEVNPNNRNQEVTGEYTIEAWTRFDFPGRGNTHSSFKWRWYHFDGVDFDQSREFTNRIYKFRGKAWDWEVDTEFGNYDYLMYVDYDMDHPEVVNELRNWGVWYTNTLGLDGFRIDAVKHIKYSFTRDWINHVRSATGKNMFAVAEFWKNDLGAIENYLQKTNWNHSVFDVPLHYNLYNASKSGGNYDMRNIFNGTVVQVHPSHAVTFVDNHDSQPEEALESFVEEWFKPLAYALTLTREQGYPSVFYGDYYGIPTHGVPAMRSKIDPILEARQKYAYGPQHDYLDHPDVIGWTREGDSSHPKSGLATLITDGPGGSKRMYAGLKNAGETWYDITGNRSDTVKIGSDGWGEFHVNYGSVSIYVQK

SEQ ID NO: 29118 - protein, 485 aa, Bacillus sp.
HHNGTNGTMMQYFEWYLPNDGNHWNRLNSDASNLKSKGITAVWIPPAWKAASQNDVGYGAYDLYDLGEFNQKGTVRTKYGTRSQLQAAVTSLKNNGIQVYGDVVMNHKGGADATEMVRAVEVNPNNRNQEVTGEYTIEAWTRFDFPGRGNTHSSFKWRWYHFDGVDWDQSRRVNNRIYKFRGHGKAWDWEVDTEFGNYDYLMYTDYDMDHPEVVNELRNWGVWYTNTLGLDGFRIDAVKHIKYSFTRDWINHVRSATGKNMFAVAEFWKNDLGAIENYLQKTNWNHSVFDVPLHYNLYNASKSGGNYDMRNIFNGTVVQRHPSHAVTFVDNHDSQPEEALESFVEEWFKPLAYALTLTREQGYPSVFYGDYYGIPTHGVPAMRSKIDPILEARQKYAYGPQHDYLDHPDVIGWTREGDSSHPKSGLATLITDGPGGSKRMYAGLKNAGETWYDITGNRSDTVKIGSDGWGEFHVNDGSVSIYVQK

SEQ ID NO: 29119 - protein, 485 aa, Bacillus sp.
HHNGTNGTMMQYFEWYLPNDGNHWNRLNSDASNLKSKGITAVWIPPAWKAVSQNDVGYGAYDLYDLGEFNQKGTVRTKYGTRSQLQAAVTSLKNNGIQVYGDVVMNHKGGADATEMVRAVEVNPNNRNQEVTGEYTIEAWTRFDFPGRGNTHSSFKWRWYHFDGVDWDQSRNLTNRIYKFRGHGKAWDWEVDTEFGNYDYLMYTDYDMDHPEVVNELRNWGVWYTNTLGLDGFRIDAVKHIKYSFTRDWINHVRSATGKNMFAVAEFWKNDLGAIENYLQKTNWNHSVFDVPLHYNLYNASKSGGNYDMRNIFNGTVVQVHPSHAVTFVDNHDSQPEEALESFVEEWFKPLAYALTLTREQGYPSVFYGDYYGIPTHGVPAMRSKIDPILEARQKYAYGPQHDYLDHPDVIGWTREGDSSHPKSGLATLITDGPGGSKRMYAGLKNAGETWYDITGNRSDTVKIGSDGWGEFHVNDGSVSIYVQK

SEQ ID NO: 29120 - protein, 485 aa, Bacillus sp.
HHNGTNGTMMQYFEWYLPNDGNHWNRLNSDASNLKSKGITAVWIPPAWKGASQNDVGYGAYDLYDLGEFNQKGTVRTKYGTRSQLQAAVTSLKNNGIQVYGDVVMNHKGGADATEMVRAVEVNPNNRNQEVTGEYTIEAWTRFDFPGRGNTHSSFKWRWYHFDGVDWDQSERLNNRIYKFRGHGKAWDWEVDTEFGNYDYLMYADYDMDHPEVVNELRNWGVWYTNTLGLDGFRIDAVKHIKYSFTRDWINHVRSATGKNMFAVAEFWKNDLGAIENYLQKTNWNHSVFDVPLHYNLYNASKSGGNYDMRNIFNGTVVQRHPSHAVTFVDNHDSQPEEALESFVEEWFKPLAYALTLTREQGLPSVFYGDYYGIPTHGVPAMRSKIDPILEARQKYAYGPQHDYLDHPDVIGWTREGDSSHPKSGLATLITDGPGGSKRMYAGLKNAGETWYDITGNRSDTVKIGSDGWGEFHVNDGSVSIYVQK

SEQ ID NO: 29121 - protein, 483 aa, Bacillus sp.
HHNGTNGTMMQYFEWYLPNDGNHWNRLNSDASNLKSKGITAVWIPPAWKGASQNDVGYGAYDLYDLGEFNQKGTVRTKYGTRSQLQAAVTSLKNNGIQVYGDVVMNHKGGADATEMVRAVEVNPNNRNQEVTGEYTIEAWTRFDFPGRGNTHSSFKWRWYHFDGVDWDQSRRLNNRIYKFRGKAWDWEVDTEFGNYDYLMYADYDMDHPEVVNELRNWGVWYTNTLGLDGFRIDAVKHIKYSFTRDWINHVRSATGKNMFAVAEFWLNDLGSIENYLQKTNWNHSVFDVPLHYNLYNASKSGGNYDMRNIFNGTVVQRHPSHAVTFVDNHDSQPEEALESFVEEWFKPLAYALTLTREQGYPSVFYGDYYGIPTHGVPAMRSKIDPILEARQKYAYGPQHDYLDHPDVIGWTREGDSSHPKSGLATLITDGPGGSKRMYAGLKNAGETWYDITGNRSDTVKIGSDGWGEFHVNDGSVSIYVQK

SEQ ID NO: 29122 - protein, 483 aa, Synthetic construct
HHNGTNGTMMQYFEWYLPNDGNHWNRLNSDASNLKSKGITAVWIPPAWKGASQNDVGYGAYDLYDLGEFNQKGTVRTKYGTRSQLQAAVTSLKNNGIQVYGDVVMNHKGGADATEMVRAVEVNPNNRNQEVTGEYTIEAWTRFDFPGRGNTHSSFKWRWYHFDGVDWDQSRRLNNRIYLFRGKSWDWPVDTENGNYDYLMYADIDMDHPEVVNELRNWGVWYTNTLGLDGFRIDAVKHIKYSFTRDWINHVRSATGKNMFAVAEFWKNDLGAIENYLQKTNWNHSVFDVPLHYNLYNASKSGGNYDMRNIFNGTVVQRHPSHAVTFVDNHDSQPEEALESFVEEWFKPLAYALTLTREQGYPSVFYGDYYGIPTHGVPAMRSKIDPILEARQKYAYGPQHDYLDHPDVIGWTREGDSSHPKSGLATLITDGPGGSKRMYAGLKNAGETWYDITGNRSDTVKIGSDGWGEFHVNDGSVSIYVQK

SEQ ID NO: 29123 - protein, 485 aa, Bacillus sp.
HHNGTNGTMMQYFEWYLPNDGNHWNRLNSDASNLKSKGITAVWIPPAWKGASQNDVGYGAYDLYDLGEFNQKGTVRTKYGTRSQLQAAVTSLKNNGIQVYGDVVMNHKGGADATEMVRAVEVNPNNRNQEVTGEYTIEAWTRFDFPGRGNTHSSFKWRWYHFDGVDFDMSRELSNRIYKFRGHGKAWDWEVDTEFGNYDYLMYADYDMDHPEVVNELRNWGVWYTNTLGLDGFRIDAVKHIKYSFTRDWINHVRSATGKNMFAVAEFWKNDLGAIENYLQKTNWNHSVFDVPLHYNLYNASKSGGNYDMRNIFNGTVVQRHPSHAVTFVDNHDSQPEEALESFVEEWFKPLAYALTLTREQGYPSVFYGDYYGIPTHGVPAMRSKIDPILEARQKYAYGPQHDYLDHPDVIGWTREGDSSHPKSGLATLITDGPGGSKRMYAGLKNAGETWYDITGNRSDTVKIGSDGWGEFHVNDGSVSIYVQK

SEQ ID NO: 29124 - protein, 483 aa, Bacillus sp.
HHNGTNGTMMQYFEWYLPNDGNHWNRLNSDASNLKSKGITAVWIPPAWKGASQNDVGYGAYDLYDLGEFNQKGTVRTKYGTRSQLQAAVTSLKNNGIQVYGDVVMNHKGGADATEMVPAVEVNPNNRNQEVTGEYTIEAWTRFDFPGRGNTHSSFKWRWYHFDGVDWDQSRRTNNRIYKFRSKAWDWEVDTEFGNYDYLMYTDYDMDHPEVVNELRNWGVWYTNTLGLDGFRIDAVKHIKYSFTRDWINHVRSATGKNMFAVAEFWKNDLGAIENYLQKTNWNHSVFDVPLHYNLYNASKSGGNYDMRNIFNGTVVQRHPSHAVTFVDNHDSQPEEALESFVEEWFKPLAYALTLTREQGYPSVFYGDYYGIPTHGVPAMRSKIDPILEARQKYAYGPQHDYLDHPDVIGWTREGDSSHPKSGLATLITDGPGGSKRMYAGLKNAGETWYDITGNRSDTVKIGSDGWGEFHVNDGSVSIYVQK

SEQ ID NO: 29125 - protein, 485 aa, Bacillus sp.
HHNGTNGTMMQYFEWYLPNDGNHWNRLNSDASNLKSKGIKAVWIPPAWKGASQNDVGYGAYDLYDLGEFNQKGTVRTKYGTRSQLQAAVTSLKNNGIQVYGDVVMNHKGGADATEMVRAVEVNPNNRNQEVTGEYTIEAWTRFDFPGRGNTHSSFKWRWYHFDGVDWDQSRRLDNRIYKFRGHGKAWDWEVDTEFGNYDYLMYTDYDMDHPEVVNELRNWGVWYTNTLGLDGFRIDAVKHIKYSFTRDWINHVRSATGKNMFAVAEFWKNDLGAIENYLQKTNWNHSVFDVPLHYNLYNASKSGGNYDMRNIFNGTVVQRHPSHAVTFVDNHDSQPEEALESFVEEWFKPLAYALTLTREQGYPSVFYGDYYGIPTHGVPAMRSKIDPILEARQKYAYGPQHDYLDHPDVIGWTREGDSSHPKSGLATLITDGPGGSKRMYAGLKNAGETWYDITGNRSDTVKIGSDGWGEFHVNDGSVSIYVQK

SEQ ID NO: 29126 - protein, 485 aa, Bacillus sp.
HHNGTNGTMMQYFEWYLPNDGNHWNRLNSDASNLKSKGITAVWIPPAWKGASQNDVGYGAYDLYDLGEFNQKGTVRTKYGTRSQLQAAVTSLKNNGIQVYGDVVMNHKGGADATEMVPAVEVNPNNRNQEVTGEYTIEAWTRFDFPGRGNTHSSFKWRWYHFDGVDWDQSRRLNNRIYKFRGHGKAWDWEVDTEFGNYDYLMYADYDMDHPEVVNELRNWGVWYTNTLGLDGFRIDAVKHIKYSFTRDWINHVRSATGKNMFAVAEFWKNDLGAIENYLQKTNWNHSVFDVPLHYNLYNASKSGGNYDMRNIFNGTVVQRHPSHAVTFVDNHDSQPEEALESFVETWFKPLAYALTLTREQGYPSVFYGDYYGIPTHGVPAMRSKIDPILEARQKYAYGPQHDYLDHPDVIGWTREGDSSHPKSGLATLITDGPGGSKRMYAGLKNAGETWYDITGNRSDTVKIGSDGWGEFHVNDASVSIYVQK

SEQ ID NO: 29127 - protein, 485 aa, Bacillus sp.
HHNGTNGTMMQYFEWYLPNDGNHWNRLNSDASNLKSKGITAVWIPPAWKGASQNDVGYGAYDLYDLGEFNQKGTVRTKYGTRSQLQAAVTSLKNNGIQVYGDVVMNHKGGADATEMVRAVEVNPNNRNQEVTGEYTIEAWTRFDFPGRGNTHSSFKWRWYHFDGVDWDQSRRLNNRIYKFRGHGKAWDWEVDTEFGNYDYLMYADYDMDHTETVNELRNWGVWYTNTLGLDGFRIDAVKHIKYSFTRDWINHVRSATGKNMFAVAEFWKNDLGAIENYLQKTNWNHSVFDVPLHYNLYNASKSGGNYDMRNIFNGTVVQRHPSHAVTFVDNHDSQPEEALESFVEEWFKPLAYALTLTREQGYPSVFYGDYYGIPTHGVPAMRSKIDPILEARQKYAYGPQHDYLDHPDVIGWTREGDSSHPKSGLATLITDGPGGSKRMYAGLKNAGETWYDITGNRSDTVKIGSDGWGEFHVNDGSVSIYVQK

SEQ ID NO: 29128 - protein, 485 aa, Bacillus sp.
HHNGTNGTMMQYFEWYLPNDGNHWNRLNSDASNLKSKGITAVWIPPAWKGASQNDVGYGAYDLYDLGEFNQKGTVRTKYGTRSQLQAAVTSLKNNGIQVYGDVVMNHKGGADATEMVRAVEVNPNNRNQEVTGEYTIEAWTRFDFPGRGNTHSSFKWRWYHFDGVDWDQSRRLNNRIYKFRGHGKAWDWEVDTEFGNYDYLMYADYDMDHPETTNELRNWGVWYTNTLGLDGFRIDAVKHIKYSFTRDWINHVRSATGKNMFAVAEFWKNDLGAIENYLQKTNWNHSVFDVPLHYNLYNASKSGGNYDMRNIFNGTVVQRHPSHAVTFVDNHDSQPEEALESFVEEWFKPLAYALTLTREQGYPSVFYGDYYGIPTHGVPAMRSKIDPILEARQKYAYGPQHDYLDHPDVIGWTREGDSSHPKSGLATLITDGPGGSKRMYAGLKNAGETWYDITGNRSDTVKIGSDGWGEFHVNDGSVSIYVQK

SEQ ID NO: 29129 - protein, 485 aa, Bacillus sp.
HHNGTNGTMMQYFEWYLPNDGNHWNRLNSDASNLKSKGITAVWIPPAWKAASQNDVGYGAYDLYDLGEFNQKGTVRTKYGTRSQLQAAVTSLKNNGIQVYGDVVMNHKGGADATEMVRAVEVNPNNRNQEVTGEYTIEAWTRFDFPGRGNTHSSFKWRWYHFDGVDWDQSRQTNNRIYKFRGHGKAWDWEVDTEFGNYDYLMYADYDMDHPEVVNELRNWGVWYTNTLGLDGFRIDAVKHIKYSFTRDWINHVRSATGKNMFAVAEFWKNDLGAIENYLQKTNWNHSVFDVPLHYNLYNASKSQGNYDMRNIFNGTVVQRHPSHAVTFVDNHDSQPEEALESFVDTWFKPLAYALTLTREQGYPSVFYGDYYGIPTHGVPAMRSKIDPILEARQKYAYGPQHDYLDHPDVIGWTREGDSSHPKSGLATLITDGPGGSKRMYAGLKNAGETWYDITGNRSDTVKIGSDGWGEFHVNGTSVSIYVQK

SEQ ID NO: 29130 - protein, 485 aa, Bacillus sp.
HHNGTNKTMMQYFEWYLPNDGNHWNRLNSDASNLKSKGITAVWIPPAWKGASQNDVGYGAYDLYDLGEFNQKGTVRTKYGTRSQLQAAVTSLKNNGIQVYGDVVMNHKGGADATEMVRAVEVNPNNRNQEVTGEYTIEAWTRFDFPGRGNTHSSFKWRWYHFDGVDWDQSRRLNNRIYKFRGHGKAWDWEVDTEFGNYDYLMYADYDMDHPEVVNELRNWGVWYTNTLGLDGFRIDAVKHIKYSFTRDWINHVRSATGKNMFAVAEFWKNDLGAIENYLQKTNWNHSVFDVPLHYNLYNASKSGGNYDMRNIFNGTVVQMQPSHAVTFVDNHDSQPEEALESFVEEWFKPLAYALTLTREQGYPSVFYGDYYGIPTHGVPAMRSKIDPILEARQKYAYGPQHDYLDHPDVIGWTREGDSSHPKSGLATLITDGPGGSKRMYAGLKNAGETWYDITGNRSDTVKIGSDGWGEFHVNDGSVSIYVQK

SEQ ID NO: 29131 - protein, 485 aa, Bacillus sp.
HHNGTNGTMMQYFEWYLPNDGNHWNRLNSDASNLKSKGITAVWIPPAWKATSQNDVGYGAYDLYDLGEFNQKGTVRTKYGTRSQLQSAVTSLKNNGIQVYGDVVMNHKGGADATEMVRAVEVNPNNRNQEVTGEYTIEAWTRFDFPGRGNTHSSFKWRWYHFDGVDWDMSRNTDNRIYKFRGHGKAWDWEVDTEFGNYDYLMYADIDMDHPEVVNELRNWGVWYTNTLGLDGFRIDAVKHIKYSFTRDWINHVRSATGKNMFAVAEFWKNDLGAIENYLQKTNWNHSVFDVPLHYNLYNASKSQGNYDMRNIFNGTVVQRHPSHAVTFVDNHDSQPEEALESFVDTWFKPLAYALTLTREQGYPSVFYGDYYGIPTHGVPAMRSKIDPILEARQKYAYGPQHDYLDHPDVIGWTREGDSSHPKSGLATLITDGPGGSKRMYAGLKNAGETWYDITGNRSDTVKIGSDGWGEFHVNGSSVSIYVQK

SEQ ID NO: 29132 - protein, 485 aa, Bacillus sp.
HHNGTNGTMMQYFEWYLPNDGNHWNRLNSDASNLKSKGITAVWIPPAWKGASQNDVGYGAYDLYDLGEFNQKGTVRTKYGTRSQLQAAVTSLKNNGIQVYGDVVMNHKGGADATEMVRAVEVNPNNRNQEVTGEYTIEAWTRFDFPGRGNTHSSFKWRWYHFDGVDWDQSRRLNNRIYKFRGHGKAWDWEVDTEFGNYDYLMYADYDMDHPEVVNELRNWGVWYTNTLGLDGFRIDAVKHIKYSFTRDWINHVRSATGKNMFAVAEFWKNDLGAIENYLQKTNWNHSVFDVPLHYNLYNASKSGGNYDMRNIFNGTVVQRHPSHAVTFVDNHDSQPEEALESFVETWFKPLAYALTLTREQGYPSVFYGDYYGIPTHGVPAMRSKIDPILEARQKYAYGPQHDYLDHPDVIGWTREGDSSHPKSGLATLITDGPGGSKRMYAGLKNAGETWYDITGNRSDTVKIGSDGWGEFHVNQKSVSIYVQK

SEQ ID NO: 29133 - protein, 483 aa, Bacillus sp.
HHNGTNGTMMQYFEWYLPNDGNHWNRLNSDASNLKSKGITAVWIPPAWKATSQNDVGYGAYDLYDLGEFNQKGTVRTKYGTRSQLQAAVTSLKNNGIQVYGDVVMNHKGGADATEMVRAVEVNPNNRNQEVTGEYTIEAWTRFDFPGRGNTHSSFKWRWYHFDGVDWDQSRELSNRIYKFRGKAWDWEVDTEFGNYDYLMYADYDMDHPEVVNELRNWGVWYTNTLGLDGFRIDAVKHIKYSFTRDWINHVRSATGKNMFAVAEFWKNDLGAIENYLQKTNWNHSVFDVPLHYNLYNASKSQGNYDMRNIFNGTVVQRHPSHAVTFVDNHDSQPEEALESFVDTWFKPLAYALTLTREQGYPSVFYGDYYGIPTHGVPAMRSKIDPILEARQKYAYGPQHDYLDHPDVIGWTREGDSSHPKSGLATLITDGPGGSKRMYAGLKNAGETWYDITGNRSDTVKIGSDGWGEFHVNGSSVSIYVQK

SEQ ID NO: 29134 - protein, 485 aa, Bacillus sp.
HHNGTNGTMMQYFEWYLPNDGNHWNRLNSDASNLKSKGITAVWIPPAWKAASQNDVGYGAYDLYDLGEFNQKGTVRTKYGTRSQLQAAVTSLKNNGIQVYGDVVMNHKGGADATEMVDAVEVNPNNRNQEVTGEYTIEAWTRFDFPGRGNTHSSFKWRWYHFDGVDFDQSRQITNRIYKFRGHGKAWDWEVDTEFGNYDYLMYTDYDMDHPEVVNELRNWGVWYTNTLGLDGFRIDAVKHIKYSFTRDWINHVRSATGKNMFAVAEFWKNDLGAIENYLQKTNWNHSVFDVPLHYNLYNASKSGGNYDMRNIFNGTVVQRHPSHAVTFVDNHDSQPEEALESFVEEWFKPLAYALTLTREQGYPSVFYGDYYGIPTHGVPAMRSKIDPILEARQKYAYGPQHDYLDHPDVIGWTREGDSSHPKSGLATLITDGPGGSKRMYAGLKNAGETWYDITGNRSDTVKIGSDGWGEFHVNDGSVSIYVQK

SEQ ID NO: 29135 - protein, 485 aa, Bacillus sp.
HHNGTNGTMMQYFEWYLPNDGNHWNRLNSDASNLKSKGITAVWIPPAWKGASQNDVGYGAYDLYDLGEFNQKGTVRTKYGTRSQLQAAVTSLKNNGIQVYGDVVMNHKGGADATEMVRAVEVNPNNRNQEVTGEYTIEAWTRFDFPGRGNTHSSFKWRWYHFDGVDWDQSRRLNNRIYKFRGHGKAWDWEVDTEFGNYDYLMYADYDMDHPEVVNELRNWGVWYTNTLGLDGFRIDAVKHIKYSFTRDWINHVRSATGKNMFAVAEFWKNDLGAIENYLQKTNWNHSVFDVPLHYNLYNASQSGGNYDMRNIFNGTVVQRHPSHAVTFVDNHDSQPEEALESFVEPWFKPLAYALTLTREQGYPSVFYGDYYGIPTHGVPAMRSKIDPILEARQKYAYGPQHDYLDHPDVIGWTREGDSSHPKSGLATLITDGPGGSKRMYAGLKNAGETWYDITGNRSDTVKIGSDGWGEFHVNKASVSIYVQK

SEQ ID NO: 29136 - protein, 483 aa, Bacillus sp.
HHNGTNGTMMQYFEWYLPNDGNHWNRLNSDASNLKSKGITAVWIPPAWKGASQNDVGYGAYDLYDLGEFNQKGTVRTKYGTRSQLQAAVTSLKNNGIQVYGDVVMNHKGGADATEMVRAVEVNPNNRNQEVTGEYTIEAWTRFDFPGRGNTHSSFKWRWYHFDGVDWDQSRRLNNRIYLFRGKAWKWEVPTENGNYDYLMYADIDMDHPEVVNELRNWGVWYTNTLGLDGFRIDAVKHIKYSFTRDWINHVRSATGKNMFAVAEFWKNDLGAIENYLQKTNWNHSVFDVPLHYNLYNASKSGGNYDMRNIFNGTVVQRHPSHAVTFVDNHDSQPEEALESFVEEWFKPLAYALTLTREQGYPSVFYGDYYGIPTHGVPAMRSKIDPILEARQKYAYGPQHDYLDHPDVIGWTREGDSSHPKSGLATLITDGPGGSKRMYAGLKNAGETWYDITGNRSDTVKIGSDGWGEFHVNDGSVSIYVQK

SEQ ID NO: 29137 - protein, 485 aa, Bacillus sp.
HHNGTNLTMMQYFEWYLPNDGNHWNRLNSDASNLKSKGITAVWIPPAWKGASQNDVGYGAYDLYDLGEFNQKGTVRTKYGTRSQLQAAVTSLKNNGINVYGDVVMNHKGGADATEMVRAVEVNPNNRNQEVTGEYTIEAWTRFDFPGRGNTHSSFKWRWYHFDGVDWDQSRRLNNRIYKFRGHGKAWDWEVDTEFGNYDYLMYADYDMDHPEVVNELRNWGVWYTNTLGLDGFRIDAVKHIKYSFTRDWINHVRSATGKNMFAVAEFWKNDLGAIENYLQKTNWNHSVFDVPLHYNLYNASKSGGNYDMRNIFNGTVVQAHPNHAVTFVDNHDSQPEEALESFVEEWFKPLAYALTLTREQGYPSVFYGDYYGIPTHGVPAMRSKIDPILEARQKYAYGPQHDYLDHPDVIGWTREGDSSHPKSGLATLITDGPGGSKRMYAGLKNAGETWYDITGNRSDTVKIGSDGWGEFHVNDGSVSIYVQK

SEQ ID NO: 29138 - protein, 483 aa, Synthetic construct
HHNGTNGTMMQYFEWYLPNDGNHWNRLNSDASNLKSKGITAVWIPPAWKGASQNDVGYGAYDLYDLGEFNQKGTVRTKYGTRSQLQAAVTSLKNNGIQVYGDVVMNHKGGADATEMVRAVEVNPNNRNQEVTGEYTIEAWTRFDFPGRGNTHSSFKWRWYHFDGVDWDQSRRLNNRIYKFRGKAWDWEVDTENGNYDYLMYADIDMDHPEVVNELRNWGVWYTNTLGLDGFRIDAVKHIKYSFTRDWINHVRSATGKNMFAVAEFWKNDLGAIENYLQKTNWNHSVFDVPLHYNLYNASKSGGNYDMRNIFNGTVVQRHPSHAVTFVDNHDSQPEEALESFVEEWFKPLAYALTLTREQGYPSVFYGDYYGIPTHGVPAMRSKIDPILEARQKYAYGPQHDYIDHPDVIGWTREGDSSAAKSGLAALITDGPGGSKRMYAGLKNAGETWYDITGNRSDTVKIGSDGWGEFHVNDGSVSIYVQK

SEQ ID NO: 29139 - protein, 483 aa, Bacillus sp.
HHNGTNGTMMQYFEWYLPNDGNHWNRLNSDASNLKSKGITAVWIPPAWKGASQNDVGYGAYDLYDLGEFNQKGTVRTKYGTRSQLQAAVTSLKNNGIQVYGDVVMNHKGGADATEMVRAVEVNPNNRNQEVTGEYTIEAWTRFDFPGRGNTHSSFKWRWYHFDGVDWDQSRRTNNRIYKFRSKAWDWEVDTEFGNYDYLMYTDYDMDHPEVVNELRNWGVWYTNTLGLDGFRIDAVKHIKYSFTRDWINHVRSATGKNMFAVAEFWKNDLGAIENYLQKTNWNHSVFDVPLHYNLYNASKSGGNYDMRNIFNGTVVQRHPSHAVTFVDNHDSQPEEALESFVEEWFKPLAYALTLTREQGYPSVFYGDYYGIPTHGVPAMRSKIDPILEARQKYAYGPQHDYLDHPDVIGWTREGDSSHPKSGLATLITDGPGGSKRMYAGLKNAGETWYDITGNRSDTVKIGSDGWGEFHVNDGSVSIYVQK

SEQ ID NO: 29140 - protein, 485 aa, Bacillus sp.
HHNGTNGTMMQYFEWYLPNDGNHWNRLNSDASNLKSKGITAVWIPPAWKGASQNDVGYGAYDLYDLGEFNQKGTVRTKYGTRSQLQAAVTSLKNNGIQVYGDVVMNHKGGADATEMVRAVEVNPNNRNQEVTGEYTIEAWTRFDFPGRGNTHSSFKWRWYHFDGVDWDQSRRLNNRIYKFRGHGKAWDWEVDTEFGNYDYLMYADYDMDHPEVVNELRNWGVWYTNTLGLDGFRIDAVKHIKYSFTRDWINHVRSATGKNMFAVAEFWKNDLGAIENYLQKTNWNHSVFDVPLHYNLYNASKSGGNYDMRNIFNGTVVQRHPSHAVTFVDNHDSQPEEALESFVETWFKPLAYALTLTREQGYPSVFYGDYYGIPTHGVPAMRSKIDPILEARQKYAYGPQHDYLDHPDVIGWTREGDSSHPKSGLATLITDGPGGSKRMYAGLKNAGETWYDITGNRSDTVKIGSDGWGEFHVNDKSVSIYVQK

SEQ ID NO: 29141 - protein, 485 aa, Bacillus sp.
HHNGTNGTMMQYFEWYLPNDGNHWNRLNSDASNLKSKGITAVWIPPAWKGASQNDVGYGAYDLYDLGEFNQKGTVRTKYGTRSQLQAAVTSLKNNGIKVYGDVVMNHKGGADATEMVRAVEVNPNNRNQEVTGEYTIEAWTRFDFPGRGNTHSSFKWRWYHFDGVDWDQSRRLNNRIYKFRGHGKAWDWEVDTEFGNYDYLMYADYDMDHPEVVNELRNWGVWYTNTLGLDGFRIDAVKHIKYSFTRDWINHVRSATGKNMFAVAEFWNNDLGAIENYLQKTNWNHSVFDVPLHYNLYNASKSGGNYDMRNIFNGTVVQAHPMQAVTFVDNHDSQPEEALESFVEEWFKPLAYALTLTREQGYPSVFYGDYYGIPTHGVPAMRSKIDPILEARQKYAYGPQHDYLDHPDVIGWTREGDSSHPKSGLATLITDGPGGSKRMYAGLKNAGETWYDITGNRSDTVKIGSDGWGEFHVNDGSVSIYVQK

SEQ ID NO: 29142 - protein, 485 aa, Bacillus sp.
HHNGTNGTMMQYFEWYLPNDGNHWNRLNSDASNLKSKGITAVWIPPAWKGASQNDVGYGAYDLYDLGEFNQKGTVRTKYGTRSQLQAAVTSLKNNGIQVYGDVVMNHKGGADATEMVRAVEVNPNNRNQEVTGEYTIEAWTRFDFPGRGNTHSSFKWRWYHFDGVDFDQSRQLNNRIYKFRGHGKAWDWEVDTEFGNYDYLMYADYDMDHPEVVNELRNWGVWYTNTLGLDGFRIDAVKHIKYSFTRDWINHVRSATGKNMFAVAEFWKNDLGAIENYLQKTNWNHSVFDVPLHYNLYNASKSGGNYDMRNIFNGTVVQRHPSHAVTFVDNHDSQPEEALESFVETWFKPLAYALTLTREQGLPSVFYGDYYGIPTHGVPAMRSKIDPILEARQKYAYGPQHDYLDHPDVIGWTREGDSSHPKSGLATLITDGPGGSKRMYAGLKNAGETWYDITGNRSDTVKIGSDGWGEFHVNDGSVSIYVQK

SEQ ID NO: 29143 - protein, 485 aa, Bacillus sp.
HHNGTNGTMMQYFEWYLPNDGNHWNRLNSDASNLKSKGITAVWIPPAWKAVSQNDVGYGAYDLYDLGEFNQKGTVRTKYGTRSQLQAAVTSLKNNGIQVYGDVVMNHKGGADATEMVRAVEVNPNNRNQEVTGEYTIEAWTRFDFPGRGNTHSSFKWRWYHFDGVDWDQSRNLTNRIYKFRGHGKAWDWEVDTEFGNYDYLMYTDYDMDHPEVVNELRNWGVWYTNTLGLDGFRIDAVKHIKYSFTRDWINHVRSATGKNMFAVAEFWKNDLGAIENYLQKTNWNHSVFDVPLHYNLYNASKSGGNYDMRNIFNGTVVQVHPSHAVTFVDNHDSQPEEALESFVEEWFKPLAYALTLTREQGYPSVFYGDYYGIPTHGVPAMRSKIDPILEARQKYAYGPQHDYLDHPDVIGWTREGDSSHPKSGLATLITDGPGGSKRMYAGLKNAGETWYDITGNRSDTVKIGSDGWGEFHVNYGSVSIYVQK

SEQ ID NO: 29144 - protein, 483 aa, Bacillus sp.
HHNGTNGTMMQYFEWYLPNDGNHWNRLNSDASNLKSKGITAVWIPPAWKAVSQNDVGYGAYDLYDLGEFNQKGTVRTKYGTRSQLQAAVTSLKNNGIQVYGDVVMNHKGGADATEMVPAVEVNPNNRNQEVTGEYTIEAWTRFDFPGRGNTHSSFKWRWYHFDGVDWDQSRRLSNRIYKFRSKAWDWEVDTEFGNYDYLMYADYDMDHPEVVNELRNWGVWYTNTLGLDGFRIDAVKHIKYSFTRDWINHVRSATGKNMFAVAEFWKNDLGAIENYLQKTNWNHSVFDVPLHYNLYNASKSGGNYDMRNIFNGTVVQRHPSHAVTFVDNHDSQPEEALESFVEEWFKPLAYALTLTREQGYPSVFYGDYYGIPTHGVPAMRSKIDPILEARQKYAYGPQHDYLDHPDVIGWTREGDSSHPKSGLATLITDGPGGSKRMYAGLKNAGETWYDITGNRSDTVKIGSDGWGEFHVNDGSVSIYVQK

SEQ ID NO: 29145 - protein, 483 aa, Bacillus sp.
HHNGTNGTMMQYFEWYLPNDGNHWNRLNSDASNLKSKGITAVWIPPAWKAVSQNDVGYGAYDLYDLGEFNQKGTVRTKYGTRSQLQAAVTSLKNNGIQVYGDVVMNHKGGADLTEMVRAVEVNPNNRNQEVTGEYTIEAWTRFDFPGRGNTHSSFKWRWYHFDGVDWDQSREFTNRIYKFRGKAWDWEVDTEFGNYDYLMYVDYDMDHPEVVNELRNWGVWYTNTLGLDGFRIDAVKHIKYSFTRDWINHVRSATGKNMFAVAEFWKNDLGAIENYLQKTNWNHSVFDVPLHYNLYNASKSGGNYDMRNIFNGTVVQVHPSHAVTFVDNHDSQPEEALESFVEEWFKPLAYALTLTREQGYPSVFYGDYYGIPTHGVPAMRSKIDPILEARQKYAYGPQHDYLDHPDVIGWTREGDSSHPKSGLATLITDGPGGSKRMYAGLKNAGETWYDITGNRSDTVKIGSDGWGEFHVNDGSVSIYVQK

SEQ ID NO: 29146 - protein, 485 aa, Bacillus sp.
HHNGTNGTMMQYFEWYLPNDGNHWNRLNSDASNLKSKGITAVWIPPAWKGASQNDVGYGAYDLYDLGEFNQKGTVRTKYGTRSQLQAAVTSLKNNGIQVYGDVVMNHKGGADATEMVRAVEVNPNNRNQEVTGEYTIEAWTRFDFPGRGNTHSSFKWRWYHFDGVDWDQSRRLNNRIYKFRGHGKAWDWEVDTEFGNYDYLMYADYDMDHPEVVNELRNWGVWYTNTLGLDGFRIDAVKHIKYSFTRDWINHVRSATGKNMFAVAEFWKNDLGAIENYLQKTNWNHSVFDVPLHYNLYNASKSGSNYDMRNIFNGTVVQRHPSHAVTFVDNHDSQPEEALESFVDEWFKPLAYALTLTREQGYPSVFYGDYYGIPTHGVPAMRSKIDPILEARQKYAYGPQHDYLDHPDVIGWTREGDSSHPKSGLATLITDGPGGSKRMYAGLKNAGETWYDITGNRSDTVKIGSDGWGEFHVNKQSVSIYVQK

SEQ ID NO: 29147 - protein, 485 aa, Bacillus sp.
HHNGTNGTMMQYFEWYLPNDGNHWNRLNSDASNLKSKGITAVWIPPAWKGASQNDVGYGAYDLYDLGEFNQKGTVRTKYGTRSQLQAAVTSLKNNGIQVYGDVVMNHKGGADATEMVRAVEVNPNNRNQEVTGEYTIEAWTRFDFPGRGNTHSSFKWRWYHFDGVDWDQSRRLNNRIYKFRGHGKAWDWEVDTEFGNYDYLMYADYDMDHPEVVNELRNWGVWYTNTLGLDGFRIDAVKHIKYSFTRDWINHVRSATGKNMFAVAEFWKYDLGAIENYLQKTNWNHSVFDVPLHNNLYNASKSGGNYDMRNIFNGTVVQRHPSHAVTFVDNHDSQPEEALESFVEEWFKPLAYALTLTREQGYPSVFYGDYYGIPTHGVPAMRSKIDPILEARQKYAYGPQHDYLDHPDVIGWTREGDSSHPKSGLATLITDGPGGSKRMYAGLKNAGETWYDITGNRSDTVKIGSDGWGEFHVNDGSVSIYVQK

SEQ ID NO: 29148 - protein, 483 aa, Bacillus sp.
HHNGTNGTMMQYFEWYLPNDGNHWNRLNSDASNLKSKGITAVWIPPAWKGTSQNDVGYGAYDLYDLGEFNQKGTVRTKYGTRSQLQAAVTSLKNNGIQVYGDVVMNHKGGADATEMVRAVEVNPNNRNQEVTGEYTIEAWTRFDFPGRGNTHSSFKWRWYHFDGVDWDQSRNLNNRIYKFRGKAWDWEVDTEFGNYDYLMYVDYDMDHPEVVNELRNWGVWYTNTLGLDGFRIDAVKHIKYSFTRDWINHVRSATGKNMFAVAEFWKNDLGAIENYLQKTNWNHSVFDVPLHYNLYNASKSQGNYDMRNIFNGTVVQRHPSHAVTFVDNHDSQPEEALESFVDTWFKPLAYALTLTREQGYPSVFYGDYYGIPTHGVPAMRSKIDPILEARQKYAYGPQHDYLDHPDVIGWTREGDSSHPKSGLATLITDGPGGSKRMYAGLKNAGETWYDITGNRSDTVKIGSDGWGEFHVNGSSVSIYVQK

SEQ ID NO: 29149 - protein, 483 aa, Bacillus sp.
HHNGTNGTMMQYFEWYLPNDGNHWNRLNSDASNLKSKGITAVWIPPAWKGASQNDVGYGAYDLYDLGEFNQKGTVRTKYGTRSQLQAAVTSLKNNGIQVYGDVVMNHKGGADATEMVRAVEVNPNNRNQEVTGEYTIEAWTRFDFPGRGNTHSSFKWRWYHFDGVDWDQSRRLNNRIYKFRGKAWDWEVDTEFGNYDYLMYADYDMDHPEVVNELRNWGVWYTNTLGLDGFRIDAVKHIKYSFTRDWINHVRSATGKNMFAVAEFWGGDLGAIENYLQKTNWNHSVFDVPLHYNLYNASKSGGNYDMRNIFNGTVVQRHPSHAVTFVDNHDSQPEEALESFVEEWFKPLAYALTLTREQGYPSVFYGDYYGIPTHGVPAMRSKIDPILEARQKYAYGPQHDYLDHPDVIGWTREGDSSHPKSGLATLITDGPGGSKRMYAGLKNAGETWYDITGNRSDTVKIGSDGWGEFHVNDGSVSIYVQK

SEQ ID NO: 29150 - protein, 485 aa, Bacillus sp.
HHNGTNGTMMQYFEWYLPNDGNHWNRLNSDASNLKSKGITAVWIPPAWKGASQNDVGYGAYDLYDLGEFNQKGTVRTKYGTRSQLQAAVTSLKNNGIQVYGDVVMNHKGGADATEMVRAVEVNPNNRNQEVTGEYTIEAWTRFDFPGRGNTHSSFKWRWYHFDGVDWDQSRRLNNRIYKFRGHGKAWDWEVDTEFGNYDYLMYADYDMDHPEVVNELRNWGVWYTNTLGLDGFRIDAVKHIKYSFTRDWINHVRSATGKNMFAVAEFWKNDLGAIENYLQKTNWNHSVFDVPLHYNLYNASKSGRNYDMRNIFNGTVVQRHPSHAVTFVDNHDSQPEEALESFVEPWFKPLAYALTLTREQGYPSVFYGDYYGIPTHGVPAMRSKIDPILEARQKYAYGPQHDYLDHPDVIGWTREGDSSHPKSGLATLITDGPGGSKRMYAGLKNAGKTWYDITGNRSDTVKIGSDGWGEFHVNDGSVSIYVQK

SEQ ID NO: 29151 - protein, 485 aa, Bacillus sp.
HHNGTNGTMMQYFEWYLPNDGNHWNRLNSDASNLKSKGITAVWIPPAWKAASQNDVGYGAYDLYDLGEFNQKGTVRTKYGTRSQLQAAVTSLKNNGIQVYGDVVMNHKGGADATEMVPAVEVNPNNRNQEVTGEYTIEAWTRFDFPGRGNTHSSFKWRWYHFDGVDWDQSRDLQNRIYKFRGHSKAWDWEVDTEFGNYDYLMYADYDMDHPEVVNELRNWGVWYTNTLGLDGFRIDAVKHIKYSFTRDWINHVRSATGKNMFAVAEFWKNDLGAIENYLQKTNWNHSVFDVPLHYNLYNASKSGGNYDMRNIFNGTVVQRHPSHAVTFVDNHDSQPEEALESFVETWFKPLAYALTLTREQGYPSVFYGDYYGIPTHGVPAMRSKIDPILEARQKYAYGPQHDYLDHPDVIGWTREGDSSHPKSGLATLITDGPGGSKRMYAGLKNAGETWYDITGNRSDTVKIGSDGWGEFHVNKASVSIYVQK

SEQ ID NO: 29152 - protein, 483 aa, Bacillus sp.
HHNGTNGTMMQYFEWYLPNDGNHWNRLNSDASNLKSKGITAVWIPPAWKAASQNDVGYGAYDLYDLGEFNQKGTVRTKYGTRSQLQAAVTSLKNNGIQVYGDVVMNHKGGADATEMVRAVEVNPNNRNQEVTGEYTIEAWTRFDFPGRGNTHSSFKWRWYHFDGVDWDQSRQTNNRIYKFRGKAWDWEVDTEFGNYDYLMYADYDMDHPEVVNELRNWGVWYTNTLGLDGFRIDAVKHIKYSFTRDWINHVRSATGKNMFAVAEFWKNDLGAIENYLQKTNWNHSVFDVPLHYNLYNASKSQGNYDMRNIFNGTVVQRHPSHAVTFVDNHDSQPEEALESFVDTWFKPLAYALTLTREQGYPSVFYGDYYGIPTHGVPAMRSKIDPILEARQKYAYGPQHDYLDHPDVIGWTREGDSSHPKSGLATLITDGPGGSKRMYAGLKNAGETWYDITGNRSDTVKIGSDGWGEFHVNGTSVSIYVQK

SEQ ID NO: 29153 - protein, 485 aa, Bacillus sp.
HHNGTNGTMMQYFEWYLPNDGNHWNRLNSDASNLKSKGITAVWIPPAWKGASQNDVGYGAYDLYDLGEFNQKGTVRTKYGTRSQLQAAVTSLKNNGIQVYGDVVMNHKGGADLTEMVRAVEVNPNNRNQEVTGEYTIEAWTRFDFPGRGNTHSSFKWRWYHFDGVDFDQSRQLNNRIYKFRGHGKAWDWEVDTEFGNYDYLMYADYDMDHPEVVGELRNWGVWYTNTLGLDGFRIDAVKHIKYSFTRDWINHVRSATGKNMFAVAEFWKNDLGAIENYLQKTNWNHSVFDVPLHYNLYNASKSGGNYDMRNIFNGTVVQRHPSHAVTFVDNHDSQPEEALESFVEEWFKPLAYALTLTREQGYPSVFYGDYYGIPTHGVPAMRSKIDPILEARQKYAYGPQHDYLDHPDVIGWTREGDSSHPKSGLATLITDGPGGSKRMYAGLKNAGETWYDITGNRSDTVKIGSDGWGEFHVNDGSVSIYVQK

SEQ ID NO: 29154 - protein, 485 aa, Bacillus sp.
HHNGTNGTMMQYFEWYLPNDGNHWNRLNSDASNLKSKGITAVWIPPAWKGASQNDVGYGAYDLYDLGEFNQKGTVRTKYGTRSQLQAAVTSLKNNGIQVYGDVVMNHKGGADATEMVRAVEVNPNNRNQEVTGEYTIEAWTRFDFPGRGNTHSSFKWRWYHFDGVDWDQSRRLNNRIYKFRGHGKAWDWEVDTEFGNYDYLMYADYDMDHPEVVNELRNWGVWYTNTLGLDGFRIDAVKHIKYSFTRDWINHVRSATGKNMFAVAEFWKNDLGAIENYLQKTNWNHSVFDVPLHYNLYNASKSGGNYDMRNIFNGTVVQRHPSHAVTFVDNHDSQPEEALESFVEPWFKPLAYALTLTREQGYPSVFYGDYYGIPTHGVPAMRSKIDPILEARQKYAYGPQHDYLDHPDVIGWTREGDSSHPKSGLATLITDGPGGSKRMYAGLKNAGETWYDITGNRSDTVKIGSDGWGEFHVNQSSVSIYVQK

SEQ ID NO: 29155 - protein, 485 aa, Bacillus sp.
HHNGTNGTMMQYFEWYLPNDGNHWNRLNSDASNLKSKGITAVWIPPAWKGASQNDVGYGAYDLYDLGEFNQKGTVRTKYGTRSQLQAAVTSLKNNGIQVYGDVVMNHKGGADATEMVRAVEVNPNNRNQEVTGEYTIEAWTRFDFPGRGNTHSSFKWRWYHFDGVDWDQSRRLNNRIYKFRGHGKAWDWEVDTEFGNYDYLMYADYDMDHPEVVNELRNWGVWYTNTLGLDGFRIDAVKHIKYSFTRDWINHVRSATGKNMFAVAEFWKNDLGAIENYLQKTNWNHSVFDVPLHYNLYNASKSQGNYDMRNIFNGTVVQRHPSHAVTFVDNHDSQPEEALESFVDTWFKPLAYALTLTREQGYPSVFYGDYYGIPTHGVPAMRSKIDPILEARQKYAYGPQHDYLDHPDVIGWTREGDSSHPKSGLATLITDGPGGSKRMYAGLKNAGETWYDITGNRSDTVKIGSDGWGEFHVNDGSVSIYVQK

SEQ ID NO: 29156 - protein, 483 aa, Bacillus sp.
HHNGTNGTMMQYFEWYLPNDGNHWNRLNSDASNLKSKGITAVWIPPAWKAASQNDVGYGAYDLYDLGEFNQKGTVRTKYGTRSQLQAAVTSLKNNGIQVYGDVVMNHKGGADATEMVPAVEVNPNNRNQEVTGEYTIEAWTRFDFPGRGNTHSSFKWRWYHFDGVDWDQSRDLQNRIYKFRGKAWDWEVDTEFGNYDYLMYADYDMDHPEVVNELRNWGVWYTNTLGLDGFRIDAVKHIKYSFTRDWINHVRSATGKNMFAVAEFWKNDLGAIENYLQKTNWNHSVFDVPLHYNLYNASKSGGNYDMRNIFNGTVVQRHPSHAVTFVDNHDSQPEEALESFVETWFKPLAYALTLTREQGYPSVFYGDYYGIPTHGVPAMRSKIDPILEARQKYAYGPQHDYLDHPDVIGWTREGDSSHPKSGLATLITDGPGGSKRMYAGLKNAGETWYDITGNRSDTVKIGSDGWGEFHVNKASVSIYVQK

SEQ ID NO: 29157 - protein, 483 aa, Bacillus sp.
HHNGTNGTMMQYFEWYLPNDGNHWNRLNSDASNLKSKGITAVWIPPAWKAASQNDVGYGAYDLYDLGEFNQKGTVRTKYGTRSQLQAAVTSLKNNGIQVYGDVVMNHKGGADATEMVRAVEVNPNNRNQEVTGEYTIEAWTRFDFPGRGNTHSSFKWRWYHFDGVDWDQSRQTNNRIYKFRGKAWDWEVDTEFGNYDYLMYADYDMDHPEVVNELRNWGVWYTNTLGLDGFRIDAVKHIKYSFTRDWINHVRSATGKNMFAVAEFWKNDLGAIENYLQKTNWNHSVFDVPLHYNLYNASKSGGNYDMRNIFNGTVVQRHPSHAVTFVDNHDSQPEEALESFVETWFKPLAYALTLTREQGYPSVFYGDYYGIPTHGVPAMRSKIDPILEARQKYAYGPQHDYLDHPDVIGWTREGDSSHPKSGLATLITDGPGGSKRMYAGLKNAGETWYDITGNRSDTVKIGSDGWGEFHVNDASVSIYVQK

SEQ ID NO: 29158 - protein, 483 aa, Bacillus sp.
HHNGTNGTMMQYFEWYLPNDGNHWNRLNSDASNLKSKGITAVWIPPAWKGASQNDVGYGAYDLYDLGEFNQKGTVRTKYGTRSQLQAAVTSLKNNGIQVYGDVVMNHKGGADATEMVRAVEVNPNNRNQEVTGEYTIEAWTRFDFPGRGNTHSSFKWRWYHFDGVDWDQSRDLTNRIYKFRGKAWDWEVDTEFGNYDYLMYADYDMDHPEVVNELRNWGVWYTNTLGLDGFRIDAVKHIKYSFTRDWINHVRSATGKNMFAVAEFWKNDLGAIENYLQKTNWNHSVFDVPLHYNLYNASQSGGNYDMRNIFNGTVVQRHPSHAVTFVDNHDSQPEEALESFVEPWFKPLAYALTLTREQGYPSVFYGDYYGIPTHGVPAMRSKIDPILEARQKYAYGPQHDYLDHPDVIGWTREGDSSHPKSGLATLITDGPGGSKRMYAGLKNAGETWYDITGNRSDTVKIGSDGWGEFHVNKSSVSIYVQK

SEQ ID NO: 29159 - protein, 483 aa, Bacillus sp.
HHNGTNGTMMQYFEWYLPNDGNHWNRLNSDASNLKSKGITAVWIPPAWKGASQNDVGYGAYDLYDLGEFNQKGTVRTKYGTRSQLQAAVTSLKNNGIQVYGDVVMNHKGGADATEMVRAVEVNPNNRNQEVTGEYTIEAWTRFDFPGRGNTHSSFKWRWYHFDGVDWDQSRRLNNRIYKFRGKAWDWEVDTEFGNYDYLMYADYDMDHPEVVNELRNWGVWYTNTLGLDGFRIDAVKHIKYSFTRDWINHVRSATGKNMFAVAEFWKNDLGAIENYLQKTNWNHSVFDVPLHYNLYNASKSQGNYDMRNIFNGTVVQRHPSHAVTFVDNHDSQPEEALESFVDPWFKPLAYALTLTREQGYPSVFYGDYYGIPTHGVPAMRSKIDPILEARQKYAYGPQHDYLDHPDVIGWTREGDSSHPKSGLATLITDGPGGSKRMYAGLKNAGETWYDITGNRSDTVKIGSDGWGEFHVNGTSVSIYVQK

SEQ ID NO: 29160 - protein, 485 aa, Bacillus sp.
HHNGTNGTMMQYFEWYLPNDGNHWNRLNSDASNLKSKGITAVWIPPAWKGASQNDVGYGAYDLYDLGEFNQKGTVRTKYGTRSQLQAAVTSLKNNGIQVYGDVVMNHKGGADATEMVRAVEVNPNNRNQEVTGEYTIEAWTRFDFPGRGNTHSSFKWRWYHFDGVDWDQSRRLNNRIYKFRGHGKAWDWEVDTEFGNYDYLMYADYDMDHPEVVNELRNWGVWYTNTLGLDGFRIDAVKHIKYSFTRDWINHVRSATGKNMFAVAEFWQNDLGWIENYLQKTNWNHSVFDVPLHYNLYNASKSGGNYDMRNIFNGTVVQRHPSHAVTFVDNHDSQPEEALESFVEEWFKPLAYALTLTREQGYPSVFYGDYYGIPTHGVPAMRSKIDPILEARQKYAYGPQHDYLDHPDVIGWTREGDSSHPKSGLATLITDGPGGSKRMYAGLKNAGETWYDITGNRSDTVKIGSDGWGEFHVNDGSVSIYVQK

SEQ ID NO: 29161 - protein, 483 aa, Bacillus sp.
HHNGTNQTMMQYFEWYLPNDGNHWNRLNSDASNLKSKGITAVWIPPAWKGASQNDVGYGAYDLYDLGEFNQKGTVRTKYGTRSQLQAAVTSLKNNGIQVYGDVVMNHKGGADATEMVRAVEVNPNNRNQEVTGEYTIEAWTRFDFPGRGNTHSSFKWRWYHFDGVDWDQSRRLNNRIYKFRGKAWDWEVDTEFGNYDYLMYADYDMDHPEVVNELRNWGVWYTNTLGLDGFRIDAVKHIKYSFTRDWINHVRSATGKNMFAVAEFWKNDLGAIENYLQKTNWNHSVFDVPLHYNLYNASKSGGNYDMRNIFNGTVVQSNPSHAVTFVDNHDSQPEEALESFVEEWFKPLAYALTLTREQGYPSVFYGDYYGIPTHGVPAMRSKIDPILEARQKYAYGPQHDYLDHPDVIGWTREGDSSHPKSGLATLITDGPGGSKRMYAGLKNAGETWYDITGNRSDTVKIGSDGWGEFHVNDGSVSIYVQK

SEQ ID NO: 29162 - protein, 485 aa, Bacillus sp.
HHNGTNGTMMQYFEWYLPNDGNHWNRLNSDASNLKSKGITAVWIPPAWKGASQNDVGYGAYDLYDLGEFNQKGTVRTKYGTRSQLQAAVTSLKNNGIQVYGDVVMNHKGGADATEMVRAVEVNPNNRNQEVTGEYTIEAWTRFDFPGRGNTHSSFKWRWYHFDGVDWDQSRRLNNRIYKFRGHGKAWDWEVDTEFGNYDYLMYADYDMDHPEVVNELRNWGVWYTNTLGLDGFRIDAVKHIKYSFTRDWINHVRIATGKNMFAVAEFWKNDLGAIENYLQKTNWNHSVFDVPLHYNLYNASKSGGNYDMRNIFNGTVVQANPNHAVTFVDNHDSQPEEALESFVDEWFKPLAYALTLTREQGYPSVFYGDYYGIPTHGVPAMRSKIDPILEARQKYAYGPQHDYLDHPDVIGWTREGDSSHPKSGLATLITDGPGGSKRMYAGLKNAGETWYDITGNRSDTVKIGSDGWGEFHVNDQSVSIYVQK

SEQ ID NO: 29163 - protein, 485 aa, Bacillus sp.
HHNGTNGTMMQYFEWYLPNDGNHWNRLNSDASNLKSKGITAVWIPPAWKAASQNDVGYGAYDLYDLGEFNQKGTVRTKYGTRSQLQAAVTSLKNNGIQVYGDVVMNHKGGADATEMVRAVEVNPNNRNQEVTGEYTIEAWTRFDFPGRGNTHSSFKWRWYHFDGVDWDQSRDLQNRIYKFRGHGKAWDWEVDTEFGNYDYLMYADYDMDHPEVVNELRNWGVWYTNTLGLDGFRIDAVKHIKYSFTRDWINHVRSATGKNMFAVAEFWKNDLGAIENYLQKTNWNHSVFDVPLHYNLYNASQSGGNYDMRNIFNGTVVQRHPSHAVTFVDNHDSQPEEALESFVEPWFKPLAYALTLTREQGYPSVFYGDYYGIPTHGVPAMRSKIDPILEARQKYAYGPQHDYLDHPDVIGWTREGDSSHPKSGLATLITDGPGGSKRMYAGLKNAGETWYDITGNRSDTVKIGSDGWGEFHVNKSSVSIYVQK

SEQ ID NO: 29164 - protein, 485 aa, Bacillus sp.
HHNGTNGTMMQYFEWYLPNDGNHWNRLNSDASNLKSKGITAVWIPPAWKGASQNDVGYGAYDLYDLGEFNQKGTVRTKYGTRSQLQAAVTSLKNNGIQVYGDVVMNHKGGADATEMVRAVEVNPNNRNQEVTGEYTIEAWTRFDFPGRGNTHSSFKWRWYHFDGVDWDQSRRLNNRIYKFRGHGKAWDWEVDTEFGNYDYLMYADYDMDHPEVVNELRNWGVWYTNTLGLDGFRIDAVKHIKYSFTRDWINHVRSATGKNMFAVAEFWKNDLGAIENYLQKTNWNHSVFDVPLHYNLYNASKSGGNYDMRNIFNGTVVQRHPSHAVTFVDNHDSQPEEALESFVDTWFKPLAYALTLTREQGYPSVFYGDYYGIPTHGVPAMRSKIDPILEARQKYAYGPQHDYLDHPDVIGWTREGDSSHPKSGLATLITDGPGGSKRMYAGLKNAGETWYDITGNRSDTVKIGSDGWGEFHVNQASVSIYVQK

SEQ ID NO: 29165 - protein, 485 aa, Bacillus sp.
HHNGTNGTMMQYFEWYLPNDGNHWNRLNSDASNLKSKGITAVWIPPAWKGASQNDVGYGAYDLYDLGEFNQKGTVRTKYGTRSQLQAAVTSLKNNGIQVYGDVVMNHKGGADATEMVSAVEVNPNNRQQEVTGEYTIEAWTRFDFPGRGNTHSSFKWRWYHFDGVDWDQSRRLNNRIYLFRGHGKAWDWEVDTEFGNYDYLMYADYDMDHPEVVNELRNWGVWYTNTLGLDGFRIDAVKHIKYSFTRDWINHVRSATGKNMFAVAEFWKNDLGAIENYLQKTNWNHSVFDVPLHYNLYNASKSGGNYDMRNIFNGTVVQRHPSHAVTFVDNHDSQPEEALESFVEEWFKPLAYALTLTREQGYPSVFYGDYYGIPTHGVPAMRSKIDPILEARQKYAYGPQHDYLDHPDVIGWTREGDSSHPKSGLATLITDGPGGSKRMYAGLKNAGETWYDITGNRSDTVKIGSDGWGEFHVNDGSVSIYVQK

SEQ ID NO: 29166 - protein, 485 aa, Bacillus sp.
HHNGTNGTMMQYFEWYLPNDGNHWNRLNSDASNLKSKGITAVWIPPAWKGASQNDVGYGAYDLYDLGEFNQKGTVRTKYGTRSQLQAAVTSLKNNGIQVYGDVVMNHKGGADATEMVRAVEVNPNNRNQEVTGEYTIEAWTRFDFPGRGNTHSSFKWRWYHFDGVDWDQSRRLNNRIYKFRGHGKAWDWEVDTEFGNYDYLMYADYDMDHHEVINELRNWGVWYTNTLGLDGFRIDAVKHIKYSFTRDWINHVRSATGKNMFAVAEFWKNDLGAIENYLQKTNWNHSVFDVPLHYNLYNASKSGGNYDMRNIFNGTVVQRHPSHAVTFVDNHDSQPEEALESFVEEWFKPLAYALTLTREQGYPSVFYGDYYGIPTHGVPAMRSKIDPILEARQKYAYGPQHDYLDHPDVIGWTREGDSSHPKSGLATLITDGPGGSKRMYAGLKNAGETWYDITGNRSDTVKIGSDGWGEFHVNDGSVSIYVQK

SEQ ID NO: 29167 - protein, 483 aa, Bacillus sp.
HHNGTNGTMMQYFEWYLPNDGNHWNRLNSDASNLKSKGITAVWIPPAWKAVSQNDVGYGAYDLYDLGEFNQKGTVRTKYGTRSQLQAAVTSLKNNGIQVYGDVVMNHKGGADATEMVRAVEVNPNNRNQEVTGEYTIEAWTRFDFPGRGNTHSSFKWRWYHFDGVDWDQSRDFQNRIYKFRGKAWDWEVDTEFGNYDYLMYTDYDMDHPEVVNELRNWGVWYTNTLGLDGFRIDAVKHIKYSFTRDWINHVRSATGKNMFAVAEFWKNDLGAIENYLQKTNWNHSVFDVPLHYNLYNASKSQGNYDMRNIFNGTVVQRHPSHAVTFVDNHDSQPEEALESFVDTWFKPLAYALTLTREQGYPSVFYGDYYGIPTHGVPAMRSKIDPILEARQKYAYGPQHDYLDHPDVIGWTREGDSSHPKSGLATLITDGPGGSKRMYAGLKNAGETWYDITGNRSDTVKIGSDGWGEFHVNGSSVSIYVQK

SEQ ID NO: 29168 - protein, 485 aa, Bacillus sp.
HHNGTNGTMMQYFEWYLPNDGNHWNRLNSDASNLKSKGITAVWIPPAWKGASQNDVGYGAYDLYDLGEFNQKGTVRTKYGTRSQLQAAVTSLKNNGIQVYGDVVMNHKGGADATEMVRAVEVNPNNRNQEVTGEYTIEAWTRFDFPGRGNTHSSFKWRWYHFDGVDWDQSRRLNNRIYKFRGHGKAWDWEVDTEFGNYDYLMYADYDMDHPEVVNELRNWGVWYTNTLGLDGFRIDAVKHIKYSFTRDWINHVRSATGKNMFAVAEFWKNDLGAIENYLQKTNWNHSVFDVPLHYNLYNASKSAGNYDMRNIFNGTVVQRHPSHAVTFVDNHDSQPEEALESFVDPWFKPLAYALTLTREQGYPSVFYGDYYGIPTHGVPAMRSKIDPILEARQKYAYGPQHDYLDHPDVIGWTREGDSSHPKSGLATLITDGPGGSKRMYAGLKNAGETWYDITGNRSDTVKIGSDGWGEFHVNKGSVSIYVQK

SEQ ID NO: 29169 - protein, 485 aa, Bacillus sp.
HHNGTNGTMMQYFEWYLPNDGNHWNRLNSDASNLKSKGITAVWIPPAWKGASQNDVGYGAYDLYDLGEFNQKGTVRTKYGTRSQLQAAVTSLKNNGIQVYGDVVMNHKGGADATEMVRAVEVNPNNRNQEVTGEYTIEAWTRFDFPGRQNTHSSFKWRWYHFDGVDWDQSERLNNRIYKFRGHGKAWDWEVDTEFGNYDYLMYADYDMDHPEVVNELRNWGVWYTNTLGLDGFRIDAVKHIKYSFTRDWINHVRSATGKNMFAVAEFWKNDLGAIENYLQKTNWNHSVFDVPLHYNLYNASKSGGNYDMRNIFNGTVVQRHPSHAVTFVDNHDSQPEEALESFVEEWFKPLAYALTLTREQGYPSVFYGDYYGIPTHGVPAMRSKIDPILEARQKYAYGPQHDYLDHPDVIGWTREGDSSHPKSGLATLITDGPGGSKRMYAGLKNAGETWYDITGNRSDTVKIGSDGWGEFHVNDGSVSIYVQK

SEQ ID NO: 29170 - protein, 485 aa, Bacillus sp.
HHNGTNGTMMQYFEWYLPNDGNHWNRLNSDASNLKSKGITAVWIPPAWKAASQNDVGYGAYDLYDLGEFNQKGTVRTKYGTRSQLQAAVTSLKNNGIQVYGDVVMNHKGGADLTEMVDAVEVNPNNRNQEVTGEYTIEAWTRFDFPGRGNTHSSFKWRWYHFDGVDWDQSRQITNRIYKFRGHGKAWDWEVDTEFGNYDYLMYTDYDMDHPEVVNELRNWGVWYTNTLGLDGFRIDAVKHIKYSFTRDWINHVRSATGKNMFAVAEFWKNDLGAIENYLQKTNWNHSVFDVPLHYNLYNASKSGGNYDMRNIFNGTVVQRHPSHAVTFVDNHDSQPEEALESFVEEWFKPLAYALTLTREQGYPSVFYGDYYGIPTHGVPAMRSKIDPILEARQKYAYGPQHDYLDHPDVIGWTREGDSSHPKSGLATLITDGPGGSKRMYAGLKNAGETWYDITGNRSDTVKIGSDGWGEFHVNDGSVSIYVQK

SEQ ID NO: 29171 - protein, 485 aa, Bacillus sp.
HHNGTNGTMMQYFEWYLPNDGNHWNRLNSDASNLKSKGITAVWIPPAWKGASQNDVGYGAYDLYDLGEFNQKGTVRTKYGTRSQLQAAVTSLKNNGIQVYGDVVMNHKGGADATEMVRAVEVNPNNRNQEVTGEYTIEAWTRFDFPGRGNTHSSFKWRWYHFDGVDWDQSERLNNRIYKFRGHGKAWDWEVETEFGNYDYLMYADYDMDHPEVVNELRNWGVWYTNTLGLDGFRIDAVKHIKYSFTRDWINHVRSATGKNMFAVAEFWKNDLGAIENYLQKTNWNHSVFDVPLHYNLYNASKSGGNYDMRNIFNGTVVQRHPSHAVTFVDNHDSQPEEALESFVDPWFKPLAYALTLTREQGYPSVFYGDYYGIPTHGVPAMRSKIDPILEARQKYAYGPQHDYLDHPDVIGWTREGDSSHPKSGLATLITDGPGGSKRMYAGLKNAGETWYDITGNRSDTVKIGSDGWGEFHVNGGSVSIYVQK

SEQ ID NO: 29172 - protein, 483 aa, Bacillus sp.
HHNGTNGTMMQYFEWYLPNDGNHWNRLNSDASNLKSKGITAVWIPPAWKAQSQNDVGYGAYDLYDLGEFNQKGTVRTKYGTRSQLQAAVTSLKNNGIQVYGDVVMNHKGGADATEMVRAVEVNPNNRNQEVTGEYTIEAWTRFDFPGRGNTHSSFKWRWYHFDGVDWDQSRQLNNRIYKFRGKAWDWEVDTEFGNYDYLMYADYDMDHPEVVNELRNWGVWYTNTLGLDGFRIDAVKHIKYSFTRDWINHVRSATGKNMFAVAEFWKNDLGAIENYLQKTNWNHSVFDVPLHYNLYNASKSQGNYDMRNIFNGTVVQRHPSHAVTFVDNHDSQPEEALESFVDTWFKPLAYALTLTREQGYPSVFYGDYYGIPTHGVPAMRSKIDPILEARQKYAYGPQHDYLDHPDVIGWTREGDSSHPKSGLATLITDGPGGSKRMYAGLKNAGETWYDITGNRSDTVKIGSDGWGEFHVNGSSVSIYVQK

SEQ ID NO: 29173 - protein, 483 aa, Bacillus sp.
HHNGTNGTMMQYFEWYLPNDGNHWNRLNSDASNLKSKGITAVWIPPAWKATSQNDVGYGAYDLYDLGEFNQKGTVRTKYGTRSQLQAAVTSLKNNGIQVYGDVVMNHKGGADATEMVPAVEVNPNNRNQEVTGEYTIEAWTRFDFPGRGNTHSSFKWRWYHFDGVDWDQSRELNNRIYKFRSKAWDWEVDTEFGNYDYLMYTDYDMDHPEVVNELRNWGVWYTNTLGLDGFRIDAVKHIKYSFTRDWINHVRSATGKNMFAVAEFWKNDLGAIENYLQKTNWNHSVFDVPLHYNLYNASKSGGNYDMRNIFNGTVVQRHPSHAVTFVDNHDSQPEEALESFVEEWFKPLAYALTLTREQGYPSVFYGDYYGIPTHGVPAMRSKIDPILEARQKYAYGPQHDYLDHPDVIGWTREGDSSHPKSGLATLITDGPGGSKRMYAGLKNAGETWYDITGNRSDTVKIGSDGWGEFHVNDGSVSIYVQK

SEQ ID NO: 29174 - protein, 485 aa, Bacillus sp.
HHNGTNGTMMQYFEWYLPNDGNHWNRLNSDASNLKSKGITAVWIPPAWKGASQNDVGYGAYDLYDLGEFNQKGTVRTKYGTRSQLQAAVTSLKNNGIQVYGDVVMNHKGGADATEMVRAVEVNPNNRNQEVTGEYTIEAWTRFDFPGRGNTHSSFKWRWYHFDGVDWDQSRRLNNRIYKFRGHGKAWDWEVDTEFGNYDYLMYADYDMDHPEVVNELRNWGVWYTNTLGLDGFRIDAVKHIKYSFTRDWINHVRSATGKNMFAVAEFWKNDLGAIENYLQKTNWNHSVFDVPLHYNLYNASKSGGNYDMRNIFNGTVVQRHPSHAVTFVDNHDSQPEEALESFVETWFKPLAYALTLTREQGYPSVFYGDYYGIPTHGVPAMRSKIDPILEARQKYAYGPQHDYLDHPDVIGWTREGDSSHPKSGLATLITDGPGGSKRMYAGLKNAGETWYDITGNRSDTVKIGSDGWGEFHVNKASVSIYVQK

SEQ ID NO: 29175 - protein, 485 aa, Bacillus sp.
HHNGTNGTMMQYFEWYLPNDGNHWNRLNSDASNLKSKGITAVWIPPAWKGASQNDVGYGAYDLYDLGEFNQKGTVRTKYGTRSQLQAAVTSLKNNGIQVYGDVVMNHKGGADATEMVRAVEVNPNNRNQEVTGEYTIEAWTRFDFPGRGNTHSSFKWRWYHFDGVDWDQSRRLNNRIYKFRGHGKAWDWEVDTEFGNYDYLMYADYDMDHPEVVNELRNWGVWYTNTLGLDGFRIDAVKHIKYSFTRDWINHVRSATGKNMFAVAEFWQNDLGSIENYLQKTNWNHSVFDVPLHYNLYNASKSGGNYDMRNIFNGTVVQRHPSHAVTFVDNHDSQPEEALESFVEEWFKPLAYALTLTREQGYPSVFYGDYYGIPTHGVPAMRSKIDPILEARQKYAYGPQHDYLDHPDVIGWTREGDSSHPKSGLATLITDGPGGSKRMYAGLKNAGETWYDITGNRSDTVKIGSDGWGEFHVNDGSVSIYVQK

SEQ ID NO: 29176 - protein, 485 aa, Bacillus sp.
HHNGTNGTMMQYFEWYLPNDGNHWNRLNSDASNLKSKGITAVWIPPAWKGASQNDVGYGAYDLYDLGEFNQKGTVRTKYGTRSQLQAAVTSLKNNGIQVYGDVVMNHKGGADATEMVRAVEVNPNNRNQEVTGEYTIEAWTRFDFPGRGNTHSSFKWRWYHFDGVDWDQSRRLNNRIYKFRGHGKAWDWEVDTEFGNYDYLMYADYDMDHPEVVNELRNWGVWYTNTLGLDGFRIDAVKHIKYSFTRDWINHVRSATGKNMFAVAEFWKNDLGAIENYLQKTNWNHSVFDVPLHYNLYNASKSAGNYDMRNIFNGTVVQRHPSHAVTFVDNHDSQPEEALESFVDEWFKPLAYALTLTREQGYPSVFYGDYYGIPTHGVPAMRSKIDPILEARQKYAYGPQHDYLDHPDVIGWTREGDSSHPKSGLATLITDGPGGSKRMYAGLKNAGETWYDITGNRSDTVKIGSDGWGEFHVNQASVSIYVQK

SEQ ID NO: 29177 - protein, 483 aa, Bacillus sp.
HHNGTNGTMMQYFEWYLPNDGNHWNRLNSDASNLKSKGITAVWIPPAWKGASQNDVGYGAYDLYDLGEFNQKGTVRTKYGTRSQLQAAVTSLKNNGIQVYGDVVMNHKGGADATEMVRAVEVNPNNRNQEVTGEYTIEAWTRFDFPGRGNTHSSFKWRWYHFDGVDWDQSRRLNNRIYKFRGKAWDWEVDTEFGNYDYLMYADYDMDHPEVVNELRNWGVWYTNTLGLDGFRIDAVKHIKYSFTRDWINHVRSATGKNMFAVAEFWKNDLGAIENYLQKTNWNHSVFDVPLHYNLYNASKSQGNYDMRNIFNGTVVQRHPSHAVTFVDNHDSQPEEALESFVDPWFKPLAYALTLTREQGYPSVFYGDYYGIPTHGVPAMRSKIDPILEARQKYAYGPQHDYLDHPDVIGWTREGDSSHPKSGLATLITDGPGGSKRMYAGLKNAGETWYDITGNRSDTVKIGSDGWGEFHVNGQSVSIYVQK

SEQ ID NO: 29178 - protein, 483 aa, Bacillus sp.
HHNGTNGTMMQYFEWYLPNDGNHWNRLNSDASNLKSKGITAVWIPPAWKGASQNDVGYGAYDLYDLGEFNQKGTVRTKYGTRSQLQAAVTSLKNNGIQVYGDVVMNHKGGADATEMVRAVEVNPNNRNQEVTGEYTIEAWTRFDFPGRGNTHSSFKWRWYHFDGVDWDQSRRLNNRIYKFRGKAWDWEVDTEFGNYDYLMYADYDMDHPEVVNELRNWGVWYTNTLGLDGFRIDAVKHIKYSFTRDWINHVRSATGKNMFAVAEFWKNDLGAIENYLQKTNWNHSVFDVPLHYNLYNASKSGSNYDMRNIFNGTVVQRHPSHAVTFVDNHDSQPEEALESFVDEWFKPLAYALTLTREQGYPSVFYGDYYGIPTHGVPAMRSKIDPILEARQKYAYGPQHDYLDHPDVIGWTREGDSSHPKSGLATLITDGPGGSKRMYAGLKNAGETWYDITGNRSDTVKIGSDGWGEFHVNKQSVSIYVQK

SEQ ID NO: 29179 - protein, 483 aa, Bacillus sp.
HHNGTNGTMMQYFEWYLPNDGNHWNRLNSDASNLKSKGITAVWIPPAWKGASQNDVGYGAYDLYDLGEFNQKGTVRTKYGTRSQLQAAVTSLKNNGIQVYGDVVMNHKGGADATEMVRAVEVNPNNRNQEVTGEYTIEAWTRFDFPGRGNTHSSFKWRWYHFDGVDWDQSRRLNNRIYKFRGKAWDWEVDTENGFYDYLMYADIDMDHPEVVIPLRNWGVWYTNTLGLDGFRIDAVKHIKYSFTRDWINHVRSATGKNMFAVAEFWKNDLGAIENYLQKTNWNHSVFDVPLHYNLYNASKSGGNYDMRNIFNGTVVQRHPSHAVTFVDNHDSQPEEALESFVEEWFKPLAYALTLTREQGYPSVFYGDYYGIPTHGVPAMRSKIDPILEARQKYAYGPQHDYLDHPDVIGWTREGDSSHPKSGLATLITDGPGGSKRMYAGLKNAGETWYDITGNRSDTVKIGSDGWGEFHVNDGSVSIYVQK

SEQ ID NO: 29180 - protein, 483 aa, Bacillus sp.
HHNGTNGTMMQYFEWYLPNDGNHWNRLNSDASNLKSKGITVVWIPPAWKGASQNDVGYGAYDIYDLGEFNQKGTVRTKYGTRSQLQAAVTSLKNNGIQVYGDVVMNHKGGADATEMVRAVEVNPNNRNQEVTGEYTIEAWTRFDFPGRGNTHSSFKWRWYHFDGVDWDQSRRLNNRIYKFRGKAWDWEVDTENGNYDYLMYADIDYDHPEVVNELRNWGVWYTNTLGLDGFRIDAVKHIKYSFTRDWINHVRSATGKNMFAVAEFWKNDLGAIENYLQKTNWNHSVFDVPLHYNLYNASKSGGNYDMRNIFNGTVVQRHPSHAVTFVDNHDSQPEEALESFVEEWFKPLAYALTLTREQGYPSVFYGDYYGIPTHGVPAMRSKIDPILEARQKYAYGPQHDYLDHPDVIGWTREGDSSHPKSGLATLITDGPGGSKRMYAGLKNAGETWYDITGNRSDTVKIGSDGWGEFHVNDGSVSIYVQK

SEQ ID NO: 29181 - protein, 483 aa, Bacillus sp.
HHNGTNGTMMQYFEWYLPNDGNHWNRLNSDASNLKSKGIKAVWIPPAWKGASQNDVGYGAYDLYDLGEFNQKGTVRTKYGTRSQLQAAVTSLKNNGIQVYGDVVMNHKGGADATEMVRAVEVNPNNRNQEVTGEYTIEAWTRFDFPGRGNTHSSFKWRWYHFDGVDWDQSRRLDNRIYKFRGKAWDWEVDTEFGNYDYLMYTDYDMDHPEVVNELRNWGVWYTNTLGLDGFRIDAVKHIKYSFTRDWINHVRSATGKNMFAVAEFWKNDLGAIENYLQKTNWNHSVFDVPLHYNLYNASKSGGNYDMRNIFNGTVVQRHPSHAVTFVDNHDSQPEEALESFVEEWFKPLAYALTLTREQGYPSVFYGDYYGIPTHGVPAMRSKIDPILEARQKYAYGPQHDYLDHPDVIGWTREGDSSHPKSGLATLITDGPGGSKRMYAGLKNAGETWYDITGNRSDTVKIGSDGWGEFHVNDGSVSIYVQK

SEQ ID NO: 29182 - protein, 483 aa, Bacillus sp.
HHNGTNGTMMQYFEWYLPNDGNHWNRLNSDASNLKSKGITAVWIPPAWKGASQNDVGYGAYDLYDLGEFNQKGTVRTKYGTRSQLQAAVTSLKNNGIQVYGDVVMNHKGGADATEMVRAVEVNPNNRNQEVTGEYTIEAWTRFDFPGRGNTHSSFKWRWYHFDGVDWDQSRRLNNRIYKFRGKAWDWEVDTEFGNYDYLMYADYDMDHPEVVNELRNWGVWYTNTLGLDGFRIDAVKHIKYSFTRDWINHVRSATGKNMFAVAEFWKNDLGAIENYLQKTNWNHSVFDVPLHYNLYNASKSGGNYDMRNIFNGTVVQRHPSHAVTFVDNHDSQPEEALESFVEPWFKPLAYALTLTREQGYPSVFYGDYYGIPTHGVPAMRSKIDPILEARQKYAYGPQHDYLDHPDVIGWTREGDSSHPKSGLATLITDGPGGSKRMYAGLKNAGETWYDITGNRSDTVKIGSDGWGEFHVNQTSVSIYVQK

SEQ ID NO: 29183 - protein, 483 aa, Bacillus sp.
HHNGTNGTMMQYFEWYLPNDGNHWNRLNSDASNLKSKGITAVWIPPAWKGASQNDVGYGAYDLYDLGEFNQKGTVRTKYGTRSQLQAAVTSLKNNGIQVYGDVVMNHKGGADATEMVRAVEVNPNNRNQEVTGEYTIEAWTRFDFPGRGNTHSSFKWRWYHFDGVDWDQSRRLNNRIYKFRGKAWDWEVDTEFGNYDYLMYADYDMDHPETSNELRNWGVWYTNTLGLDGFRIDAVKHIKYSFTRDWINHVRSATGKNMFAVAEFWKNDLGAIENYLQKTNWNHSVFDVPLHYNLYNASKSGGNYDMRNIFNGTVVQRHPSHAVTFVDNHDSQPEEALESFVEEWFKPLAYALTLTREQGYPSVFYGDYYGIPTHGVPAMRSKIDPILEARQKYAYGPQHDYLDHPDVIGWTREGDSSHPKSGLATLITDGPGGSKRMYAGLKNAGETWYDITGNRSDTVKIGSDGWGEFHVNDGSVSIYVQK

SEQ ID NO: 29184 - protein, 483 aa, Bacillus sp.
HHNGTNGTMMQYFEWYLPNDGNHWNRLNSDASNLKSKGITAVWIPPAWKGASQNDVGYGAYDLYDLGEFNQKGTVRTKYGTRSQLQAAVTSLKNNGIQVYGDVVMNHKGGADATEMVRAVEVNPNNRNQEVTGEYTIEAWTRFDFPGRGNTHSSFKWRWYHFDGVDWDQSRRLNNRIYKFRGKAWDWEVDTEFGNYDYLMYADYDMDHPEVVNELRNWGVWYTNTLGLDGFRIDAVKHIKYSFTRDWINHVRSATGKNMFAVAEFWKNDLGAIENYLQKTNWNHSVFDVPLHYNLYNASKSSGNYDMRNIFNGTVVQRHPSHAVTFVDNHDSQPEEALESFVDTWFKPLAYALTLTREQGYPSVFYGDYYGIPTHGVPAMRSKIDPILEARQKYAYGPQHDYLDHPDVIGWTREGDSSHPKSGLATLITDGPGGSKRMYAGLKNAGETWYDITGNRSDTVKIGSDGWGEFHVNKGSVSIYVQK

SEQ ID NO: 29185 - protein, 483 aa, Bacillus sp.
HHNGTNGTMMQYFEWYLPNDGNHWNRLNSDASNLKSKGITAVWIPPAWKGASQNDVGYGAYDLYDLGEFNQKGTVRTKYGTRSQLQAAVTSLKNNGIQVYGDVVMNHKGGADATEMVRAVEVNPNNRNQEVTGEYTIEAWTRFDFPGRGNTHSSFKWRWYHFDGVDWDQSRRLNNRIYKFRGKAWDWEVDTEFGNYDYLMYADYDMDHPEVVNELRNWGVWYTNTLGLDGFRIDAVKHIKYSFTRDWINHVRSATGKNMFAVAEFWKNDLGAIENYLQKTNWNHSVFDVPLHYNLYNASKSQGNYDMRNIFNGTVVQRHPSHAVTFVDNHDSQPEEALESFVDTWFKPLAYALTLTREQGYPSVFYGDYYGIPTHGVPAMRSKIDPILEARQKYAYGPQHDYLDHPDVIGWTREGDSSHPKSGLATLITDGPGGSKRMYAGLKNAGETWYDITGNRSDTVKIGSDGWGEFHVNDGSVSIYVQK

SEQ ID NO: 29186 - protein, 483 aa, Bacillus sp.
HHNGTNGTMMQYFEWYLPNDGNHWNRLNSDASNLKSKGITAVWIPPAWKGASQNDVGYGAYDLYDLGEFNQKGTVRTKYGTRSQLQAAVTSLKNNGIQVYGDVVMNHKGGADATEMVRAVEVNPNNRNQEVTGEYTIEAWTRFDFPGRGNTHSSFKWRWYHFDGVDWDQSRRLNNRIYKFRGKAWDWEVDTEFGNYDYLMYADYDMDHHEVINELRNWGVWYTNTLGLDGFRIDAVKHIKYSFTRDWINHVRSATGKNMFAVAEFWKNDLGAIENYLQKTNWNHSVFDVPLHYNLYNASKSGGNYDMRNIFNGTVVQRHPSHAVTFVDNHDSQPEEALESFVEEWFKPLAYALTLTREQGYPSVFYGDYYGIPTHGVPAMRSKIDPILEARQKYAYGPQHDYLDHPDVIGWTREGDSSHPKSGLATLITDGPGGSKRMYAGLKNAGETWYDITGNRSDTVKIGSDGWGEFHVNDGSVSIYVQK

SEQ ID NO: 29187 - protein, 483 aa, Bacillus sp.
HHNGTNGTMMQYFEWYLPNDGNHWNRLNSDASNLKSKGITAVWIPPAWKGASQNDVGYGAYDLYDLGEFNQKGTVRTKYGTRSQLQAAVTSLKNNGIQVYGDVVMNHKGGADATEMVRAVEVNPNNRNQEVTGEYTIEAWTRFDFPGRGNTHSSFKWRWYHFDGVDWDQSRNLTNRIYKFRSKAWDWEVDTEFGNYDYLMYTDYDMDHPEVVNELRNWGVWYTNTLGLDGFRIDAVKHIKYSFTRDWINHVRSATGKNMFAVAEFWKNDLGAIENYLQKTNWNHSVFDVPLHYNLYNASKSGGNYDMRNIFNGTVVQRHPSHAVTFVDNHDSQPEEALESFVEEWFKPLAYALTLTREQGYPSVFYGDYYGIPTHGVPAMRSKIDPILEARQKYAYGPQHDYLDHPDVIGWTREGDSSHPKSGLATLITDGPGGSKRMYAGLKNAGETWYDITGNRSDTVKIGSDGWGEFHVNDGSVSIYVQK

SEQ ID NO: 29188 - protein, 485 aa, Synthetic construct
HHNGTNGTMMQYFEWYLPNDGNHWNRLNSDASNLKSKGITAVWIPPAWKGASQNDVGYGAYDLYDLGEFNQKGTVRTKYGTRSQLQAAVTSLKNNGIQVYGDVVMNHKGGADATEMVRAVEVNPNNRNQEVTGEYTIEAWTRFDFPGRGNTHSSFKWRWYHFDGVDWDQSRRLNNRIYLFRGHGKSWDWPVDTENGNYDYLMYADIDMDHPEVVNELRNWGVWYTNTLGLDGFRIDAVKHIKYSFTRDWINHVRSATGKNMFAVAEFWKNDLGAIENYLQKTNWNHSVFDVPLHYNLYNASKSGGNYDMRNIFNGTVVQRHPSHAVTFVDNHDSQPEEALESFVEEWFKPLAYALTLTREQGYPSVFYGDYYGIPTHGVPAMRSKIDPILEARQKYAYGPQHDYLDHPDVIGWTREGDSSHPKSGLATLITDGPGGSKRMYAGLKNAGETWYDITGNRSDTVKIGSDGWGEFHVNDGSVSIYVQK

SEQ ID NO: 29189 - protein, 483 aa, Bacillus sp.
HHNGTNGTMMQYFEWYLPNDGNHWNRLNSDASNLKSKGITAVWIPPAWKATSQNDVGYGAYDLYDLGEFNQKGTVRTKYGTRSQLQAAVTSLKNNGIQVYGDVVMNHKGGADATEMVRAVEVNPNNRNQEVTGEYTIEAWTRFDFPGRGNTHSSFKWRWYHFDGVDWDQSRELNNRIYKFRGKAWDWEVDTEFGNYDYLMYTDYDMDHPEVVNELRNWGVWYTNTLGLDGFRIDAVKHIKYSFTRDWINHVRSATGKNMFAVAEFWKNDLGAIENYLQKTNWNHSVFDVPLHYNLYNASKSGGNYDMRNIFNGTVVQVHPSHAVTFVDNHDSQPEEALESFVEEWFKPLAYALTLTREQGYPSVFYGDYYGIPTHGVPAMRSKIDPILEARQKYAYGPQHDYLDHPDVIGWTREGDSSHPKSGLATLITDGPGGSKRMYAGLKNAGETWYDITGTRSDTVKIGSDGWGEFHVNYGSVSIYVQK

SEQ ID NO: 29190 - protein, 485 aa, Bacillus sp.
HHNGTNGTMMQYFEWYLPNDGNHWNRLNSDASNLKSKGITAVWIPPAWKGASQNDVGYGAYDLYDLGEFNQKGTVRTKYGTRSQLQAAVTSLKNNGIQVYGDVVMNHKGGADATEMVRAVEVNPNNRNQEVTGEYTIEAWTRFDFPGRGNTHSSFKWRWYHFDGVDWDQSRRLNNRIYKFRGHGKAWDWEVDTEFGNYDYLMYADYDMDHPETSNELRNWGVWYTNTLGLDGFRIDAVKHIKYSFTRDWINHVRSATGKNMFAVAEFWKNDLGAIENYLQKTNWNHSVFDVPLHYNLYNASKSGGNYDMRNIFNGTVVQRHPSHAVTFVDNHDSQPEEALESFVEEWFKPLAYALTLTREQGYPSVFYGDYYGIPTHGVPAMRSKIDPILEARQKYAYGPQHDYLDHPDVIGWTREGDSSHPKSGLATLITDGPGGSKRMYAGLKNAGETWYDITGNRSDTVKIGSDGWGEFHVNDGSVSIYVQK

SEQ ID NO: 29191 - protein, 483 aa, Bacillus sp.
HHNGTNGTMMQYFEWYLPNDGNHWNRLNSDASNLKSKGITAVWIPPAWKGASQNDVGYGAYDLYDLGEFNQKGTVRTKYGTRSQLQAAVTSLKNNGIQVYGDVVMNHKGGADATEMVRAVEVNPNNRNQEVTGEYTIEAWTRFDFPGRGNTHSSFKWRWYHFDGVDWDQSRRLNNRIYKFRGKAWDWEVDTEFGNYDYLMYADYDMDHPETTNELRNWGVWYTNTLGLDGFRIDAVKHIKYSFTRDWINHVRSATGKNMFAVAEFWKNDLGAIENYLQKTNWNHSVFDVPLHYNLYNASKSGGNYDMRNIFNGTVVQRHPSHAVTFVDNHDSQPEEALESFVEEWFKPLAYALTLTREQGYPSVFYGDYYGIPTHGVPAMRSKIDPILEARQKYAYGPQHDYLDHPDVIGWTREGDSSHPKSGLATLITDGPGGSKRMYAGLKNAGETWYDITGNRSDTVKIGSDGWGEFHVNDGSVSIYVQK

SEQ ID NO: 29192 - protein, 483 aa, Bacillus sp.
HHNGTNGTMMQYFEWYLPNDGNHWNRLNSDASNLKSKGITAVWIPPAWKGASQNDVGYGAYDLYDLGEFNQKGTVRTKYGTRSQLQAAVTSLKNNGIQVYGDVVMNHKGGADATEMVRAVEVNPNNRNQEVTGEYTIEAWTRFDFPGRGNTHSSFKWRWYHFDGVDWDQSRNVNNRIYKFRGKAWDWEVDTEFGNYDYLMYADYDMDHPEVVNELRNWGVWYTNTLGLDGFRIDAVKHIKYSFTRDWINHVRSATGKNMFAVAEFWKNDLGAIENYLQKTNWNHSVFDVPLHYNLYNASKSGGNYDMRNIFNGTVVQRHPSHAVTFVDNHDSQPEEALESFVETWFKPLAYALTLTREQGYPSVFYGDYYGIPTHGVPAMRSKIDPILEARQKYAYGPQHDYLDHPDVIGWTREGDSSHPKSGLATLITDGPGGSKRMYAGLKNAGETWYDITGNRSDTVKIGSDGWGEFHVNDASVSIYVQK

SEQ ID NO: 29193 - protein, 483 aa, Bacillus sp.
HHNGTNGTMMQYFEWYLPNDGNHWNRLNSDASNLKSKGITAVWIPPAWKGASQNDVGYGAYDLYDLGEFNQKGTVRTKYGTRSQLQAAVTSLKNNGIQVYGDVVMNHKGGADATEMVRAVEVNPNNRNQEVTGEYTIEAWTRFDFPGRGNTHSSFKWRWYHFDGVDWDQSRRLNNRIYKFRGKAWDWEVDTEFGNYDYLMYADYDMDHPEVVNELRNWGVWYTNTLGLDGFRIDAVKHIKYSFTRDWINHVRSATGKNMFAVAEFWKNDLGAIENYLQKTNWNHSVFDVPLHYNLYNASKSGGNYDMRNIFNGTVVQRHPSHAVTFVDNHDSQPEEALESFVDTWFKPLAYALTLTREQGYPSVFYGDYYGIPTHGVPAMRSKIDPILEARQKYAYGPQHDYLDHPDVIGWTREGDSSHPKSGLATLITDGPGGSKRMYAGLKNAGETWYDITGNRSDTVKIGSDGWGEFHVNQQSVSIYVQK

SEQ ID NO: 29194 - protein, 485 aa, Bacillus sp.
HHNGTNGTMMQYFEWYLPNDGNHWNRLNSDASNLKSKGITAVWIPPAWKGASQNDVGYGAYDLYDLGEFNQKGTVRTKYGTRSQLQAAVTSLKNNGIQVYGDVVMNHKGGADATEMVRAVEVNPNNRNQEVTGEYTIEAWTRFDFPGRGNTHSSFKWRWYHFDGVDWDQSREFDNRIYKFRGHGKAWDWEVDTEFGNYDYLMYADYDMDHPEVVNELRNWGVWYTNTLGLDGFRIDAVKHIKYSFTRDWINHVRSATGKNMFAVAEFWKNDLGAIENYLQKTNWNHSVFDVPLHYNLYNASKSGGNYDMRNIFNGTVVQRHPSHAVTFVDNHDSQPEEALESFVETWFKPLAYVLTLTREQGYPSVFYGDYYGIPTHGVPAMRSKIDPILEARQKYAYGPQHDYLDHPDVIGWTREGDSSHPKSGLATLITDGPGGSKRMYAGLKNAGETWYDITGNRSDTVKIGSDGWGEFHVNDASVSIYVQK

SEQ ID NO: 29195 - protein, 483 aa, Bacillus sp.
HHNGTNGTMMQYFEWYLPNDGNHWNRLNSDASNLKSKGITAVWIPPAWKGASQNDVGYGAYDLYDLGEFNQKGTVRTKYGTRSQLQAAVTSLKNNGIQVYGDVVMNHKGGADATEMVRAVEVNPNNRNQEVTGEYTIEAWTRFDFPGRQNTHSSFKWRWYHFDGVDWDQSERLNNRIYKFRGKAWDWEVDTEFGNYDYLMYADYDMDHPEVVNELRNWGVWYTNTLGLDGFRIDAVKHIKYSFTRDWINHVRSATGKNMFAVAEFWKNDLGAIENYLQKTNWNHSVFDVPLHYNLYNASKSGGNYDMRNIFNGTVVQRHPSHAVTFVDNHDSQPEEALESFVEEWFKPLAYALTLTREQGYPSVFYGDYYGIPTHGVPAMRSKIDPILEARQKYAYGPQHDYLDHPDVIGWTREGDSSHPKSGLATLITDGPGGSKRMYAGLKNAGETWYDITGNRSDTVKIGSDGWGEFHVNDGSVSIYVQK

SEQ ID NO: 29196 - protein, 483 aa, Bacillus sp.
HHNGTNGTMMQYFEWYLPNDGNHWNRLNSDASNLKSKGITAVWIPPAWKAASQNDVGYGAYDLYDLGEFNQKGTVRTKYGTRSQLQAAVTSLKNNGIQVYGDVVMNHKGGADATEMVRAVEVNPNNRNQEVTGEYTIEAWTRFDFPGRGNTHSSFKWRWYHFDGVDWDQSRDLQNRIYKFRGKAWDWEVDTEFGNYDYLMYADYDMDHPEVVNELRNWGVWYTNTLGLDGFRIDAVKHIKYSFTRDWINHVRSATGKNMFAVAEFWKNDLGAIENYLQKTNWNHSVFDVPLHYNLYNASQSGGNYDMRNIFNGTVVQRHPSHAVTFVDNHDSQPEEALESFVEPWFKPLAYALTLTREQGYPSVFYGDYYGIPTHGVPAMRSKIDPILEARQKYAYGPQHDYLDHPDVIGWTREGDSSHPKSGLATLITDGPGGSKRMYAGLKNAGETWYDITGNRSDTVKIGSDGWGEFHVNKSSVSIYVQK

SEQ ID NO: 29197 - protein, 485 aa, Synthetic construct
HHNGTNGTMMQYFEWYLPNDGNHWNRLNSDASNLKSKGITAVWIPPAWKGASQNDVGYGAYDLYDLGEFNQKGTVRTKYGTRSQLQAAVTSLKNNGIQVYGDVVMNHKGGADATEMVRAVEVNPNNRNQEVTGEYTIEAWTRFDFPGRGNTHSSFKWRWYHFDGVDWDQSRRLNNRIYKFRGHGKAWDWEVDTENGNYDYLMYADYDYDHPEAVNEMRNWGVWYTNTLGLDGFRIDAVKHIKYSFTRDWINHVRSATGKNMFAVAEFWKNDLGAIENYLQKTNWNHSVFDVPLHYNLYNASKSGGNYDMRNIFNGTVVQRHPSHAVTFVDNHDSQPEEALESFVEEWFKPLAYALTLTREQGYPSVFYGDYYGIPTHGVPAMRSKIDPILEARQKYAYGPQHDYLDHPDVIGWTREGDSSHPKSGLATLITDGPGGSKRMYAGLKNAGETWYDITGNRSDTVKIGSDGWGEFHVNDGSVSIYVQK

SEQ ID NO: 29198 - protein, 483 aa, Bacillus sp.
HHNGTNGTMMQYFEWYLPNDGNHWNRLNSDASNLKSKGITAVWIPPAWKGASQNDVGYGAYDLYDLGEFNQKGTVRTKYGTRSQLQAAVTSLKNNGIQVYGDVVMNHKGGADATEMVRAVEVNPNNRNQEVTGEYTIEAWTRFDFPGRGNTHSSFKWRWYHFDGVDWDQSRRLNNRIYKFRGKAWDWEVDTEFGNYDYLMYADYDMDHPEVVNELRNWGVWYTNTLGLDGFRIDAVKHIKYSFTRDWINHVRSATGKNMFAVAEFWKNDLGAIENYLQKTNWNHSVFDVPLHYNLYNASQSQGNYDMRNIFNGTVVQRHPSHAVTFVDNHDSQPEEALESFVEEWFKPLAYALTLTREQGYPSVFYGDYYGIPTHGVPAMRSKIDPILEARQKYAYGPQHDYLDHPDVIGWTREGDSSHPKSGLATLITDGPGGSKRMYAGLKNAGETWYDITGNRSDTVKIGSDGWGEFHVNKKSVSIYVQK

SEQ ID NO: 29199 - protein, 483 aa, Bacillus sp.
HHNGTNGTMMQYFEWYLPNDGNHWNRLNSDASNLKSKGITAVWIPPAWKAASQNDVGYGAYDLYDLGEFNQKGTVRTKYGTRSQLQAAVTSLKNNGIQVYGDVVMNHKGGADATEMVRAVEVNPNNRNQEVTGEYTIEAWTRFDFPGRGNTHSSFKWRWYHFDGVDWDQSRRLDNRIYKFRGKAWDWEVDTEFGNYDYLMYTDYDMDHPEVVNELRNWGVWYTNTLGLDGFRIDAVKHIKYSFTRDWINHVRSATGKNMFAVAEFWKNDLGAIENYLQKTNWNHSVFDVPLHYNLYNASKSGGNYDMRNIFNGTVVQRHPSHAVTFVDNHDSQPEEALESFVEEWFKPLAYALTLTREQGYPSVFYGDYYGIPTHGVPAMRSKIDPILEARQKYAYGPQHDYLDHPDVIGWTREGDSSHPKSGLATLITDGPGGSKRMYAGLKNAGETWYDITGNRSDTVKIGSDGWGEFHVNDGSVSIYVQK

SEQ ID NO: 29200 - protein, 483 aa, Bacillus sp.
HHNGTNGTMMQYFEWYLPNDGNHWNRLNSDASNLKSKGITAVWIPPAWKGASQNDVGYGAYDLYDLGEFNQKGTVRTKYGTRSQLQAAVTSLKNNGIQVYGDVVMNHKGGADATEMVRAVEVNPNNRNQEVTGEYTIEAWTRFDFPGRGNTHSSFKWRWYHFDGVDWDQSRRLNNRIYKFRGKAWDWEVDTEFGNYDYLMYADYDMDHPEVVNELRNWGVWYTNTLGLDGFRIDAVKHIKYSFTRDWINHVRSATGKNMFAVAEFWKNDLGAIENYLQKTNWNHSVFDVPLHYNLYNASKSGGNYDMRNIFNGTVVQRHPSHAVTFVDNHDSQPEEALESFVEPWFKPLAYALTLTREQGYPSVFYGDYYGIPTHGVPAMRSKIDPILEARQKYAYGPQHDYLDHPDVIGWTREGDSSHPKSGLATLITDGPGGSKRMYAGLKNAGETWYDITGNRSDTVKIGSDGWGEFHVNQSSVSIYVQK

SEQ ID NO: 29201 - protein, 483 aa, Bacillus sp.
HHNGTNGTMMQYFEWYLPNDGNHWNRLNSDASNLKSKGITAVWIPPAWKGASQNDVGYGAYDLYDLGEFNQKGTVRTKYGTRSQLQAAVTSLKNNGIQVYGDVVMNHKGGADATEMVRAVEVNPNNRNQEVTGEYTIEAWTRFDFPGRGNTHSSFKWRWYHFDGVDWDQSRRLNNRIYKFRGKAWDWEVDTEFGNYDYLMYADYDMDHPEVVNELRNWGVWYTNTLGLDGFRIDAVKHIKYSFTRDWINHVRSATGKNMFAVAEFWKNDLGAIENYLQKTNWNHSVFDVPLHYNLYNASKSGSNYDMRNIFNGTVVQRHPSHAVTFVDNHDSQPEEALESFVEPWFKPLAYALTLTREQGYPSVFYGDYYGIPTHGVPAMRSKIDPILEARQKYAYGPQHDYLDHPDVIGWTREGDSSHPKSGLATLITDGPGGSKRMYAGLKNAGETWYDITGNRSDTVKIGSDGWGEFHVNDGSVSIYVQK

SEQ ID NO: 29202 - protein, 483 aa, Bacillus sp.
HHNGTNGTMMQYFEWYLPNDGNHWNRLNSDASNLKSKGITAVWIPPAWKGASQNDVGYGAYDLYDLGEFNQKGTVRTKYGTRSQLQAAVTSLKNNGIQVYGDVVMNHKGGADATEMVRAVEVNPNNRNQEVTGEYTIEAWTRFDFPGRGNTHSSFKWRWYHFDGVDWDQSRRLNNRIYKFRGKAWDWEVDTEFGNYDYLMYADYDMDHPEVVNELRNWGVWYTNTLGLDGFRIDAVKHIKYSFTRDWINHVRSATGKNMFAVAEFWKNDLGAIENYLQKTNWNHSVFDVPLHYNLYNASQSGGNYDMRNIFNGTVVQRHPSHAVTFVDNHDSQPEEALESFVDPWFKPLAYALTLTREQGYPSVFYGDYYGIPTHGVPAMRSKIDPILEARQKYAYGPQHDYLDHPDVIGWTREGDSSHPKSGLATLITDGPGGSKRMYAGLKNAGETWYDITGNRSDTVKIGSDGWGEFHVNKQSVSIYVQK

SEQ ID NO: 29203 - protein, 483 aa, Bacillus sp.
HHNGTNGTMMQYFEWYLPNDGNHWNRLNSDASNLKSKGITAVWIPPAWKGASQNDVGYGAYDLYDLGEFNQKGTVRTKYGTRSQLQAAVTSLKNNGIQVYGDVVMNHKGGADATEMVRAVEVNPNNRNQEVTGEYTIEAWTRFDFPGRGNTHSSFKWRWYHFDGVDWDQSRRLNNRIYKFRGKAWDWEVDTEFGNYDYLMYADYDMDHPEVVNELRNWGVWYTNTLGLDGFRIDAVKHIKYSFTRDWINHVRSATGKNMFAVAEFWKNDLGAIENYLQKTNWNHSVFDVPLHYNLYNASKSGRNYDMRNIFNGTVVQRHPSHAVTFVDNHDSQPEEALESFVEPWFKPLAYALTLTREQGYPSVFYGDYYGIPTHGVPAMRSKIDPILEARQKYAYGPQHDYLDHPDVIGWTREGDSSHPKSGLATLITDGPGGSKRMYAGLKNAGKTWYDITGNRSDTVKIGSDGWGEFHVNDGSVSIYVQK

SEQ ID NO: 29204 - protein, 483 aa, Bacillus sp.
HHNGTNGTMMQYFEWYLPNDGNHWNRLNSDASNLKSKGITAVWIPPAWKGASQNDVGYGAYDLYDLGEFNQKGTVRTKYGTRSQLQAAVTSLKNNGIQVYGDVVMNHKGGADATEMVRAVEVNPNNRNQEVTGEYTIEAWTRFDFPGRGNTHSSFKWRWYHFDGVDWDQSRRLNNRIYKFRGKAWDWEVDTEFGNYDYLMYADYDMDHPEVVNELRNWGVWYTNTLGLDGFRIDAVKHIKYSFTRDWINHVRSATGKNMFAVAEFWKNDLGAIENYLQKTNWNHSVFDVPLHYNLYNASKSGGNYDMRNIFNGTVVQRHPSHAVTFVDNHDSQPEEALESFVEPWFKPLAYALTLTREQGYPSVFYGDYYGIPTHGVPAMRSKIDPILEARQKYAYGPQHDYLDHPDVIGWTREGDSSHPKSGLATLITDGPGGSKRMYAGLKNAGETWYDITGNRSDTVKIGSDGWGEFHVNGQSVFIYVQK

SEQ ID NO: 29205 - protein, 483 aa, Bacillus sp.
HHNGTNGTMMQYFEWYLPNDGNHWNRLNSDASNLKSKGITAVWIPPAWKGASQNDVGYGAYDLYDLGEFNQKGTVRTKYGTRSQLQAAVTSLKNNGIQVYGDVVMNHKGGADATEMVRAVEVNPNNRNQEVTGEYTIEAWTRFDFPGRGNTHSSFKWRWYHFDGVDWDQSRRLNNRIYKFRGKAWDWEVDTEFGNYDYLMYADYDMDHPEVVNELRNWGVWYTNTLGLDGFRIDAVKHIKYSFTRDWINHVRIATGKNMFAVAEFWKNDLGAIENYLQKTNWNHSVFDVPLHYNLYNASKSGGNYDMRNIFNGTVVQANPNHAVTFVDNHDSQPEEALESFVDEWFKPLAYALTLTREQGYPSVFYGDYYGIPTHGVPAMRSKIDPILEARQKYAYGPQHDYLDHPDVIGWTREGDSSHPKSGLATLITDGPGGSKRMYAGLKNAGETWYDITGNRSDTVKIGSDGWGEFHVNDQSVSIYVQK

SEQ ID NO: 29206 - protein, 485 aa, Bacillus sp.
HHNGTNGTMMQYFEWYLPNDGNHWNRLNSDASNLKSKGITAVWIPPAWKGASQNDVGYGAYDLYDLGEFNQKGTVRTKYGTRSQLQAAVTSLKNNGIQVYGDVVMNHKGGADATEMVRAVEVNPNNRNQEVTGEYTIEAWTRFDFPGRGNTHSSFKWRWYHFDGVDWDQSRDLTNRIYKFRGHGKAWDWEVDTEFGNYDYLMYADYDMDHPEVVNELRNWGVWYTNTLGLDGFRIDAVKHIKYSFTRDWINHVRSATGKNMFAVAEFWKNDLGAIENYLQKTNWNHSVFDVPLHYNLYNASQSGGNYDMRNIFNGTVVQRHPSHAVTFVDNHDSQPEEALESFVEPWFKPLAYALTLTREQGYPSVFYGDYYGIPTHGVPAMRSKIDPILEARQKYAYGPQHDYLDHPDVIGWTREGDSSHPKSGLATLITDGPGGSKRMYAGLKNAGETWYDITGNRSDTVKIGSDGWGEFHVNKSSVSIYVQK

SEQ ID NO: 29207 - protein, 483 aa, Bacillus sp.
HHNGTNGTMMQYFEWYLPNDGNHWNRLNSDASNLKSKGITAVWIPPAWKGASQNDVGYGAYDLYDLGEFNQKGTVRTKYGTRSQLQAAVTSLKNNGIQVYGDVVMNHKGGADATEMVRAVEVNPNNRNQEVTGEYTIEAWTRFDFPGRGNTHSSFKWRWYHFDGVDWDQSRRLNNRIYKFRGKAWDWEVDTEFGNYDYLMYADYDMDHPEVVNELRNWGVWYTNTLGLDGFRIDAVKHIKYSFTRDWINHVRSATGKNMFAVAEFWKNDLGAIENYLQKTNWNHSVFDVPLHYNLYNASQSGGNYDMRNIFNGTVVQRHPSHAVTFVDNHDSQPEEALESFVEPWFKPLAYALTLTREQGYPSVFYGDYYGIPTHGVPAMRSKIDPILEARQKYAYGPQHDYLDHPDVIGWTREGDSSHPKSGLATLITDGPGGSKRMYAGLKNAGETWYDITGNRSDTVKIGSDGWGEFHVNKSSVSIYVQK

SEQ ID NO: 29208 - protein, 483 aa, Bacillus sp.
HHNGTNGTMMQYFEWYLPNDGNHWNRLNSDASNLKSKGITAVWIPPAWKATSQNDVGYGAYDLYDLGEFNQKGTVRTKYGTRSQLQSAVTSLKNNGIQVYGDVVMNHKGGADATEMVRAVEVNPNNRNQEVTGEYTIEAWTRFDFPGRGNTHSSFKWRWYHFDGVDWDMSRNTDNRIYKFRGKAWDWEVDTEFGNYDYLMYADYDMDHPEVVNELRNWGVWYTNTLGLDGFRIDAVKHIKYSFTRDWINHVRSATGKNMFAVAEFWKNDLGAIENYLQKTNWNHSVFDVPLHYNLYNASKSQGNYDMRNIFNGTVVQRHPSHAVTFVDNHDSQPEEALESFVDTWFKPLAYALTLTREQGYPSVFYGDYYGIPTHGVPAMRSKIDPILEARQKYAYGPQHDYLDHPDVIGWTREGDSSHPKSGLATLITDGPGGSKRMYAGLKNAGETWYDITGNRSDTVKIGSDGWGEFHVNGSSVSIYVQK

SEQ ID NO: 29209 - protein, 483 aa, Bacillus sp.
HHNGTNGTMMQYFEWYLPNDGNHWNRLNSDASNLKSKGITAVWIPPAWKGASQNDVGYGAYDLYDLGEFNQKGTVRTKYGTRSQLQAAVTSLKNNGIQVYGDVVMNHKGGADATEMVRAVEVNPNNRNQEVTGEYTIEAWTRFDFPGRGNTHSSFKWRWYHFDGVDWDQSRRLNNRIYKFRGKAWDWEVDTEFGNYDYLMYADYDMDHPEVVNELRNWGVWYTNTLGLDGFRIDAVKHIKYSFTRDWINHVRSATGKNMFAVAEFWKNDLGAIENYLQKTNWNHSVFDVPLHYNLYNASKSGGNYDMRNIFNGTVVQRHPSHAVTFVDNHDSQPEEALESFVETWFKPLAYALTLTREQGYPSVFYGDYYGIPTHGVPAMRSKIDPILEARQKYAYGPQHDYLDHPDVIGWTREGDSSHPKSGLATLITDGPGGSKRMYAGLKNAGETWYDITGNRSDTVKIGSDGWGEFHVNQSSVSIYVQK

SEQ ID NO: 29210 - protein, 483 aa, Bacillus sp.
HHNGTNGTMMQYFEWYLPNDGNHWNRLNSDASNLKSKGITAVWIPPAWKGASQNDVGYGAYDLYDLGEFNQKGTVRTKYGTRSQLQAAVTSLKNNGIQVYGDVVMNHKGGADATEMVRAVEVNPNNRNQEVTGEYTIEAWTRFDFPGRGNTHSSFKWRWYHFDGVDWDQSRRLNNRIYKFRGKAWDWEVDTEFGNYDYLMYADYDMDHPEVVNELRNWGVWYTNTLGLDGFRIDAVKHIKYSFTRDWINHVRSATGKNMFAVAEFWKNDLGAIENYLQKTNWNHSVFDVPLHYNLYNASKSGGNYDMRNIFNGTVVQRHPSHAVTFVDNHDSQPEEALESFVETWFKPLAYALTLTREQGYPSVFYGDYYGIPTHGVPAMRSKIDPILEARQKYAYGPQHDYLDHPDVIGWTREGDSSHPKSGLATLITDGPGGSKRMYAGLKNAGETWYDITGNRSDTVKIGSDGWGEFHVNKSSVSIYVQK

SEQ ID NO: 29211 - protein, 483 aa, Bacillus sp.
HHNGTNGTMMQYFEWYLPNDGNHWNRLNSDASNLKSKGIKAVWIPPAWKGASQNDVGYGAYDLYDLGEFNQKGTVRTKYGTRSQLQAAVTSLKNNGIQVYGDVVMNHKGGADATEMVRAVEVNPNNRNQEVTGEYTIEAWTRFDFPGRGNTHSSFKWRWYHFDGVDWDQSRRLNNRIYSFRGKAWDWEVDTEFGNYDYLMYADYDMDHPEVVNELRNWGVWYTNTLGLDGFRIDAVKHIKYSFTRDWINHVRSATGKNMFAVAEFWKNDLGAIENYLQKTNWNHSVFDVPLHYNLYNASKSGGNYDMRNIFNGTVVQRHPSHAVTFVDNHDSQPEEALESFVEEWFKPLAYALTLTREQGYPSVFYGDYYGIPTHGVPAMRSKIDPILEARQKYAYGPQHDYLDHPDVIGWTREGDSSHPKSGLATLITDGPGGSKRMYAGLKNAGETWYDITGNRSDTVKIGSDGWGEFHVNDGSVSIYVQK

SEQ ID NO: 29212 - protein, 483 aa, Bacillus sp.
HHNGTNGTMMQYFEWYLPNDGNHWNRLNSDASNLKSKGITAVWIPPAWKGASQNDVGYGAYDLYDLGEFNQKGTVRTKYGTRSQLQAAVTSLKNNGIQVYGDVVMNHKGGADATEMVPAVEVNPNNRNQEVTGEYTIEAWTRFDFPGRGNTHSSFKWRWYHFDGVDWDQSRRLNNRIYKFRGKAWDWEVDTEFGNYDYLMYADYDMDHPEVVNELRNWGVWYTNTLGLDGFRIDAVKHIKYSFTRDWINHVRSATGKNMFAVAEFWKNDLGAIENYLQKTNWNHSVFDVPLHYNLYNASKSGGNYDMRNIFNGTVVQRHPSHAVTFVDNHDSQPEEALESFVETWFKPLAYALTLTREQGYPSVFYGDYYGIPTHGVPAMRSKIDPILEARQKYAYGPQHDYLDHPDVIGWTREGDSSHPKSGLATLITDGPGGSKRMYAGLKNAGETWYDITGNRSDTVKIGSDGWGEFHVNDASVSIYVQK

SEQ ID NO: 29213 - protein, 485 aa, Synthetic construct
HHNGTNGTMMQYFEWYLPNDGNHWNRLNSDASNLKSKGITAVWIPPAWKGASQNDVGYGAYDLYDLGEFNQKGTVRTKYGTRSQLQAAVTSLKNNGIQVYGDVVMNHKGGADATEMVRAVEVNPNNRNQEVTGEYTIEAWTRFDFPGRGNTHSSFKWRWYHFDGVDWDQSRRLNNRIYKFRGHGKAWDWEVDTEFGNYDYLMYADYDMDHPEGTNELRNWGVWYTNTLGLDGFRIDAVKHIKYSFTRDWINHVRSATGKNMFAVAEFWKNDLGAIENYLQKTNWNHSVFDVPLHYNLYNASKSGGNYDMRNIFNGTVVQRHPSHAVTFVDNHDSQPEEALESFVEEWFKPLAYALTLTREQGYPSVFYGDYYGIPTHGVPAMRSKIDPILEARQKYAYGPQHDYLDHPDVIGWTREGDSSHPKSGLATLITDGPGGSKRMYAGLKNAGETWYDITGNRSDTVKIGSDGWGEFHVNDGSVSIYVQK

SEQ ID NO: 29214 - protein, 483 aa, Bacillus sp.
HHNGTNGTMMQYFEWYLPNDGNHWNRLNSDASNLKSKGITAVWIPPAWKGASQNDVGYGAYDLYDLGEFNQKGTVRTKYGTRSQLQAAVTSLKNNGIQVYGDVVMNHKGGADATEMVSAVEVNPNNRLQEVTGEYTIEAWTRFDFPGRGNTHSSFKWRWYHFDGVDWDQSRRLNNRIYKFRSKAWDWEVDTEFGNYDYLMYADYDMDHPEVVNELRNWGVWYTNTLGLDGFRIDAVKHIKYSFTRDWINHVRSATGKNMFAVAEFWKNDLGAIENYLQKTNWNHSVFDVPLHYNLYNASKSGGNYDMRNIFNGTVVQRHPSHAVTFVDNHDSQPEEALESFVEEWFKPLAYALTLTREQGYPSVFYGDYYGIPTHGVPAMRSKIDPILEARQKYAYGPQHDYLDHPDVIGWTREGDSSHPKSGLATLITDGPGGSKRMYAGLKNAGETWYDITGNRSDTVKIGSDGWGEFHVNDGSVSIYVQK

SEQ ID NO: 29215 - protein, 483 aa, Bacillus sp.
HHNGTNGTMMQYFEWYLPNDGNHWNRLNSDASNLKSKGITAVWIPPAWKGASQNDVGYGAYDLYDLGEFNQKGTVRTKYGTRSQLQAAVTSLKNNGIQVYGDVVMNHKGGADATEMVRAVEVNPNNRNQEVTGEYTIEAWTRFDFPGRGNTHSSFKWRWYHFDGVDWDQSRRLNNRIYKFRGKAWDWEVDTEFGNYDYLMYADYDMDHPEVVNELRNWGVWYTNTLGLDGFRIDAVKHIKYSFTRDWINHVRSATGKNMFAVAEFWQNDLGMIENYLQKTNWNHSVFDVPLHYNLYNASKSGGNYDMRNIFNGTVVQRHPSHAVTFVDNHDSQPEEALESFVEEWFKPLAYALTLTREQGYPSVFYGDYYGIPTHGVPAMRSKIDPILEARQKYAYGPQHDYLDHPDVIGWTREGDSSHPKSGLATLITDGPGGSKRMYAGLKNAGETWYDITGNRSDTVKIGSDGWGEFHVNDGSVSIYVQK

SEQ ID NO: 29216 - protein, 483 aa, Bacillus sp.
HHNGTNGTMMQYFEWYLPNDGNHWNRLNSDASNLKSKGITAVWIPPAWKGASQNDVGYGAYDLYDLGEFNQKGTVRTKYGTRSQLQAAVTSLKNNGIQVYGDVVMNHKGGADATEMVRAVEVNPNNRNQEVTGEYTIEAWTRFDFPGRGNTHSSFKWRWYHFDGVDWDQSRRLNNRIYKFRGKAWDWEVDTEFGNYDYLMYADYDMDHPEVVNELRNWGVWYTNTLGLDGFRIDAVKHIKYSFTRDWINHVRSATGKNMFAVAEFWKNDLGAIENYLQKTNWNHSVFDVPLHYNLYNASKSAGNYDMRNIFNGTVVQRHPSHAVTFVDNHDSQPEEALESFVEPWFKPLAYALTLTREQGYPSVFYGDYYGIPTHGVPAMRSKIDPILEARQKYAYGPQHDYLDHPDVIGWTREGDSSHPKSGLATLITDGPGGSKRMYAGLKNAGETWYDITGNRSDTVKIGSDGWGEFHVNGSSVSIYVQK

SEQ ID NO: 29217 - protein, 483 aa, Bacillus sp.
HHNGTNGTMMQYFEWYLPNDGNHWNRLNSDASNLKSKGITAVWIPPAWKAASQNDVGYGAYDLYDLGEFNQKGTVRTKYGTRSQLQAAVTSLKNNGIQVYGDVVMNHKGGADATEMVRAVEVNPNNRNQEVTGEYTIEAWTRFDFPGRGNTHSSFKWRWYHFDGVDWDQSRRLNNRIYKFRGKAWDWEVDTEFGNYDYLMYTDYDMDHPEVVNELRNWGVWYTNTLGLDGFRIDAVKHIKYSFTRDWINHVRSATGKNMFAVAEFWKNDLGAIENYLQKTNWNHSVFDVPLHYNLYNASKSGGNYDMRNIFNGTVVQRHPSHAVTFVDNHDSQPEEALESFVEEWFKPLAYALTLTREQGYPSVFYGDYYGIPTHGVPAMRSKIDPILEARQKYAYGPQHDYLDHPDVIGWTREGDSSHPKSGLATLITDGPGGSKRMYAGLKNAGETWYDITGNRSDTVKIGSDGWGEFHVNDGSVSIYVQK

SEQ ID NO: 29218 - protein, 483 aa, Bacillus sp.
HHNGTNGTMMQYFEWYLPNDGNHWNRLNSDASNLKSKGITAVWIPPAWKGISQNDVGYGAYDLYDLGEFNQKGTVRTKYGTRSQLQAAVTSLKNNGIQVYGDVVMNHKGGADATEMVRAVEVNPNNRNQEVTGEYTIEAWTRFDFPGRGNTHSSFKWRWYHFDGVDWDQSRRTNNRIYKFRGKAWDWEVDTEFGNYDYLMYTDYDMDHPEVVNELRNWGVWYTNTLGLDGFRIDAVKHIKYSFTRDWINHVRSATGKNMFAVAEFWKNDLGAIENYLQKTNWNHSVFDVPLHYNIYNASKSGGNYDMRNIFNGTVVQRHPSHAVTFVDNHDSQPEEALESFVEEWFKPLAYALTLTREQGYPSVFYGDYYGIPTHGVPAMRSKIDPILEARQKYAYGPQHDYLDHPDVIGWTREGDSSHPKSGLATLITDGPGGSKRMYAGLKNAGETWYDITGNRSDTVKIGSDGWGEFHVNDGSVSIYVQK

SEQ ID NO: 29219 - protein, 483 aa, Bacillus sp.
HHNGTNGTMMQYFEWYLPNDGNHWNRLNSDASNLKSKGITAVWIPPAWKAASQNDVGYGAYDLYDLGEFNQKGTVRTKYGTRSQLQAAVTSLKNNGIQVYGDVVMNHKGGADATEMVRAVEVNPNNRNQEVTGEYTIEAWTRFDFPGRGNTHSSFKWRWYHFDGVDWDQSRRLTNRIYKFRGKAWDWEVDTEFGNYDYLMYADYDMDHPEVVNELRNWGVWYTNTLGLDGFRIDAVKHIKYSFTRDWINHVRSATGKNMFAVAEFWKNDLGAIENYLQKTNWNHSVFDVPLHYNLYNASKSGGNYDMRNIFNGTVVQRHPSHAVTFVDNHDSQPEEALESFVEEWFKPLAYALTLTREQGYPSVFYGDYYGIPTHGVPAMRSKIDPILEARQKYAYGPQHDYLDHPDVIGWTREGDSSHPKSGLATLITDGPGGSKRMYAGLKNAGETWYMITGNRSDTVKIGSDGWGEFHVNDGSVSIYVQK

SEQ ID NO: 29220 - protein, 483 aa, Bacillus sp.
HHNGTNGTMMQYFEWYLPNDGNHWNRLNSDASNLKSKGITAVWIPPAWKGASQNDVGYGAYDLYDLGEFNQKGTVRTKYGTRSQLQAAVTSLKNNGIQVYGDVVMNHKGGADATEMVRAVEVNPNNRNQEVTGEYTIEAWTRFDFPGRGNTHSSFKWRWYHFDGVDWDQSRRLNNRIYKFRGKAWDWEVDTENGFYDYLMYADIDMDHPEVVGTLRNWGVWYTNTLGLDGFRIDAVKHIKYSFTRDWINHVRSATGKNMFAVAEFWKNDLGAIENYLQKTNWNHSVFDVPLHYNLYNASKSGGNYDMRNIFNGTVVQRHPSHAVTFVDNHDSQPEEALESFVEEWFKPLAYALTLTREQGYPSVFYGDYYGIPTHGVPAMRSKIDPILEARQKYAYGPQHDYLDHPDVIGWTREGDSSHPKSGLATLITDGPGGSKRMYAGLKNAGETWYDITGNRSDTVKIGSDGWGEFHVNDGSVSIYVQK

SEQ ID NO: 29221 - protein, 483 aa, Synthetic construct
HHNGTNGTMMQYFEWYLPNDGNHWNRLNSDASNLKSKGITAVWIPPAWKGASQNDVGYGAYDLYDLGEFNQKGTVRTKYGTRSQLQAAVTSLKNNGIQVYGDVVMNHKGGADATEMVQAVEVNPNNRNQEVTGEYTIEAWTRFDFPGRGNTHSSFKWRWYHFDGVDWDQSRRLSNRIYKFRGKAWDWPVDTENGNYDYLMYADLDMDHPEVVNELRNWGVWYTNTLGLDGFRIDAVKHIKFSFTRDWINHVRSATGKNMFAVAEYWKNDLGAIENYLQFTNWNHSVFDVPLHYNLYNASKSGGNYDMRKLLNGTVVSKHPSKAVTFVDNHDTQPEEALESFVQPWFKPLAYAFILTRESGYPSVFYGDMYGIPTHGVPAMKHKIEPILKARKQYAYGAQHDYLDHHDIVGWTREGDSSHPNSGLATLITDGPGGAKRMYVGRQNAGETWHDITGNRSEPVVINSEGWGEFHVNKGSVSIYVQR

SEQ ID NO: 29222 - protein, 485 aa, Synthetic construct
HHNGTNGTMMQYFEWYLPNDGNHWNRLNSDASNLKSKGITAVWIPPAWKGASQNDVGYGAYDLYDLGEFNQKGTVRTKYGTRSQLQAAVTSLKNNGIQVYGDVVMNHKGGADATEMVRAVEVNPNNRNQEVTGEYTIEAWTRFDFPGRGNTHSSFKWRWYHFDGVDWDQSRRLNNRIYLFRGHGKRWDWPVDTENGNYDYLMYADIDMDHPEVVNELRNWGVWYTNTLGLDGFRIDAVKHIKYSFTRDWINHVRSATGKNMFAVAEFWKNDLGAIENYLQKTNWNHSVFDVPLHYNLYNASKSGGNYDMRNIFNGTVVQRHPSHAVTFVDNHDSQPEEALESFVEEWFKPLAYALTLTREQGYPSVFYGDYYGIPTHGVPAMRSKIDPILEARQKYAYGPQHDYLDHPDVIGWTREGDSSHPKSGLATLITDGPGGSKRMYAGLKNAGETWYDITGNRSDTVKIGSDGWGEFHVNDGSVSIYVQK

SEQ ID NO: 29223 - protein, 483 aa, Bacillus sp.
HHNGTNGTMMQYFEWYLPNDGNHWNRLNSDASNLKSKGITAVWIPPAWKGASQNDVGYGAYDLYDLGEFNQKGTVRTKYGTRSQLQAAVTSLKNNGIQVYGDVVMNHKGGADATEMVRAVEVNPNNRNQEVTGEYTIEAWTRFDFPGRGNTHSSFKWRWYHFDGVDWDQSRRLNNRIYKFRGKAWDWEVDTEFGNYDYLMYADYDMDHPEVVNELRNWGVWYTNTLGLDGFRIDAVKHIKYSFTRDWINHVRSATGKNMFAVAEFWQNDLGYIENYLQKTNWNHSVFDVPLHYNLYNASKSGGNYDMRNIFNGTVVQRHPSHAVTFVDNHDSQPEEALESFVEEWFKPLAYALTLTREQGYPSVFYGDYYGIPTHGVPAMRSKIDPILEARQKYAYGPQHDYLDHPDVIGWTREGDSSHPKSGLATLITDGPGGSKRMYAGLKNAGETWYDITGNRSDTVKIGSDGWGEFHVNDGSVSIYVQK

SEQ ID NO: 29224 - protein, 483 aa, Bacillus sp.
HHNGTNLTMMQYFEWYLPNDGNHWNRLNSDASNLKSKGITAVWIPPAWKGASQNDVGYGAYDLYDLGEFNQKGTVRTKYGTRSQLQAAVTSLKNNGIQVYGDVVMNHKGGADATEMVRAVEVNPNNRNQEVTGEYTIEAWTRFDFPGRGNTHSSFKWRWYHFDGVDWDQSRRLNNRIYKFRGKAWDWEVDTEFGNYDYLMYADYDMDHPEVVNELRNWGVWYTNTLGLDGFRIDAVKHIKYSFTRDWINHVRSATGKNMFAVAEFWKNDLGAIENYLQKTNWNHSVFDVPLHYNLYNASKSGGNYDMRNIFNGTVVQSHPNWAVTFVDNHDSQPEEALESFVEEWFKPLAYALTLTREQGYPSVFYGDYYGIPTHGVPAMRSKIDPILEARQKYAYGPQHDYLDHPDVIGWTREGDSSHPKSGLATLITDGPGGSKRMYAGLKNAGETWYDITGNRSDTVKIGSDGWGEFHVNDGSVSIYVQK

SEQ ID NO: 29225 - protein, 483 aa, Bacillus sp.
HHNGTNGTMMQYFEWYLPNDGNHWNRLNSDASNLKSKGITAVWIPPAWKGASQNDVGYGAYDLYDLGEFNQKGTVRTKYGTRSQLQAAVTSLKNNGIQVYGDVVMNHKGGADATEMVRAVEVNPNNRNQEVTGEYTIEAWTRFDFPGRGNTHSSFKWRWYHFDGVDFDQSRRLNNRIYKFRGKAWDWEVDTEFGNYDYLMYADYDMDHPEVVNELRNWGVWYTNTLGLDGFRIDAVKHIKYSFTRDWINHVRIATGKNMFAVAEFWKNDLGAIENYLQKTNWNHSVFDVPLHYNLYNASKSGGNYDMRNIFNGTVVQRHPSHAVTFVDNHDSQPEEALESFVDEWFKPLAYALTLTREQGYPSVFYGDYYGIPTHGVPAMRSKIDPILEARQKYAYGPQHDYLDHPDVIGWTREGDSSHPKSGLATLITDGPGGSKRMYAGLKNAGETWYDITGNRSDTVKIGSDGWGEFHVNDQSVSIYVQK

SEQ ID NO: 29226 - protein, 483 aa, Bacillus sp.
HHNGTNGTMMQYFEWYLPNDGNHWNRLNSDASNLKSKGITAVWIPPAWKGASQNDVGYGAYDLYDLGEFNQKGTVRTKYGTRSQLQAAVTSLKNNGIQVYGDVVMNHKGGADATEMVRAVEVNPNNRNQEVTGEYTIEAWTRFDFPGRGNTHSSFKWRWYHFDGVDWDQSRKLNNRIYKFRGKAWDWEVDTEFGNYDYLMYVDYDMDHPEVVNELRNWGVWYTNTLGLDGFRIDAVKHIKYSFTRDWINHVRIATGKNMFAVAEFWKNDLGAIENYLQKTNWNHSVFDVPLHYNLYNASKSGGNYDMRNIFNGTVVQRHPSHAVTFVDNHDSQPEEALESFVDEWFKPLAYALTLTREQGYPSVFYGDYYGIPTHGVPAMRSKIDPILEARQKYAYGPQHDYLDHPDVIGWTREGDSSHPPSGLATLITDGPGGSKRMYAGLKNAGETWYDITGNRSDTVKIGSDGWGEFHVNDQSVSIYVQK

SEQ ID NO: 29227 - protein, 483 aa, Bacillus sp.
HHNGTNGTMMQYFEWYLPNDGNHWNRLNSDASNLKSKGITAVWIPPAWKAVSQNDVGYGAYDLYDLGEFNQKGTVRTKYGTRSQLQAAVTSLKNNGIQVYGDVVMNHKGGADLTEMVDAVEVNPNNRNQEVTGEYTIEAWTRFDFPGRGNTHSSFKWRWYHFDGVDWDQSREFTNRIYKFRGKAWDWEVDTEFGNYDYLMYVDYDMDHPEVVNELRNWGVWYTNTLGLDGFRIDAVKHIKYSFTRDWINHVRSATGKNMFAVAEFWKNDLGAIENYLQKTNWNHSVFDVPLHYNLYNASKSGGNYDMRNIFNGTVVQRHPSHAVTFVDNHDSQPEEALESFVEEWFKPLAYALTLTREQGYPSVFYGDYYGIPTHGVPAMRSKIDPILEARQKYAYGPQHDYLDHPDVIGWTREGDSSHPKSGLATLITDGPGGSKRMYAGLKNAGETWYDITGNRSDTVKIGSDGWGEFHVNDGSVSIYVQK

SEQ ID NO: 29228 - protein, 483 aa, Bacillus sp.
HHNGTNGTMMQYFEWYLPNDGNHWNRLNSDASNLKSKGITAVWIPPAWKAVSQNDVGYGAYDLYDLGEFNQKGTVRTKYGTRSQLQAAVTSLKNNGIQVYGDVVMNHKGGADATEMVDAVEVNPNNRNQEVTGEYTIEAWTRFDFPGRGNTHSSFKWRWYHFDGVDFDQSREFTNRIYKFRGKAWDWEVDTEFGNYDYLMYTDYDMDHPEVVNELRNWGVWYTNTLGLDGFRIDAVKHIKYSFTRDWINHVRSATGKNMFAVAEFWKNDLGAIENYLQKTNWNHSVFDVPLHYNLYNASKSGGNYDMRNIFNGTVVQRHPSHAVTFVDNHDSQPEEALESFVEEWFKPLAYALTLTREQGYPSVFYGDYYGIPTHGVPAMRSKIDPILEARQKYAYGPQHDYLDHPDVIGWTREGDSSHPKSGLATLITDGPGGSKRMYAGLKNAGETWYDITGNRSDTVKIGSDGWGEFHVNDGSVSIYVQK

SEQ ID NO: 29229 - protein, 483 aa, Bacillus sp.
HHNGTNGTMMQYFEWYLPNDGNHWNRLNSDASNLKSKGITAVWIPPAWKGASQNDVGYGAYDLYDLGEFNQKGTVRTKYGTRSQLQAAVTSLKNNGIQVYGDVVMNHKGGADATEMVRAVEVNPNNRNQEVTGEYTIEAWTRFDFPGRGNTHSSFKWRWYHFDGVDWDQSRRLNNRIYKFRGKAWDWEVDTEFGNYDYLMYADYDMDSPEVTNELRNWGVWYTNTLGLDGFRIDAVKHIKYSFTRDWINHVRSATGKNMFAVAEFWKNDLGAIENYLQKTNWNHSVFDVPLHYNLYNASKSGGNYDMRNIFNGTVVQRHPSHAVTFVDNHDSQPEEALESFVEEWFKPLAYALTLTREQGYPSVFYGDYYGIPTHGVPAMRSKIDPILEARQKYAYGPQHDYLDHPDVIGWTREGDSSHPKSGLATLITDGPGGSKRMYAGLKNAGETWYDITGNRSDTVKIGSDGWGEFHVNDGSVSIYVQK

SEQ ID NO: 29230 - protein, 483 aa, Bacillus sp.
HHNGTNGTMMQYFEWYLPNDGNHWNRLNSDASNLKSKGITAVWIPPAWKGASQNDVGYGAYDLYDLGEFNQKGTVRTKYGTRSQLQAAVTSLKNNGIQVYGDVVMNHKGGADATEMVRAVEVNPNNRNQEVTGEYTIEAWTRFDFPGRGNTHSSFKWRWYHFDGVDWDQSRNVNNRIYKFRGKAWDWEVDTEFGNYDYLMYADYDMDHPEVVNELRNWGVWYTNTLGLDGFRIDAVKHIKYSFTRDWINHVRSATGKNMFAVAEFWKNDLGAIENYLQKTNWNHSVFDVPLHYNLYNASQSGGNYDMRNIFNGTVVQRHPSHAVTFVDNHDSQPEEALESFVEPWFKPLAYALTLTREQGYPSVFYGDYYGIPTHGVPAMRSKIDPILEARQKYAYGPQHDYLDHPDVIGWTREGDSSHPKSGLATLITDGPGGSKRMYAGLKNAGETWYDITGNRSDTVKIGSDGWGEFHVNKSSVSIYVQK

SEQ ID NO: 29231 - protein, 483 aa, Bacillus sp.
HHNGTNGTMMQYFEWYLPNDGNHWNRLNSDASNLKSKGITAVWIPPAWKGASQNDVGYGAYDLYDLGEFNQKGTVRTKYGTRSQLQAAVTSLKNNGIQVYGDVVMNHKGGADATEMVRAVEVNPNNRNQEVTGEYTIEAWTRFDFPGRGNTHSSFKWRWYHFDGVDWDQSRRLNNRIYKFRGKAWDWEVDTEFGNYDYLMYADYDMDHPEVVNELRNWGVWYTNTLGLDGFRIDAVKHIKYSFTRDWINHVRSATGKNMFAVAEFWKNDLGAIENYLQKTNWNHSVFDVPLHYNLYNASQSGGNYDMRNIFNGTVVQRHPSHAVTFVDNHDSQPEEALESFVDTWFKPLAYALTLTREQGYPSVFYGDYYGIPTHGVPAMRSKIDPILEARQKYAYGPQHDYLDHPDVIGWTREGDSSHPKSGLATLITDGPGGSKRMYAGLKNAGETWYDITGNRSDTVKIGSDGWGEFHVNKQSVSIYVQK

SEQ ID NO: 29232 - protein, 485 aa, Bacillus sp.
HHNGTNNTMMQYFEWYLPNDGNHWNRLNSDASNLKSKGITAVWIPPAWKGASQNDVGYGAYDLYDLGEFNQKGTVRTKYGTRSQLQAAVTSLKNNGISVYGDVVMNHKGGADATEMVRAVEVNPNNRNQEVTGEYTIEAWTRFDFPGRGNTHSSFKWRWYHFDGVDWDQSRRLNNRIYKFRGHGKAWDWEVDTEFGNYDYLMYADYDMDHPEVVNELRNWGVWYTNTLGLDGFRIDAVKHIKYSFTRDWINHVRSATGKNMFAVAEFWKNDLGAIENYLQKTNWNHSVFDVPLHYNLYNASKSGGNYDMRNIFNGTVVQMHPNHAVTFVDNHDSQPEEALESFVEEWFKPLAYALTLTREQGYPSVFYGDYYGIPTHGVPAMRSKIDPILEARQKYAYGPQHDYLDHPDVIGWTREGDSSHPKSGLATLITDGPGGSKRMYAGLKNAGETWYDITGNRSDTVKIGSDGWGEFHVNDGSVSIYVQK

SEQ ID NO: 29233 - protein, 485 aa, Bacillus sp.
HHNGTNGTMMQYFEWYLPNDGNHWNRLNSDASNLKSKGITAVWIPPAWKGASQNDVGYGAYDLYDLGEFNQKGTVRTKYGTRSQLQAAVTSLKNNGIQVYGDVVMNHKGGADATEMVRAVEVNPNNRNQEVTGEYTIEAWTRFDFPGRGNTHSSFKWRWYHFDGVDWDQSRRLNNRIYKFRGHGKAWDWEVDTEFGNYDYLMYADYDMDHPEVVNELRNWGVWYTNTLGLDGFRIDAVKHIKYSFTRDWINHVRSATGKNMFAVAEFWNNDLGCIENYLQKTNWNHSVFDVPLHYNLYNASKSGGNYDMRNIFNGTVVQRHPSHAVTFVDNHDSQPEEALESFVEEWFKPLAYALTLTREQGYPSVFYGDYYGIPTHGVPAMRSKIDPILEARQKYAYGPQHDYLDHPDVIGWTREGDSSHPKSGLATLITDGPGGSKRMYAGLKNAGETWYDITGNRSDTVKIGSDGWGEFHVNDGSVSIYVQK

SEQ ID NO: 29234 - protein, 483 aa, Bacillus sp.
HHNGTNGTMMQYFEWYLPNDGNHWNRLNSDASNLKSKGITAVWIPPAWKGASQNDVGYGAYDLYDLGEFNQKGTVRTKYGTRSQLQAAVTSLKNNGIQVYGDVVMNHKGGADATEMVRAVEVNPNNRNQEVTGEYTIEAWTRFDFPGRGNTHSSFKWRWYHFDGVDWDQSRRLNNRIYKFRGKAWDWEVDTEFGNYDYLMYADYDMDHPEVVNELRNWGVWYTNTLGLDGFRIDAVKHIKYSFTRDWINHVRSATGKNMFAVAEFWKNDLGAIENYLQKTNWNHSVFDVPLHYNLYNASKSGGNYDMRNIFNGTVVQRHPSHAVTFVDNHDSQPEEALESFVDPWFKPLAYALTLTREQGYPSVFYGDYYGIPTHGVPAMRSKIDPILEARQKYAYGPQHDYLDHPDVIGWTREGDSSHPKSGLATLITDGPGGSKRMYAGLKNAGETWYDITGNRSDTVKIGSDGWGEFHVNKTSVSIYVQK

SEQ ID NO: 29235 - protein, 483 aa, Bacillus sp.
HHNGTNGTMMQYFEWYLPNDGNHWNRLNSDASNLKSKGITAVWIPPAWKAASQNDVGYGAYDLYDLGEFNQKGTVRTKYGTRSQLQAAVTSLKNNGIQVYGDVVMNHKGGADATEMVRAVEVNPNNRNQEVTGEYTIEAYTRFDFPGRGNTHSSFKWRWYHFDGVDWDQSRDLDNRIYKFRGKAWDWEVDTEFGNYDYLMYADYDMDHPEVVNELRNWGVWYTNTLGLDGFRIDAVKHIKYSFTRDWINHVRSATGKNMFAVAEFWKNDLGAIENYLQKTNWNHSVFDVPLHYNLYNASKSGGNYDMRNIFNGTVVQRHPSHAVTFVDNHDSQPEEALESFVEEWFKPLAYALTLTREQGYPSVFYGDYYGIPTHGVPAMRSKIDPILEARQKYAYGPQHDYLDHPDVIGWTREGDSSHPKSGLATLITDGPGGSKRMYAGLKNAGETWYDITGNRSDTVKIGSDGWGEFHVNDGSVSIYVQK

SEQ ID NO: 29236 - protein, 485 aa, Bacillus sp.
HHNGTNGTMMQYFEWYLPNDGNHWNRLNSDASNLKSKGITAVWIPPAWKGASQNDVGYGAYDLYDLGEFNQKGTVRTKYGTRSQLQAAVTSLKNNGIQVYGDVVMNHKGGADATEMVRAVEVNPNNRNQEVTGEYTIEAWTRFDFPGRGNTHSSFKWRWYHFDGVDWDQSRRLNNRIYKFRGHGKAWDWEVDTEFGNYDYLMYADYDMDHPEVVNELRNWGVWYTNTLGLDGFRIDAVKHIKYSFTRDWINHVRSATGKNMFAVAEFWLNDLGSIENYLQKTNWNHSVFDVPLHYNLYNASKSGGNYDMRNIFNGTVVQRHPSHAVTFVDNHDSQPEEALESFVEEWFKPLAYALTLTREQGYPSVFYGDYYGIPTHGVPAMRSKIDPILEARQKYAYGPQHDYLDHPDVIGWTREGDSSHPKSGLATLITDGPGGSKRMYAGLKNAGETWYDITGNRSDTVKIGSDGWGEFHVNDGSVSIYVQK

SEQ ID NO: 29237 - protein, 483 aa, Bacillus sp.
HHNGTNGTMMQYFEWYLPNDGNHWNRLNSDASNLKSKGITAVWIPPAWKGASQNDVGYGAYDLYDLGEFNQKGTVRTKYGTRSQLQAAVTSLKNNGIQVYGDVVMNHKGGADATEMVRAVEVNPNNRNQEVTGEYTIEAWTRFDFPGRGNTHSSFKWRWYHFDGVDWDQSRRLNNRIYKFRGKAWDWEVDTEFGNYDYLMYADYDMDHPEVVNELRNWGVWYTNTLGLDGFRIDAVKHIKYSFTRDWINHVRSATGKNMFAVAEFWHNDLGWIENYLQKTNWNHSVFDVPLHYNLYNASKSGGNYDMRNIFNGTVVQRHPSHAVTFVDNHDSQPEEALESFVEEWFKPLAYALTLTREQGYPSVFYGDYYGIPTHGVPAMRSKIDPILEARQKYAYGPQHDYLDHPDVIGWTREGDSSHPKSGLATLITDGPGGSKRMYAGLKNAGETWYDITGNRSDTVKIGSDGWGEFHVNDGSVSIYVQK

SEQ ID NO: 29238 - protein, 483 aa, Bacillus sp.
HHNGTNGTMMQYFEWYLPNDGNHWNRLNSDASNLKSKGITAVWIPPAWKGASQNDVGYGAYDVYDLGEFNQKGTVRTKYGTRSQLQAAVTSLKNNGIQVYGDVVFNHKGGADATEMVRAVEVNPNNRNQEVTGEYTIEAWTRFDFPGRGNTHSSFKWRWYHFDGVDWDQSRRLNNRIYKFRGKAWDWEVDTENGNYDYLMYADIDYDHPEVVNELRNWGVWYTNTLGLDGFRIDAVKHIKYSFTRDWINHVRSATGKNMFAVAEFWKNDLGAIENYLQKTNWNHSVFDVPLHYNLYNASKSGGNYDMRNIFNGTVVQRHPSHAVTFVDNHDSQPEEALESFVEEWFKPLAYALTLTREQGYPSVFYGDYYGIPTHGVPAMRSKIDPILEARQKYAYGPQHDYLDHPDVIGWTREGDSSHPKSGLATLITDGPGGSKRMYAGLKNAGETWYDITGNRSDTVKIGSDGWGEFHVNDGSVSIYVQK

SEQ ID NO: 29239 - protein, 483 aa, Bacillus sp.
HHNGTNGTMMQYFEWYLPNDGNHWNRLNSDASNLKSKGITAVWIPPAWKGASQNDVGYGAYDLYDLGEFNQKGTVRTKYGTRSQLQAAVTSLKNNGIQVYGDVVMNHKGGADATEMVSAVEVNPNNRQQEVTGEYTIEAWTRFDFPGRGNTHSSFKWRWYHFDGVDWDQSRRLNNRIYLFRGKAWDWEVDTEFGNYDYLMYADYDMDHPEVVNELRNWGVWYTNTLGLDGFRIDAVKHIKYSFTRDWINHVRSATGKNMFAVAEFWKNDLGAIENYLQKTNWNHSVFDVPLHYNLYNASKSGGNYDMRNIFNGTVVQRHPSHAVTFVDNHDSQPEEALESFVEEWFKPLAYALTLTREQGYPSVFYGDYYGIPTHGVPAMRSKIDPILEARQKYAYGPQHDYLDHPDVIGWTREGDSSHPKSGLATLITDGPGGSKRMYAGLKNAGETWYDITGNRSDTVKIGSDGWGEFHVNDGSVSIYVQK

SEQ ID NO: 29240 - protein, 483 aa, Bacillus sp.
HHNGTNGTMMQYFEWYLPNDGNHWNRLNSDASNLKSKGITAVWIPPAWKATSQNDVGYGAYDLYDLGEFNQKGTVRTKYGTRSQFQAAVTSLKNNGIQVYGDVVMNHKGGADATEMVRAVEVNPNNRNQEVTGEYTIEAWTRFDFPGRGNTHSSFKWRWYHFDGVDWDQSRNVNNRIYKFRGKAWDWEVDTEFGNYDYLMYADYDMDHPEVVNELRNWGVWYTNTLGLDGFRIDAVKHIKYSFTRDWINHVRSATGKNMFAVAEFWKNDLGAIENYLQKTNWNHSVFDVPLHYNLYNASKSGGNYDMRNIFNGTVVKAHPNHAVTFVDNHDSQPEEALESFVEEWFKPLAYALTLTREQGYPSVFYGDYYGIPTHGVPAMRSKIDPILEARQKYAYGPQHDYLDHPDVIGWTREGDSSHPKSGLATLITDGPGGSKRMYAGLKNAGETWYDITGNRSDTVKIGSDGWGEFHVNDGSVSIYVQK

SEQ ID NO: 29241 - protein, 485 aa, Bacillus sp.
HHNGTNGTMMQYFEWYLPNDGNHWNRLNSDASNLKSKGITAVWIPPAWKATSQNDVGYGAYDLYDLGEFNQKGTVRTKYGTRSQLQAAVTSLKNNGIQVYGDVVMNHKGGADATEMVRAVEVNPNNRNQEVTGEYTIEAWTRFDFPGRGNTHSSFKWRWYHFDGVDWDQSRELSNRIYKFRGHGKAWDWEVDTEFGNYDYLMYADYDMDHPEVVNELRNWGVWYTNTLGLDGFRIDAVKHIKYSFTRDWINHVRSATGKNMFAVAEFWKNDLGAIENYLQKTNWNHSVFDVPLHYNLYNASKSQGNYDMRNIFNGTVVQRHPSHAVTFVDNHDSQPEEALESFVDTWFKPLAYALTLTREQGYPSVFYGDYYGIPTHGVPAMRSKIDPILEARQKYAYGPQHDYLDHPDVIGWTREGDSSHPKSGLATLITDGPGGSKRMYAGLKNAGETWYDITGNRSDTVKIGSDGWGEFHVNGSSVSIYVQK

SEQ ID NO: 29242 - protein, 483 aa, Bacillus sp.
HHNGTNGTMMQYFEWYLPNDGNHWNRLNSDASNLKSKGITAVWIPPAWKAVSQNDVGYGAYDLYDLGEFNQKGTVRTKYGTRSQLQAAVTSLKNNGIQVYGDVVMNHKGGADATEMVRAVEVNPNNRNQEVTGEYTIEAWTRFDFPGRGNTHSSFKWRWYHFDGVDFDQSREFTNRIYKFRGKAWDWEVDTEFGNYDYLMYVDYDMDHPEVVNELRNWGVWYTNTLGLDGFRIDAVKHIKYSFTRDWINHVRSATGKNMFAVAEFWKNDLGAIENYLQKTNWNHSVFDVPLHYNLYNASKSGGNYDMRNIFNGTVVQAHPNHAVTFVDNHDSQPEEALESFVEEWFKPLAYALTLTREQGYPSVFYGDYYGIPTHGVPAMRSKIDPILEARQKYAYGPQHDYLDHPDVIGWTREGDSSHPKSGLATLITDGPGGSKRMYAGLKNAGETWYDITGNRSDTVKIGSDGWGEFHVNDGSVSIYVQK

SEQ ID NO: 29243 - protein, 483 aa, Bacillus sp.
HHNGTNGTMMQYFEWYLPNDGNHWNRLNSDASNLKSKGITAVWIPPAWKAVSQNDVGYGAYDLYDLGEFNQKGTVRTKYGTRSQLQAAVTSLKNNGIQVYGDVVMNHKGGADATEMVRAVEVNPNNRNQEVTGEYTIEAYTRFDFPGRGNTHSSFKWRWYHFDGVDWDQSREFTNRIYKFRGKAWDWEVDTEFGNYDYLMYVDYDMDHPEVVNELRNWGVWYTNTLGLDGFRIDAVKHIKYSFTRDWINHVRSATGKNMFAVAEFWKNDLGAIENYLQKTNWNHSVFDVPLHYNLYNASKSGGNYDMRNIFNGTVVQRHPSHAVTFVDNHDSQPEEALESFVEEWFKPLAYALTLTREQGYPSVFYGDYYGIPTHGVPAMRSKIDPILEARQKYAYGPQHDYLDHPDVIGWTREGDSSHPKSGLATLITDGPGGSKRMYAGLKNAGETWYDITGNRSDTVKIGSDGWGEFHVNDGSVSIYVQK

SEQ ID NO: 29244 - protein, 483 aa, Bacillus sp.
HHNGTNGTMMQYFEWYLPNDGNHWNRLNSDASNLKSKGITAVWIPPAWKAVSQNDVGYGAYDLYDLGEFNQKGTVRTKYGTRSQLQAAVTSLKNNGIQVYGDVVMNHKGGADATEMVPAVEVNPNNRNQEVTGEYTIEAWTRFDFPGRGNTHSSFKWRWYHFDGVDWDQSRDLENRIYKFRSKAWDWEVDTEFGNYDYLMYADYDMDHPEVVNELRNWGVWYTNTLGLDGFRIDAVKHIKYSFTRDWINHVRSATGKNMFAVAEFWKNDLGAIENYLQKTNWNHSVFDVPLHYNLYNASKSGGNYDMRNIFNGTVVQRHPSHAVTFVDNHDSQPEEALESFVEEWFKPLAYALTLTREQGYPSVFYGDYYGIPTHGVPAMRSKIDPILEARQKYAYGPQHDYLDHPDVIGWTREGDSSHPKSGLATLITDGPGGSKRMYAGLKNAGETWYDITGNRSDTVKIGSDGWGEFHVNDGSVSIYVQK

SEQ ID NO: 29245 - protein, 483 aa, Bacillus sp.
HHNGTNGTMMQYFEWYLPNDGNHWNRLNSDASNLKSKGITAVWIPPAWKGASQNDVGYGAYDLYDLGEFNQKGTVRTKYGTRSQLQAAVTSLKNNGIQVYGDVVMNHKGGADATEMVRAVEVNPNNRNQEVTGEYTIEAWTRFDFPGRGNTHSSFKWRWYHFDGVDWDQSRRLNNRIYKFRGKAWDWEVDTEFGNYDYLMYADYDMDHPEVVNELRNWGVWYTNTLGLDGFRIDAVKHIKYSFTRDWINHVRSATGKNMFAVAEFWKNDLGAIENYLQKTNWNHSVFDVPLHYNLYNASKSGGNYDMRNIFNGTVVQRHPSHAVTFVDNHDSQPEEALESFVDTWFKPLAYALTLTREQGYPSVFYGDYYGIPTHGVPAMRSKIDPILEARQKYAYGPQHDYLDHPDVIGWTREGDSSHPKSGLATLITDGPGGSKRMYAGLKNAGETWYDITGNRSDTVKIGSDGWGEFHVNKKSVSIYVQK

SEQ ID NO: 29246 - protein, 485 aa, Bacillus sp.
HHNGTNETMMQYFEWYLPNDGNHWNRLNSDASNLKSKGITAVWIPPAWKGASQNDVGYGAYDLYDLGEFNQKGTVRTKYGTRSQLQAAVTSLKNNGIAVYGDVVMNHKGGADATEMVRAVEVNPNNRNQEVTGEYTIEAWTRFDFPGRGNTHSSFKWRWYHFDGVDWDQSRRLNNRIYKFRGHGKAWDWEVDTEFGNYDYLMYADYDMDHPEVVNELRNWGVWYTNTLGLDGFRIDAVKHIKYSFTRDWINHVRSATGKNMFAVAEFWKNDLGAIENYLQKTNWNHSVFDVPLHYNLYNASRSGGNYDMRNIFNGTVVQAHPNHAVTFVDNHDSQPEEALESFVEEWFKPLAYALTLTREQGYPSVFYGDYYGIPTHGVPAMRSKIDPILEARQKYAYGPQHDYLDHPDVIGWTREGDSSHPKSGLATLITDGPGGSKRMYAGLKNAGETWYDITGNRSDTVKIGSDGWGEFHVNDGSVSIYVQK

SEQ ID NO: 29247 - protein, 485 aa, Bacillus sp. (in: firmicutes)
HHNGTNGTMMQYFEWYLPNDGNHWNRLNSDASNLKSKGITAVWIPPAWKGASQNDVGYGAYDLYDLGEFNQKGTVRTKYGTRSQLQAAVTSLKNNGIQVYGDVVMNHKGGADATEMVRAVEVNPNNRNQEVTGEYTIEAWTRFDFPGRGNTHSSFKWRWYHFDGVDWDQSRRLNNRIYKFRGHGKAWDWEVDTENGNYDYLMYADIDMDHPEVVNELRNWGVWYTNTLGLDGFRIDAVKHIKYSFTRDWINHVRSATGKNMFAVAEFWKNDLGAIENYLQKTNWNHSVFDVPLHYNLYNASKSGGNYDMRNIFNGTVVQRHPSHAVTFVDNHDSQPEEALESFVEEWFKPLAYALTLTREQGYPSVFYGDYYGIPTHGVPAMRSKIDPILEARQKYAYGPQHDYIDHPDVIGWTREGDSSAAKSGLAALITDGPGGSKRMYAGLKNAGETWYDITGNRSDTVKIGSDGWGEFHVNDGSVSIYVQK

SEQ ID NO: 29248 - protein, 485 aa, Bacillus sp.
HHNGTNGTMMQYFEWYLPNDGNHWNRLNSDASNLKSKGITAVWIPPAWKGASQNDVGYGAYDLYDLGEFNQKGTVRTKYGTRSQLQAAVTSLKNNGIQVYGDVVMNHKGGADATEMVRAVEVNPNNRNQEVTGEYTIEAWTRFDFPGRGNTHSSFKWRWYHFDGVDWDQSRRLNNRIYKFRGHGKAWDWEVDTEFGNYDYLMYADYDMDHPEVVNELRNWGVWYTNTLGLDGFRIDAVKHIKYSFTRDWINHVRSATGKNMFAVAEFWKNDLGAIENYLQKTNWNHSVFDVPLHYNLYNASQSQGNYDMRNIFNGTVVQRHPSHAVTFVDNHDSQPEEALESFVEEWFKPLAYALTLTREQGYPSVFYGDYYGIPTHGVPAMRSKIDPILEARQKYAYGPQHDYLDHPDVIGWTREGDSSHPKSGLATLITDGPGGSKRMYAGLKNAGETWYDITGNRSDTVKIGSDGWGEFHVNKKSVSIYVQK

SEQ ID NO: 29249 - protein, 485 aa, Bacillus sp.
HHNGTNGTMMQYFEWYLPNDGNHWNRLNSDASNLKSKGITAVWIPPAWKGASQNDVGYGAYDLYDLGEFNQKGTVRTKYGTRSQLQAAVTSLKNNGINVYGDVVMNHKGGADATEMVRAVEVNPNNRNQEVTGEYTIEAWTRFDFPGRGNTHSSFKWRWYHFDGVDWDQSRRLNNRIYKFRGHGKAWDWEVDTEFGNYDYLMYADYDMDHPEVVNELRNWGVWYTNTLGLDGFRIDAVKHIKYSFTRDWINHVRSATGKNMFAVAEFWKNDLGAIENYLQKTNWNHSVFDVPLHYNLYNASKSGGNYDMRNIFNGTVVQANPNHAVTFVDNHDSQPEEALESFVEEWFKPLAYALTLTREQGYPSVFYGDYYGIPTHGVPAMRSKIDPILEARQKYAYGPQHDYLDHPDVIGWTREGDSSHPKSGLATLITDGPGGSKRMYAGLKNAGETWYDITGNRSDTVKIGSDGWGEFHVNDGSVSIYVQK

SEQ ID NO: 29250 - protein, 485 aa, Bacillus sp.
HHNGTNGTMMQYFEWYLPNDGNHWNRLNSDASNLKSKGITAVWIPPAWKGASQNDVGYGAYDLYDLGEFNQKGTVRTKYGTRSQLQAAVTSLKNNGIQVYGDVVMNHKGGADATEMVRAVEVNPNNRFQEVTGEYTIEAWTRFDFPGRGNTHSSFKWRWYHFDGVDWDQSRRLNNRIYLFRGHGKAWDWEVDTEFGNYDYLMYADYDMDHPEVVNELRNWGVWYTNTLGLDGFRIDAVKHIKYSFTRDWINHVRSATGKNMFAVAEFWKNDLGAIENYLQKTNWNHSVFDVPLHYNLYNASKSGGNYDMRNIFNGTVVQRHPSHAVTFVDNHDSQPEEALESFVEEWFKPLAYALTLTREQGYPSVFYGDYYGIPTHGVPAMRSKIDPILEARQKYAYGPQHDYLDHPDVIGWTREGDSSHPKSGLATLITDGPGGSKRMYAGLKNAGETWYDITGNRSDTVKIGSDGWGEFHVNDGSVSIYVQK

SEQ ID NO: 29251 - protein, 483 aa, Bacillus sp.
HHNGTNGTMMQYFEWYLPNDGNHWNRLNSDASNLKSKGITAVWIPPAWKAASQNDVGYGAYDLYDLGEFNQKGTVRTKYGTRSQLQAAVTSLKNNGIQVYGDVVMNHKGGADATEMVRAVEVNPNNRNQEVTGEYTIEAWTRFDFPGRGNTHSSFKWRWYHFDGVDWDQSRNLTNRIYKFRGKAWDWEVDTEFGNYDYLMYADYDMDHPEVVNELRNWGVWYTNTLGLDGFRIDAVKHIKYSFTRDWINHVRIATGKNMFAVAEFWKNDLGAIENYLQKTNWNHSVFDVPLHYNLYNASKSGGNYDMRNIFNGTVVQRHPSHAVTFVDNHDSQPEEALESFVDEWFKPLAYALTLTREQGYPSVFYGDYYGIPTHGVPAMRSKIDPILEARQKYAYGPQHDYLDHPDVIGWTREGDSSHPKSGLATLITDGPGGSKRMYAGLKNAGETWYDITGNRSDTVKIGSDGWGEFHVNDQSVSIYVQK

SEQ ID NO: 29252 - protein, 485 aa, Bacillus sp.
HHNGTNGTMMQYFEWYLPNDGNHWNRLNSDASNLKSKGITAVWIPPAWKAVSQNDVGYGAYDLYDLGEFNQKGTVRTKYGTRSQLQAAVTSLKNNGIQVYGDVVMNHKGGADLTEMVRAVEVNPNNRNQEVTGEYTIEAWTRFDFPGRGNTHSSFKWRWYHFDGVDWDQSREFTNRIYKFRGHGKAWDWEVDTEFGNYDYLMYVDYDMDHPEVVNELRNWGVWYTNTLGLDGFRIDAVKHIKYSFTRDWINHVRSATGKNMFAVAEFWKNDLGAIENYLQKTNWNHSVFDVPLHYNLYNASKSGGNYDMRNIFNGTVVQVHPSHAVTFVDNHDSQPEEALESFVEEWFKPLAYALTLTREQGYPSVFYGDYYGIPTHGVPAMRSKIDPILEARQKYAYGPQHDYLDHPDVIGWTREGDSSHPKSGLATLITDGPGGSKRMYAGLKNAGETWYDITGNRSDTVKIGSDGWGEFHVNDGSVSIYVQK

SEQ ID NO: 29253 - protein, 485 aa, Bacillus sp.
HHNGTNGTMMQYFEWYLPNDGNHWNRLNSDASNLKSKGITAVWIPPAWKGASQNDVGYGAYDLYDLGEFNQKGTVRTKYGTRSQLQAAVTSLKNNGIQVYGDVVMNHKGGADATEMVRAVEVNPNNRNQEVTGEYTIEAWTRFDFPGRGNTHSSFKWRWYHFDGVDWDQSRRTNNRIYKFRGHGKAWDWEVDTEFGNYDYLMYTDYDMDHPEVVNELRNWGVWYTNTLGLDGFRIDAVKHIKYSFTRDWINHVRIATGKNMFAVAEFWKNDLGAIENYLQKTNWNHSVFDVPLHYNLYNASKSGGNYDMRNIFNGTVVQRHPSHAVTFVDNHDSQPEEALESFVDEWFKPLAYALTLTREQGYPSVFYGDYYGIPTHGVPAMRSKIDPILEARQKYAYGPQHDYLDHPDVIGWTREGDSSHPKSGLATLITDGPGGSKRMYAGLKNAGETWYDITGNRSDTVKIGSDGWGEFHVNDQSVSIYVQK

SEQ ID NO: 29254 - protein, 483 aa, Bacillus sp.
HHNGTNGTMMQYFEWYLPNDGNHWNRLNSDASNLKSKGITAVWIPPAWKAVSQNDVGYGAYDLYDLGEFNQKGTVRTKYGTRSQLQAAVTSLKNNGIQVYGDVVMNHKGGADATEMVRAVEVNPNNRNQEVTGEYTIEAWTRFDFPGRGNTHSSFKWRWYHFDGVDWDQSRNLTNRIYKFRGKAWDWEVDTEFGNYDYLMYTDYDMDHPEVVNELRNWGVWYTNTLGLDGFRIDAVKHIKYSFTRDWINHVRSATGKNMFAVAEFWKNDLGAIENYLQKTNWNHSVFDVPLHYNLYNASKSGGNYDMRNIFNGTVVQAHPNHAVTFVDNHDSQPEEALESFVEEWFKPLAYALTLTREQGYPSVFYGDYYGIPTHGVPAMRSKIDPILEARQKYAYGPQHDYLDHPDVIGWTREGDSSHPKSGLATLITDGPGGSKRMYAGLKNAGETWYDITGNRSDTVKIGSDGWGEFHVNDGSVSIYVQK

SEQ ID NO: 29255 - protein, 485 aa, Bacillus sp.
HHNGTNGTMMQYFEWYLPNDGNHWNRLNSDASNLKSKGITAVWIPPAWKAASQNDVGYGAYDLYDLGEFNQKGTVRTKYGTRSQLQAAVTSLKNNGIQVYGDVVMNHKGGADATEMVRAVEVNPNNRNQEVTGEYTIEAWTRFDFPGRGNTHSSFKWRWYHFDGVDWDQSRDLDNRIYKFRGHGKAWDWEVDTEFGNYDYLMYADYDMDHPEVVNELRNWGVWYTNTLGLDGFRIDAVKHIKYSFTRDWINHVRIATGKNMFAVAEFWKNDLGAIENYLQKTNWNHSVFDVPLHYNLYNASKSGGNYDMRNIFNGTVVQRHPSHAVTFVDNHDSQPEEALESFVDEWFKPLAYALTLTREQGYPSVFYGDYYGIPTHGVPAMRSKIDPILEARQKYAYGPQHDYLDHPDVIGWTREGDSSHPKSGLATLITDGPGGSKRMYAGLKNAGETWYDITGNRSDTVKIGSDGWGEFHVNDQSVSIYVQK

SEQ ID NO: 29256 - protein, 483 aa, Bacillus sp.
HHNGTNGTMMQYFEWYLPNDGNHWNRLNSDASNLKSKGITAVWIPPAWKGASQNDVGYGAYDLYDLGEFNQKGTVRTKYGTRSQLQAAVTSLKNNGIQVYGDVVMNHKGGADATEMVRAVEVNPNNRNQEVTGEYTIEAWTRFDFPGRGNTHSSFKWRWYHFDGVDWDQSRRLNNRIYKFRGKAWDWEVDTEFGNYDYLMYADYDMDHPEVVNELRNWGVWYTNTLGLDGFRIDAVKHIKYSFTRDWINHVRSATGKNMFAVAEFWKNDLGAIENYLQKTNWNHSVFDVPLHYNLYNASKSAGNYDMRNIFNGTVVQRHPSHAVTFVDNHDSQPEEALESFVEPWFKPLAYALTLTREQGYPSVFYGDYYGIPTHGVPAMRSKIDPILEARQKYAYGPQHDYLDHPDVIGWTREGDSSHPKSGLATLITDGPGGSKRMYAGLKNAGETWYDITGNRSDTVKIGSDGWGEFHVNGASVSIYVQK

SEQ ID NO: 29257 - protein, 483 aa, Bacillus sp.
HHNGTNGTMMQYFEWYLPNDGNHWNRLNSDASNLKSKGITAVWIPPAWKGASQNDVGYGAYDLYDLGEFNQKGTVRTKYGTRSQLQAAVTSLKNNGIQVYGDVVMNHKGGADATEMVRAVEVNPNNRNQEVTGEYTIEAWTRFDFPGRGNTHSSFKWRWYHFDGVDWDQSRRLNNRIYKFRGKAWDWEVDTEFGNYDYLMYADYDMDHPEVVNELRNWGVWYTNTLGLDGFRIDAVKHIKYSFTRDWINHVRSATGKNMFAVAEFWQNDLGWIENYLQKTNWNHSVFDVPLHYNLYNASKSGGNYDMRNIFNGTVVQRHPSHAVTFVDNHDSQPEEALESFVEEWFKPLAYALTLTREQGYPSVFYGDYYGIPTHGVPAMRSKIDPILEARQKYAYGPQHDYLDHPDVIGWTREGDSSHPKSGLATLITDGPGGSKRMYAGLKNAGETWYDITGNRSDTVKIGSDGWGEFHVNDGSVSIYVQK

SEQ ID NO: 29258 - protein, 483 aa, Bacillus sp.
HHNGTNGTMMQYFEWYLPNDGNHWNRLNSDASNLKSKGIKAVWIPPAWKGASQNDVGYGAYDLYDLGEFNQKGTVRTKYGTRSQLQAAVTSLKNNGIQVYGDVVMNHKGGADATEMVRAVEVNPNNRNQEVTGEYTIEAWTRFDFPGRGNTHSSFKWRWYHFDGVDWDQSERLNNRIYKFRGKAWDWEVDTEFGNYDYLMYADYDMDHPEVVNELRNWGVWYTNTLGLDGFRIDAVKHIKYSFTRDWINHVRSATGKNMFAVAEFWKNDLGAIENYLQKTNWNHSVFDVPLHYNLYNASKSGGNYDMRNIFNGTVVQRHPSHAVTFVDNHDSQPEEALESFVEEWFKPLAYALTLTREQGYPSVFYGDYYGIPTHGVPAMRSKIDPILEARQKYAYGPQHDYLDHPDVIGWTREGDSSHPKSGLATLITDGPGGSKRMYAGLKNAGETWYDITGNRSDTVKIGSDGWGEFHVNDGSVSIYVQK

SEQ ID NO: 29259 - protein, 485 aa, Bacillus sp.
HHNGTNGTMMQYFEWYLPNDGNHWNRLNSDASNLKSKGITAVWIPPAWKGASQNDVGYGAYDLYDLGEFNQKGTVRTKYGTRSQLQAAVTSLKNNGIQVYGDVVMNHKGGADATEMVRAVEVNPNNRNQEVTGEYTIEAWTRFDFPGRGNTHSSFKWRWYHFDGVDWDQSRRLNNRIYKFRGHGKAWDWEVDTEFGNYDYLMYADYDMDHPEVVNELRNWGVWYTNTLGLDGFRIDAVKHIKYSFTRDWINHVRSATGKNMFAVAEFWKNDLGAIENYLQKTNWNHSVFDVPLHYNLYNASQSGGNYDMRNIFNGTVVQRHPSHAVTFVDNHDSQPEEALESFVEPWFKPLAYALTLTREQGYPSVFYGDYYGIPTHGVPAMRSKIDPILEARQKYAYGPQHDYLDHPDVIGWTREGDSSHPKSGLATLITDGPGGSKRMYAGLKNAGETWYDITGNRSDTVKIGSDGWGEFHVNKQSVSIYVQK

SEQ ID NO: 29260 - protein, 483 aa, Bacillus sp.
HHNGTNGTMMQYFEWYLPNDGNHWNRLNSDASNLKSKGITAVWIPPAWKAASQNDVGYGAYDLYDLGEFNQKGTVRTKYGTRSQLQAAVTSLKNNGIQVYGDVVMNHKGGADATEMVRAVEVNPNNRNQEVTGEYTIEAWTRFDFPGRGNTHSSFKWRWYHFDGVDWDQSRDLQNRIYKFRGKAWDWEVDTEFGNYDYLMYADYDMDHPEVVNELRNWGVWYTNTLGLDGFRIDAVKHIKYSFTRDWINHVRSATGKNMFAVAEFWKNDLGAIENYLQKTNWNHSVFDVPLHYNLYNASKSSGNYDMRNIFNGTVVQRHPSHAVTFVDNHDSQPEEALESFVDEWFKPLAYALTLTREQGYPSVFYGDYYGIPTHGVPAMRSKIDPILEARQKYAYGPQHDYLDHPDVIGWTREGDSSHPKSGLATLITDGPGGSKRMYAGLKNAGETWYDITGNRSDTVKIGSDGWGEFHVNKQSVSIYVQK

SEQ ID NO: 29261 - protein, 483 aa, Bacillus sp.
HHNGTNGTMMQYFEWYLPNDGNHWNRLNSDASNLKSKGITAVWIPPAWKGASQNDVGYGAYDLYDLGEFNQKGTVRTKYGTRSQLQAAVTSLKNNGIQVYGDVVMNHKGGADATEMVRAVEVNPNNRNQEVTGEYTIEAWTRFDFPGRGNTHSSFKWRWYHFDGVDWDQSRRLNNRIYKFRGKAWDWEVDTEFGNYDYLMYADYDMDHPEVVNELRNWGVWYTNTLGLDGFRIDAVKHIKYSFTRDWINHVRSATGKNMFAVAEFWKNDLGAIENYLQKTNWNHSVFDVPLHYNLYNASKSGGNYDMRNIFNGTVVQRHPSHAVTFVDNHDSQPEEALESFVETWFKPLAYALTLTREQGYPSVFYGDYYGIPTHGVPAMRSKIDPILEARQKYAYGPQHDYLDHPDVIGWTREGDSSHPKSGLATLITDGPGGSKRMYAGLKNAGETWYDITGNRSDTVKIGSDGWGEFHVNDASVSIYVQK

SEQ ID NO: 29262 - protein, 483 aa, Bacillus sp.
HHNGTNGTMMQYFEWYLPNDGNHWNRLNSDASNLKSKGITAVWIPPAWKAASQNDVGYGAYDLYDLGEFNQKGTVRTKYGTRSQLQAAVTSLKNNGIQVYGDVVMNHKGGADATEMVRAVEVNPNNRNQEVTGEYTIEAWTRFDFPGRGNTHSSFKWRWYHFDGVDWDQSRDLQNRIYKFRGKAWDWEVDTEFGNYDYLMYADYDMDHPEVVNELRNWGVWYTNTLGLDGFRIDAVKHIKYSFTRDWINHVRSATGKNMFAVAEFWKNDLGAIENYLQKTNWNHSVFDVPLHYNLYNASKSGGNYDMRNIFNGTVVQRHPSHAVTFVDNHDSQPEEALESFVETWFKPLAYALTLTREQGYPSVFYGDYYGIPTHGVPAMRSKIDPILEARQKYAYGPQHDYLDHPDVIGWTREGDSSHPKSGLATLITDGPGGSKRMYAGLKNAGETWYDITGNRSDTVKIGSDGWGEFHVNDASVSIYVQK

SEQ ID NO: 29263 - protein, 483 aa, Bacillus sp.
HHNGKNGTMMQYFEWYLPNDGNHWNRLNSDASNLKSKGITAVWIPPAWKGASQNDVGYGAYDLYDLGEFNQKGTVRTKYGTRSQLQAAVTSLKNNGIQVYGDVVMNHKGGADATEMVRAVEVNPNNRNQEVTGEYTIEAWTRFDFPGRGNTHSSFKWRWYHFDGVDWDQSREFNNRIYKFRGKAWDWEVDTEFGNYDYLMYADYDMDHPEVVNELRNWGVWYTNTLGLDGFRIDAVKHIKYSFTRDWINHVRSATGKNMFAVAEFWKNDLGAIENYLQKTNWNHSVFDVPLHYNLYNASQSGGNYDMRNIFNGTVVQRHPSHAVTFVDNHDSQPEEALESFVEPWFKPLAYALTLTREQGYPSVFYGDYYGIPTHGVPAMRSKIDPILEARQKYAYGPQHDYLDHPDVIGWTREGDSSHPKSGLATLITDGPGGSKRMYAGLKNAGETWYDITGNRSDTVKIGSDGWGEFHVNKSSVSIYVQK

SEQ ID NO: 29264 - protein, 483 aa, Bacillus sp.
HHNGTNGTMMQYFEWYLPNDGNHWNRLNSDASNLKSKGITAVWIPPAWKGASQNDVGYGAYDLYDLGEFNQKGTVRTKYGTRSQLQAAVTSLKNNGIQVYGDVVMNHKGGADATEMVRAVEVNPNNRNQEVTGEYTIEAWTRFDFPGRGNTHSSFKWRWYHFDGVDWDQSRRLNNRIYKFRGKAWDWEVDTEFGNYDYLMYADYDMDHPEVVNELRNWGVWYTNTLGLDGFRIDAVKHIKYSFTRDWINHVRSATGKNMFAVAEFWKNDLGAIENYLQKTNWNHSVFDVPLHNNLYTASKSGGNYDMRNIFNGTVVQRHPSHAVTFVDNHDSQPEEALESFVEEWFKPLAYALTLTREQGYPSVFYGDYYGIPTHGVPAMRSKIDPILEARQKYAYGPQHDYLDHPDVIGWTREGDSSHPKSGLATLITDGPGGSKRMYAGLKNAGETWYDITGNRSDTVKIGSDGWGEFHVNDGSVSIYVQK

SEQ ID NO: 29265 - protein, 483 aa, Bacillus sp.
HHNGTNGTMMQYFEWYLPNDGNHWNRLNSDASNLKSKGITAVWIPPAWKAVSQNDVGYGAYDLYDLGEFNQKGTVRTKYGTRSQLQAAVTSLKNNGIQVYGDVVMNHKGGADATEMVRAVEVNPNNRNQEVTGEYTIEAWTRFDFPGRGNTHSSFKWRWYHFDGVDWDQSRDLENRIYKFRGKAWDWEVDTEFGNYDYLMYADYDMDHPEVVNELRNWGVWYTNTLGLDGFRIDAVKHIKYSFTRDWINHVRSATGKNMFAVAEFWKNDLGAIENYLQKTNWNHSVFDVPLHYNLYNASKSGGNYDMRNIFNETVVQAHPNHAVTFVDNHDSQPEEALESFVEEWFKPLAYALTLTREQGYPSVFYGDYYGIPTHGVPAMRSKIDPILEARQKYAYGPQHDYLDHPDVIGWTREGDSSHPKSGLATLITDGPGGSKRMYAGLKNAGETWYDITGNRSDTVKIGSDGWGEFHVNDGSVSIYVQK

SEQ ID NO: 29266 - protein, 485 aa, Bacillus sp.
HHNGTNGTMMQYFEWYLPNDGNHWNRLNSDASNLKSKGITAVWIPPAWKGASQNDVGYGAYDLYDLGEFNQKGTVRTKYGTRSQLQAAVTSLKNNGIQVYGDVVMNHKGGADATEMVRAVEVNPNNRNQEVTGEYTIEAWTRFDFPGRGNTHSSFKWRWYHFDGVDWDQSRRLNNRIYKFRGHGKAWDWEVDTEFGNYDYLMYADYDMDHPEVVNELRNWGVWYTNTLGLDGFRIDAVKHIKYSFTRDWINHVRSATGKNMFAVAEFWHNDLGSIENYLQKTNWNHSVFDVPLHYNLYNASKSGGNYDMRNIFNGTVVQRHPSHAVTFVDNHDSQPEEALESFVEEWFKPLAYALTLTREQGYPSVFYGDYYGIPTHGVPAMRSKIDPILEARQKYAYGPQHDYLDHPDVIGWTREGDSSHPKSGLATLITDGPGGSKRMYAGLKNAGETWYDITGNRSDTVKIGSDGWGEFHVNDGSVSIYVQK

SEQ ID NO: 29267 - protein, 483 aa, Bacillus sp.
HHNGTNGTMMQYFEWYLPNDGNHWNRLNSDASNLKSKGITAVWIPPAWKGASQNDVGYGAYDLYDLGEFNQKGTVRTKYGTRSQLQAAVTSLKNNGIQVYGDVVMNHKGGADATEMVRAVEVNPNNRNQEVTGEYTIEAWTRFDFPGRGNTHSSFKWRWYHFDGVDWDQSRRLNNRIYKFRGKAWDWEVDTEFGNYDYLMYADYDMDHPEVVNELRNWGVWYTNTLGLDGFRIDAVKHIKYSFTRDWINHVRSATGKNMFAVAEFWHNDLGEIENYLQKTNWNHSVFDVPLHYNLYNASKSGGNYDMRNIFNGTVVQRHPSHAVTFVDNHDSQPEEALESFVEEWFKPLAYALTLTREQGYPSVFYGDYYGIPTHGVPAMRSKIDPILEARQKYAYGPQHDYLDHPDVIGWTREGDSSHPKSGLATLITDGPGGSKRMYAGLKNAGETWYDITGNRSDTVKIGSDGWGEFHVNDGSVSIYVQK

SEQ ID NO: 29268 - protein, 485 aa, Bacillus sp.
HHNGTNGTMMQYFEWYLPNDGNHWNRLNSDASNLKSKGITAVWIPPAWKGASQNDVGYGAYDLYDLGEFNQKGTVRTKYGTRSQLQAAVTSLKNNGIQVYGDVVMNHKGGADATEMVRAVEVNPNNRNQEVTGEYTIEAWTRFDFPGRGNTHSSFKWRWYHFDGVDWDQSRRLNNRIYKFRGHGKAWDWEVDTEFGNYDYLMYADYDMDHPEVVNELRNWGVWYTNTLGLDGFRIDAVKHIKYSFTRDWINHVRSATGKNMFAVAEFWKNDLGAIENYLQKTNWNHSVFDVPLHYNLYNASQSGGNYDMRNIFNGTVVQRHPSHAVTFVDNHDSQPEEALESFVEPWFKPLAYALTLTREQGYPSVFYGDYYGIPTHGVPAMRSKIDPILEARQKYAYGPQHDYLDHPDVIGWTREGDSSHPKSGLATLITDGPGGSKRMYAGLKNAGETWYDITGNRSDTVKIGSDGWGEFHVNKSSVSIYVQK

SEQ ID NO: 29269 - protein, 483 aa, Bacillus sp.
HHNGTNGTMMQYFEWYLPNDGNHWNRLNSDASNLKSKGITAVWIPPAWKAASQNDVGYGAYDLYDLGEFNQKGTVRTKYGTRSQLQAAVTSLKNNGIQVYGDVVMNHKGGADATEMVRAVEVNPNNRNQEVTGEYTIEAWTRFDFPGRGNTHSSFKWRWYHFDGVDWDQSRNLTNRIYKFRGKAWDWEVDTEFGNYDYLMYADYDMDHPEVVNELRNWGVWYTNTLGLDGFRIDAVKHIKYSFTRDWINHVRSATGKNMFAVAEFWKNDLGAIENYLQKTNWNHSVFDVPLHYNLYNASKSGGNYDMRNIFNGTVVQRHPSHAVTFVDNHDSQPEEALESFVETWFKPLAYALTLTREQGYPSVFYGDYYGIPTHGVPAMRSKIDPILEARQKYAYGPQHDYLDHPDVIGWTREGDSSHPKSGLATLITDGPGGSKRMYAGLKNAGETWYDITGNRSDTVKIGSDGWGEFHVNKGSVSIYVQK

SEQ ID NO: 29270 - protein, 483 aa, Bacillus sp.
HHNGTNGTMMQYFEWYLPNDGNHWNRLNSDASNLKSKGIKAVWIPPAWKGASQNDVGYGAYDLYDLGEFNQRGTVRTKYGTRSQLQAAVTSLKNNGIQVYGDVVMNHKGGADATEMVRAVEVNPNNRNQEVTGEYTIEAWTRFDFPGRGNTHSSFKWRWYHFDGVDWDQSRNFQNRIYKFRGKAWDWEVDTEFGNYDYLMYADYDMDHPEVVNELRNWGVWYTNTLGLDGFRIDAVKHIKYSFTRDWINHVRSATGKNMFAVAEFWKNDLGAIENYLQKTNWNHSVFDVPLHYNLYNASKSQGNYDMRNIFNGTVVQRHPSHAVTFVDNHDSQPEEALESFVDTWFKPLAYALTLTREQGYPSVFYGDYYGIPTHGVPAMRSKIDPILEARQKYAYGPQHDYLDHPDVIGWTREGDSSHPKSGLATLITDGPGGSKRMYAGLKNAGETWYDITGNRSDTVKIGSDGWGEFHVNGSSVSIYVQK

SEQ ID NO: 29271 - protein, 483 aa, Bacillus sp.
HHNGTNGTMMQYFEWYLPNDGNHWNRLNSDASNLKSKGITAVWIPPAWKGASQNDVGYGAYDLYDLGEFNQKGTVRTKYGTRSQLQAAVTSLKNNGIQVYGDVVMNHKGGADATEMVRAVEVNPNNRNQEVTGEYTIEAWTRFDFPGRGNTHSSFKWRWYHFDGVDWDQSRRLNNRIYKFRGKAWDWEVDTEFGNYDYLMYADYDMDHPEVVNELRNWGVWYTNTLGLDGFRIDAVKHIKYSFTRDWINHVRSATGKNMFAVAEFWKNDLGAIENYLQKTNWNHSVFDVPLHYNLYNASKSGGNYDMRNIFNGTVVQRHPSHAVTFVDNHDSQPEEALESFVDPWFKPLAYALTLTREQGYPSVFYGDYYGIPTHGVPAMRSKIDPILEARQKYAYGPQHDYLDHPDVIGWTREGDSSHPKSGLATLITDGPGGSKRMYAGLKNAGETWYDITGNRSDTVKIGSDGWGEFHVNDSSVSIYVQK

SEQ ID NO: 29272 - protein, 483 aa, Bacillus sp.
HHNGTNETMMQYFEWYLPNDGNHWNRLNSDASNLKSKGITAVWIPPAWKGASQNDVGYGAYDLYDLGEFNQKGTVRTKYGTRSQLQAAVTSLKNNGIQVYGDVVMNHKGGADATEMVRAVEVNPNNRNQEVTGEYTIEAWTRFDFPGRGNTHSSFKWRWYHFDGVDWDQSRRLNNRIYKFRGKAWDWEVDTEFGNYDYLMYADYDMDHPEVVNELRNWGVWYTNTLGLDGFRIDAVKHIKYSFTRDWINHVRSATGKNMFAVAEFWKNDLGAIENYLQKTNWNHSVFDVPLHYNLYNASKSGGNYDMRNIFNGTVVQAHPSQAVTFVDNHDSQPEEALESFVEEWFKPLAYALTLTREQGYPSVFYGDYYGIPTHGVPAMRSKIDPILEARQKYAYGPQHDYLDHPDVIGWTREGDSSHPKSGLATLITDGPGGSKRMYAGLKNAGETWYDITGNRSDTVKIGSDGWGEFHVNDGSVSIYVQK

SEQ ID NO: 29273 - protein, 483 aa, Bacillus sp.
HHNGTNGTMMQYFEWYLPNDGNHWNRLNSDASNLKSKGITAVWIPPAWKAASQNDVGYGAYDLYDLGEFNQKGTVRTKYGTRSQLQAAVTSLKNNGIQVYGDVVMNHKGGADATEMVRAVEVNPNNRNQEVTGEYTIEAWTRFDFPGRGNTHSSFKWRWYHFDGVDWDQSRRTNNRIYKFRGKAWDWEVDTEFGNYDYLMYTDYDMDHPEVVNELRNWGVWYTNTLGLDGFRIDAVKHIKYSFTRDWINHVRSATGKNMFAVAEFWKNDLGAIENYLQKTNWNHSVFDVPLHYNLYNASKSGGNYDMRNIFNGTVVQRHPSHAVTFVDNHDSQPEEALESFVEEWFKPLAYALTLTREQGYPSVFYGDYYGIPTHGVPAMRSKIDPILEARQKYAYGPQHDYLDHPDVIGWTREGDSSHPKSGLATLITDGPGGSKRMYAGLKNAGETWYDITGNRSDTVKIGSDGWGEFHVNDGSVSIYVQK

SEQ ID NO: 29274 - protein, 483 aa, Bacillus sp.
HHNGTNGTMMQYFEWYLPNDGNHWNRLNSDASNLKSKGITAVWIPPAWKGASQNDVGYGAYDLYDLGEFNQKGTVRTKYGTRSQLQAAVTSLKNNGIQVYGDVVMNHKGGADATEMVRAVEVNPNNRNQEVTGEYTIEAWTRFDFPGRGNTHSSFKWRWYHFDGVDWDQSRRLNNRIYKFRGKAWDWEVDTENGFYDYLMYADIDMDHPEVVSTLRNWGVWYTNTLGLDGFRIDAVKHIKYSFTRDWINHVRSATGKNMFAVAEFWKNDLGAIENYLQKTNWNHSVFDVPLHYNLYNASKSGGNYDMRNIFNGTVVQRHPSHAVTFVDNHDSQPEEALESFVEEWFKPLAYALTLTREQGYPSVFYGDYYGIPTHGVPAMRSKIDPILEARQKYAYGPQHDYLDHPDVIGWTREGDSSHPKSGLATLITDGPGGSKRMYAGLKNAGETWYDITGNRSDTVKIGSDGWGEFHVNDGSVSIYVQK

SEQ ID NO: 29275 - protein, 483 aa, Bacillus sp.
HHNGTNGTMMQYFEWYLPNDGNHWNRLNSDASNLKSKGITAVWIPPAWKAASQNDVGYGAYDLYDLGEFNQKGTVRTKYGTRSQLQAAVTSLKNNGIQVYGDVVMNHKGGADATEMVRAVEVNPNNRNQEVTGEYTIEAWTRFDFPGRGNTHSSFKWRWYHFDGVDWDQSRTLSNRIYKFRGKAWDWEVDTEFGNYDYLMYADYDMDHPEVVNELRNWGVWYTNTLGLDGFRIDAVKHIKYSFTRDWINHVRSATGKNMFAVAEFWKNDLGAIENYLQKTNWNHSVFDVPLHYNLYNASKSGGNYDMRNIFNGTVVQRHPSHAVTFVDNHDSQPEEALESFVETWFKPLAYALTLTREQGYPSVFYGDYYGIPTHGVPAMRSKIDPILEARQKYAYGPQHDYLDHPDVIGWTREGDSSHPKSGLATLITDGPGGSKRMYAGLKNAGETWYDITGNRSDTVKIGSDGWGEFHVNDGSVSIYVQK

SEQ ID NO: 29276 - protein, 483 aa, Bacillus sp.
HHNGTNGTMMQYFEWYLPNDGNHWNRLNSDASNLKSKGITAVWIPPAWKGASQNDVGYGAYDLYDLGEFNQKGTVRTKYGTRSQLQAAVTSLKNNGIQVYGDVVMNHKGGADLTEMVRAVEVNPNNRNQEVTGEYTIEAWTRFDFPGRGNTHSSFKWRWYHFDGVDFDQSRQLNNRIYKFRGKAWDWEVDTEFGNYDYLMYADYDMDHPEVVGELRNWGVWYTNTLGLDGFRIDAVKHIKYSFTRDWINHVRSATGKNMFAVAEFWKNDLGAIENYLQKTNWNHSVFDVPLHYNLYNASKSGGNYDMRNIFNGTVVQRHPSHAVTFVDNHDSQPEEALESFVEEWFKPLAYALTLTREQGYPSVFYGDYYGIPTHGVPAMRSKIDPILEARQKYAYGPQHDYLDHPDVIGWTREGDSSHPKSGLATLITDGPGGSKRMYAGLKNAGETWYDITGNRSDTVKIGSDGWGEFHVNDGSVSIYVQK

SEQ ID NO: 29277 - protein, 483 aa, Bacillus sp.
HHNGTNGTMMQYFEWYLPNDGNHWNRLNSDASNLKSKGITAVWIPPAWKAVSQNDVGYGAYDLYDLGEFNQKGTVRTKYGTRSQLQAAVTSLKNNGIQVYGDVVMNHKGGADATEMVRAVEVNPNNRNQEVTGEYTIEAYTRFDFSGRGNTHSSFKWRWYHFDGVDWDQSRRFDNRIYKFRGKAWDWEVDTEFGNYDYLMYADYDMDHPEVVNELRNWGVWYTNTLGLDGFRIDAVKHIKYSFTRDWINHVRSATGKNMFAVAEFWKNDLGAIENYLQKTNWNHSVFDVPLHYNLYNASKSGGNYDMRNIFNGTVVQRHPSHAVTFVDNHDSQPEEALESFVEEWFKPLAYALTLTREQGYPSVFYGDYYGIPTHGVPAMRSKIDPILEARQKYAYGPQHDYLDHPDVIGWTREGDSSHPKSGLATLITDGPGGSKRMYAGLKNAGETWYDITGNRSDTVKIGSDGWGEFHVNDGSVSIYVQK

SEQ ID NO: 29278 - protein, 483 aa, Bacillus sp.
HHNGTNGTMMQYFEWYLPNDGNHWNRLNSDASNLKSKGITAVWIPPAWKGASQNDVGYGAYDLYDLGEFNQKGTVRTKYGTRSQLQAAVTSLKNNGIQVYGDVVMNHKGGADATEMVRAVEVNPNNRNQEVTGEYTIEAWTRFDFPGRGNTHSSFKWRWYHFDGVDWDQSRRLNNRIYKFRGKAWDWEVDTEFGNYDYLMYADYDMDHPEVVNELRNWGVWYTNTLGLDGFRIDAVKHIKYSFTRDWINHVRSATGKNMFAVAEFWKNDLGAIENYLQKTNWNHSVFDVPLHYNLYNASKSAGNYDMRNIFNGTVVQRHPSHAVTFVDNHDSQPEEALESFVDTWFKPLAYALTLTREQGYPSVFYGDYYGIPTHGVPAMRSKIDPILEARQKYAYGPQHDYLDHPDVIGWTREGDSSHPKSGLATLITDGPGGSKRMYAGLKNAGETWYDITGNRSDTVKIGSDGWGEFHVNGKSVSIYVQK

SEQ ID NO: 29279 - protein, 483 aa, Bacillus sp.
HHNGTNGTMMQYFEWYLPNDGNHWNRLNSDASNLKSKGITAVWIPPAWKGASQNDVGYGAYDLYDLGEFNQKGTVRTKYGTRSQLQAAVTSLKNNGIQVYGDVVMNHKGGADATEMVRAVEVNPNNRNQEVTGEYTIEAWTRFDFPGRGNTHSSFKWRWYHFDGVDWDQSRRLNNRIYKFRGKAWDWEVDTENGNYDYLMYADIDYDYPEVVNELRVWGVWYTNTLGLDGFRIDAVKHIKYSFTRVWINHVRSATGKNMFAVAEFWKNDLGAIENYLQKTNWNHSVFDVPLHYNLYNASKSGGNYDMRNIFNGTVVQRHPSHAVTFVDNHDSQPEEALESFVEEWFKPLAYALTLTREQGYPSVFYGDYYGIPTHGVPAMRSKIDPILEARQKYAYGPQHDYLDHPDVIGWTREGDSSHPKSGLATLITDGPGGSKRMYAGLKNAGETWYDITGNRSDTVKIGSDGWGEFHVNDGSVSIYVQK

SEQ ID NO: 29280 - protein, 483 aa, Bacillus sp.
HHNGTNGTMMQYFEWYLPNDGNHWNRLNSDASNLKSKGITAVWIPPAWKAASQNDVGYGAYDLYDLGEFNQKGTVRTKYGTRSQLQAAVTSLKNNGIQVYGDVVMNHKGGADLTEMVDAVEVNPNNRNQEVTGEYTIEAWTRFDFPGRGNTHSSFKWRWYHFDGVDWDQSRQITNRIYKFRGKAWDWEVDTEFGNYDYLMYTDYDMDHPEVVNELRNWGVWYTNTLGLDGFRIDAVKHIKYSFTRDWINHVRSATGKNMFAVAEFWKNDLGAIENYLQKTNWNHSVFDVPLHYNLYNASKSGGNYDMRNIFNGTVVQRHPSHAVTFVDNHDSQPEEALESFVEEWFKPLAYALTLTREQGYPSVFYGDYYGIPTHGVPAMRSKIDPILEARQKYAYGPQHDYLDHPDVIGWTREGDSSHPKSGLATLITDGPGGSKRMYAGLKNAGETWYDITGNRSDTVKIGSDGWGEFHVNDGSVSIYVQK

SEQ ID NO: 29281 - protein, 485 aa, Synthetic construct
HHNGTNGTMMQYFEWYLPNDGNHWNRLNSDASNLKSKGITAVWIPPAWKGASQNDVGYGAYDLYDLGEFNQKGTVRTKYGTRSQLQAAVTSLKNNGIQVYGDVVMNHKGGADATEMVRAVEVNPNNRNQEVTGEYTIEAWTRFDFPGRGNTHSSFKWRWYHFDGVDWDQSRRLNNRIYKFRGHGKAWDWEVDTEFGNYDYLMYADIDMDHPESTNELRNWGVWYTNTLGLDGFRIDAVKHIKYSFTRDWINHVRSATGKNMFAVAEFWKNDLGAIENYLQKTNWNHSVFDVPLHYNLYNASKSGGNYDMRNIFNGTVVQRHPSHAVTFVDNHDSQPEEALESFVEEWFKPLAYALTLTREQGYPSVFYGDYYGIPTHGVPAMRSKIDPILEARQKYAYGPQHDYLDHPDVIGWTREGDSSHPKSGLATLITDGPGGSKRMYAGLKNAGETWYDITGNRSDTVKIGSDGWGEFHVNDGSVSIYVQK

SEQ ID NO: 29282 - protein, 485 aa, Bacillus sp.
HHNGTNGTMMQYFEWYLPNDGNHWNRLNSDASNLKSKGITAVWIPPAWKGASQNDVGYGAYDLYDLGEFNQKGTVRTKYGTRSQLQAAVTSLKNNGIQVYGDVVMNHKGGADATEMVRAVEVNPNNRNQEVTGEYTIEAWTRFDFPGRGNTHSSFKWRWYHFDGVDWDQSRRLNNRIYKFRGHGKAWDWEVDTEFGNYDYLMYADYDMDHPEVVNELRNWGVWYTNTLGLDGFRIDAVKHIKYSFTRDWINHVRSATGKNMFAVAEFWKNDLGAIENYLQKTNWNHSVFDVPLHYNLYNASKSSGNYDMRNIFNGTVVQRHPSHAVTFVDNHDSQPEEALESFVDTWFKPLAYALTLTREQGYPSVFYGDYYGIPTHGVPAMRSKIDPILEARQKYAYGPQHDYLDHPDVIGWTREGDSSHPKSGLATLITDGPGGSKRMYAGLKNAGETWYDITGNRSDTVKIGSDGWGEFHVNKGSVSIYVQK

SEQ ID NO: 29283 - protein, 483 aa, Bacillus sp.
HHNGTNGTMMQYFEWYLPNDGNHWNRLNSDASNLKSKGITAVWIPPAWKATSQNDVGYGAYDLYDLGEFNQKGTVRTKYGTRSQLQAAVTSLKNNGIQVYGDVVMNHKGGADATEMVRAVEVNPNNRNQEVTGEYTIEAYTRFDFSGRGNTHSSFKWRWYHFDGVDWDQSRDLNNRIYKFRGKAWDWEVDTEFGNYDYLMYADYDMDHPEVVNELRNWGVWYTNTLGLDGFRIDAVKHIKYSFTRDWINHVRSATGKNMFAVAEFWKNDLGAIENYLQKTNWNHSVFDVPLHYNLYNASKSGGNYDMRNIFNGTVVQRHPSHAVTFVDNHDSQPEEALESFVEEWFKPLAYALTLTREQGYPSVFYGDYYGIPTHGVPAMRSKIDPILEARQKYAYGPQHDYLDHPDVIGWTREGDSSHPKSGLATLITDGPGGSKRMYAGLKNAGETWYDITGNRSDTVKIGSDGWGEFHVNDGSVSIYVQK

SEQ ID NO: 29284 - protein, 485 aa, Synthetic construct
HHNGTNGTMMQYFEWYLPNDGNHWNRLNSDASNLKSKGITAVWIPPAWKGASQNDVGYGAYDLYDLGEFNQKGTVRTKYGTRSQLQAAVTSLKNNGIQVYGDVVMNHKGGADATEMVRAVEVNPNNRNQEVTGEYTIEAWTRFDFPGRGNTHSSFKWRWYHFDGVDWDQSRRLNNRIYLFRGHGKKWDWPVDTENGNYDYLMYADIDMDHPEVVNELRNWGVWYTNTLGLDGFRIDAVKHIKYSFTRDWINHVRSATGKNMFAVAEFWKNDLGAIENYLQKTNWNHSVFDVPLHYNLYNASKSGGNYDMRNIFNGTVVQRHPSHAVTFVDNHDSQPEEALESFVEEWFKPLAYALTLTREQGYPSVFYGDYYGIPTHGVPAMRSKIDPILEARQKYAYGPQHDYLDHPDVIGWTREGDSSHPKSGLATLITDGPGGSKRMYAGLKNAGETWYDITGNRSDTVKIGSDGWGEFHVNDGSVSIYVQK

SEQ ID NO: 29285 - protein, 483 aa, Bacillus sp.
HHNGTNGTMMQYFEWYLPNDGNHWNRLNSDASNLKSKGITAVWIPPAWKAISQNDVGYGAYDLYDLGEFNQKGTVRTKYGTRSQLQAAVTSLKNNGIQVYGDVVMNHKGGADATEMVRAVEVNPNNRNQEVTGEYTIEAWTRFDFPGRGNTHSSFKWRWYHFDGVDWDQSRRLNNRIYKFRGKAWDWEVDTEFGNYDYLMYVDYDMDHPEVVNELRNWGVWYTNTLGLDGFRIDAVKHIKYSFTRDWINHVRSATGKNMFAVAEFWKNDLGAIENYLQKTNWNHSVFDVPLHYNLYNASKSGGNYDMRNIFNGTVVQRHPSHAVTFVDNHDSQPEEALESFVEEWFKPLAYALTLTREQGYPSVFYGDYYGIPTHGVPAMRSKIDPILEARQKYAYGPQHDYLDHPDVIGWTREGDSSHPKSGLATLITDGPGGSKRMYAGLKNAGETWYDITGNRSDTVKIGSDGWGEFHVNDGSVSIYVQK

SEQ ID NO: 29286 - protein, 483 aa, Bacillus sp.
HHNGTNATMMQYFEWYLPNDGNHWNRLNSDASNLKSKGITAVWIPPAWKGASQNDVGYGAYDLYDLGEFNQKGTVRTKYGTRSQLQAAVTSLKNNGILVYGDVVMNHKGGADATEMVRAVEVNPNNRNQEVTGEYTIEAWTRFDFPGRGNTHSSFKWRWYHFDGVDWDQSRRLNNRIYKFRGKAWDWEVDTEFGNYDYLMYADYDMDHPEVVNELRNWGVWYTNTLGLDGFRIDAVKHIKYSFTRDWINHVRSATGKNMFAVAEFWKNDLGAIENYLQKTNWNHSVFDVPLHYNLYNASKSGGNYDMRNIFNGTVVQMHPSHAVTFVDNHDSQPEEALESFVEEWFKPLAYALTLTREQGYPSVFYGDYYGIPTHGVPAMRSKIDPILEARQKYAYGPQHDYLDHPDVIGWTREGDSSHPKSGLATLITDGPGGSKRMYAGLKNAGETWYDITGNRSDTVKIGSDGWGEFHVNDGSVSIYVQK

SEQ ID NO: 29287 - protein, 483 aa, Bacillus sp.
HHNGTNGTMMQYFEWYLPNDGNHWNRLNSDASNLKSKGITAVWIPPAWKAASQNDVGYGAYDLYDLGEFNQKGTVRTKYGTRSQLQAAVTSLKNNGIQVYGDVVMNHKGGADATEMVRAVEVNPNNRNQEVTGEYTIEAWTRFDFPGRGNTHSSFKWRWYHFDGVDWDQSRDLDNRIYKFRGKAWDWEVDTEFGNYDYLMYADYDMDHPEVVNELRNWGVWYTNTLGLDGFRIDAVKHIKYSFTRDWINHVRSATGKNMFAVAEFWKNDLGAIENYLQKTNWNHSVFDVPLHYNLYNASKSGGNYDMRNIFNGTVVQANPNHAVTFVDNHDSQPEEALESFVEEWFKPLAYALTLTREQGYPSVFYGDYYGIPTHGVPAMRSKIDPILEARQKYAYGPQHDYLDHPDVIGWTREGDSSHPKSGLATLITDGPGGSKRMYAGLKNAGETWYDITGNRSDTVKIGSDGWGEFHVNDGSVSIYVQK

SEQ ID NO: 29288 - protein, 483 aa, Bacillus sp.
HHNGTNGTMMQYFEWYLPNDGNHWNRLNSDASNLKSKGITAVWIPPAWKALSQNDVGYGAYDLYDLGEFNQKGTVRTKYGTRSQLQAAVTSLKNNGIQVYGDVVMNHKGGADATEMVRAVEVNPNNRNQEVTGEYTIEAWTRFDFPGRGNTHSSFKWRWYHFDGVDWDQSRRTTNRIYKFRGKAWDWEVDTEFGNYDYLMYTDYDMDHPEVVNELRNWGVWYTNTLGLDGFRIDAVKHIKYSFTRDWINHVRSATGKNMFAVAEFWKNDLGAIENYLQKTNWNHSVFDVPLHYNLYNASKSGGNYDMRNIFNGTVVQRHPSHAVTFVDNHDSQPEEALESFVEEWFKPLAYALTLTREQGYPSVFYGDYYGIPTHGVPAMRSKIDPILEARQKYAYGPQHDYLDHPDVIGWTREGDSSHPKSGLATLITDGPGGSKRMYAGLKNAGETWYDITGNRSDTVKIGSDGWGEFHVNDGSVSIYVQK

SEQ ID NO: 29289 - protein, 485 aa, Bacillus sp.
HHNGTNGTMMQYFEWYLPNDGNHWNRLNSDASNLKSKGITAVWIPPAWKAASQNDVGYGAYDLYDLGEFNQKGTVRTKYGTRSQLQAAVTSLKNNGIQVYGDVVMNHKGGADATEMVRAVEVNPNNRNQEVTGEYTIEAWTRFDFPGRGNTHSSFKWRWYHFDGVDWDQSRRTNNRIYKFRGHGKAWDWEVDTEFGNYDYLMYTDYDMDHPEVVNELRNWGVWYTNTLGLDGFRIDAVKHIKYSFTRDWINHVRSATGKNMFAVAEFWKNDLGAIENYLQKTNWNHSVFDVPLHYNLYNASKSGGNYDMRNIFNGTVVQRHPSHAVTFVDNHDSQPEEALESFVEEWFKPLAYALTLTREQGYPSVFYGDYYGIPTHGVPAMRSKIDPILEARQKYAYGPQHDYLDHPDVIGWTREGDSSHPKSGLATLITDGPGGSKRMYAGLKNAGETWYDITGNRSDTVKIGSDGWGEFHVNDGSVSIYVQK

SEQ ID NO: 29290 - protein, 485 aa, Bacillus sp.
HHNGTNGTMMQYFEWYLPNDGNHWNRLNSDASNLKSKGITAVWIPPAWKAISQNDVGYGAYDLYDLGEFNQKGTVRTKYGTRSQLQAAVTSLKNNGIQVYGDVVMNHKGGADATEMVRAVEVNPNNRNQEVTGEYTIEAWTRFDFPGRGNTHSSFKWRWYHFDGVDWDQSRRLNNRIYKFRGHGKAWDWEVDTEFGNYDYLMYVDYDMDHPEVVNELRNWGVWYTNTLGLDGFRIDAVKHIKYSFTRDWINHVRSATGKNMFAVAEFWKNDLGAIENYLQKTNWNHSVFDVPLHYNLYNASKSGGNYDMRNIFNGTVVQRHPSHAVTFVDNHDSQPEEALESFVEEWFKPLAYALTLTREQGYPSVFYGDYYGIPTHGVPAMRSKIDPILEARQKYAYGPQHDYLDHPDVIGWTREGDSSHPKSGLATLITDGPGGSKRMYAGLKNAGETWYDITGNRSDTVKIGSDGWGEFHVNDGSVSIYVQK

SEQ ID NO: 29291 - protein, 485 aa, Bacillus sp.
HHNGTNGTMMQYFEWYLPNDGNHWNRLNSDASNLKSKGITAVWIPPAWKGASQNDVGYGAYDLYDLGEFNQKGTVRTKYGTRSQLQAAVTSLKNNGIQVYGDVVMNHKGGADATEMVRAVEVNPNNRNQEVTGEYTIEAWTRFDFPGRGNTHSSFKWRWYHFDGVDWDQSRRLNNRIYKFRGHGKAWDWEVDTEFGNYDYLMYADYDMDHPEVVNELRNWGVWYTNTLGLDGFRIDAVKHIKYSFTRDWINHVRSATGKNMFAVAEFWKNDLGAIENYLQKTNWNHSVFDVPLHYNLYNASKSGGNYDMRNIFNGTVVQRHPSHAVTFVDNHDSQPEEALESFVDPWFKPLAYALTLTREQGYPSVFYGDYYGIPTHGVPAMRSKIDPILEARQKYAYGPQHDYLDHPDVIGWTREGDSSHPKSGLATLITDGPGGSKRMYAGLKNAGETWYDITGNRSDTVKIGSDGWGEFHVNDSSVSIYVQK

SEQ ID NO: 29292 - protein, 483 aa, Bacillus sp.
HHNGTNGTMMQYFEWYLPNDGNHWNRLNSDASNLKSKGITAVWIPPAWKAASQNDVGYGAYDLYDLGEFNQKGTVRTKYGTRSQLQAAVTSLKNNGIQVYGDVVMNHKGGADATEMVRAVEVNPNNRNQEVTGEYTIEAWTRFDFPGRGNTHSSFKWRWYHFDGVDWDQSRDLDNRIYKFRGKAWDWEVDTEFGNYDYLMYADYDMDHPEVVNELRNWGVWYTNTLGLDGFRIDAVKHIKYSFTRDWINHVRSATGKNMFAVAEFWKNDLGAIENYLQKTNWNHSVFDVPLHYNLYNASKSGGNYDMRNIFNGTVVQRHPSHAVTFVDNHDSQPEEALESFVETWFKPLAYALTLTREQGYPSVFYGDYYGIPTHGVPAMRSKIDPILEARQKYAYGPQHDYLDHPDVIGWTREGDSSHPKSGLATLITDGPGGSKRMYAGLKNAGETWYDITGNRSDTVKIGSDGWGEFHVNKGSVSIYVQK

SEQ ID NO: 29293 - protein, 485 aa, Bacillus sp.
HHNGTNGTMMQYFEWYLPNDGNHWNRLNSDASNLKSKGITAVWIPPAWKGASQNDVGYGAYDLYDLGEFNQKGTVRTKYGTRSQLQAAVTSLKNNGIQVYGDVVMNHKGGADATEMVRAVEVNPNNRNQEVTGEYTIEAWTRFDFPGRGNTHSSFKWRWYHFDGVDWDQSRRLNNRIYKFRGHGKAWDWEVDTEFGNYDYLMYADYDMDHPEVVNELRNWGVWYTNTLGLDGFRIDAVKHIKYSFTRDWINHVRSATGKNMFAVAEFWKNDLGAIENYLQKTNWNHSVFDVPLHYNLYNASKSGGNYDMRNIFNGTVVQRHPSHAVTFVDNHDSQPEEALESFVETWFKPLAYALTLTREQGYPSVFYGDYYGIPTHGVPAMRSKIDPILEARQKYAYGPQHDYLDHPDVIGWTREGDSSHPKSGLATLITDGPGGSKRMYAGLKNAGETWYDITGNRSDTVKIGSDGWGEFHVNQSSVSIYVQK

SEQ ID NO: 29294 - protein, 485 aa, Bacillus sp.
HHNGTNGTMMQYFEWYLPNDGNHWNRLNSDASNLKSKGITAVWIPPAWKAVSQNDVGYGAYDLYDLGEFNQKGTVRTKYGTRSQLQAAVTSLKNNGIQVYGDVVMNHKGGADATEMVRAVEVNPNNRNQEVTGEYTIEAWTRFDFPGRGNTHSSFKWRWYHFDGVDWDQSRNLTNRIYKFRGHGKAWDWEVDTEFGNYDYLMYTDYDMDHPEVVNELRNWGVWYTNTLGLDGFRIDAVKHIKYSFTRDWINHVRSATGKNMFAVAEFWKNDLGAIENYLQKTNWNHSVFDVPLHYNLYNASKSGGNYDMRNIFNGTVVQRHPSHAVTFVDNHDSQPEEALESFVDPWFKPLAYALTLTREQGYPSVFYGDYYGIPTHGVPAMRSKIDPILEARQKYAYGPQHDYLDHPDVIGWTREGDSSHPKSGLATLITDGPGGSKRMYAGLKNAGETWYDITGNRSDTVKIGSDGWGEFHVNGGSVSIYVQK

SEQ ID NO: 29295 - protein, 485 aa, Bacillus sp.
HHNGTNGTMMQYFEWYLPNDGNHWNRLNSDASNLKSKGITAVWIPPAWKALSQNDVGYGAYDLYDLGEFNQKGTVRTKYGTRSQLQAAVTSLKNNGIQVYGDVVMNHKGGADATEMVRAVEVNPNNRNQEVTGEYTIEAWTRFDFPGRGNTHSSFKWRWYHFDGVDWDQSRRTTNRIYKFRGHGKAWDWEVDTEFGNYDYLMYTDYDMDHPEVVNELRNWGVWYTNTLGLDGFRIDAVKHIKYSFTRDWINHVRSATGKNMFAVAEFWKNDLGAIENYLQKTNWNHSVFDVPLHYNLYNASKSGGNYDMRNIFNGTVVQRHPSHAVTFVDNHDSQPEEALESFVEEWFKPLAYALTLTREQGYPSVFYGDYYGIPTHGVPAMRSKIDPILEARQKYAYGPQHDYLDHPDVIGWTREGDSSHPKSGLATLITDGPGGSKRMYAGLKNAGETWYDITGNRSDTVKIGSDGWGEFHVNDGSVSIYVQK

SEQ ID NO: 29296 - protein, 485 aa, Bacillus sp.
HHNGTNGTMMQYFEWYLPNDGNHWNRLNSDASNLKSKGIKAVWIPPAWKGASQNDVGYGAYDLYDLGEFNQRGTVRTKYGTRSQLQAAVTSLKNNGIQVYGDVVMNHKGGADATEMVRAVEVNPNNRNQEVTGEYTIEAWTRFDFPGRGNTHSSFKWRWYHFDGVDWDQSRNFQNRIYKFRGHGKAWDWEVDTEFGNYDYLMYADYDMDHPEVVNELRNWGVWYTNTLGLDGFRIDAVKHIKYSFTRDWINHVRSATGKNMFAVAEFWKNDLGAIENYLQKTNWNHSVFDVPLHYNLYNASKSQGNYDMRNIFNGTVVQRHPSHAVTFVDNHDSQPEEALESFVDTWFKPLAYALTLTREQGYPSVFYGDYYGIPTHGVPAMRSKIDPILEARQKYAYGPQHDYLDHPDVIGWTREGDSSHPKSGLATLITDGPGGSKRMYAGLKNAGETWYDITGNRSDTVKIGSDGWGEFHVNGSSVSIYVQK

SEQ ID NO: 29297 - protein, 483 aa, Bacillus sp.
HHNGTNGTMMQYFEWYLPNDGNHWNRLNSDASNLKSKGITAVWIPPAWKATSQNDVGYGAYDLYDLGEFNQKGTVRTKYGTRSQLQAAVTSLKNNGIQVYGDVVMNHKGGADATEMVRAVEVNPNNRNQEVTGEYTIEAWTRFDFPGRGNTHSSFKWRWYHFDGVDWDQSRRLSNRIYKFRGKAWDWEVDTEFGNYDYLMYTDYDMDHPEVVNELRNWGVWYTNTLGLDGFRIDAVKHIKYSFTRDWINHVRIATGKNMFAVAEFWKNDLGAIENYLQKTNWNHSVFDVPLHYNLYNASKSGGNYDMRNIFNGTVVQRHPSHAVTFVDNHDSQPEEALESFVDEWFKPLAYALTLTREQGYPSVFYGDYYGIPTHGVPAMRSKIDPILEARQKYAYGPQHDYLDHPDVIGWTREGDSSHPKSGLATLITDGPGGSKRMYAGLKNAGETWYDITGNRSDTVKIGSDGWGEFHVNDQSVSIYVQK

SEQ ID NO: 29298 - protein, 483 aa, Bacillus sp.
HHNGTNGTMMQYFEWYLPNDGNHWNRLNSDASNLKSKGITAVWIPPAWKGASQNDVGYGAYDLYDLGEFNQKGTVRTKYGTRSQLQAAVTSLKNNGIQVYGDVVMNHKGGADYTEMVRAVEVNPNNRNQEVTGEYTIEAWTRFDFPGRGNTHSSFKWRWYHFDGVDWDQSERLNNRIYKFRGKAWDWEVDTEFGNYDYLMYADYDMDHPEVVNELRNWGVWYTNTLGLDGFRIDAVKHIKYSFTRDWINHVRSATGKNMFAVAEFWKNDLGAIENYLQKTNWNHSVFDVPLHYNLYNASKSGGNYDMRNIFNGTVVQRHPSHAVTFVDNHDSQPEEALESFVEEWFKPLAYALTLTREQGYPSVFYGDYYGIPTHGVPAMRSKIDPILEARQKYAYGPQHDYLDHPDVIGWTREGDSSHPKSGLATLITDGPGGSKRMYAGLKNAGETWYDITGNRSDTVKIGSDGWGEFHVNDGSVSIYVQK

SEQ ID NO: 29299 - protein, 483 aa, Bacillus sp.
HHNGTNGTMMQYFEWYLPNDGNHWNRLNSDASNLKSKGITAVWIPPAWKGASQNDVGYGAYDLYDLGEFNQKGTVRTKYGTRSQLQAAVTSLKNNGIQVYGDVVMNHKGGADATEMVRAVEVNPNNRNQEVTGEYTIEAWTRFDFPGRGNTHSSFKWRWYHFDGVDWDQSRRLNNRIYKFRGKAWDWEVDTEFGNYDYLMYADYDMDHPEVVNELRNWGVWYTNTLGLDGFRIDAVKHIKYSFTRDWINHVRSATGKNMFAVAEFWKNDLGAIENYLQKTNWNHSVFDVPLHYNLYNASKSGGNYDMRNIFNGTVVQRHPSHAVTFVDNHDSQPEEALESFVETWFKPLAYALTLTREQGYPSVFYGDYYGIPTHGVPAMRSKIDPILEARQKYAYGPQHDYLDHPDVIGWTREGDSSHPKSGLATLITDGPGGSKRMYAGLKNAGETWYDITGNRSDTVKIGSDGWGEFHVNQKSVSIYVQK

SEQ ID NO: 29300 - protein, 483 aa, Synthetic construct
HHNGTNGTMMQYFEWYLPNDGNHWNRLNSDASNLKSKGITAVWIPPAWKGASQNDVGYGAYDLYDLGEFNQKGTVRTKYGTRSQLQAAVTSLKNNGIQVYGDVVMNHKGGADATEMVRAVEVNPNNRNQEVTGEYTIEAWTRFDFPGRGNTHSSFKWRWYHFDGVDWDQSRRLNNRIYKFRGKAWDWEVDTENGNYDYLMYADIDMDYPEAVNEQRNWGVWYTNTLGLDGFRIDAVKHIKYSFTRDWINHVRSATGKNMFAVAEFWKNDLGAIENYLQKTNWNHSVFDVPLHYNLYNASKSGGNYDMRNIFNGTVVQRHPSHAVTFVDNHDSQPEEALESFVEEWFKPLAYALTLTREQGYPSVFYGDYYGIPTHGVPAMRSKIDPILEARQKYAYGPQHDYLDHPDVIGWTREGDSSHPKSGLATLITDGPGGSKRMYAGLKNAGETWYDITGNRSDTVKIGSDGWGEFHVNDGSVSIYVQK

SEQ ID NO: 29301 - protein, 483 aa, Bacillus sp.
HHNGTNGTMMQYFEWYLPNDGNHWNRLNSDASNLKSKGITAVWIPPAWKGASQNDVGYGAYDLYDLGEFNQKGTVRTKYGTRSQLQAAVTSLKNNGIQVYGDVVMNHKGGADATEMVRAVEVNPNNRNQEVTGEYTIEAWTRFDFPGRGNTHSSFKWRWYHFDGVDWDQSREFTNRIYKFRGKAWDWEVDTEFGNYDYLMYVDYDMDHPEVVNELRNWGVWYTNTLGLDGFRIDAVKHIKYSFTRDWINHVRSATGKNMFAVAEFWKNDLGAIENYLQKTNWNHSVFDVPLHYNLYNASKSGGNYDMRNIFNGTVVQRHPSHAVTFVDNHDSQPEEALESFVDTWFKPLAYALTLTREQGYPSVFYGDYYGIPTHGVPAMRSKIDPILEARQKYAYGPQHDYLDHPDVIGWTREGDSSHPKSGLATLITDGPGGSKRMYAGLKNAGETWYDITGNRSDTVKIGSDGWGEFHVNDASVSIYVQK

SEQ ID NO: 29302 - protein, 483 aa, Bacillus sp.
HHNGTNGTMMQYFEWYLPNDGNHWNRLNSDASNLKSKGITAVWIPPAWKGASQNDVGYGAYDLYDLGEFNQKGTVRTKYGTRSQLQAAVTSLKNNGIQVYGDVVMNHKGGADATEMVRAVEVNPNNRNQEVTGEYTIEAWTRFDFPGRGNTHSSFKWRWYHFDGVDWDQSRRLNNRIYKFRGKAWDWEVDTEFGNYDYLMYADYDMDHPEVVNELRNWGVWYTNTLGLDGFRIDAVKHIKYSFTRDWINHVRSATGKNMFAVAEFWKNDLGAIENYLQKTNWNHSVFDVPLHYNLYNASKSGGNYDMRNIFNGTVVQRHPSHAVTFVDNHDSQPEEALESFVDPWFKPLAYALTLTREQGYPSVFYGDYYGIPTHGVPAMRSKIDPILEARQKYAYGPQHDYLDHPDVIGWTREGDSSHPKSGLATLITDGPGGSKRMYAGLKNAGETWYDITGNRSDTVKIGSDGWGEFHVNQASVSIYVQK

SEQ ID NO: 29303 - protein, 485 aa, Bacillus sp.
HHNGTNGTMMQYFEWYLPNDGNHWNRLNSDASNLKSKGITAVWIPPAWKGASQNDVGYGAYDLYDLGEFNQKGTVRTKYGTRSQLQAAVTSLKNNGIQVYGDVVMNHKGGADATEMVRAVEVNPNNRNQEVTGEYTIEAWTRFDFPGRGNTHSSFKWRWYHFDGVDWDQSRRLNNRIYKFRGHGKAWDWEVDTEFGNYDYLMYADYDMDHPEVVNELRNWGVWYTNTLGLDGFRIDAVKHIKYSFTRDWINHVRSATGKNMFAVAEFWQNDLGCIENYLQKTNWNHSVFDVPLHYNLYNASKSGGNYDMRNIFNGTVVQRHPSHAVTFVDNHDSQPEEALESFVEEWFKPLAYALTLTREQGYPSVFYGDYYGIPTHGVPAMRSKIDPILEARQKYAYGPQHDYLDHPDVIGWTREGDSSHPKSGLATLITDGPGGSKRMYAGLKNAGETWYDITGNRSDTVKIGSDGWGEFHVNDGSVSIYVQK

SEQ ID NO: 29304 - protein, 485 aa, Bacillus sp.
HHNGTNGTMMQYFEWYLPNDGNHWNRLNSDASNLKSKGITAVWIPPAWKGASQNDVGYGAYDLYDLGEFNQKGTVRTKYGTRSQLQAAVTSLKNNGIQVYGDVVMNHKGGADATEMVRAVEVNPNNRNQEVTGEYTIEAWTRFDFPGRGNTHSSFKWRWYHFDGVDWDQSRRLNNRIYKFRGHGKAWDWEVDTEFGNYDYLMYADYDMDHPEVVNELRNWGVWYTNTLGLDGFRIDAVKHIKYSFTRDWINHVRSATGKNMFAVAEFWKNDLGAIENYLQKTNWNHSVFDVPLHYNLYNASKSAGNYDMRNIFNGTVVQRHPSHAVTFVDNHDSQPEEALESFVDEWFKPLAYALTLTREQGYPSVFYGDYYGIPTHGVPAMRSKIDPILEARQKYAYGPQHDYLDHPDVIGWTREGDSSHPKSGLATLITDGPGGSKRMYAGLKNAGETWYDITGNRSDTVKIGSDGWGEFHVNKSSVSIYVQK

SEQ ID NO: 29305 - protein, 483 aa, Bacillus sp.
HHNGTNHTMMQYFEWYLPNDGNHWNRLNSDASNLKSKGITAVWIPPAWKGASQNDVGYGAYDLYDLGEFNQKGTVRTKYGTRSQLQAAVTSLKNNGISVYGDVVMNHKGGADATEMVRAVEVNPNNRNQEVTGEYTIEAWTRFDFPGRGNTHSSFKWRWYHFDGVDWDQSRRLNNRIYKFRGKAWDWEVDTEFGNYDYLMYADYDMDHPEVVNELRNWGVWYTNTLGLDGFRIDAVKHIKYSFTRDWINHVRSATGKNMFAVAEFWKNDLGAIENYLQKTNWNHSVFDVPLHYNLYNASKSGGNYDMRNIFNGTVVQAHPMLAVTFVDNHDSQPEEALESFVEEWFKPLAYALTLTREQGYPSVFYGDYYGIPTHGVPAMRSKIDPILEARQKYAYGPQHDYLDHPDVIGWTREGDSSHPKSGLATLITDGPGGSKRMYAGLKNAGETWYDITGNRSDTVKIGSDGWGEFHVNDGSVSIYVQK

SEQ ID NO: 29306 - protein, 483 aa, Bacillus sp.
HHNGTNGTMMQYFEWYLPNDGNHWNRLNSDASNLKSKGITAVWIPPAWKGASQNDVGYGAYDLYDLGEFNQKGTVRTKYGTRSQLQAAVTSLKNNGIQVYGDVVMNHKGGADATEMVRAVEVNPNNRNQEVTGEYTIEAWTRFDFPGRGNTHSSFKWRWYHFDGVDWDQSRRLNNRIYKFRSKVWDWEVDTEFGNYDYLMYADYDMDHPEVVNELRNWGVWYTNTLGLDGFRIDAVKHIKYSFTRDWINHVRSATGKNMFAVAEFWKNDLGAIENYLQKTNWNHSVFDVPLHYNLYNASKSGGNYDMRNIFNGTVVQRHPSHAVTFVDNHDSQPEEALESFVEEWFKPLAYALTLTREQGYPSVFYGDYYGIPTHGVPAMRSKIDPILEARQKYAYGPQHDYLDHPDVIGWTREGDSSHPKSGLATLITDGPGGSKRMYAGLKNAGETWYDITGNRSDTVKIGSDGWGEFHVNDGSVSIYVQK

SEQ ID NO: 29307 - protein, 483 aa, Bacillus sp.
HHNGTNGTMMQYFEWYLPNDGNHWNRLNSDASNLKSKGITAVWIPPAWKGASQNDVGYGAYDLYDLGEFNQKGTVRTKYGTRSQLQAAVTSLKNNGIQVYGDVVMNHKGGADVTEMVRAVEVNPNNRNQEVTGEYTIEAWTRFDFPGRGNTHSSFKWRWYHFDGVDWDQSRRLNNRIYKFRGKAWDWEVDTEFGNYDYLMYADYDMDHPEVVNELRNWGVWYTNTLGLDGFRIDAVKHIKYSFTRDWINHVRSATGKNMFAVAEFWKNDLGAIENYLQKTNWNHSVFDVPLHYNLYNASKSGGNYDMRNIFNGTVVQRHPSHAVTFVDNHDSQPEEALESFVEPWFKPLAYALTLTREQGYPSVFYGDYYGIPTHGVPAMRSKIDPILEARQKYAYGPQHDYLDHPDVIGWTREGDSSHPKSGLATLITDGPGGSKRMYAGLKNAGETWYDITGNRSDTVKIGSDGWGEFHVNGKSVSIYVQK

SEQ ID NO: 29308 - protein, 483 aa, Bacillus sp.
HHNGTNGTMMQYFEWYLPNDGNHWNRLNSDASNLKSKGITAVWIPPAWKGASQNDVGYGAYDLYDLGEFNQKGTVRTKYGTRSQLQAAVTSLKNNGIQVYGDVVMNHKGGADATEMVRAVEVNPNNRNQEVTGEYTIEAWTRFDFPGRGNTHSSFKWRWYHFDGVDWDQSREFDNRIYKFRGKAWDWEVDTEFGNYDYLMYADYDMDHPEVVNELRNWGVWYTNTLGLDGFRIDAVKHIKYSFTRDWINHVRSATGKNMFAVAEFWKNDLGAIENYLQKTNWNHSVFDVPLHYNLYNASKSGGNYDMRNIFNGTVVQRHPSHAVTFVDNHDSQPEEALESFVETWFKPLAYVLTLTREQGYPSVFYGDYYGIPTHGVPAMRSKIDPILEARQKYAYGPQHDYLDHPDVIGWTREGDSSHPKSGLATLITDGPGGSKRMYAGLKNAGETWYDITGNRSDTVKIGSDGWGEFHVNDASVSIYVQK

SEQ ID NO: 29309 - protein, 483 aa, Bacillus sp.
HHNGTNGTMMQYFEWYLPNDGNHWNRLNSDASNLKSKGITAVWIPPAWKGASQNDVGYGAYDLYDLGEFNQKGTVRTKYGTRSQLQAAVTSLKNNGIQVYGDVVMNHKGGADATEMVRAVEVNPNNRNQEVTGEYTIEAWTRFDFPGRGNTHSSFKWRWYHFDGVDWDQSRRLNNRIYKFRGKAWDWEVDTEFGNYDYLMYADYDMDHPEVVNELRNWGVWYTNTLGLDGFRIDAVKHIKYSFTRDWINHVRSATGKNMFAVAEFWKNDLGAIENYLQKTNWNHSVFDVPLHYNLYNASQSGGNYDMRNIFNGTVVQRHPSHAVTFVDNHDSQPEEALESFVEPWFKPLAYALTLTREQGYPSVFYGDYYGIPTHGVPAMRSKIDPILEARQKYAYGPQHDYLDHPDVIGWTREGDSSHPKSGLATLITDGPGGSKRMYAGLKNAGETWYDITGNRSDTVKIGSDGWGEFHVNDASVSIYVQK

SEQ ID NO: 29310 - protein, 485 aa, Bacillus sp.
HHNGTNGTMMQYFEWYLPNDGNHWNRLNSDASNLKSKGITAVWIPPAWKAASQNDVGYGAYDLYDLGEFNQKGTVRTKYGTRSQLQAAVTSLKNNGIQVYGDVVMNHKGGADATEMVRAVEVNPNNRNQEVTGEYTIEAWTRFDFPGRGNTHSSFKWRWYHFDGVDFDQSRQITNRIYKFRGHGKAWDWEVDTEFGNYDYLMYTDYDMDHPEVVNELRNWGVWYTNTLGLDGFRIDAVKHIKYSFTRDWINHVRSATGKNMFAVAEFWKNDLGAIENYLQKTNWNHSVFDVPLHYNLYNASKSGGNYDMRNIFNGTVVQRHPSHAVTFVDNHDSQPEEALESFVEEWFKPLAYALTLTREQGYPSVFYGDYYGIPTHGVPAMRSKIDPILEARQKYAYGPQHDYLDHPDVIGWTREGDSSHPKSGLATLITDGPGGSKRMYAGLKNAGETWYDITGNRSDTVKIGSDGWGEFHVNDGSVSIYVQK

SEQ ID NO: 29311 - protein, 483 aa, Bacillus sp.
HHNGTNGTMMQYFEWYLPNDGNHWNRLNSDASNLKSKGITAVWIPPAWKGASQNDVGYGAYDLYDLGEFNQKGTVRTKYGTRSQLQAAVTSLKNNGIQVYGDVVMNHKGGADATEMVRAVEVNPNNRNQEVTGEYTIEAWTRFDFPGRGNTHSSFKWRWYHFDGVDWDQSRRLNNRIYKFRGKAWDWEVDTEFGNYDYLMYADYDMDHPEVVNELRNWGVWYTNTLGLDGFRIDAVKHIKYSFTRDWINHVRSATGKNMFAVAEFWKNDLGAIENYLQKTNWNHSVFDVPLHYNLYNASKSAGNYDMRNIFNGTVVQRHPSHAVTFVDNHDSQPEEALESFVDEWFKPLAYALTLTREQGYPSVFYGDYYGIPTHGVPAMRSKIDPILEARQKYAYGPQHDYLDHPDVIGWTREGDSSHPKSGLATLITDGPGGSKRMYAGLKNAGETWYDITGNRSDTVKIGSDGWGEFHVNQASVSIYVQK

SEQ ID NO: 29312 - protein, 483 aa, Bacillus sp.
HHNGTNGTMMQYFEWYLPNDGNHWNRLNSDASNLKSKGIKAVWIPPAWKGASQNDVGYGAYDLYDLGEFNQKGTVRTKYGTRSQLQAAVTSLKNNGIQVYGDVVMNHKGGADATEMVRAVEVNPNNRNQEVTGEYTIEAWTRFDFPGRGNTHSSFKWRWYHFDGVDWDQSRRLNNRIYKFRGKAWDWEVDTEFGNYDYLMYADYDMDHPEVVNELRNWGVWYTNTLGLDGFRIDAVKHIKYSFTRDWINHVRSATGKNMFAVAEFWKNDLGAIENYLQKTNWNHSVFDVPLHYNLYNASKSGGNYDMRNIFNGTVVQRHPSHAVTFVDNHDSQPEEALESFVETWFKPLAYALTLTREQGYPSVFYGDYYGIPTHGVPAMRSKIDPILEARQKYAYGPQHDYLDHPDVIGWTREGDSSHPKSGLATLITDGPGGSKRMYAGLKNAGETWYDITGNRSDTVKIGSDGWGEFHVNDGSVSIYVQK

SEQ ID NO: 29313 - protein, 485 aa, Bacillus sp.
HHNGTNGTMMQYFEWYLPNDGNHWNRLNSDASNLKSKGITAVWIPPAWKAVSQNDVGYGAYDLYDLGEFNQKGTVRTKYGTRSQLQAAVTSLKNNGIQVYGDVVMNHKGGADATEMVRAVEVNPNNRNQEVTGEYTIEAWTRFDFPGRGNTHSSFKWRWYHFDGVDWDQSRNLTNRIYKFRGHGKAWDWEVDTEFGNYDYLMYTDYDMDHPEVVNELRNWGVWYTNTLGLDGFRIDAVKHIKYSFTRDWINHVRSATGKNMFAVAEFWKNDLGAIENYLQKTNWNHSVFDVPLHYNLYNASKSGGNYDMRNIFNGTVVQRHPSHAVTFVDNHDSQPEEALESFVEEWFKPLAYALTLTREQGYPSVFYGDYYGIPTHGVPAMRSKIDPILEARQKYAYGPQHDYLDHPDVIGWTREGDSSHPKSGLATLITDGPGGSKRMYAGLKNAGETWYDITGNRSDTVKIGSDGWGEFHVNDGSVSIYVQK

SEQ ID NO: 29314 - protein, 483 aa, Bacillus sp.
HHNGTNGTMMQYFEWYLPNDGNHWNRLNSDASNLKSKGITAVWIPPAWKGASQNDVGYGAYDLYDLGEFNQKGTVRTKYGTRSQLQAAVTSLKNNGIQVYGDVVMNHKGGADATEMVRAVEVNPNNRNQEVTGEYTIEAWTRFDFPGRGNTHSSFKWRWYHFDGVDWDQSRRLNNRIYKFRGKAWDWEVDTEFGNYDYLMYADYDMDHPEVVNELRNWGVWYTNTLGLDGFRIDAVKHIKYSFTRDWINHVRSATGKNMFAVAEFWQNDLGHIENYLQKTNWNHSVFDVPLHYNLYNASKSGGNYDMRNIFNGTVVQRHPSHAVTFVDNHDSQPEEALESFVEEWFKPLAYALTLTREQGYPSVFYGDYYGIPTHGVPAMRSKIDPILEARQKYAYGPQHDYLDHPDVIGWTREGDSSHPKSGLATLITDGPGGSKRMYAGLKNAGETWYDITGNRSDTVKIGSDGWGEFHVNDGSVSIYVQK

SEQ ID NO: 29315 - protein, 483 aa, Bacillus sp.
HHNGTNGTMMQYFEWYLPNDGNHWNRLNSDASNLKSKGITAVWIPPAWKATSQNDVGYGAYDLYDLGEFNQKGTVRTKYGTRSQLQAAVTSLKNNGIQVYGDVVMNHKGGADATEMVRAVEVNPNNRNQEVTGEYTIEAWTRFDFPGRGNTHSSFKWRWYHFDGVDWDQSRDLNNRIYKFRGKAWDWEVDTEFGNYDYLMYADYDMDHPEVVNELRNWGVWYTNTLGLDGFRIDAVKHIKYSFTRDWINHVRSATGKNMFAVAEFWKNDLGAIENYLQKTNWNHSVFDVPLHYNLYNASQSGGNYDMRNIFNGTVVQRHPSHAVTFVDNHDSQPEEALESFVEPWFKPLAYALTLTREQGYPSVFYGDYYGIPTHGVPAMRSKIDPILEARQKYAYGPQHDYLDHPDVIGWTREGDSSHPKSGLATLITDGPGGSKRMYAGLKNAGETWYDITGNRSDTVKIGSDGWGEFHVNKSSVSIYVQK

SEQ ID NO: 29316 - protein, 483 aa, Bacillus sp.
HHNGTNGTMMQYFEWYLPNDGNHWNRLNSDASNLKSKGITAVWIPPAWKGASQNDVGYGAYDLYDLGEFNQKGTVRTKYGTRSQLQAAVTSLKNNGIQVYGDVVMNHKGGADATEMVRAVEVNPNNRNQEVTGEYTIEAWTRFDFPGRGNTHSSFKWRWYHFDGVDWDQSRKLNNRIYKFRGKAWDWEVDTEFGNYDYLMYVDYDMDHPEVVNELRNWGVWYTNTLGLDGFRIDAVKHIKYSFTRDWINHVRSATGKNMFAVAEFWKNDLGAIENYLQKTNWNHSVFDVPLHYNLYNASKSGGNYDMRNIFNGTVVQRHPSHAVTFVDNHDSQPEEALESFVDEWFKPLAYALTLTREQGYPSVFYGDYYGIPTHGVPAMRSKIDPILEARQKYAYGPQHDYLDHPDVIGWTREGDSSHPKSGLATLITDGPGGSKRMYAGLKNAGETWYDITGNRSDTVKIGSDGWGEFHVNKSSVSIYVQK

SEQ ID NO: 29317 - protein, 483 aa, Bacillus sp.
HHNGTNGTMMQYFEWYLPNDGNHWNRLNSDASNLKSKGITAVWIPPAWKGASQNDVGYGAYDLYDLGEFNQKGTVRTKYGTRSQLQAAVTSLKNNGIQVYGDVVMNHKGGADATEMVRAVEVNPNNRNQEVTGEYTIEAWTRFDFPGRGNTHSSFKWRWYHFDGVDWDQSRRLNNRIYKFRGKAWDWEVDTEFGNYDYLMYADYDMDHPEVVNELRNWGVWYTNTLGLDGFRIDAVKHIKYSFTRDWINHVRSATGKNMFAVAEFWKNDLGAIENYLQKTNWNHSVFDVPLHYNLYNASKSQGNYDMRNIFNGTVVQRHPSHAVTFVDNHDSQPEEALESFVDTWFKPLAYALTLTREQGYPSVFYGDYYGIPTHGVPAMRSKIDPILEARQKYAYGPQHDYLDHPDVIGWTREGDSSHPKSGLATLITDGPGGSKRMYAGLKNAGETWYDITGNRSDTVKIGSDGWGEFHVNGTSVSIYVQK

SEQ ID NO: 29318 - protein, 483 aa, Bacillus sp.
HHNGTNGTMMQYFEWYLPNDGNHWNRLNSDASNLKSKGITAVWIPPAWKAVSQNDVGYGAYDLYDLGEFNQKGTVRTKYGTRSQLQAAVTSLKNNGIQVYGDVVMNHKGGADLTEMVRAVEVNPNNRNQEVTGEYTIEAWTRFDFPGRGNTHSSFKWRWYHFDGVDWDQSREFTNRIYKFRGKAWDWEVDTEFGNYDYLMYVDYDMDHPEVVNELRNWGVWYTNTLGLDGFRIDAVKHIKYSFTRDWINHVRSATGKNMFAVAEFWKNDLGAIENYLQKTNWNHSVFDVPLHYNLYNASKSGGNYDMRNIFNGTVVQRHPSHAVTFVDNHDSQPEEALESFVEEWFKPLAYALTLTREQGYPSVFYGDYYGIPTHGVPAMRSKIDPILEARQKYAYGPQHDYLDHPDVIGWTREGDSSHPKSGLATLITDGPGGSKRMYAGLKNAGETWYDITGNRSDTVKIGSDGWGEFHVNDGSVSIYVQK

SEQ ID NO: 29319 - protein, 483 aa, Bacillus sp.
HHNGTNGTMMQYFEWYLPNDGNHWNRLNSDASNLKSKGITAVWIPPAWKGASQNDVGYGAYDLYDLGEFNQKGTVRTKYGTRSQLQAAVTSLKNNGIQVYGDVVMNHKGGADATEMVRAVEVNPNNRNQEVTGEYTIEAWTRFDFPGRGNTHSSFKWRWYHFDGVDFDQSRQLNNRIYKFRGKAWDWEVDTEFGNYDYLMYADYDMDHPEVVNELRNWGVWYTNTLGLDGFRIDAVKHIKYSFTRDWINHVRSATGKNMFAVAEFWKNDLGAIENYLQKTNWNHSVFDVPLHYNLYNASKSGGNYDMRNIFNGTVVQRHPSHAVTFVDNHDSQPEEALESFVETWFKPLAYALTLTREQGLPSVFYGDYYGIPTHGVPAMRSKIDPILEARQKYAYGPQHDYLDHPDVIGWTREGDSSHPKSGLATLITDGPGGSKRMYAGLKNAGETWYDITGNRSDTVKIGSDGWGEFHVNDGSVSIYVQK

SEQ ID NO: 29320 - protein, 483 aa, Bacillus sp.
HHNGTNGTMMQYFEWYLPNDGNHWNRLNSDASNLKSKGITAVWIPPAWKAISQNDVGYGAYDLYDLGEFNQKGTVRTKYGTRSQLQAAVTSLKNNGIQVYGDVVMNHKGGADATEMIRAVEVNPNNRNQEVTGEYTIEAWTRFDFPGRGNTHSSFKWRWYHFDGVDWDQSRELNNRIYKFRGKAWDWEVDTEFGNYDYLMYADYDMDHPEVVNELRNWGVWYTNTLGLDGFRIDAVKHIKYSFTRDWINHVRSATGKNMFAVAEFWKNDLGAIENYLQKTNWNHSVFDVPLHYNLYNASKSGGNYDMRNIFNGTVVQRHPSHAVTFVDNHDSQPEEALESFVEEWFKPLAYALTLTREQGYPSVFYGDYYGIPTHGVPAMRSKIDPILEARQKYAYGPQHDYLDHPDVIGWTREGDSSHPKSGLATLITDGPGGSKRMYAGLKNAGETWYDITGNRSDTVKIGSDGWGEFHVNDGSVSIYVQK

SEQ ID NO: 29321 - protein, 483 aa, Bacillus sp.
HHNGTNKTMMQYFEWYLPNDGNHWNRLNSDASNLKSKGITAVWIPPAWKGASQNDVGYGAYDLYDLGEFNQKGTVRTKYGTRSQLQAAVTSLKNNGIQVYGDVVMNHKGGADATEMVRAVEVNPNNRNQEVTGEYTIEAWTRFDFPGRGNTHSSFKWRWYHFDGVDWDQSRRLNNRIYKFRGKAWDWEVDTEFGNYDYLMYADYDMDHPEVVNELRNWGVWYTNTLGLDGFRIDAVKHIKYSFTRDWINHVRSATGKNMFAVAEFWKNDLGAIENYLQKTNWNHSVFDVPLHYNLYNASKSGGNYDMRNIFNGTVVQMQPSHAVTFVDNHDSQPEEALESFVEEWFKPLAYALTLTREQGYPSVFYGDYYGIPTHGVPAMRSKIDPILEARQKYAYGPQHDYLDHPDVIGWTREGDSSHPKSGLATLITDGPGGSKRMYAGLKNAGETWYDITGNRSDTVKIGSDGWGEFHVNDGSVSIYVQK

SEQ ID NO: 29322 - protein, 485 aa, Bacillus sp.
HHNGTNGTMMQYFEWYLPNDGNHWNRLNSDASNLKSKGITAVWIPPAWKGASQNDVGYGAYDLYDLGEFNQKGTVRTKYGTRSQLQAAVTSLKNNGINVYGDVVMNHKGGADLTEMVRAVEVNPNNRNQEVTGEYTIEAWTRFDFPGRGNTHSSFKWRWYHFDGVDWDQSRRLNNRIYKFRGHGKAWDWEVDTEFGNYDYLMYADYDMDHPEVVNELRNWGVWYTNTLGLDGFRIDAVKHIKYSFTRDWINHVRSATGKNMFAVAEFWKNDLGAIENYLQKTNWNHSVFDVPLHYNLYNASKSVGNYDMRNIFNGTVVQAHPMHAVTFVDNHDSQPEEALESFVEEWFKPLAYALTLTREQGYPSVFYGDYYGIPTHGVPAMRSKIDPILEARQKYAYGPQHDYLDHPDVIGWTREGDSSHPKSGLATLITDGPGGSKRMYAGLKNAGETWYDITGNRSDTVKIGSDGWGEFHVNDGSVSIYVQK

SEQ ID NO: 29323 - protein, 483 aa, Bacillus sp.
HHNGTNGTMMQYFEWYLPNDGNHWNRLNSDASNLKSKGITAVWIPPAWKGASQNDVGYGAYDLYDLGEFNQKGTVRTKYGTRSQLQAAVTSLKNNGIQVYGDVVMNHKGGADATEMVRAVEVNPNNRNQEVTGEYTIEAWTRFDFPGRGNTHSSFKWRWYHFDGVDWDQSRRLNNRIYKFRGKAWDWEVDTEFGNYDYLMYADYDMDHPEVVNELRNWGVWYTNTLGLDGFRIDAVKHIKYSFTRDWINHVRSATGKNMFAVAEFWKNDLGAIENYLQKTNWNHSVFDVPLHYNLYNASKSGGNYDMRNIFNGTVVQRHPSHAVTFVDNHDSQPEEALESFVDPWFKPLAYALTLTREQGYPSVFYGDYYGIPTHGVPAMRSKIDPILEARQKYAYGPQHDYLDHPDVIGWTREGDSSHPKSGLATLITDGPGGSKRMYAGLKNAGETWYDITGNRSDTVKIGSDGWGEFHVNQQSVSIYVQK

SEQ ID NO: 29324 - protein, 485 aa, Bacillus sp.
HHNGTNGTMMQYFEWYLPNDGNHWNRLNSDASNLKSKGITAVWIPPAWKGASQNDVGYGAYDLYDLGEFNQKGTVRTKYGTRSQLQAAVTSLKNNGIQVYGDVVMNHKGGADATEMVRAVEVNPNNRNQEVTGEYTIEAWTRFDFPGRGNTHSSFKWRWYHFDGVDWDQSRRLNNRIYKFRGHGKAWDWEVDTEFGNYDYLMYADYDMDHPEVVNELRNWGVWYTNTLGLDGFRIDAVKHIKYSFTRDWINHVRSATGKNMFAVAEFWKNDLGAIENYLQKTNWNHSVFDVPLHYNLYNASKSGGNYDMRNIFNGTVVQRHPSHAVTFVDNHDSQPEEALESFVEPWFKPLAYALTLTREQGYPSVFYGDYYGIPTHGVPAMRSKIDPILEARQKYAYGPQHDYLDHPDVIGWTREGDSSHPKSGLATLITDGPGGSKRMYAGLKNAGETWYDITGNRSDTVKIGSDGWGEFHVNDTSVSIYVQK

SEQ ID NO: 29325 - protein, 483 aa, Bacillus sp.
HHNGTNGTMMQYFEWYLPNDGNHWNRLNSDASNLKSKGITAVWIPPAWKGASQNDVGYGAYDLYDLGEFNQKGTVRTKYGTRSQLQAAVTSLKNNGIQVYGDVVMNHKGGADLTEMVRAVEVNPNNRNQEVTGEYTIEAWTRFDFPGRGNTHSSFKWRWYHFDGVDWDQSRRLNNRIYKFRGKAWDWEVDTEFGNYDYLMYADYDMDHPEVVNELRNWGVWYTNTLGLDGFRIDAVKHIKYSFTRDWINHVRIATGKNMFAVAEFWKNDLGAIENYLQKTNWNHSVFDVPLHYNLYNASKSGGNYDMRNIFNGTVVQRHPSHAVTFVDNHDSQPEEALESFVDEWFKPLAYALTLTREQGYPSVFYGDYYGIPTHGVPAMRSKIDPILEARQKYAYGPQHDYLDHPDVIGWTREGDSSHPKSGLATLITDGPGGSKRMYAGLKNAGETWYDITGNRSDTVKIGSDGWGEFHVNDQSVSIYVQK

SEQ ID NO: 29326 - protein, 483 aa, Bacillus sp.
HHNGTNGTMMQYFEWYLPNDGNHWNRLNSDASNLKSKGITAVWIPPAWKATSQNDVGYGAYDLYDLGEFNQKGTVRTKYGTRSQLQAAVTSLKNNGIQVYGDVVMNHKGGADATEMVRAVEVNPNNRNQEVTGEYTIEAWTRFDFPGRGNTHSSFKWRWYHFDGVDWDQSRNVNNRIYKFRGKAWDWEVDTEFGNYDYLMYADYDMDHPEVVNELRNWGVWYTNTLGLDGFRIDAVKHIKYSFTRDWINHVRSATGKNMFAVAEFWKNDLGAIENYLQKTNWNHSVFDVPLHYNLYNASKSQGNYDMRNIFNGTVVQRHPSHAVTFVDNHDSQPEEALESFVDTWFKPLAYALTLTREQGYPSVFYGDYYGIPTHGVPAMRSKIDPILEARQKYAYGPQHDYLDHPDVIGWTREGDSSHPKSGLATLITDGPGGSKRMYAGLKNAGETWYDITGNRSDTVKIGSDGWGEFHVNGTSVSIYVQK

SEQ ID NO: 29327 - protein, 483 aa, Bacillus sp.
HHNGTNGTMMQYFEWYLPNDGNHWNRLNSDASNLKSKGITAVWIPPAWKGASQNDVGYGAYDLYDLGEFNQKGTVRTKYGTRSQLQAAVTSLKNNGIQVYGDVVMNHKGGADATEMVRAVEVNPNNRNQEVTGEYTIEAWTRFDFPGRGNTHSSFKWRWYHFDGVDWDQSRRLNNRIYKFRGKAWDWEVDTEFGNYDYLMYADYDMDHPEVVNELRNWGVWYTNTLGLDGFRIDAVKHIKYSFTRDWINHVRSATGKNMFAVAEFWKNDLGAIENYLQKTNWNHSVFDVPLHYNLYNASKSGGNYDMRNIFNGTVVQRHPSHAVTFVDNHDSQPEEALESFVDTWFKPLAYALTLTREQGYPSVFYGDYYGIPTHGVPAMRSKIDPILEARQKYAYGPQHDYLDHPDVIGWTREGDSSHPKSGLATLITDGPGGSKRMYAGPKNAGETWYDITGNRSDTVKIGSDGWGEFHVNDKSVSIYVQK

SEQ ID NO: 29328 - protein, 483 aa, Bacillus sp.
HHNGTNGTMMQYFEWYLPNDGNHWNRLNSDASNLKSKGITAVWIPPAWKAVSQNDVGYGAYDLYDLGEFNQKGTVRTKYGTRSQLQAAVTSLKNNGIQVYGDVVMNHKGGADATEMVRAVEVNPNNRNQEVTGEYTIEAWTRFDFPGRGNTHSSFKWRWYHFDGVDWDQSRNLTNRIYKFRGKAWDWEVDTEFGNYDYLMYTDYDMDHPEVVNELRNWGVWYTNTLGLDGFRIDAVKHIKYSFTRDWINHVRSATGKNMFAVAEFWKNDLGAIENYLQKTNWNHSVFDVPLHYNLYNASKSGGNYDMRNIFNGTVVQRHPSHAVTFVDNHDSQPEEALESFVDPWFKPLAYALTLTREQGYPSVFYGDYYGIPTHGVPAMRSKIDPILEARQKYAYGPQHDYLDHPDVIGWTREGDSSHPKSGLATLITDGPGGSKRMYAGLKNAGETWYDITGNRSDTVKIGSDGWGEFHVNGGSVSIYVQK

SEQ ID NO: 29329 - protein, 483 aa, Bacillus sp.
HHNGTNGTMMQYFEWYLPNDGNHWNRLNSDASNLKSKGITAVWIPPAWKGASQNDVGYGAYDLYDLGEFNQKGTVRTKYGTRSQLQAAVTSLKNNGIQVYGDVVMNHKGGADATEMVRAVEVNPNNRNQEVTGEYTIEAWTRFDFPGRGNTHSSFKWRWYHFDGVDWDQSRRLNNRIYKFRGKAWDWEVDTEFGNYDYLMYADYDMDHPEVVNELRNWGVWYTNTLGLDGFRIDAVKHIKYSFTRDWINHVRSATGKNMFAVAEFWKNDLGAIENYLQKTNWNHSVFDVPLHYNLYNASKSGGNYDMRNIFNGTVVQRHPSHAVTFVDNHDSQPEEALESFVEPWFKPLAYALTLTREQGYPSVFYGDYYGIPTHGVPAMRSKIDPILEARQKYAYGPQHDYLDHPDVIGWTREGDSSHPKSGLATLITDGPGGSKRMYAGLKNAGETWYDITGNRSDTVKIGSDGWGEFHVNKTSVSIYVQK

SEQ ID NO: 29330 - protein, 485 aa, Synthetic construct
HHNGTNGTMMQYFEWYLPNDGNHWNRLNSDASNLKSKGITAVWIPPAWKGASQNDVGYGAYDLYDLGEFNQKGTVRTKYGTRSQLQAAVTSLKNNGIQVYGDVVMNHKGGADATEMVRAVEVNPNNRNQEVTGEYTIEAWTRFDFPGRGNTHSSFKWRWYHFDGVDWDQSRRLNNRIYLFRPHGKSWDWPVDTENGNYDYLMYADIDMDHPEVVNELRNWGVWYTNTLGLDGFRIDAVKHIKYSFTRDWINHVRSATGKNMFAVAEFWKNDLGAIENYLQKTNWNHSVFDVPLHYNLYNASKSGGNYDMRNIFNGTVVQRHPSHAVTFVDNHDSQPEEALESFVEEWFKPLAYALTLTREQGYPSVFYGDYYGIPTHGVPAMRSKIDPILEARQKYAYGPQHDYLDHPDVIGWTREGDSSHPKSGLATLITDGPGGSKRMYAGLKNAGETWYDITGNRSDTVKIGSDGWGEFHVNDGSVSIYVQK

SEQ ID NO: 29331 - protein, 483 aa, Bacillus sp.
HHNGTNGTMMQYFEWYLPNDGNHWNRLNSDASNLKSKGITAVWIPPAWKGASQNDVGYGAYDLYDLGEFNQKGTVRTKYGTRSQLQAAVTSLKNNGIQVYGDVVMNHKGGADATEMVRAVEVNPNNRNQEVTGEYTIEAWTRFDFPGRGNTHSSFKWRWYHFDGVDWDQSRRLNNRIYKFRGKAWDWEVDTENGNYDYLMYADIDYDYPEVVAELRMWGVWYTNTLGLDGFRIDAVKHIKYSFTRDWINHVRSATGKNMFAVAEFWKNDLGAIENYLQKTNWNHSVFDVPLHYNLYNASKSGGNYDMRNIFNGTVVQRHPSHAVTFVDNHDSQPEEALESFVEEWFKPLAYALTLTREQGYPSVFYGDYYGIPTHGVPAMRSKIDPILEARQKYAYGPQHDYLDHPDVIGWTREGDSSHPKSGLATLITDGPGGSKRMYAGLKNAGETWYDITGNRSDTVKIGSDGWGEFHVNDGSVSIYVQK

SEQ ID NO: 29332 - protein, 483 aa, Bacillus sp.
HHNGTNGTMMQYFEWYLPNDGNHWNRLNSDASNLKSKGITAVWIPPAWKGASQNDVGYGAYDLYDLGEFNQKGTVRTKYGTRSQLQAAVTSLKNNGIQVYGDVVMNHKGGADATEMVRAVEVNPNNRNQEVTGEYTIEAWTRFDFPGRGNTHSSFKWRWYHFDGVDWDQSRRLNNRIYKFRGKAWDWEVDTEFGNYDYLMYADYDMDHPEVVNELRNWGVWYTNTLGLDGFRIDAVKHIKYSFTRDWINHVRSATGKNMFAVAEFWKNDLGAIENYLQKTNWNHSVFDVPLHYNLYNASKSQGNYDMRNIFNGTVVQRHPSHAVTFVDNHDSQPEEALESFVEPWFKPLAYALTLTREQGYPSVFYGDYYGIPTHGVPAMRSKIDPILEARQKYAYGPQHDYLDHPDVIGWTREGDSSHPKSGLATLITDGPGGSKRMYAGLKNAGETWYDITGNRSDTVKIGSDGWGEFHVNGKSVSIYVQK

SEQ ID NO: 29333 - protein, 485 aa, Bacillus sp.
HHNGTNGTMMQYFEWYLPNDGNHWNRLNSDASNLKSKGITAVWIPPAWKAASQNDVGYGAYDLYDLGEFNQKGTVRTKYGTRSQLQAAVTSLKNNGIQVYGDVVMNHKGGADLTEMVRAVEVNPNNRNQEVTGEYTIEAWTRFDFPGRGNTHSSFKWRWYHFDGVDFDQSRQLNNRIYKFRGHGKAWDWEVDTEFGNYDYLMYADYDMDHPEVVNELRNWGVWYTNTLGLDGFRIDAVKHIKYSFTRDWINHVRSATGKNMFAVAEFWKNDLGAIENYLQKTNWNHSVFDVPLHYNLYNASKSGGNYDMRNIFNGTVVQRHPSHAVTFVDNHDSQPEEALESFVEEWFKPLAYALTLTREQGYPSVFYGDYYGIPTHGVPAMRSKIDPILEARQKYAYGPQHDYLDHPDVIGWTREGDSSHPKSGLATLITDGPGGSKRMYAGLKNAGETWYDITGNRSDTVKIGSDGWGEFHVNDGSVSIYVQK

SEQ ID NO: 29334 - protein, 485 aa, Bacillus sp.
HHNGTNGTMMQYFEWYLPNDGNHWNRLNSDASNLKSKGITAVWIPPAWKATSQNDVGYGAYDLYDLGEFNQKGTVRTKYGTRSQLQAAVTSLKNNGIQVYGDVVMNHKGGADLTEMVRAVEVNPNNRNQEVTGEYTIEAWTRFDFPGRGNTHSSFKWRWYHFDGVDFDQSRNVNNRIYKFRGHGKAWDWEVDTEFGNYDYLMYADYDMDHPEVVNELRNWGVWYTNTLGLDGFRIDAVKHIKYSFTRDWINHVRSATGKNMFAVAEFWKNDLGAIENYLQKTNWNHSVFDVPLHYNLYNASKSGGNYDMRNIFNGTVVQRHPSHAVTFVDNHDSQPEEALESFVEEWFKPLAYALTLTREQGYPSVFYGDYYGIPTHGVPAMRSKIDPILEARQKYAYGPQHDYLDHPDVIGWTREGDSSHPKSGLATLITDGPGGSKRMYAGLKNAGETWYDITGNRSDTVKIGSDGWGEFHVNDGSVSIYVQK

SEQ ID NO: 29335 - protein, 483 aa, Bacillus sp.
HHNGTNQTMMQYFEWYLPNDGNHWNRLNSDASNLKSKGITAVWIPPAWKGASQNDVGYGAYDLYDLGEFNQKGTVRTKYGTRSQLQAAVTSLKNNGITVYGDVVMNHKGGADATEMVRAVEVNPNNRNQEVTGEYTIEAWTRFDFPGRGNTHSSFKWRWYHFDGVDWDQSRRLNNRIYKFRGKAWDWEVDTEFGNYDYLMYADYDMDHPEVVNELRNWGVWYTNTLGLDGFRIDAVKHIKYSFTRDWINHVRSATGKNMFAVAEFWKNDLGAIENYLQKTNWNHSVFDVPLHYNLYNASKSGGNYDMRNIFNGTVVQAHPSHAVTFVDNHDSQPEEALESFVEEWFKPLAYALTLTREQGYPSVFYGDYYGIPTHGVPAMRSKIDPILEARQKYAYGPQHDYLDHPDVIGWTREGDSSHPKSGLATLITDGPGGSKRMYAGLKNAGETWYDITGNRSDTVKIGSDGWGEFHVNDGSVSIYVQK

SEQ ID NO: 29336 - protein, 483 aa, Bacillus sp.
HHNGTNLTMMQYFEWYLPNDGNHWNRLNSDASNLKSKGITAVWIPPAWKGASQNDVGYGAYDLYDLGEFNQKGTVRTKYGTRSQLQAAVTSLKNNGINVYGDVVMNHKGGADATEMVRAVEVNPNNRNQEVTGEYTIEAWTRFDFPGRGNTHSSFKWRWYHFDGVDWDQSRRLNNRIYKFRGKAWDWEVDTEFGNYDYLMYADYDMDHPEVVNELRNWGVWYTNTLGLDGFRIDAVKHIKYSFTRDWINHVRSATGKNMFAVAEFWKNDLGAIENYLQKTNWNHSVFDVPLHYNLYNASKSGGNYDMRNIFNGTVVQAHPNHAVTFVDNHDSQPEEALESFVEEWFKPLAYALTLTREQGYPSVFYGDYYGIPTHGVPAMRSKIDPILEARQKYAYGPQHDYLDHPDVIGWTREGDSSHPKSGLATLITDGPGGSKRMYAGLKNAGETWYDITGNRSDTVKIGSDGWGEFHVNDGSVSIYVQK

SEQ ID NO: 29337 - protein, 485 aa, Synthetic construct
HHNGTNGTMMQYFEWYLPNDGNHWNRLNSDASNLKSKGITAVWIPPAWKGASQNDVGYGAYDLYDLGEFNQKGTVRTKYGTRSQLQAAVTSLKNNGIQVYGDVVMNHKGGADATEMVRAVEVNPNNRNQEVTGEYTIEAWTRFDFPGRGNTHSSFKWRWYHFDGVDWDQSRRLNNRIYKFRGHGKAWDWEVDTEFGNYDYLMYADYDMDHPEPTNELRNWGVWYTNTLGLDGFRIDAVKHIKYSFTRDWINHVRSATGKNMFAVAEFWKNDLGAIENYLQKTNWNHSVFDVPLHYNLYNASKSGGNYDMRNIFNGTVVQRHPSHAVTFVDNHDSQPEEALESFVEEWFKPLAYALTLTREQGYPSVFYGDYYGIPTHGVPAMRSKIDPILEARQKYAYGPQHDYLDHPDVIGWTREGDSSHPKSGLATLITDGPGGSKRMYAGLKNAGETWYDITGNRSDTVKIGSDGWGEFHVNDGSVSIYVQK

SEQ ID NO: 29338 - protein, 483 aa, Bacillus sp.
HHNGTNGTMMQYFEWYLPNDGNHWNRLNSDASNLKSKGITAVWIPPAWKGASQNDVGYGAYDLYDLGEFNQKGTVRTKYGTRSQLQAAVTSLKNNGIQVYGDVVMNHKGGADATEMVRAVEVNPNNRNQEVTGEYTIEAWTRFDFPGRGNTHSSFKWRWYHFDGVDWDQSRRLNNRIYKFRGKAWDWEVDTEFGNYDYLMYADYDMDHPEVVNELRNWGVWYTNTLGLDGFRIDAVKHIKYSFTRDWINHVRSATGKNMFAVAEFWQNDLGRIENYLQKTNWNHSVFDVPLHYNLYNASKSGGNYDMRNIFNGTVVQRHPSHAVTFVDNHDSQPEEALESFVEEWFKPLAYALTLTREQGYPSVFYGDYYGIPTHGVPAMRSKIDPILEARQKYAYGPQHDYLDHPDVIGWTREGDSSHPKSGLATLITDGPGGSKRMYAGLKNAGETWYDITGNRSDTVKIGSDGWGEFHVNDGSVSIYVQK

SEQ ID NO: 29339 - protein, 485 aa, Bacillus sp.
HHNGTNQTMMQYFEWYLPNDGNHWNRLNSDASNLKSKGITAVWIPPAWKGASQNDVGYGAYDLYDLGEFNQKGTVRTKYGTRSQLQAAVTSLKNNGIQVYGDVVMNHKGGADATEMVRAVEVNPNNRNQEVTGEYTIEAWTRFDFPGRGNTHSSFKWRWYHFDGVDWDQSRRLNNRIYKFRGHGKAWDWEVDTEFGNYDYLMYADYDMDHPEVVNELRNWGVWYTNTLGLDGFRIDAVKHIKYSFTRDWINHVRSATGKNMFAVAEFWKNDLGAIENYLQKTNWNHSVFDVPLHYNLYNASKSGGNYDMRNIFNGTVVQSNPSHAVTFVDNHDSQPEEALESFVEEWFKPLAYALTLTREQGYPSVFYGDYYGIPTHGVPAMRSKIDPILEARQKYAYGPQHDYLDHPDVIGWTREGDSSHPKSGLATLITDGPGGSKRMYAGLKNAGETWYDITGNRSDTVKIGSDGWGEFHVNDGSVSIYVQK

SEQ ID NO: 29340 - protein, 485 aa, Bacillus sp.
HHNGTNGTMMQYFEWYLPNDGNHWNRLNSDASNLKSKGITAVWIPPAWKGVSQNDVGYGAYDLYDLGEFNQKGTVRTKYGTRSQLQAAVTSLKNNGIQVYGDVVMNHKGGADATEMVRAVEVNPNNRNQEVTGEYTIEAWTRFDFPGRGNTHSSFKWRWYHFDGVDWDQSRDLSNRIYKFRGHGKAWDWEVDTEFGNYDYLMYADYDMDHPEVVNELRNWGVWYTNTLGLDGFRIDAVKHIKYSFTRDWINHVRSATGKNMFAVAEFWKNDLGAIENYLQKTNWNHSVFDVPLHYNLYNASKSGNNYDMRNIFNGTVVQRHPSHAVTFVDNHDSQPEEALESFVEEWFKPLAYALTLTREQGYPSVFYGDYYGIPTHGVPAMRSKIDPILEARQKYAYGPQHDYLDHPDVIGWTREGDSSHPKSGLATLITDGPGGSKRMYAGLKNAGETWYDITGNRSDTVKILSGGWGEFHVNDGSVSIYVQK

SEQ ID NO: 29341 - protein, 485 aa, Bacillus sp.
HHNGTNGTMMQYFEWYLPNDGNHWNRLNSDASNLKSKGITAVWIPPAWKGASQNDVGYGAYDLYDLGEFNQKGTVRTKYGTRSQLQAAVTSLKNNGIQVYGDVVMNHKGGADATEMVRAVEVNPNNRNQEVTGEYTIEAWTRFDFPGRGNTHSSFKWRWYHFDGVDWDQSRRLNNRIYKFRGHGKAWDWEVDTEFGNYDYLMYADYDMDHPEVVNELRNWGVWYTNTLGLDGFRIDAVKHIKYSFTRDWINHVRSATGKNMFAVAEFWRNDLGWIENYLQKTNWNHSVFDVPLHYNLYNASKSGGNYDMRNIFNGTVVQRHPSHAVTFVDNHDSQPEEALESFVEEWFKPLAYALTLTREQGYPSVFYGDYYGIPTHGVPAMRSKIDPILEARQKYAYGPQHDYLDHPDVIGWTREGDSSHPKSGLATLITDGPGGSKRMYAGLKNAGETWYDITGNRSDTVKIGSDGWGEFHVNDGSVSIYVQK

SEQ ID NO: 29342 - protein, 485 aa, Bacillus sp.
HHNGTNGTMMQYFEWYLPNDGNHWNRLNSDASNLKSKGITAVWIPPAWKAASQNDVGYGAYDLYDLGEFNQKGTVRTKYGTRSQLQAAVTSLKNNGIQVYGDVVMNHKGGADATEMVRAVEVNPNNRNQEVTGEYTIEAWTRFDFPGRGNTHSSFKWRWYHFDGVDWDQSRRITNRIYKFRGHGKAWDWEVDTEFGNYDYLMYADYDMDHPEVVNELRKFGVWYTNTLGLDGFRIDAVKHIKYSFTRDWINHVRSATGKNMFAVAEFWKNDLGAIENYLQKTNWNHSVFDVPLHYNLYNASKSGGNYDMRNIFNGTVVQRHPSHAVTFVDNHDSQPEEALESFVEEWFKPLAYALTLTREQGYPSVFYGDYYGIPTHGVPAMRSKIDPILEARQKYAYGPQHDYLDHPDVIGWTREGDSSHPKSGLATLITDGPGGSKRMYAGLKNAGETWYDITGNRSDTVKIGSDGWGEFHVNDGSVSIYVQK

SEQ ID NO: 29343 - protein, 485 aa, Bacillus sp.
HHNGTNGTMMQYFEWYLPNDGNHWNRLNSDASNLKSKGITAVWIPPAWKATSQNDVGYGAYDLYDLGEFNQKGTVRTKYGTRSQLQAAVTSLKNNGIQVYGDVVMNHKGGADATEMVRAVEVNPNNRNQEVTGEYTIEAWTRFDFPGRGNTHSSFKWRWYHFDGVDWDQSRRLSNRIYKFRGHGKAWDWEVDTEFGNYDYLMYTDYDMDHPEVVNELRNWGVWYTNTLGLDGFRIDAVKHIKYSFTRDWINHVRIATGKNMFAVAEFWKNDLGAIENYLQKTNWNHSVFDVPLHYNLYNASKSGGNYDMRNIFNGTVVQRHPSHAVTFVDNHDSQPEEALESFVDEWFKPLAYALTLTREQGYPSVFYGDYYGIPTHGVPAMRSKIDPILEARQKYAYGPQHDYLDHPDVIGWTREGDSSHPKSGLATLITDGPGGSKRMYAGLKNAGETWYDITGNRSDTVKIGSDGWGEFHVNDQSVSIYVQK

SEQ ID NO: 29344 - protein, 483 aa, Bacillus sp.
HHNGTNGTMMQYFEWYLPNDGNHWNRLNSDASNLKSKGITAVWIPPAWKGASQNDVGYGAYDLYDLGEFNQKGTVRTKYGTRSQLQAAVTSLKNNGIQVYGDVVMNHKGGADATEMVRAVEVNPNNRNQEVTGEYTIEAWTRFDFPGRGNTHSSFKWRWYHFDGVDWDQSRRLNNRIYKFRGKAWDWEVDTEFGNYDYLMYADYDMDHPEVVNELRNWGVWYTNTLGLDGFRIDAVKHIKYSFTRDWINHVRSATGKNMFAVAEFWKNDLGAIENYLQKTNWNHSVFDVPLHYNLYNASKSGGNYDMRNIFNGTVVQRHPSHAVTFVDNHDSQPEEALESFVDPWFKPLAYALTLTREQGYPSVFYGDYYGIPTHGVPAMRSKIDPILEARQKYAYGPQHDYLDHPDVIGWTREGDSSHPKSGLATLITDGPGGSKRMYAGLKNAGETWYDITGNRSDTVKIGSDGWGEFHVNDKSVSIYVQK

SEQ ID NO: 29345 - protein, 485 aa, Bacillus sp.
HHNGTNGTMMQYFEWYLPNDGNHWNRLNSDASNLKSKGIKAVWIPPAWKGASQNDVGYGAYDLYDLGEFNQRGTVRTKYGTRSQLQAAVTSLKNNGIQVYGDVVMNHKGGADATEMVRAVEVNPNNRNQEVTGEYTIEAWTRFDFPGRGNTHSSFKWRWYHFDGVDFDQSRNFQNRIYKFRGHGKAWDWEVDTEFGNYDYLMYADYDMDHPEVVNELRNWGVWYTNTLGLDGFRIDAVKHIKYSFTRDWINHVRSATGKNMFAVAEFWKNDLGAIENYLQKTNWNHSVFDVPLHYNLYNASKSQGNYDMRNIFNGTVVQRHPSHAVTFVDNHDSQPEEALESFVDTWFKPLAYALTLTREQGYPSVFYGDYYGIPTHGVPAMRSKIDPILEARQKYAYGPQHDYLDHPDVIGWTREGDSSHPKSGLATLITDGPGGSKRMYAGLKNAGETWYDITGNRSDTVKIGSDGWGEFHVNGGSVSIYVQK

SEQ ID NO: 29346 - protein, 483 aa, Bacillus sp.
HHNGTNGTMMQYFEWYLPNDGNHWNRLNSDASNLKSKGITAVWIPPAWKGASQNDVGYGAYDLYDLGEFNQKGTVRTKYGTRSQLQAAVTSLKNNGIQVYGDVVMNHKGGADATEMVRAVEVNPNNRNQEVTGEYTIEAWTRFDFPGRGNTHSSFKWRWYHFDGVDWDQSRRLNNRIYKFRGKAWDWEVDTEFGNYDYLMYADYDMDHPEVVNELRNWGVWYTNTLGLDGFRIDAVKHIKYSFTRDWINHVRSATGKNMFAVAEFWKNDLGAIENYLQKTNWNHSVFDVPLHYNLYNASKSGGNYDMRNIFNGTVVQRHPSHAVTFVDNHDSQPEEALESFVETWFKPLAYALTLTREQGYPSVFYGDYYGIPTHGVPAMRSKIDPILEARQKYAYGPQHDYLDHPDVIGWTREGDSSHPKSGLATLITDGPGGSKRMYAGLKNAGETWYDITGNRSDTVKIGSDGWGEFHVNKQSVSIYVQK

SEQ ID NO: 29347 - protein, 483 aa, Bacillus sp.
HHNGTNGTMMQYFEWYLPNDGNHWNRLNSDASNLKSKGITAVWIPPAWKATSQNDVGYGAYDLYDLGEFNQKGTVRTKYGTRSQLQAAVTSLKNNGIQVYGDVVMNHKGGADATEMVRAVEVNPNNRNQEVTGEYTIEAWTRFDFPGRANTHSSFKWRWYHFDGVDFDQSRNVNNRIYKFRGKAWDWEVDTEFGNYDYLMYADYDMDHPEVVNELRNWGVWYTNTLGLDGFRIDAVKHIKYSFTRDWINHVRSATGKNMFAVAEFWKNDLGAIENYLQKTNWNHSVFDVPLHYNLYNASKSGGNYDMRNIFNGTVVQRHPSHAVTFVDNHDSQPEEALESFVEEWFKPLAYALTLTREQGYPSVFYGDYYGIPTHGVPAMRSKIDPILEARQKYAYGPQHDYLDHPDVIGWTREGDSSHPKSGLATLITDGPGGSKRMYAGLKNAGETWYDITGNRSDTVKIGSDGWGEFHVNDGSVSIYVQK

SEQ ID NO: 29348 - protein, 483 aa, Bacillus sp.
HHNGTNGTMMQYFEWYLPNDGNHWNRLNSDASNLKSKGITAVWIPPAWKGASQNDVGYGAYDLYDLGEFNQKGTVRTKYGTRSQLQAAVTSLKNNGIQVYGDVVMNHKGGADATEMVRAVEVNPNNRNQEVTGEYTIEAWTRFDFPGRGNTHSSFKWRWYHFDGVDWDQSRRLNNRIYKFRGKAWDWEVDTEFGNYDYLMYADYDMDHPEVVNELRNWGVWYTNTLGLDGFRIDAVKHIKYSFTRDWINHVRSATGKNMFAVAEFWNNDLGMIENYLQKTNWNHSVFDVPLHYNLYNASKSGGNYDMRNIFNGTVVQRHPSHAVTFVDNHDSQPEEALESFVEEWFKPLAYALTLTREQGYPSVFYGDYYGIPTHGVPAMRSKIDPILEARQKYAYGPQHDYLDHPDVIGWTREGDSSHPKSGLATLITDGPGGSKRMYAGLKNAGETWYDITGNRSDTVKIGSDGWGEFHVNDGSVSIYVQK

SEQ ID NO: 29349 - protein, 485 aa, Bacillus sp.
HHNGTNGTMMQYFEWYLPNDGNHWNRLNSDASNLKSKGITAVWIPPAWKGASQNDVGYGAYDLYDLGEFNQKGTVRTKYGTRSQLQAAVTSLKNNGIQVYGDVVMNHKGGADATEMVRAVEVNPNNRNQEVTGEYTIEAWTRFDFPGRGNTHSSFKWRWYHFDGVDWDQSRRLNNRIYKFRGHGKAWDWEVDTEFGNYDYLMYADYDMDHPEVVNELRNWGVWYTNTLGLDGFRIDAVKHIKYSFTRDWINHVRSATGKNMFAVAEFWKNDLGAIENYLQKTNWNHSVFDVPLHYNLYNASKSQGNYDMRNIFNGTVVQRHPSHAVTFVDNHDSQPEEALESFVEPWFKPLAYALTLTREQGYPSVFYGDYYGIPTHGVPAMRSKIDPILEARQKYAYGPQHDYLDHPDVIGWTREGDSSHPKSGLATLITDGPGGSKRMYAGLKNAGETWYDITGNRSDTVKIGSDGWGEFHVNGSSVSIYVQK

SEQ ID NO: 29350 - protein, 483 aa, Synthetic construct
HHNGTNGTMMQYFEWYLPNDGNHWNRLNSDASNLKSKGITAVWIPPAWKGASQNDVGYGAYDLYDLGEFNQKGTVRTKYGTRSQLQAAVTSLKNNGIQVYGDVVMNHKGGADATEMVRAVEVNPNNRNQEVTGEYTIEAWTRFDFPGRGNTHSSFKWRWYHFDGVDWDQSRRLNNRIYLFRGKKWDWPVDTENGNYDYLMYADIDMDHPEVVNELRNWGVWYTNTLGLDGFRIDAVKHIKYSFTRDWINHVRSATGKNMFAVAEFWKNDLGAIENYLQKTNWNHSVFDVPLHYNLYNASKSGGNYDMRNIFNGTVVQRHPSHAVTFVDNHDSQPEEALESFVEEWFKPLAYALTLTREQGYPSVFYGDYYGIPTHGVPAMRSKIDPILEARQKYAYGPQHDYLDHPDVIGWTREGDSSHPKSGLATLITDGPGGSKRMYAGLKNAGETWYDITGNRSDTVKIGSDGWGEFHVNDGSVSIYVQK

SEQ ID NO: 29351 - protein, 483 aa, Synthetic construct
HHNGTNGTMMQYFEWYLPNDGNHWNRLNSDASNLKSKGITAVWIPPAWKGASQNDVGYGAYDLYDLGEFNQKGTVRTKYGTRSQLQAAVTSLKNNGIQVYGDVVMNHKGGADATEMVRAVEVNPNNRNQEVTGEYTIEAWTRFDFPGRGNTHSSFKWRWYHFDGVDWDQSRRLNNRIYKFRGKEWDWEVDTEFGNYDYLMYADYDMDSPEVVNELRNWGVWYTNTLGLDGFRIDAVKHIKYSFTRDWINHVRSATGKNMFAVAEFWKNDLGAIENYLQKTNWNHSVFDVPLHYNLYNASKSGGNYDMRNIFNGTVVQRHPSHAVTFVDNHDSQPEEALESFVEEWFKPLAYALTLTREQGYPSVFYGDYYGIPTHGVPAMRSKIDPILEARQKYAYGPQHDYLDHPDVIGWTREGDSSHPKSGLATLITDGPGGSKRMYAGLKNAGETWYDITGNRSDTVKIGSDGWGEFHVNDGSVSIYVQK

SEQ ID NO: 29352 - protein, 483 aa, Bacillus sp.
HHNGTNGTMMQYFEWYLPNDGNHWNRLNSDASNLKSKGIKAVWIPPAWKGASQNDVGYGAYDLYDLGEFNQRGTVRTKYGTRSQLQAAVTSLKNNGIQVYGDVVMNHKGGADATEMVRAVEVNPNNRNQEVTGEYTIEAWTRFDFPGRGNTHSSFKWRWYHFDGVDFDQSRNFQNRIYKFRGKAWDWEVDTEFGNYDYLMYADYDMDHPEVVNELRNWGVWYTNTLGLDGFRIDAVKHIKYSFTRDWINHVRSATGKNMFAVAEFWKNDLGAIENYLQKTNWNHSVFDVPLHYNLYNASKSQGNYDMRNIFNGTVVQRHPSHAVTFVDNHDSQPEEALESFVDTWFKPLAYALTLTREQGYPSVFYGDYYGIPTHGVPAMRSKIDPILEARQKYAYGPQHDYLDHPDVIGWTREGDSSHPKSGLATLITDGPGGSKRMYAGLKNAGETWYDITGNRSDTVKIKSDGWGEFHVNGGSVSIYVQK

SEQ ID NO: 29353 - protein, 485 aa, Bacillus sp.
HHNGTNGTMMQYFEWYLPNDGNHWNRLNSDASNLKSKGITAVWIPPAWKGASQNDVGYGAYDLYDLGEFNQKGTVRTKYGTRSQLQAAVTSLKNNGIQVYGDVVMNHKGGADATEMVRAVEVNPNNRNQEVTGEYTIEAWTRFDFPGRGNTHSSFKWRWYHFDGVDWDQSRRLNNRIYKFRGHGKAWDWEVDTEFGNYDYLMYADYDMDHPEVVNELRNWGVWYTNTLGLDGFRIDAVKHIKYSFTRDWINHVRSATGKNMFAVAEFWKNDLGAIENYLQKTNWNHSVFDVPLHYNLYNASKSAGNYDMRNIFNGTVVQRHPSHAVTFVDNHDSQPEEALESFVDEWFKPLAYALTLTREQGYPSVFYGDYYGIPTHGVPAMRSKIDPILEARQKYAYGPQHDYLDHPDVIGWTREGDSSHPKSGLATLITDGPGGSKRMYAGLKNAGETWYDITGNRSDTVKIGSDGWGEFHVNQQSVSIYVQK

SEQ ID NO: 29354 - protein, 483 aa, Bacillus sp.
HHNGTNGTMMQYFEWYLPNDGNHWNRLNSDASNLKSKGITAVWIPPAWKGASQNDVGYGAYDLYDLGEFNQKGTVRTKYGTRSQLQAAVTSLKNNGIQVYGDVVMNHKGGADATEMVRAVEVNPNNRNQEVTGEYTIEAWTRFDFPGRGNTHSSFKWRWYHFDGVDWDQSRRLNNRIYKFRGKAWDWEVDTENGFYDYLMYADIDYDHPEVVSELRNWGVWYTNTLGLDGFRIDAVKHIKYSFTRDWINHVRSATGKNMFAVAEFWKNDLGAIENYLQKTNWNHSVFDVPLHYNLYNASKSGGNYDMRNIFNGTVVQRHPSHAVTFVDNHDSQPEEALESFVEEWFKPLAYALTLTREQGYPSVFYGDYYGIPTHGVPAMRSKIDPILEARQKYAYGPQHDYLDHPDVIGWTREGDSSHPKSGLATLITDGPGGSKRMYAGLKNAGETWYDITGNRSDTVKIGSDGWGEFHVNDGSVSIYVQK

SEQ ID NO: 29355 - protein, 483 aa, Bacillus sp.
HHNGTNGTMMQYFEWYLPNDGNHWNRLNSDASNLKSKGITAVWIPPAWKGASQNDVGYGAYDLYDLGEFNQKGTVRTKYGTRSQLQAAVTSLKNNGIQVYGDVVMNHKGGADATEMVRAVEVNPNNRNQEVTGEYTIEAWTRFDFPGRGNTHSSFKWRWYHFDGVDWDQSRRLNNRIYKFRGKAWDWEVDTEFGNYDYLMYADYDMDHPEVVNELRNWGVWYTNTLGLDGFRIDAVKHIKYSFTRDWINHVRSATGKNMFAVAEFWQNDLGLIENYLQKTNWNHSVFDVPLHYNLYNASKSGGNYDMRNIFNGTVVQRHPSHAVTFVDNHDSQPEEALESFVEEWFKPLAYALTLTREQGYPSVFYGDYYGIPTHGVPAMRSKIDPILEARQKYAYGPQHDYLDHPDVIGWTREGDSSHPKSGLATLITDGPGGSKRMYAGLKNAGETWYDITGNRSDTVKIGSDGWGEFHVNDGSVSIYVQK

SEQ ID NO: 29356 - protein, 485 aa, Bacillus sp.
HHNGTNGTMMQYFEWYLPNDGNHWNRLNSDASNLKSKGITAVWIPPAWKGASQNDVGYGAYDLYDLGEFNQKGTVRTKYGTRSQLQAAVTSLKNNGIQVYGDVVMNHKGGADATEMVRAVEVNPNNRNQEVTGEYTIEAWTRFDFPGRGNTHSSFKWRWYHFDGVDWDQSRRLNNRIYKFRGHGKAWDWEVDTEFGNYDYLMYADYDMDHPEVVNELRNWGVWYTNTLGLDGFRIDAVKHIKYSFTRDWINHVRSATGKNMFAVAEFWKNDLGAIENYLQKTNWNHSVFDVPLHYNLYNASKSGGNYDMRNIFNGTVVQRHPSHAVTFVDNHDSQPEEALESFVEPWFKPLAYALTLTREQGYPSVFYGDYYGIPTHGVPAMRSKIDPILEARQKYAYGPQHDYLDHPDVIGWTREGDSSHPKSGLATLITDGPGGSKRMYAGLKNAGETWYDITGNRSDTVKIGSDGWGEFHVNDQSVSIYVQK

SEQ ID NO: 29357 - protein, 485 aa, Bacillus sp.
HHNGTNGTMMQYFEWYLPNDGNHWNRLNSDASNLKSKGITAVWIPPAWKAASQNDVGYGAYDLYDLGEFNQKGTVRTKYGTRSQLQAAVTSLKNNGIQVYGDVVMNHKGGADATEMVRAVEVNPNNRNQEVTGEYTIEAWTRFDFPGRGNTHSSFKWRWYHFDGVDWDQSRNLTNRIYKFRGHGKAWDWEVDTEFGNYDYLMYADYDMDHPEVVNELRNWGVWYTNTLGLDGFRIDAVKHIKYSFTRDWINHVRSATGKNMFAVAEFWKNDLGAIENYLQKTNWNHSVFDVPLHYNLYNASKSGGNYDMRNIFNGTVVQRHPSHAVTFVDNHDSQPEEALESFVETWFKPLAYALTLTREQGYPSVFYGDYYGIPTHGVPAMRSKIDPILEARQKYAYGPQHDYLDHPDVIGWTREGDSSHPKSGLATLITDGPGGSKRMYAGLKNAGETWYDITGNRSDTVKIGSDGWGEFHVNKGSVSIYVQK

SEQ ID NO: 29358 - protein, 485 aa, Bacillus sp.
HHNGTNGTMMQYFEWYLPNDGNHWNRLNSDASNLKSKGITAVWIPPAWKGASQNDVGYGAYDLYDLGEFNQKGTVRTKYGTRSQLQAAVTSLKNNGIQVYGDVVMNHKGGADATEMVRAVEVNPNNRNQEVTGEYTIEAWTRFDFPGRGNTHSSFKWRWYHFDGVDWDQSRNVNNRIYKFRGHGKAWDWEVDTEFGNYDYLMYADYDMDHPEVVNELRNWGVWYTNTLGLDGFRIDAVKHIKYSFTRDWINHVRSATGKNMFAVAEFWKNDLGAIENYLQKTNWNHSVFDVPLHYNLYNASQSGGNYDMRNIFNGTVVQRHPSHAVTFVDNHDSQPEEALESFVEPWFKPLAYALTLTREQGYPSVFYGDYYGIPTHGVPAMRSKIDPILEARQKYAYGPQHDYLDHPDVIGWTREGDSSHPKSGLATLITDGPGGSKRMYAGLKNAGETWYDITGNRSDTVKIGSDGWGEFHVNKSSVSIYVQK

SEQ ID NO: 29359 - protein, 483 aa, Bacillus sp.
HHNGTNGTMMQYFEWYLPNDGNHWNRLNSDASNLKSKGITAVWIPPAWKAVSQNDVGYGAYDLYDLGEFNQKGTVRTKYGTRSQLQAAVTSLKNNGIQVYGDVVMNHKGGADATEMVRAVEVNPNNRNQEVTGEYTIEAWTRFDFPGRGNTHSSFKWRWYHFDGVDWDQSRDLENRIYKFRGKAWDWEVDTEFGNYDYLMYADYDMDHPEVVNELRNWGVWYTNTLGLDGFRIDAVKHIKYSFTRDWINHVRIATGKNMFAVAEFWKNDLGAIENYLQKTNWNHSVFDVPLHYNLYNASKSGGNYDMRNIFNGTVVQRHPSHAVTFVDNHDSQPEEALESFVDEWFKPLAYALTLTREQGYPSVFYGDYYGIPTHGVPAMRSKIDPILEARQKYAYGPQHDYLDHPDVIGWTREGDSSHPKSGLATLITDGPGGSKRMYAGLKNAGETWYDITGNRSDTVKIGSDGWGEFHVNDQSVSIYVQK

SEQ ID NO: 29360 - protein, 483 aa, Synthetic construct
HHNGTNGTMMQYFEWYLPNDGNHWNRLNSDASNLKSKGITAVWIPPAWKGASQNDVGYGAYDLYDLGEFNQKGTVRTKYGTRSQLQAAVTSLKNNGIQVYGDVVMNHKGGADATEMVRAVEVNPNNRNQEVTGEYTIEAWTRFDFPGRGNTHSSFKWRWYHFDGVDWDQSRRLNNRIYKFRGKAWDWEVDTEFGNYDYLMYADYDMDHPESTNELRNWGVWYTNTLGLDGFRIDAVKHIKYSFTRDWINHVRSATGKNMFAVAEFWKNDLGAIENYLQKTNWNHSVFDVPLHYNLYNASKSGGNYDMRNIFNGTVVQRHPSHAVTFVDNHDSQPEEALESFVEEWFKPLAYALTLTREQGYPSVFYGDYYGIPTHGVPAMRSKIDPILEARQKYAYGPQHDYLDHPDVIGWTREGDSSHPKSGLATLITDGPGGSKRMYAGLKNAGETWYDITGNRSDTVKIGSDGWGEFHVNDGSVSIYVQK

SEQ ID NO: 29361 - protein, 485 aa, Bacillus sp.
HHNGTNGTMMQYFEWYLPNDGNHWNRLNSDASNLKSKGITAVWIPPAWKGASQNDVGYGAYDLYDLGEFNQKGTVRTKYGTRSQLQAAVTSLKNNGIQVYGDVVMNHKGGADATEMVRAVEVNPNNRNQEVTGEYTIEAWTRFDFPGRGNTHSSFKWRWYHFDGVDWDQSRRLNNRIYKFRGHGKAWDWEVDTEFGNYDYLMYADYDMDHPEVVNELRNWGVWYTNTLGLDGFRIDAVKHIKYSFTRDWINHVRSATGKNMFAVAEFWKNDLGAIENYLQKTNWNHSVFDVPLHYNLYNASKSAGNYDMRNIFNGTVVQRHPSHAVTFVDNHDSQPEEALESFVEEWFKPLAYALTLTREQGYPSVFYGDYYGIPTHGVPAMRSKIDPILEARQKYAYGPQHDYLDHPDVIGWTREGDSSHPKSGLATLITDGPGGSKRMYAGLKNAGETWYDITGNRSDTVKIGSDGWGEFHVNKSSVSIYVQK

SEQ ID NO: 29362 - protein, 483 aa, Bacillus sp.
HHNGTNETMMQYFEWYLPNDGNHWNRLNSDASNLKSKGITAVWIPPAWKGASQNDVGYGAYDLYDLGEFNQKGTVRTKYGTRSQLQAAVTSLKNNGIAVYGDVVMNHKGGADATEMVRAVEVNPNNRNQEVTGEYTIEAWTRFDFPGRGNTHSSFKWRWYHFDGVDWDQSRRLNNRIYKFRGKAWDWEVDTEFGNYDYLMYADYDMDHPEVVNELRNWGVWYTNTLGLDGFRIDAVKHIKYSFTRDWINHVRSATGKNMFAVAEFWKNDLGAIENYLQKTNWNHSVFDVPLHYNLYNASRSGGNYDMRNIFNGTVVQAHPNHAVTFVDNHDSQPEEALESFVEEWFKPLAYALTLTREQGYPSVFYGDYYGIPTHGVPAMRSKIDPILEARQKYAYGPQHDYLDHPDVIGWTREGDSSHPKSGLATLITDGPGGSKRMYAGLKNAGETWYDITGNRSDTVKIGSDGWGEFHVNDGSVSIYVQK

SEQ ID NO: 29363 - protein, 483 aa, Bacillus sp.
HHNGTNGTMMQYFEWYLPNDGNHWNRLNSDASNLKSKGITAVWIPPAWKGASQNDVGYGAYDLYDLGEFNQKGTVRTKYGTRSQLQAAVTSLKNNGIQVYGDVVMNHKGGADATEMVRAVEVNPNNRNQEVTGEYTIEAWTRFDFPGRGNTHSSFKWRWYHFDGVDWDQSRRLNNRIYKFRGKAWDWEVDTEFGNYDYLMYADYDMDHPEVVNELRNWGVWYTNTLGLDGFRIDAVKHIKYSFTRDWINHVRSATGKNMFAVAEFWKNDLGAIENYLQKTNWNHSVFDVPLHYNLYNASKSGGNYDMRNIFNGTVVQRHPSHAVTFVDNHDSQPEEALESFVDPWFKPLAYALTLTREQGYPSVFYGDYYGIPTHGVPAMRSKIDPILEARQKYAYGPQHDYLDHPDVIGWTREGDSSHPKSGLATLITDGPGGSKRMYAGLKNAGETWYDITGNRSDTVKIGSDGWGEFHVNKSSVSIYVQK

SEQ ID NO: 29364 - protein, 485 aa, Bacillus sp.
HHNGTNGTMMQYFEWYLPNDGNHWNRLNSDASNLKSKGITAVWIPPAWKGASQNDVGYGAYDLYDLGEFNQRGTVRTKYGTRSQLQAAVTSLKNNGINVYGDVVMNHKGGADATEMVRAVEVNPNNRNQEVTGEYTIEAWTRFDFPGRGNTHSSFKWRWYHFDGVDFDQSRRLNNRIYKFRGHGKAWDWEVDTEFGNYDYLMYADYDMDHPEVVNELRNWGVWYTNTLGLDGFRIDAVKHIKYSFTRDWINHVRSATGKNMFAVAEFWKNDLGAIENYLQKTNWNHSVFDVPLHYNLYNASKSGGNYDMRNIFNGTVVQAHPMHAVTFVDNHDSQPEEALESFVEEWFKPLAYALTLTREQGYPSVFYGDYYGIPTHGVPAMRSKIDPILEARQKYAYGPQHDYLDHPDVIGWTREGDSSHPKSGLATLITDGPGGSKRMYAGLKNAGETWYDITGNRSDTVKIGSDGWGEFHVNDGSVSIYVQK

SEQ ID NO: 29365 - protein, 483 aa, Bacillus sp.
HHNGTNGTMMQYFEWYLPNDGNHWNRLNSDASNLKSKGITAVWIPPAWKGASQNDVGYGAYDLYDLGEFNQKGTVRTKYGTRSQLQAAVTSLKNNGITVYGDVVMNHKGGADATEMVRAVEVNPNNRNQEVTGEYTIEAWTRFDFPGRGNTHSSFKWRWYHFDGVDWDQSRRLNNRIYKFRGKAWDWEVDTEFGNYDYLMYADYDMDHPEVVNELRNWGVWYTNTLGLDGFRIDAVKHIKYSFTRDWINHVRSATGKNMFAVAEFWKNDLGAIENYLQKTNWNHSVFDVPLHYNLYNASKSGGNYDMRNIFNGTVVQAHPSLAVTFVDNHDSQPEEALESFVEEWFKPLAYALTLTREQGYPSVFYGDYYGIPTHGVPAMRSKIDPILEARQKYAYGPQHDYLDHPDVIGWTREGDSSHPKSGLATLITDGPGGSKRMYAGLKNAGETWYDITGNRSDTVKIGSDGWGEFHVNDGSVSIYVQK

SEQ ID NO: 29366 - protein, 483 aa, Bacillus sp.
HHNGTNGTMMQYFEWYLPNDGNHWNRLNSDASNLKSKGITAVWIPPAWKAASQNDVGYGAYDLYDLGEFNQKGTVRTKYGTRSQLQAAVTSLKNNGIQVYGDVVMNHKGGADATEMVRAVEVNPNNRNQEVTGEYTIEAWTRFDFPGRGNTHSSFKWRWYHFDGVDWDQSRQLTNRIYKFRGKAWDWEVDTEFGNYDYLMYADYDMDHPEVVNELRNWGVWYTNTLGLDGFRIDAVKHIKYSFTRDWINHVRSATGKNMFAVAEFWKNDLGAIENYLQKTNWNHSVFDVPLHYNLYNASKSQGNYDMRNIFNGTVVQRHPSHAVTFVDNHDSQPEEALESFVDTWFKPLAYALTLTREQGYPSVFYGDYYGIPTHGVPAMRSKIDPILEARQKYAYGPQHDYLDHPDVIGWTREGDSSHPKSGLATLITDGPGGSKRMYAGLKNAGETWYDITGNRSDTVKIGSDGWGEFHVNGSSVSIYVQK

SEQ ID NO: 29367 - protein, 485 aa, Synthetic construct
HHNGTNGTMMQYFEWYLPNDGNHWNRLNSDASNLKSKGITAVWIPPAWKGASQNDVGYGAYDVYDLGEFNQKGTVRTKYGTRSQLQAAVTSLKNNGIQVYGDVVMNHKGGADATEMVRAVEVNPNNRNQEVTGEYTIEAWTRFDFPGRGNTHSSFKWRWYHFDGVDWDQSRRLNNRIYKFRGHGKAWDWEVDTENGNYDYLMYADYDMDHPEVVNELRNWGVWYTNTLGLDGFRIDAVKHVKYSFLRDWINHVRSATGKNMFAVAEFWKNDLGAIENYLQKTNWNHSVFDVPLHYNLYNASKSGGNYDMRNIFNGTVVQRHPSHAVTFVDNHDSQPEEALESFVEEWFKPLAYALTLTREQGYPSVFYGDYYGIPTHGVPAMRSKIDPILEARQKYAYGPQHDYLDHPDVIGWTREGDSSHPKSGLATLITDGPGGSKRMYAGLKNAGETWYDITGNRSDTVKIGSDGWGEFHVNDGSVSIYVQK

SEQ ID NO: 29368 - protein, 483 aa, Bacillus sp.
HHNGTNSTMMQYFEWYLPNDGNHWNRLNSDASNLKSKGITAVWIPPAWKGASQNDVGYGAYDLYDLGEFNQKGTVRTKYGTRSQLQAAVTSLKNNGIQVYGDVVMNHKGGADATEMVRAVEVNPNNRNQEVTGEYTIEAWTRFDFPGRGNTHSSFKWRWYHFDGVDWDQSRRLNNRIYKFRGKAWDWEVDTEFGNYDYLMYADYDMDHPEVVNELRNWGVWYTNTLGLDGFRIDAVKHIKYSFTRDWINHVRSATGKNMFAVAEFWKNDLGAIENYLQKTNWNHSVFDVPLHYNLYNASKSGGNYDMRNIFNGTVVQAHPNQAVTFVDNHDSQPEEALESFVEEWFKPLAYALTLTREQGYPSVFYGDYYGIPTHGVPAMRSKIDPILEARQKYAYGPQHDYLDHPDVIGWTREGDSSHPKSGLATLITDGPGGSKRMYAGLKNAGETWYDITGNRSDTVKIGSDGWGEFHVNDGSVSIYVQK

SEQ ID NO: 29369 - protein, 485 aa, Bacillus sp.
HHNGTNGTMMQYFEWYLPNDGNHWNRLNSDASNLKSKGIKAVWIPPAWKGASQNDVGYGAYDLYDLGEFNQRGTVRTKYGTRSQLQAAVTSLKNNGIQVYGDVVMNHKGGADATEMVRAVEVNPNNRNQEVTGEYTIEAWTRFDFPGRGNTHSSFKWRWYHFDGVDWDQSRRLNNRIYKFRGHGKAWDWEVDTEFGNYDYLMYADYDMDHPEVVNELRNWGVWYTNTLGLDGFRIDAVKHIKYSFTRDWINHVRSATGKNMFAVAEFWKNDLGAIENYLQKTNWNHSVFDVPLHYNLYNASKSGGNYDMRNIFNGTVVQRHPSHAVTFVDNHDSQPEEALESFVDPWFKPLAYALTLTREQGYPSVFYGDYYGIPTHGVPAMRSKIDPILEARQKYAYGPQHDYLDHPDVIGWTREGDSSHPKSGLATLITDGPGGSKRMYAGLKNAGETWYDITGNRSDTVKIGSDGWGEFHVNGGSVSIYVQK

SEQ ID NO: 29370 - protein, 483 aa, Bacillus sp.
HHNGTNGTMMQYFEWYLPNDGNHWNRLNSDASNLKSKGITAVWIPPAWKAASQNDVGYGAYDLYDLGEFNQKGTVRTKYGTRSQLQAAVTSLKNNGIQVYGDVVMNHKGGADATEMVRAVEVNPNNRNQEVTGEYTIEAWTRFDFPGRGNTHSSFKWRWYHFDGVDWDQSRRITNRIYKFRGKAWDWEVDTEFGNYDYLMYADYDMDHPEVVNELRKFGVWYTNTLGLDGFRIDAVKHIKYSFTRDWINHVRSATGKNMFAVAEFWKNDLGAIENYLQKTNWNHSVFDVPLHYNLYNASKSGGNYDMRNIFNGTVVQRHPSHAVTFVDNHDSQPEEALESFVEEWFKPLAYALTLTREQGYPSVFYGDYYGIPTHGVPAMRSKIDPILEARQKYAYGPQHDYLDHPDVIGWTREGDSSHPKSGLATLITDGPGGSKRMYAGLKNAGETWYDITGNRSDTVKIGSDGWGEFHVNDGSVSIYVQK

SEQ ID NO: 29371 - protein, 483 aa, Bacillus sp.
HHNGTNGTMMQYFEWYLPNDGNHWNRLNSDASNLKSKGITAVWIPPAWKGASQNDVGYGAYDLYDLGEFNQKGTVRTKYGTRSQLQAAVTSLKNNGIQVYGDVVMNHKGGADATEMVRAVEVNPNNRNQEVTGEYTIEAWTRFDFPGRGNTHSSFKWRWYHFDGVDWDQSRRLNNRIYKFRGKAWDWEVDTEFGNYDYLMYADYDMDHPEVVNELRNWGVWYTNTLGLDGFRIDAVKHIKYSFTRDWINHVRSATGKNMFAVAEFWLNDLGRIENYLQKTNWNHSVFDVPLHYNLYNASKSGGNYDMRNIFNGTVVQRHPSHAVTFVDNHDSQPEEALESFVEEWFKPLAYALTLTREQGYPSVFYGDYYGIPTHGVPAMRSKIDPILEARQKYAYGPQHDYLDHPDVIGWTREGDSSHPKSGLATLITDGPGGSKRMYAGLKNAGETWYDITGNRSDTVKIGSDGWGEFHVNDGSVSIYVQK

SEQ ID NO: 29372 - protein, 485 aa, Bacillus sp.
HHNGTNGTMMQYFEWYLPNDGNHWNRLNSDASNLKSKGITAVWIPPAWKGASQNDVGYGAYDLYDLGEFNQKGTVRTKYGTRSQLQAAVTSLKNNGIQVYGDVVMNHKGGADATEMVRAVEVNPNNRNQEVTGEYTIEAWTRFDFPGRGNTHSSFKWRWYHFDGVDWDQSRNVNNRIYKFRGHGKAWDWEVDTEFGNYDYLMYADYDMDHPEVVNELRNWGVWYTNTLGLDGFRIDAVKHIKYSFTRDWINHVRSATGKNMFAVAEFWKNDLGAIENYLQKTNWNHSVFDVPLHYNLYNASKSGGNYDMRNIFNGTVVQRHPSHAVTFVDNHDSQPEEALESFVETWFKPLAYALTLTREQGYPSVFYGDYYGIPTHGVPAMRSKIDPILEARQKYAYGPQHDYLDHPDVIGWTREGDSSHPKSGLATLITDGPGGSKRMYAGLKNAGETWYDITGNRSDTVKIGSDGWGEFHVNDASVSIYVQK

SEQ ID NO: 29373 - protein, 485 aa, Bacillus sp.
HHNGTNGTMMQYFEWYLPNDGNHWNRLNSDASNLKSKGITAVWIPPAWKGASQNDVGYGAYDLYDLGEFNQKGTVRTKYGTRSQLQAAVTSLKNNGIQVYGDVVMNHKGGADATEMVRAVEVNPNNRNQEVTGEYTIEAWTRFDFPGRGNTHSSFKWRWYHFDGVDWDQSRRLNNRIYKFRGHGKAWDWEVDTEFGNYDYLMYADYDMDHPEVVNELRNWGVWYTNTLGLDGFRIDAVKHIKYSFTRDWINHVRSATGKNMFAVAEFWHNDLGCIENYLQKTNWNHSVFDVPLHYNLYNASKSGGNYDMRNIFNGTVVQRHPSHAVTFVDNHDSQPEEALESFVEEWFKPLAYALTLTREQGYPSVFYGDYYGIPTHGVPAMRSKIDPILEARQKYAYGPQHDYLDHPDVIGWTREGDSSHPKSGLATLITDGPGGSKRMYAGLKNAGETWYDITGNRSDTVKIGSDGWGEFHVNDGSVSIYVQK

SEQ ID NO: 29374 - protein, 485 aa, Bacillus sp.
HHNGTNGTMMQYFEWYLPNDGNHWNRLNSDASNLKSKGITAVWIPPAWKATSQNDVGYGAYDLYDLGEFNQKGTVRTKYGTRSQLQAAVTSLKNNGIQVYGDVVMNHKGGADATEMVRAVEVNPNNRNQEVTGEYTIEAWTRFDFPGRGNTHSSFKWRWYHFDGVDWDQSRDLNNRIYKFRGHGKAWDWEVDTEFGNYDYLMYADYDMDHPEVVNELRNWGVWYTNTLGLDGFRIDAVKHIKYSFTRDWINHVRSATGKNMFAVAEFWKNDLGAIENYLQKTNWNHSVFDVPLHYNLYNASQSGGNYDMRNIFNGTVVQRHPSHAVTFVDNHDSQPEEALESFVEPWFKPLAYALTLTREQGYPSVFYGDYYGIPTHGVPAMRSKIDPILEARQKYAYGPQHDYLDHPDVIGWTREGDSSHPKSGLATLITDGPGGSKRMYAGLKNAGETWYDITGNRSDTVKIGSDGWGEFHVNKSSVSIYVQK

SEQ ID NO: 29375 - protein, 483 aa, Bacillus sp.
HHNGTNGTMMQYFEWYLPNDGNHWNRLNSDASNLKSKGITAVWIPPAWKGASQNDVGYGAYDLYDLGEFNQKGTVRTKYGTRSQLQAAVTSLKNNGIQVYGDVVMNHKGGADATEMVRAVEVNPNNRNQEVTGEYTIEAWTRFDFPGRGNTHSSFKWRWYHFDGVDWDQSRRLNNRIYKFRGKAWDWEVDTEFGNYDYLMYADYDMDHPEVVNELRNWGVWYTNTLGLDGFRIDAVKHIKYSFTRDWINHVRSATGKNMFAVAEFWKNDLGAIENYLQKTNWNHSVFDVPLHYNLYNASKSGGNYDMRNIFNGTVVQRHPSHAVTFVDNHDSQPEEALESFVDPWFKPLAYALTLTREQGYPSVFYGDYYGIPTHGVPAMRSKIDPILEARQKYAYGPQHDYLDHPDVIGWTREGDSSHPKSGLATLITDGPGGSKRMYAGLKNAGETWYDITGNRSDTVKIGSDGWGEFHVNQSSVSIYVQK

SEQ ID NO: 29376 - protein, 485 aa, Bacillus sp.
HHNGTNGTMMQYFEWYLPNDGNHWNRLNSDASNLKSKGITAVWIPPAWKGASQNDVGYGAYDLYDLGEFNQKGTVRTKYGTRSQLQAAVTSLKNNGIQVYGDVVMNHKGGADATEMVRAVEVNPNNRNQEVTGEYTIEAWTRFDFPGRGNTHSSFKWRWYHFDGVDWDQSRRLNNRIYKFRGHGKAWDWEVDTEFGNYDYLMYADYDMDHPEVVNELRNWGVWYTNTLGLDGFRIDAVKHIKYSFTRDWINHVRSATGKNMFAVAEFWHNDLGEIENYLQKTNWNHSVFDVPLHYNLYNASKSGGNYDMRNIFNGTVVQRHPSHAVTFVDNHDSQPEEALESFVEEWFKPLAYALTLTREQGYPSVFYGDYYGIPTHGVPAMRSKIDPILEARQKYAYGPQHDYLDHPDVIGWTREGDSSHPKSGLATLITDGPGGSKRMYAGLKNAGETWYDITGNRSDTVKIGSDGWGEFHVNDGSVSIYVQK

SEQ ID NO: 29377 - protein, 485 aa, Bacillus sp.
HHNGTNGTMMQYFEWYLPNDGNHWNRLNSDASNLKSKGITAVWIPPAWKGASQNDVGYGAYDLYDLGEFNQKGTVRTKYGTRSQLQAAVTSLKNNGIQVYGDVVMNHKGGADATEMVRAVEVNPNNRNQEVTGEYTIEAWTRFDFPGRGNTHSSFKWRWYHFDGVDWDQSRRLNNRIYKFRGHGKAWDWEVDTEFGNYDYLMYADYDMDHPEVVNELRNWGVWYTNTLGLDGFRIDAVKHIKYSFTRDWINHVRSATGKNMFAVAEFWLNDLGGIENYLQKTNWNHSVFDVPLHYNLYNASKSGGNYDMRNIFNGTVVQRHPSHAVTFVDNHDSQPEEALESFVEEWFKPLAYALTLTREQGYPSVFYGDYYGIPTHGVPAMRSKIDPILEARQKYAYGPQHDYLDHPDVIGWTREGDSSHPKSGLATLITDGPGGSKRMYAGLKNAGETWYDITGNRSDTVKIGSDGWGEFHVNDGSVSIYVQK

SEQ ID NO: 29378 - protein, 485 aa, Bacillus sp.
HHNGTNGTMMQYFEWYLPNDGNHWNRLNSDASNLKSKGITAVWIPPAWKAASQNDVGYGAYDLYDLGEFNQKGTVRTKYGTRSQLQAAVTSLKNNGIQVYGDVVMNHKGGADATEMVRAVEVNPNNRNQEVTGEYTIEAWTRFDFPGRGNTHSSFKWRWYHFDGVDWDQSRDLDNRIYKFRGHGKAWDWEVDTEFGNYDYLMYADYDMDHPEVVNELRNWGVWYTNTLGLDGFRIDAVKHIKYSFTRDWINHVRSATGKNMFAVAEFWKNDLGAIENYLQKTNWNHSVFDVPLHYNLYNASKSGGNYDMRNIFNGTVVQANPNHAVTFVDNHDSQPEEALESFVEEWFKPLAYALTLTREQGYPSVFYGDYYGIPTHGVPAMRSKIDPILEARQKYAYGPQHDYLDHPDVIGWTREGDSSHPKSGLATLITDGPGGSKRMYAGLKNAGETWYDITGNRSDTVKIGSDGWGEFHVNDGSVSIYVQK

SEQ ID NO: 29379 - protein, 483 aa, Bacillus sp.
HHNGTNGTMMQYFEWYLPNDGNHWNRLNSDASNLKSKGITAVWIPPAWKGASQNDVGYGAYDLYDLGEFNQKGTVRTKYGTRSQLQAAVTSLKNNGINVYGDVVMNHKGGADATEMVRAVEVNPNNRNQEVTGEYTIEAWTRFDFPGRGNTHSSFKWRWYHFDGVDWDQSRRLNNRIYKFRGKAWDWEVDTEFGNYDYLMYADYDMDHPEVVNELRNWGVWYTNTLGLDGFRIDAVKHIKYSFTRDWINHVRSATGKNMFAVAEFWKNDLGAIENYLQKTNWNHSVFDVPLHYNLYNASKSGGNYDMRNIFNGTVVQANPNHAVTFVDNHDSQPEEALESFVEEWFKPLAYALTLTREQGYPSVFYGDYYGIPTHGVPAMRSKIDPILEARQKYAYGPQHDYLDHPDVIGWTREGDSSHPKSGLATLITDGPGGSKRMYAGLKNAGETWYDITGNRSDTVKIGSDGWGEFHVNDGSVSIYVQK

SEQ ID NO: 29380 - protein, 485 aa, Bacillus sp.
HHNGTNGTMMQYFEWYLPNDGNHWNRLNSDASNLKSKGITAVWIPPAWKALSQNDVGYGAYDLYDLGEFNQKGTVRTKYGTRSQLQAAVTSLKNNGIQVYGDVVMNHKGGADATEMVRAVEVNPNNRNQEVTGEYTIEAWTRFDFPGRGNTHSSFKWRWYHFDGVDWDQSRNVNNRIYKFRGHGKAWDWEVDTEFGNYDYLMYTDYDMDHPEVVNELRNWGVWYTNTLGLDGFRIDAVKHIKYSFTRDWINHVRSATGKNMFAVAEFWKNDLGAIENYLQKTNWNHSVFDVPLHYNLYNASKSGGNYDMRNIFNGTVVQRHPSHAVTFVDNHDSQPEEALESFVEEWFKPLAYALTLTREQGYPSVFYGDYYGIPTHGVPAMRSKIDPILEARQKYAYGPQHDYLDHPDVIGWTREGDSSHPKSGLATLITDGPGGSKRMYAGLKNAGETWYDITGNRSDTVKIGSDGWGEFHVNDGSVSIYVQK

SEQ ID NO: 29381 - protein, 485 aa, Bacillus sp.
HHNGTNGTMMQYFEWYLPNDGNHWNRLNSDASNLKSKGITAVWIPPAWKGASQNDVGYGAYDLYDLGEFNQKGTVRTKYGTRSQLQAAVTSLKNNGIQVYGDVVMNHKGGADATEMVRAVEVNPNNRNQEVTGEYTIEAWTRFDFPGRGNTHSSFKWRWYHFDGVDWDQSRRLNNRIYKFRAHGKAWDWEVDTEFGNYDYLMYADYDMDYPEVSNELRNWGVWYTNTLGLDGFRIDAVKHIKYSFTRDWINHVRSATGKNMFAVAEFWKNDLGAIENYLQKTNWNHSVFDVPLHYNLYNASKSGGNYDMRNIFNGTVVQRHPSHAVTFVDNHDSQPEEALESFVEEWFKPLAYALTLTREQGYPSVFYGDYYGIPTHGVPAMRSKIDPILEARQKYAYGPQHDYLDHPDVIGWTREGDSSHPKSGLATLITDGPGGSKRMYAGLKNAGETWYDITGNRSDTVKIGSDGWGEFHVNDGSVSIYVQK

SEQ ID NO: 29382 - protein, 483 aa, Bacillus sp.
HHNGTNGTMMQYFEWYLPNDGNHWNRLNSDASNLKSKGITAVWIPPAWKALSQNDVGYGAYDLYDLGEFNQKGTVRTKYGTRSQLQAAVTSLKNNGIQVYGDVVMNHKGGADATEMVRAVEVNPNNRNQEVTGEYTIEAWTRFDFPGRGNTHSSFKWRWYHFDGVDWDQSRNVNNRIYKFRGKAWDWEVDTEFGNYDYLMYTDYDMDHPEVVNELRNWGVWYTNTLGLDGFRIDAVKHIKYSFTRDWINHVRSATGKNMFAVAEFWKNDLGAIENYLQKTNWNHSVFDVPLHYNLYNASKSGGNYDMRNIFNGTVVQRHPSHAVTFVDNHDSQPEEALESFVEEWFKPLAYALTLTREQGYPSVFYGDYYGIPTHGVPAMRSKIDPILEARQKYAYGPQHDYLDHPDVIGWTREGDSSHPKSGLATLITDGPGGSKRMYAGLKNAGETWYDITGNRSDTVKIGSDGWGEFHVNDGSVSIYVQK

SEQ ID NO: 29383 - protein, 483 aa, Synthetic construct
HHNGTNGTMMQYFEWYLPNDGNHWNRLNSDASNLKSKGITAVWIPPAWKGASQNDVGYGAYDLYDLGEFNQKGTVRTKYGTRSQLQAAVTSLKNNGIQVYGDVVMNHKGGADATEMVRAVEVNPNNRNQEVTGEYTIEAWTRFDFPGRGNTHSSFKWRWYHFDGVDWDQSRRLNNRIYKFRGKAWDWEVDTEFGNYDYLMYADYDMDHPEGTNELRNWGVWYTNTLGLDGFRIDAVKHIKYSFTRDWINHVRSATGKNMFAVAEFWKNDLGAIENYLQKTNWNHSVFDVPLHYNLYNASKSGGNYDMRNIFNGTVVQRHPSHAVTFVDNHDSQPEEALESFVEEWFKPLAYALTLTREQGYPSVFYGDYYGIPTHGVPAMRSKIDPILEARQKYAYGPQHDYLDHPDVIGWTREGDSSHPKSGLATLITDGPGGSKRMYAGLKNAGETWYDITGNRSDTVKIGSDGWGEFHVNDGSVSIYVQK

SEQ ID NO: 29384 - protein, 483 aa, Bacillus sp.
HHNGTNGTMMQYFEWYLPNDGNHWNRLNSDASNLKSKGITAVWIPPAWKGASQNDVGYGAYDLYDLGEFNQKGTVRTKYGTRSQLQAAVTSLKNNGIQVYGDVVMNHKGGADATEMVRAVEVNPNNRNQEVTGEYTIEAWTRFDFPGRGNTHSSFKWRWYHFDGVDWDQSRRLNNRIYKFRGKAWDWEVDTEFGNYDYLMYADYDMDHPEVVNELRNWGVWYTNTLGLDGFRIDAVKHIKYSFTRDWINHVRSATGKNMFAVAEFWKNDLGAIENYLQKTNWNHSVFDVPLHYNLYNASKSGGNYDMRNIFNGTVVQRHPSHAVTFVDNHDSQPEEALESFVDPWFKPLAYALTLTREQGYPSVFYGDYYGIPTHGVPAMRSKIDPILEARQKYAYGPQHDYLDHPDVIGWTREGDSSHPKSGLATLITDGPGGSKRMYAGLKNAGETWYDITGNRSDTVKIGSDGWGEFHVNQKSVSIYVQK

SEQ ID NO: 29385 - protein, 485 aa, Bacillus sp.
HHNGTNGTMMQYFEWYLPNDGNHWNRLNSDASNLKSKGITAVWIPPAWKATSQNDVGYGAYDLYDLGEFNQKGTVRTKYGTRSQLQAAVTSLKNNGIQVYGDVVMNHKGGADATEMVRAVEVNPNNRNQEVTGEYTIEAWTRFDFPGRGNTHSSFKWRWYHFDGVDWDQSRNVNNRIYKFRGHGKAWDWEVDTEFGNYDYLMYADYDMDHPEVVNELRNWGVWYTNTLGLDGFRIDAVKHIKYSFTRDWINHVRSATGKNMFAVAEFWKNDLGAIENYLQKTNWNHSVFDVPLHYNLYNASKSGGNYDMRNIFNGTVVQRHPSHAVTFVDNHDSQPEEALESFVETWFKPLAYALTLTREQGYPSVFYGDYYGIPTHGVPAMRSKIDPILEARQKYAYGPQHDYLDHPDVIGWTREGDSSHPKSGLATLITDGPGGSKRMYAGLKNAGETWYDITGNRSDTVKIGSDGWGEFHVNDASVSIYVQK

SEQ ID NO: 29386 - protein, 483 aa, Bacillus sp.
HHNGTNGTMMQYFEWYLPNDGNHWNRLNSDASNLKSKGITAVWIPPAWKGASQNDVGYGAYDLYDLGEFNQKGTVRTKYGTRSQLQAAVTSLKNNGIQVYGDVVMNHKGGADATEMVRAVEVNPNNRNQEVTGEYTIEAWTRFDFPGRGNTHSSFKWRWYHFDGVDWDQSRRLNNRIYKFRGKAWDWEVDTEFGNYDYLMYADYDMDHPEVVNELRNWGVWYTNTLGLDGFRIDAVKHIKYSFTRDWINHVRSATGKNMFAVAEFWHNDLGSIENYLQKTNWNHSVFDVPLHYNLYNASKSGGNYDMRNIFNGTVVQRHPSHAVTFVDNHDSQPEEALESFVEEWFKPLAYALTLTREQGYPSVFYGDYYGIPTHGVPAMRSKIDPILEARQKYAYGPQHDYLDHPDVIGWTREGDSSHPKSGLATLITDGPGGSKRMYAGLKNAGETWYDITGNRSDTVKIGSDGWGEFHVNDGSVSIYVQK

SEQ ID NO: 29387 - protein, 483 aa, Bacillus sp.
HHNGTNGTMMQYFEWYLPNDGNHWNRLNSDASNLKSKGITAVWIPPAWKAASQNDVGYGAYDLYDLGEFNQKGTVRTKYGTRSQLQAAVTSLKNNGIQVYGDVVMNHKGGADATEMVDAVEVNPNNRNQEVTGEYTIEAWTRFDFPGRGNTHSSFKWRWYHFDGVDFDQSRQITNRIYKFRGKAWDWEVDTEFGNYDYLMYTDYDMDHPEVVNELRNWGVWYTNTLGLDGFRIDAVKHIKYSFTRDWINHVRSATGKNMFAVAEFWKNDLGAIENYLQKTNWNHSVFDVPLHYNLYNASKSGGNYDMRNIFNGTVVQRHPSHAVTFVDNHDSQPEEALESFVEEWFKPLAYALTLTREQGYPSVFYGDYYGIPTHGVPAMRSKIDPILEARQKYAYGPQHDYLDHPDVIGWTREGDSSHPKSGLATLITDGPGGSKRMYAGLKNAGETWYDITGNRSDTVKIGSDGWGEFHVNDGSVSIYVQK

SEQ ID NO: 29388 - protein, 483 aa, Bacillus sp.
HHNGTNGTMMQYFEWYLPNDGNHWNRLNSDASNLKSKGITAVWIPPAWKGASQNDVGYGAYDLYDLGEFNQKGTVRTKYGTRSQLQAAVTSLKNNGIQVYGDVVMNHKGGADATEMVRAVEVNPNNRNQEVTGEYTIEAWTRFDFPGRGNTHSSFKWRWYHFDGVDWDQSERLNNRIYKFRGKAWDWEVDTEFGNYDYLMYADYDMDHPEVVNELRNWGVWYTNTLGLDGFRIDAVKHIKYSFTRDWINHVRSATGKNMFAVAEFWKNDLGAIENYLQKTNWNHSVFDVPLHYNLYNASKSGGNYDMRNIFNGTVVQRHPSHAVTFVDNHDSQPEEALESFVEEWFKPLAYALTLTREQGLPSVFYGDYYGIPTHGVPAMRSKIDPILEARQKYAYGPQHDYLDHPDVIGWTREGDSSHPKSGLATLITDGPGGSKRMYAGLKNAGETWYDITGNRSDTVKIGSDGWGEFHVNDGSVSIYVQK

SEQ ID NO: 29389 - protein, 483 aa, Bacillus sp.
HHNGTNGTMMQYFEWYLPNDGNHWNRLNSDASNLKSKGITAVWIPPAWKGASQNDVGYGAYDLYDLGEFNQKGTVRTKYGTRSQLQAAVTSLKNNGIQVYGDVVMNHKGGADATEMVRAVEVNPNNRNQEVTGEYTIEAWTRFDFPGRGNTHSSFKWRWYHFDGVDWDQSRRLNNRIYKFRGKAWDWEVDTEFGNYDYLMYADYDMDHPEVVNELRNWGVWYTNTLGLDGFRIDAVKHIKYSFTRDWINHVRSATGKNMFAVAEFWKNDLGAIENYLQKTNWNHSVFDVPLHYNLYNASQSGGNYDMRNIFNGTVVQRHPSHAVTFVDNHDSQPEEALESFVETWFKPLAYALTLTREQGYPSVFYGDYYGIPTHGVPAMRSKIDPILEARQKYAYGPQHDYLDHPDVIGWTREGDSSHPKSGLATLITDGPGGSKRMYAGLKNAGETWYDITGNRSDTVKIGSDGWGEFHVNKQSVSIYVQK

SEQ ID NO: 29390 - protein, 485 aa, Bacillus sp.
HHNGTNGTMMQYFEWYLPNDGNHWNRLNSDASNLKSKGITAVWIPPAWKGASQNDVGYGAYDLYDLGEFNQKGTVRTKYGTRSQLQAAVTSLKNNGIQVYGDVVMNHKGGADATEMVRAVEVNPNNRNQEVTGEYTIEAWTRFDFPGRGNTHSSFKWRWYHFDGVDWDQSRRLNNRIYKFRGHGKAWDWEVDTEFGNYDYLMYADYDMDHPEVVNELRNWGVWYTNTLGLDGFRIDAVKHIKYSFTRDWINHVRSATGKNMFAVAEFWKNDLGAIENYLQKTNWNHSVFDVPLHYNLYNASKSAGNYDMRNIFNGTVVQRHPSHAVTFVDNHDSQPEEALESFVEPWFKPLAYALTLTREQGYPSVFYGDYYGIPTHGVPAMRSKIDPILEARQKYAYGPQHDYLDHPDVIGWTREGDSSHPKSGLATLITDGPGGSKRMYAGLKNAGETWYDITGNRSDTVKIGSDGWGEFHVNGASVSIYVQK

SEQ ID NO: 29391 - protein, 483 aa, Bacillus sp.
HHNGTNGTMMQYFEWYLPNDGNHWNRLNSDASNLKSKGITAVWIPPAWKGASQNDVGYGAYDLYDLGEFNQKGTVRTKYGTRSQLQAAVTSLKNNGIQVYGDVVMNHKGGADATEMVRAVEVNPNNRNQEVTGEYTIEAWTRFDFPGRGNTHSSFKWRWYHFDGVDFDQSRRLNNRIYKFRGKAWDWEVDTEFGNYDYLMYADYDMDHPEVVNELRNWGVWYTNTLGLDGFRIDAVKHIKYSFTRDWINHVRSATGKNMFAVAEFWKNDLGAIENYLQKTNWNHSVFDVPLHYNLYNASKSGGNYDMRNIFNGTVVQRHPSHAVTFVDNHDSQPEEALESFVDEWFKPLAYALTLTREQGYPSVFYGDYYGIPTHGVPAMRSKIDPILEARQKYAYGPQHDYLDHPDVIGWTREGDSSHPKSGLATLITDGPGGSKRMYAGLKNAGETWYDITGNRSDTVKIGSDGWGEFHVNKSSVSIYVQK

SEQ ID NO: 29392 - protein, 485 aa, Bacillus sp.
HHNGTNGTMMQYFEWYLPNDGNHWNRLNSDASNLKSKGITAVWIPPAWKAVSQNDVGYGAYDLYDLGEFNQKGTVRTKYGTRSQLQAAVTSLKNNGIQVYGDVVMNHKGGADATEMVDAVEVNPNNRNQEVTGEYTIEAWTRFDFPGRGNTHSSFKWRWYHFDGVDFDQSREFTNRIYKFRGHGKAWDWEVDTEFGNYDYLMYVDYDMDHPEVVNELRNWGVWYTNTLGLDGFRIDAVKHIKYSFTRDWINHVRSATGKNMFAVAEFWKNDLGAIENYLQKTNWNHSVFDVPLHYNLYNASKSGGNYDMRNIFNGTVVQRHPSHAVTFVDNHDSQPEEALESFVEEWFKPLAYALTLTREQGYPSVFYGDYYGIPTHGVPAMRSKIDPILEARQKYAYGPQHDYLDHPDVIGWTREGDSSHPKSGLATLITDGPGGSKRMYAGLKNAGETWYDITGNRSDTVKIGSDGWGEFHVNDGSVSIYVQK

SEQ ID NO: 29393 - protein, 483 aa, Synthetic construct
HHNGTNGTMMQYFEWYLPNDGNHWNRLNSDASNLKSKGITAVWIPPAWKGASQNDVGYGAYDLYDLGEFNQKGTVRTKYGTRSQLQAAVTSLKNNGIQVYGDVVMNHKGGADATEMVRAVEVNPNNRNQEVTGEYTIEAWTRFDFPGRGNTHSSFKWRWYHFDGVDWDQSRRLNNRIYKFRGKAWDWEVDTENGNYDYLMYADYDMDYPEAVNEMRNWGVWYTNTLGLDGFRIDAVKHIKYSFTRDWINHVRSATGKNMFAVAEFWKNDLGAIENYLQKTNWNHSVFDVPLHYNLYNASKSGGNYDMRNIFNGTVVQRHPSHAVTFVDNHDSQPEEALESFVEEWFKPLAYALTLTREQGYPSVFYGDYYGIPTHGVPAMRSKIDPILEARQKYAYGPQHDYLDHPDVIGWTREGDSSHPKSGLATLITDGPGGSKRMYAGLKNAGETWYDITGNRSDTVKIGSDGWGEFHVNDGSVSIYVQK

SEQ ID NO: 29394 - protein, 485 aa, Bacillus sp.
HHNGTNGTMMQYFEWYLPNDGNHWNRLNSDASNLKSKGITAVWIPPAWKAVSQNDVGYGAYDLYDLGEFNQKGTVRTKYGTRSQLQAAVTSLKNNGIQVYGDVVMNHKGGADLTEMVRAVEVNPNNRNQEVTGEYTIEAWTRFDFPGRGNTHSSFKWRWYHFDGVDWDQSREFTNRIYKFRGHGKAWDWEVDTEFGNYDYLMYVDYDMDHPEVVNELRNWGVWYTNTLGLDGFRIDAVKHIKYSFTRDWINHVRSATGKNMFAVAEFWKNDLGAIENYLQKTNWNHSVFDVPLHYNLYNASKSGGNYDMRNIFNGTVVQAHPNHAVTFVDNHDSQPEEALESFVEEWFKPLAYALTLTREQGYPSVFYGDYYGIPTHGVPAMRSKIDPILEARQKYAYGPQHDYLDHPDVIGWTREGDSSHPKSGLATLITDGPGGSKRMYAGLKNAGETWYDITGNRSDTVKIGSDGWGEFHVNDGSVSIYVQK

SEQ ID NO: 29395 - protein, 483 aa, Bacillus sp.
HHNGTNGTMMQYFEWYLPNDGNHWNRLNSDASNLKSKGITAVWIPPAWKGASQNDVGYGAYDLYDLGEFNQKGTVRTKYGTRSQLQAAVTSLKNNGIQVYGDVVMNHKGGADATEMVRAVEVNPNNRNQEVTGEYTIEAWTRFDFPGRGNTHSSFKWRWYHFDGVDWDQSRRLNNRIYKFRGKAWDWEVDTEFGNYDYLMYADYDMDHPEVVNELRNWGVWYTNTLGLDGFRIDAVKHIKYSFTRDWINHVRSATGKNMFAVAEFWNNDLGCIENYLQKTNWNHSVFDVPLHYNLYNASKSGGNYDMRNIFNGTVVQRHPSHAVTFVDNHDSQPEEALESFVEEWFKPLAYALTLTREQGYPSVFYGDYYGIPTHGVPAMRSKIDPILEARQKYAYGPQHDYLDHPDVIGWTREGDSSHPKSGLATLITDGPGGSKRMYAGLKNAGETWYDITGNRSDTVKIGSDGWGEFHVNDGSVSIYVQK

SEQ ID NO: 29396 - protein, 483 aa, Bacillus sp.
HHNGTNGTMMQYFEWYLPNDGNHWNRLNSDASNLKSKGITAVWIPPAWKGASQNDVGYGAYDLYDLGEFNQKGTVRTKYGTRSQLQAAVTSLKNNGIQVYGDVVMNHKGGADATEMVRAVEVNPNNRNQEVTGEYTIEAWTRFDFPGRGNTHSSFKWRWYHFDGVDWDQSRRLNNRIYLFRGKSWDWEVDTEFGNYDYLMYADYDMDHPEVVNELRNWGVWYTNTLGLDGFRIDAVKHIKYSFTRDWINHVRSATGKNMFAVAEFWKNDLGAIENYLQKTNWNHSVFDVPLHYNLYNASKSGGNYDMRNIFNGTVVQRHPSHAVTFVDNHDSQPEEALESFVEEWFKPLAYALTLTREQGYPSVFYGDYYGIPTHGVPAMRSKIDPILEARQKYAYGPQHDYLDHPDVIGWTREGDSSHPKSGLATLITDGPGGSKRMYAGLKNAGETWYDITGNRSDTVKIGSDGWGEFHVNDGSVSIYVQK

SEQ ID NO: 29397 - protein, 485 aa, Bacillus sp.
HHNGTNGTMMQYFEWYLPNDGNHWNRLNSDASNLKSKGITAVWIPPAWKAVSQNDVGYGAYDLYDLGEFNQKGTVRTKYGTRSQLQAAVTSLKNNGIQVYGDVVMNHKGGADATEMVRAVEVNPNNRNQEVTGEYTIEAWTRFDFPGRGNTHSSFKWRWYHFDGVDWDQSRDFNNRIYKFRGHGKAWDWEVDTEFGNYDYLMYADYDMDHPEVVNELRNWGVWYTNTLGLDGFRIDAVKHIKYSFTRDWINHVRSATGKNMFAVAEFWKNDLGAIENYLQKTNWNHSVFDVPLHYNLYNASKSQGNYDMRNIFNGTVVQRHPSHAVTFVDNHDSQPEEALESFVDTWFKPLAYALTLTREQGYPSVFYGDYYGIPTHGVPAMRSKIDPILEARQKYAYGPQHDYLDHPDVIGWTREGDSSHPKSGLATLITDGPGGSKRMYAGLKNAGETWYDITGNRSDTVKIGSDGWGEFHVNGSSVSIYVQK

SEQ ID NO: 29398 - protein, 483 aa, Bacillus sp.
HHNGTNGTMMQYFEWYLPNDGNHWNRLNSDASNLKSKGITAVWIPPAWKGASQNDVGYGAYDLYDLGEFNQKGTVRTKYGTRSQLQAAVTSLKNNGIQVYGDVVMNHKGGADATEMVRAVEVNPNNRNQEVTGEYTIEAWTRFDFPGRGNTHSSFKWRWYHFDGVDWDQSRRLNNRIYKFRGKAWDWEVDTEFGNYDYLMYADYDMDHPEVVNELRNWGVWYTNTLGLDGFRIDAVKHIKYSFTRDWINHVRSATGKNMFAVAEFWKNDLGAIENYLQKTNWNHSVFDVPLHYNLYNASKSAGNYDMRNIFNGTVVQRHPSHAVTFVDNHDSQPEEALESFVETWFKPLAYALTLTREQGYPSVFYGDYYGIPTHGVPAMRSKIDPILEARQKYAYGPQHDYLDHPDVIGWTREGDSSHPKSGLATLITDGPGGSKRMYAGLKNAGETWYDITGNRSDTVKIGSDGWGEFHVNDGSVSIYVQK

SEQ ID NO: 29399 - protein, 485 aa, Synthetic construct
HHNGTNGTMMQYFEWYLPNDGNHWNRLNSDASNLKSKGITAVWIPPAWKGASQNDVGYGAYDLYDLGEFNQKGTVRTKYGTRSQLQAAVTSLKNNGIQVYGDVVMNHKGGADATEMVRAVEVNPNNRNQEVTGEYTIEAWTRFDFPGRGNTHSSFKWRWYHFDGVDWDQSRRLNNRIYLFRPHGKVWDWPVDTENGNYDYLMYADIDMDHPEVVNELRNWGVWYTNTLGLDGFRIDAVKHIKYSFTRDWINHVRSATGKNMFAVAEFWKNDLGAIENYLQKTNWNHSVFDVPLHYNLYNASKSGGNYDMRNIFNGTVVQRHPSHAVTFVDNHDSQPEEALESFVEEWFKPLAYALTLTREQGYPSVFYGDYYGIPTHGVPAMRSKIDPILEARQKYAYGPQHDYLDHPDVIGWTREGDSSHPKSGLATLITDGPGGSKRMYAGLKNAGETWYDITGNRSDTVKIGSDGWGEFHVNDGSVSIYVQK

SEQ ID NO: 29400 - protein, 483 aa, Bacillus sp.
HHNGTNETMMQYFEWYLPNDGNHWNRLNSDASNLKSKGITAVWIPPAWKGASQNDVGYGAYDLYDLGEFNQKGTVRTKYGTRSQLQAAVTSLKNNGITVYGDVVMNHKGGADATEMVRAVEVNPNNRNQEVTGEYTIEAWTRFDFPGRGNTHSSFKWRWYHFDGVDWDQSRRLNNRIYKFRGKAWDWEVDTEFGNYDYLMYADYDMDHPEVVNELRNWGVWYTNTLGLDGFRIDAVKHIKYSFTRDWINHVRSATGKNMFAVAEFWKNDLGAIENYLQKTNWNHSVFDVPLHYNLYNASKSGGNYDMRNIFNGTVVQAHPSHAVTFVDNHDSQPEEALESFVEEWFKPLAYALTLTREQGYPSVFYGDYYGIPTHGVPAMRSKIDPILEARQKYAYGPQHDYLDHPDVIGWTREGDSSHPKSGLATLITDGPGGSKRMYAGLKNAGETWYDITGNRSDTVKIGSDGWGEFHVNDGSVSIYVQK

SEQ ID NO: 29401 - protein, 485 aa, Synthetic construct
HHNGTNGTMMQYFEWYLPNDGNHWNRLNSDASNLKSKGITAVWIPPAWKGASQNDVGYGAYDLYDLGEFNQKGTVRTKYGTRSQLQAAVTSLKNNGIQVYGDVVMNHKGGADATEMVRAVEVNPNNRNQEVTGEYTIEAWTRFDFPGRGNTHSSFKWRWYHFDGVDWDQSRRLNNRIYKFRGHGKAWDWEVDTENGNYDYLMYADYDYDHPEVVNEVRNWGVWYTNTLGLDGFRIDAVKHIKYSFVRDWINHVRSATGKNMFAVAEFWKNDLGAIENYLQKTNWNHSVFDVPLHYNLYNASKSGGNYDMRNIFNGTVVQRHPSHAVTFVDNHDSQPEEALESFVEEWFKPLAYALTLTREQGYPSVFYGDYYGIPTHGVPAMRSKIDPILEARQKYAYGPQHDYLDHPDVIGWTREGDSSHPKSGLATLITDGPGGSKRMYAGLKNAGETWYDITGNRSDTVKIGSDGWGEFHVNDGSVSIYVQK

SEQ ID NO: 29402 - protein, 483 aa, Bacillus sp.
HHNGTNGTMMQYFEWYLPNDGNHWNRLNSDASNLKSKGIKAVWIPPAWKGASQNDVGYGAYDLYDLGEFNQRGTVRTKYGTRSQLQAAVTSLKNNGINVYGDVVMNHKGGADATEMVRAVEVNPNNRNQEVTGEYTIEAWTRFDFPGRGNTHSSFKWRWYHFDGVDWDQSRRLNNRIYKFRGKAWDWEVDTEFGNYDYLMYADYDMDHPEVVNELRNWGVWYTNTLGLDGFRIDAVKHIKYSFTRDWINHVRSATGKNMFAVAEFWKNDLGAIENYLQKTNWNHSVFDVPLHYNLYNASKSGGNYDMRNIFNGTVVQAHPMHAVTFVDNHDSQPEEALESFVEEWFKPLAYALTLTREQGYPSVFYGDYYGIPTHGVPAMRSKIDPILEARQKYAYGPQHDYLDHPDVIGWTREGDSSHPKSGLATLITDGPGGSKRMYAGLKNAGETWYDITGNRSDTVKIGSDGWGEFHVNDGSVSIYVQK

SEQ ID NO: 29403 - protein, 483 aa, Bacillus sp.
HHNGTNGTMMQYFEWYLPNDGNHWNRLNSDASNLKSKGITAVWIPPAWKGASQNDVGYGAYDLYDLGEFNQKGTVRTKYGTRSQLQAAVTSLKNNGIQVYGDVVMNHKGGADATEMVRAVEVNPNNRNQEVTGEYTIEAWTRFDFPGRGNTHSSFKWRWYHFDGVDWDQSRRLNNRIYKFRGKAWDWEVDTEFGNYDYLMYADYDMDHPEVVNELRNWGVWYTNTLGLDGFRIDAVKHIKYSFTRDWINHVRSATGKNMFAVAEFWKNDLGAIENYLQKTNWNHSVFDVPLHYNLYNASQSGGNYDMRNIFNGTVVQRHPSHAVTFVDNHDSQPEEALESFVEPWFKPLAYALTLTREQGYPSVFYGDYYGIPTHGVPAMRSKIDPILEARQKYAYGPQHDYLDHPDVIGWTREGDSSHPKSGLATLITDGPGGSKRMYAGLKNAGETWYDITGNRSDTVKIGSDGWGEFHVNKTSVSIYVQK

SEQ ID NO: 29404 - protein, 485 aa, Bacillus sp.
HHNGTNGTMMQYFEWYLPNDGNHWNRLNSDASNLKSKGITAVWIPPAWKAASQNDVGYGAYDLYDLGEFNQKGTVRTKYGTRSQLQAAVTSLKNNGIQVYGDVVMNHKGGADATEMVRAVEVNPNNRNQEVTGEYTIEAWTRFDFPGRGNTHSSFKWRWYHFDGVDWDQSRDLQNRIYKFRGHGKAWDWEVDTEFGNYDYLMYVDYDMDHPEVVNELRNWGVWYTNTLGLDGFRIDAVKHIKYSFTRDWINHVRSATGKNMFAVAEFWKNDLGAIENYLQKTNWNHSVFDVPLHYNLYNASKSGGNYDMRNIFNGTVVQRHPSHAVTFVDNHDSQPEEALESFVDEWFKPLAYALTLTREQGYPSVFYGDYYGIPTHGVPAMRSKIDPILEARQKYAYGPQHDYLDHPDVIGWTREGDSSHPKSGLATLITDGPGGSKRMYAGLKNAGETWYDITGNRSDTVKIGSDGWGEFHVNKSSVSIYVQK

SEQ ID NO: 29405 - protein, 483 aa, Bacillus sp.
HHNGTNGTMMQYFEWYLPNDGNHWNRLNSDASNLKSKGITAVWIPPAWKGASQNDVGYGAYDLYDLGEFNQKGTVRTKYGTRSQLQAAVTSLKNNGIQVYGDVVMNHKGGADATEMVRAVEVNPNNRNQEVTGEYTIEAWTRFDFPGRGNTHSSFKWRWYHFDGVDWDQSRRLNNRIYKFRGKAWDWEVDTEFGNYDYLMYADYDMDHPEVVNELRNWGVWYTNTLGLDGFRIDAVKHIKYSFTRDWINHVRSATGKNMFAVAEFWLNDLGLIENYLQKTNWNHSVFDVPLHYNLYNASKSGGNYDMRNIFNGTVVQRHPSHAVTFVDNHDSQPEEALESFVEEWFKPLAYALTLTREQGYPSVFYGDYYGIPTHGVPAMRSKIDPILEARQKYAYGPQHDYLDHPDVIGWTREGDSSHPKSGLATLITDGPGGSKRMYAGLKNAGETWYDITGNRSDTVKIGSDGWGEFHVNDGSVSIYVQK

SEQ ID NO: 29406 - protein, 483 aa, Bacillus sp.
HHNGTNGTMMQYFEWYLPNDGNHWNRLNSDASNLKSKGITAVWIPPAWKGASQNDVGYGAYDLYDLGEFNQKGTVRTKYGTRSQLQAAVTSLKNNGIQVYGDVVMNHKGGADATEMVRAVEVNPNNRNQEVTGEYTIEAWTRFDFPGRGNTHSSFKWRWYHFDGVDWDQSRRLNNRIYKFRGKAWDWEVDTEFGNYDYLMYADYDMDHPEVVNELRNWGVWYTNTLGLDGFRIDAVKHIKYSFTRDWINHVRSATGKNMFAVAEFWLNDLGGIENYLQKTNWNHSVFDVPLHYNLYNASKSGGNYDMRNIFNGTVVQRHPSHAVTFVDNHDSQPEEALESFVEEWFKPLAYALTLTREQGYPSVFYGDYYGIPTHGVPAMRSKIDPILEARQKYAYGPQHDYLDHPDVIGWTREGDSSHPKSGLATLITDGPGGSKRMYAGLKNAGETWYDITGNRSDTVKIGSDGWGEFHVNDGSVSIYVQK

SEQ ID NO: 29407 - protein, 483 aa, Bacillus sp.
HHNGTNGTMMQYFEWYLPNDGNHWNRLNSDASNLKSKGITAVWIPPAWKGASQNDVGYGAYDLYDLGEFNQKGTVRTKYGTRSQLQAAVTSLKNNGIQVYGDVVMNHKGGADATEMVRAVEVNPNNRNQEVTGEYTIEAWTRFDFPGRGNTHSSFKWRWYHFDGVDWDQSRRLNNRIYKFRGKAWDWEVDTEFGNYDYLMYADYDMDHPEVVNELRNWGVWYTNTLGLDGFRIDAVKHIKYSFTRDWINHVRSATGKNMFAVAEFWKNDLGAIENYLQKTNWNHSVFDVPLHYNLYNASKSQGNYDMRNIFNGTVVQRHPSHAVTFVDNHDSQPEEALESFVEEWFKPLAYALTLTREQGYPSVFYGDYYGIPTHGVPAMRSKIDPILEARQKYAYGPQHDYLDHPDVIGWTREGDSSHPKSGLATLITDGPGGSKRMYAGLKNAGETWYDITGNRSDTVKIGSDGWGEFHVNKKSVSIYVQK

SEQ ID NO: 29408 - protein, 485 aa, Bacillus sp.
HHNGTNGTMMQYFEWYLPNDGNHWNRLNSDASNLKSKGITAVWIPPAWKGASQNDVGYGAYDLYDLGEFNQKGTVRTKYGTRSQLQAAVTSLKNNGIQVYGDVVMNHKGGADATEMVRAVEVNPNNRNQEVTGEYTIEAWTRFDFPGRGNTHSSFKWRWYHFDGVDWDQSRRLNNRIYKFRGHGKAWDWEVDTEFGNYDYLMYADYDMDHPEVVNELRNWGVWYTNTLGLDGFRIDAVKHIKYSFTRDWINHVRSATGKNMFAVAEFWKNDLGAIENYLQKTNWNHSVFDVPLHYNLYNASKSGGNYDMRNIFNGTVVQRHPSHAVTFVDNHDSQPEEALESFVDPWFKPLAYALTLTREQGYPSVFYGDYYGIPTHGVPAMRSKIDPILEARQKYAYGPQHDYLDHPDVIGWTREGDSSHPKSGLATLITDGPGGSKRMYAGLKNAGETWYDITGNRSDTVKIGSDGWGEFHVNKQSVSIYVQK

SEQ ID NO: 29409 - protein, 485 aa, Bacillus sp.
HHNGTNGTMMQYFEWYLPNDGNHWNRLNSDASNLKSKGITAVWIPPAWKAASQNDVGYGAYDLYDLGEFNQKGTVRTKYGTRSQLQAAVTSLKNNGIQVYGDVVMNHKGGADATEMVRAVEVNPNNRNQEVTGEYTIEAWTRFDFPGRGNTHSSFKWRWYHFDGVDWDQSRDLQNRIYKFRGHGKAWDWEVDTEFGNYDYLMYADYDMDHPEVVNELRNWGVWYTNTLGLDGFRIDAVKHIKYSFTRDWINHVRSATGKNMFAVAEFWKNDLGAIENYLQKTNWNHSVFDVPLHYNLYNASKSSGNYDMRNIFNGTVVQRHPSHAVTFVDNHDSQPEEALESFVDEWFKPLAYALTLTREQGYPSVFYGDYYGIPTHGVPAMRSKIDPILEARQKYAYGPQHDYLDHPDVIGWTREGDSSHPKSGLATLITDGPGGSKRMYAGLKNAGETWYDITGNRSDTVKIGSDGWGEFHVNKQSVSIYVQK

SEQ ID NO: 29410 - protein, 483 aa, Bacillus sp.
HHNGTNGTMMQYFEWYLPNDGNHWNRLNSDASNLKSKGITAVWIPPAWKGASQNDVGYGAYDLYDLGEFNQKGTVRTKYGTRSQLQAAVTSLKNNGIQVYGDVVMNHKGGADATEMVRAVEVNPNNRNQEVTGEYTIEAWTRFDFPGRGNTHSSFKWRWYHFDGVDWDQSRRLNNRIYKFRGKAWDWEVDTEFGNYDYLMYADYDMDHPEVVNELRNWGVWYTNTLGLDGFRIDAVKHIKYSFTRDWINHVRSATGKNMFAVAEFWKNDLGAIENYLQKTNWNHSVFDVPLHYNLYNASKSGGNYDMRNIFNGTVVQRHPSHAVTFVDNHDSQPEEALESFVEPWFKPLAYALTLTREQGYPSVFYGDYYGIPTHGVPAMRSKIDPILEARQKYAYGPQHDYLDHPDVIGWTREGDSSHPKSGLATLITDGPGGSKRMYAGLKNAGETWYDITGNRSDTVKIGSDGWGEFHVNDQSVSIYVQK

SEQ ID NO: 29411 - protein, 483 aa, Bacillus sp.
HHNGTNGTMMQYFEWYLPNDGNHWNRLNSDASNLKSKGITAVWIPPAWKGASQNDVGYGAYDLYDLGEFNQKGTVRTKYGTRSQLQAAVTSLKNNGIQVYGDVVMNHKGGADATEMVRAVEVNPNNRNQEVTGEYTIEAWTRFDFPGRGNTHSSFKWRWYHFDGVDWDQSRRLNNRIYKFRGKAWDWEVDTEFGNYDYLMYADYDMDHPEVVNELRNWGVWYTNTLGLDGFRIDAVKHIKYSFTRDWINHVRSATGKNMFAVAEFWKNDLGAIENYLQKTNWNHSVFDVPLHYNLYNASKSGGNYDMRNIFNGTVVQRHPSHAVTFVDNHDSQPEEALESFVEPWFKPLAYALTLTREQGYPSVFYGDYYGIPTHGVPAMRSKIDPILEARQKYAYGPQHDYLDHPDVIGWTREGDSSHPKSGLATLITDGPGGSKRMYAGLKNAGETWYDITGNRSDTVKIGSDGWGEFHVNDKSVSIYVQK

SEQ ID NO: 29412 - protein, 483 aa, Bacillus sp.
HHNGTNGTMMQYFEWYLPNDGNHWNRLNSDASNLKSKGITAVWIPPAWKGASQNDVGYGAYDLYDLGEFNQKGTVRTKYGTRSQLQAAVTSLKNNGIQVYGDVVMNHKGGADATEMVRAVEVNPNNRNQEVTGEYTIEAWTRFDFPGRGNTHSSFKWRWYHFDGVDWDQSRRLNNRIYKFRGKAWDWEVDTEFGNYDYLMYADYDMDHPEVVNELRNWGVWYTNTLGLDGFRIDAVKHIKYSFTRDWINHVRSATGKNMFAVAEFWKNDLGAIENYLQKTNWNHSVFDVPLHYNLYNASKSAGNYDMRNIFNGTVVQRHPSHAVTFVDNHDSQPEEALESFVEEWFKPLAYALTLTREQGYPSVFYGDYYGIPTHGVPAMRSKIDPILEARQKYAYGPQHDYLDHPDVIGWTREGDSSHPKSGLATLITDGPGGSKRMYAGLKNAGETWYDITGNRSDTVKIGSDGWGEFHVNKSSVSIYVQK

SEQ ID NO: 29413 - protein, 485 aa, Bacillus sp.
HHNGTNGTMMQYFEWYLPNDGNHWNRLNSDASNLKSKGITAVWIPPAWKGASQNDVGYGAYDLYDLGEFNQKGTVRTKYGTRSQLQAAVTSLKNNGIQVYGDVVMNHKGGADATEMVRAVEVNPNNRNQEVTGEYTIEAWTRFDFPGRGNTHSSFKWRWYHFDGVDWDQSRRLNNRIYKFRGHGKAWDWEVDTEFGNYDYLMYADYDMDHPEVVNELRNWGVWYTNTLGLDGFRIDAVKHIKYSFTRDWINHVRSATGKNMFAVAEFWKNDLGAIENYLQKTNWNHSVFDVPLHYNLYNASKSGGNYDMRNIFNGTVVQRHPSHAVTFVDNHDSQPEEALESFVDTWFKPLAYALTLTREQGYPSVFYGDYYGIPTHGVPAMRSKIDPILEARQKYAYGPQHDYLDHPDVIGWTREGDSSHPKSGLATLITDGPGGSKRMYAGLKNAGETWYDITGNRSDTVKIGSDGWGEFHVNKKSVSIYVQK

SEQ ID NO: 29414 - protein, 485 aa, Bacillus sp.
HHNGTNGTMMQYFEWYLPNDGNHWNRLNSDASNLKSKGITAVWIPPAWKAVSQNDVGYGAYDLYDLGEFNQKGTVRTKYGTRSQLQAAVTSLKNNGIQVYGDVVMNHKGGADATEMVRAVEVNPNNRNQEVTGEYTIEAWTRFDFPGRGNTHSSFKWRWYHFDGVDWDQSREFTNRIYKFRGHGKAWDWEVDTEFGNYDYLMYVDYDMDHPEVVNELRNWGVWYTNTLGLDGFRIDAVKHIKYSFTRDWINHVRIATGKNMFAVAEFWKNDLGAIENYLQKTNWNHSVFDVPLHYNLYNASKSGGNYDMRNIFNGTVVQRHPSHAVTFVDNHDSQPEEALESFVDEWFKPLAYALTLTREQGYPSVFYGDYYGIPTHGVPAMRSKIDPILEARQKYAYGPQHDYLDHPDVIGWTREGDSSHPKSGLATLITDGPGGSKRMYAGLKNAGETWYDITGNRSDTVKIGSDGWGEFHVNDQSVSIYVQK

SEQ ID NO: 29415 - protein, 485 aa, Bacillus sp.
HHNGTNHTMMQYFEWYLPNDGNHWNRLNSDASNLKSKGITAVWIPPAWKGASQNDVGYGAYDLYDLGEFNQKGTVRTKYGTRSQLQAAVTSLKNNGISVYGDVVMNHKGGADATEMVRAVEVNPNNRNQEVTGEYTIEAWTRFDFPGRGNTHSSFKWRWYHFDGVDWDQSRRLNNRIYKFRGHGKAWDWEVDTEFGNYDYLMYADYDMDHPEVVNELRNWGVWYTNTLGLDGFRIDAVKHIKYSFTRDWINHVRSATGKNMFAVAEFWKNDLGAIENYLQKTNWNHSVFDVPLHYNLYNASKSGGNYDMRNIFNGTVVQAHPMLAVTFVDNHDSQPEEALESFVEEWFKPLAYALTLTREQGYPSVFYGDYYGIPTHGVPAMRSKIDPILEARQKYAYGPQHDYLDHPDVIGWTREGDSSHPKSGLATLITDGPGGSKRMYAGLKNAGETWYDITGNRSDTVKIGSDGWGEFHVNDGSVSIYVQK

SEQ ID NO: 29416 - protein, 483 aa, Bacillus sp.
HHNGTNGTMMQYFEWYLPNDGNHWNRLNSDASNLKSKGITAVWIPPAWKGASQNDVGYGAYDLYDLGEFNQKGTVRTKYGTRSQLQAAVTSLKNNGIQVYGDVVMNHKGGADATEMVRAVEVNPNNRNQEVTGEYTIEAWTRFDFPGRGNTHSSFKWRWYHFDGVDWDQSRRTNNRIYKFRGKAWDWEVDTEFGNYDYLMYTDYDMDHPEVVNELRNWGVWYTNTLGLDGFRIDAVKHIKYSFTRDWINHVRIATGKNMFAVAEFWKNDLGAIENYLQKTNWNHSVFDVPLHYNLYNASKSGGNYDMRNIFNGTVVQRHPSHAVTFVDNHDSQPEEALESFVDEWFKPLAYALTLTREQGYPSVFYGDYYGIPTHGVPAMRSKIDPILEARQKYAYGPQHDYLDHPDVIGWTREGDSSHPKSGLATLITDGPGGSKRMYAGLKNAGETWYDITGNRSDTVKIGSDGWGEFHVNDQSVSIYVQK

SEQ ID NO: 29417 - protein, 483 aa, Bacillus sp.
HHNGTNGTMMQYFEWYLPNDGNHWNRLNSDASNLKSKGITAVWIPPAWKAASQNDVGYGAYDLYDLGEFNQKGTVRTKYGTRSQLQAAVTSLKNNGIQVYGDVVMNHKGGADLTEMVRAVEVNPNNRNQEVTGEYTIEAWTRFDFPGRGNTHSSFKWRWYHFDGVDWDQSRQITNRIYKFRGKAWDWEVDTEFGNYDYLMYTDYDMDHPEVVNELRNWGVWYTNTLGLDGFRIDAVKHIKYSFTRDWINHVRSATGKNMFAVAEFWKNDLGAIENYLQKTNWNHSVFDVPLHYNLYNASKSGGNYDMRNIFNGTVVQRHPSHAVTFVDNHDSQPEEALESFVEEWFKPLAYALTLTREQGYPSVFYGDYYGIPTHGVPAMRSKIDPILEARQKYAYGPQHDYLDHPDVIGWTREGDSSHPKSGLATLITDGPGGSKRMYAGLKNAGETWYDITGNRSDTVKIGSDGWGEFHVNDGSVSIYVQK

SEQ ID NO: 29418 - protein, 485 aa, Bacillus sp.
HHNGTNGTMMQYFEWYLPNDGNHWNRLNSDASNLKSKGITAVWIPPAWKGASQNDVGYGAYDLYDLGEFNQKGTVRTKYGTRSQLQAAVTSLKNNGIQVYGDVVMNHKGGADATEMVRAVEVNPNNRNQEVTGEYTIEAWTRFDFPGRGNTHSSFKWRWYHFDGVDWDQSRRLNNRIYKFRGHGKAWDWEVDTEFGNYDYLMYADYDMDHPEVVNELRNWGVWYTNTLGLDGFRIDAVKHIKYSFTRDWINHVRSATGKNMFAVAEFWKNDLGAIENYLQKTNWNHSVFDVPLHYNLYNASKSAGNYDMRNIFNGTVVQRHPSHAVTFVDNHDSQPEEALESFVETWFKPLAYALTLTREQGYPSVFYGDYYGIPTHGVPAMRSKIDPILEARQKYAYGPQHDYLDHPDVIGWTREGDSSHPKSGLATLITDGPGGSKRMYAGLKNAGETWYDITGNRSDTVKIGSDGWGEFHVNDGSVSIYVQK

SEQ ID NO: 29419 - protein, 485 aa, Bacillus sp.
HHNGTNDTMMQYFEWYLPNDGNHWNRLNSDASNLKSKGITAVWIPPAWKGASQNDVGYGAYDLYDLGEFNQKGTVRTKYGTRSQLQAAVTSLKNNGIAVYGDVVMNHKGGADATEMVRAVEVNPNNRNQEVTGEYTIEAWTRFDFPGRGNTHSSFKWRWYHFDGVDWDQSRRLNNRIYKFRGHGKAWDWEVDTEFGNYDYLMYADYDMDHPEVVNELRNWGVWYTNTLGLDGFRIDAVKHIKYSFTRDWINHVRSATGKNMFAVAEFWKNDLGAIENYLQKTNWNHSVFDVPLHYNLYNASKSGGNYDMRNIFNGTVVQMHPSHAVTFVDNHDSQPEEALESFVEEWFKPLAYALTLTREQGYPSVFYGDYYGIPTHGVPAMRSKIDPILEARQKYAYGPQHDYLDHPDVIGWTREGDSSHPKSGLATLITDGPGGSKRMYAGLKNAGETWYDITGNRSDTVKIGSDGWGEFHVNDGSVSIYVQK

SEQ ID NO: 29420 - protein, 485 aa, Bacillus sp.
HHNGTNGTMMQYFEWYLPNDGNHWNRLNSDASNLKSKGITAVWIPPAWKGASQNDVGYGAYDLYDLGEFNQKGTVRTKYGTRSQLQAAVTSLKNNGIQVYGDVVMNHKGGADATEMVRAVEVNPNNRNQEVTGEYTIEAWTRFDFPGRGNTHSSFKWRWYHFDGVDWDQSRRLNNRIYKFRAHGKAWDWEVDTEFGNYDYLMYADYDMDHPETINELRNWGVWYTNTLGLDGFRIDAVKHIKYSFTRDWINHVRSATGKNMFAVAEFWKNDLGAIENYLQKTNWNHSVFDVPLHYNLYNASKSGGNYDMRNIFNGTVVQRHPSHAVTFVDNHDSQPEEALESFVEEWFKPLAYALTLTREQGYPSVFYGDYYGIPTHGVPAMRSKIDPILEARQKYAYGPQHDYLDHPDVIGWTREGDSSHPKSGLATLITDGPGGSKRMYAGLKNAGETWYDITGNRSDTVKIGSDGWGEFHVNDGSVSIYVQK

SEQ ID NO: 29421 - protein, 483 aa, Synthetic construct
HHNGTNGTMMQYFEWYLPNDGNHWNRLNSDASNLKSKGITAVWIPPAWKGASQNDVGYGAYDLYDLGEFNQKGTVRTKYGTRSQLQAAVTSLKNNGIQVYGDVVMNHKGGADATEMVRAVEVNPNNRNQEVTGEYTIEAWTRFDFPGRGNTHSSFKWRWYHFDGVDWDQSRRLNNRIYLFRGKHWDWPVDTENGNYDYLMYADIDMDHPEVVNELRNWGVWYTNTLGLDGFRIDAVKHIKYSFTRDWINHVRSATGKNMFAVAEFWKNDLGAIENYLQKTNWNHSVFDVPLHYNLYNASKSGGNYDMRNIFNGTVVQRHPSHAVTFVDNHDSQPEEALESFVEEWFKPLAYALTLTREQGYPSVFYGDYYGIPTHGVPAMRSKIDPILEARQKYAYGPQHDYLDHPDVIGWTREGDSSHPKSGLATLITDGPGGSKRMYAGLKNAGETWYDITGNRSDTVKIGSDGWGEFHVNDGSVSIYVQK

SEQ ID NO: 29422 - protein, 483 aa, Bacillus sp.
HHNGTNGTMMQYFEWYLPNDGNHWNRLNSDASNLKSKGITAVWIPPAWKGASQNDVGYGAYDLYDLGEFNQKGTVRTKYGTRSQLQAAVTSLKNNGIQVYGDVVMNHKGGADATEMVRAVEVNPNNRNQEVTGEYTIEAWTRFDFPGRGNTHSSFKWRWYHFDGVDWDQSRRLNNRIYKFRGKAWDWEVDTEFGNYDYLMYADYDMDHPEVVNELRNWGVWYTNTLGLDGFRIDAVKHIKYSFTRDWINHVRSATGKNMFAVAEFWKNDLGAIENYLQKTNWNHSVFDVPLHYNLYNASKSQGNYDMRNIFNGTVVQRHPSHAVTFVDNHDSQPEEALESFVETWFKPLAYALTLTREQGYPSVFYGDYYGIPTHGVPAMRSKIDPILEARQKYAYGPQHDYLDHPDVIGWTREGDSSHPKSGLATLITDGPGGSKRMYAGLKNAGETWYDITGNRSDTVKIGSDGWGEFHVNDGSVSIYVQK

SEQ ID NO: 29423 - protein, 485 aa, Bacillus sp.
HHNGTNGTMMQYFEWYLPNDGNHWNRLNSDASNLKSKGITAVWIPPAWKGASQNDVGYGAYDLYDLGEFNQKGTVRTKYGTRSQLQAAVTSLKNNGIQVYGDVVMNHKGGADATEMVRAVEVNPNNRNQEVTGEYTIEAWTRFDFPGRGNTHSSFKWRWYHFDGVDWDQSRRLNNRIYKFRGHGKAWDWEVDTEFGNYDYLMYADYDMDHPEVVNELRNWGVWYTNTLGLDGFRIDAVKHIKYSFTRDWINHVRSATGKNMFAVAEFWKNDLGAIENYLQKTNWNHSVFDVPLHYNLYNASKSGGNYDMRNIFNGTVVQRHPSHAVTFVDNHDSQPEEALESFVETWFKPLAYALTLTREQGYPSVFYGDYYGIPTHGVPAMRSKIDPILEARQKYAYGPQHDYLDHPDVIGWTREGDSSHPKSGLATLITDGPGGSKRMYAGLKNAGETWYDITGNRSDTVKIGSDGWGEFHVNQASVSIYVQK

SEQ ID NO: 29424 - protein, 483 aa, Bacillus sp.
HHNGTNGTMMQYFEWYLPNDGNHWNRLNSDASNLKSKGITAVWIPPAWKGASQNDVGYGAYDLYDLGEFNQKGTVRTKYGTRSQLQAAVTSLKNNGIQVYGDVVMNHKGGADATEMVRAVEVNPNNRNQEVTGEYTIEAWTRFDFPGRGNTHSSFKWRWYHFDGVDWDQSRRLNNRIYLFRGKAWSWEVPTENGNYDYLMYADIDMDHPEVVNELRNWGVWYTNTLGLDGFRIDAVKHIKYSFTRDWINHVRSATGKNMFAVAEFWKNDLGAIENYLQKTNWNHSVFDVPLHYNLYNASKSGGNYDMRNIFNGTVVQRHPSHAVTFVDNHDSQPEEALESFVEEWFKPLAYALTLTREQGYPSVFYGDYYGIPTHGVPAMRSKIDPILEARQKYAYGPQHDYLDHPDVIGWTREGDSSHPKSGLATLITDGPGGSKRMYAGLKNAGETWYDITGNRSDTVKIGSDGWGEFHVNDGSVSIYVQK

SEQ ID NO: 29425 - protein, 483 aa, Bacillus sp.
HHNGTNGTMMQYFEWYLPNDGNHWNRLNSDASNLKSKGITAVWIPPAWKAASQNDVGYGAYDLYDLGEFNQKGTVRTKYGTRSQLQAAVTSLKNNGIQVYGDVVMNHKGGADATEMVRAVEVNPNNRNQEVTGEYTIEAWTRFDFPGRGNTHSSFKWRWYHFDGVDWDQSRRTSNRIYKFRGKAWDWEVDTEFGNYDYLMYVDYDMDHPEVVNELRNWGVWYTNTLGLDGFRIDAVKHIKYSFTRDWINHVRSATGKNMFAVAEFWKNDLGAIENYLQKTNWNHSVFDVPLHYNLYNASKSGGNYDMRNIFNGTVVQRHPSHAVTFVDNHDSQPEEALESFVEEWFKPLAYALTLTREQGYPSVFYGDYYGIPTHGVPAMRSKIDPILEARQKYAYGPQHDYLDHPDVIGWTREGDSSHPKSGLATLITDGPGGSKRMYAGLKNAGETWYDITGNRSDTVKIGSDGWGEFHVNDGSVSIYVQK

SEQ ID NO: 29426 - protein, 483 aa, Bacillus sp.
HHNGTNGTMMQYFEWYLPNDGNHWNRLNSDASNLKSKGITAVWIPPAWKGASQNDVGYGAYDLYDLGEFNQKGTVRTKYGTRSQLQAAVTSLKNNGINVYGDVVMNHKGGADLTEMVRAVEVNPNNRNQEVTGEYTIEAWTRFDFPGRGNTHSSFKWRWYHFDGVDWDQSRRLNNRIYKFRGKAWDWEVDTEFGNYDYLMYADYDMDHPEVVNELRNWGVWYTNTLGLDGFRIDAVKHIKYSFTRDWINHVRSATGKNMFAVAEFWKNDLGAIENYLQKTNWNHSVFDVPLHYNLYNASKSVGNYDMRNIFNGTVVQAHPMHAVTFVDNHDSQPEEALESFVEEWFKPLAYALTLTREQGYPSVFYGDYYGIPTHGVPAMRSKIDPILEARQKYAYGPQHDYLDHPDVIGWTREGDSSHPKSGLATLITDGPGGSKRMYAGLKNAGETWYDITGNRSDTVKIGSDGWGEFHVNDGSVSIYVQK

SEQ ID NO: 29427 - protein, 483 aa, Bacillus sp.
HHNGTNGTMMQYFEWYLPNDGNHWNRLNSDASNLKSKGITAVWIPPAWKGASQNDVGYGAYDLYDLGEFNQKGTVRTKYGTRSQLQAAVTSLKNNGIQVYGDVVMNHKGGADATEMVRAVEVNPNNRNQEVTGEYTIEAWTRFDFPGRGNTHSSFKWRWYHFDGVDWDQSREFDNRIYKFRGKAWDWEVDTEFGNYDYLMYADYDMDHPETTNEMRNWGVWYTNTLGLDGFRIDAVKHIKYSFTRDWINHVRSATGKNMFAVAEFWKNDLGAIENYLQKTNWNHSVFDVPLHYNLYNASKSGGNYDMRNIFNGTVVQRHPSHAVTFVDNHDSQPEEALESFVEEWFKPLAYALTLTREQGYPSVFYGDYYGIPTHGVPAMRSKIDPILEARQKYAYGPQHDYLDHPDVIGWTREGDSSHPKSGLATLITDGPGGSKRMYAGLKNAGETWYDITGNRSDTVKIGSDGWGEFHVNDGSVSIYVQK

SEQ ID NO: 29428 - protein, 485 aa, Bacillus sp.
HHNGTNGTMMQYFEWYLPNDGNHWNRLNSDASNLKSKGITAVWIPPAWKAASQNDVGYGAYDLYDLGEFNQKGTVRTKYGTRSQLQAAVTSLKNNGIQVYGDVVMNHKGGADATEMVPAVEVNPNNRNQEVTGEYTIEAWTRFDFPGRGNTHSSFKWRWYHFDGVDWDQSRDLQNRIYKFRGHGKAWDWEVDTEFGNYDYLMYADYDMDHPEVVNELRNWGVWYTNTLGLDGFRIDAVKHIKYSFTRDWINHVRSATGKNMFAVAEFWKNDLGAIENYLQKTNWNHSVFDVPLHYNLYNASKSGGNYDMRNIFNGTVVQRHPSHAVTFVDNHDSQPEEALESFVETWFKPLAYALTLTREQGYPSVFYGDYYGIPTHGVPAMRSKIDPILEARQKYAYGPQHDYLDHPDVIGWTREGDSSHPKSGLATLITDGPGGSKRMYAGLKNAGETWYDITGNRSDTVKIGSDGWGEFHVNKASVSIYVQK

SEQ ID NO: 29429 - protein, 483 aa, Bacillus sp.
HHNGTNGTMMQYFEWYLPNDGNHWNRLNSDASNLKSKGITAVWIPPAWKATSQNDVGYGAYDLYDLGEFNQKGTVRTKYGTRSQFQAAVTSLKNNGIQVYGDVVMNHKGGADATEMVRAVEVNPNNRNQEVTGEYTIEAWTRFDFPGRGNTHSSFKWRWYHFDGVDWDQSRELNNRIYKFRGKAWDWEVDTEFGNYDYLMYTDYDMDHPEVVNELRNWGVWYTNTLGLDGFRIDAVKHIKYSFTRDWINHVRSATGKNMFAVAEFWKNDLGAIENYLQKTNWNHSVFDVPLHYNLYNASKSGGNYDMRNIFNGTVVQRHPSHAVTFVDNHDSQPEEALESFVDPWFKPLAYALTLTREQGYPSVFYGDYYGIPTHGVPAMRSKIDPILEARQKYAYGPQHDYLDHPDVIGWTREGDSSHPKSGLATLITDGPGGSKRMYAGLKNAGETWYDITGNRSDTVKIGSDGWGEFHVNGGSVSIYVQK

SEQ ID NO: 29430 - protein, 485 aa, Synthetic construct
HHNGTNGTMMQYFEWYLPNDGNHWNRLNSDASNLKSKGITAVWIPPAWKGASQNDVGYGAYDLYDLGEFNQKGTVRTKYGTRSQLQAAVTSLKNNGIQVYGDVVMNHKGGADATEMVRAVEVNPNNRNQEVTGEYTIEAWTRFDFPGRGNTHSSFKWRWYHFDGVDWDQSRRLNNRIYLFRGHGKHWDWPVDTENGNYDYLMYADIDMDHPEVVNELRNWGVWYTNTLGLDGFRIDAVKHIKYSFTRDWINHVRSATGKNMFAVAEFWKNDLGAIENYLQKTNWNHSVFDVPLHYNLYNASKSGGNYDMRNIFNGTVVQRHPSHAVTFVDNHDSQPEEALESFVEEWFKPLAYALTLTREQGYPSVFYGDYYGIPTHGVPAMRSKIDPILEARQKYAYGPQHDYLDHPDVIGWTREGDSSHPKSGLATLITDGPGGSKRMYAGLKNAGETWYDITGNRSDTVKIGSDGWGEFHVNDGSVSIYVQK

SEQ ID NO: 29431 - protein, 483 aa, Bacillus sp.
HHNGTNGTMMQYFEWYLPNDGNHWNRLNSDASNLKSKGITAVWIPPAWKAASQNDVGYGAYDLYDLGEFNQKGTVRTKYGTRSQLQAAVTSLKNNGIQVYGDVVMNHKGGADATEMVRAVEVNPNNRNQEVTGEYTIEAWTRFDFPGRGNTHSSFKWRWYHFDGVDWDQSRNLNNRIYKFRGKAWDWEVDTEFGNYDYLMYTDYDMDHPEVVNELRNWGVWYTNTLGLDGFRIDAVKHIKYSFTRDWINHVRSATGKNMFAVAEFWKNDLGAIENYLQKTNWNHSVFDVPLHYNLYNASKSGGNYDMRNIFNGTVVQRHPSHAVTFVDNHDSQPEEALESFVDPWFKPLAYALTLTREQGYPSVFYGDYYGIPTHGVPAMRSKIDPILEARQKYAYGPQHDYLDHPDVIGWTREGDSSHPKSGLATLITDGPGGSKRMYAGLKNAGETWYDITGNRSDTVKIGSDGWGEFHVNGGSVSIYVQK

SEQ ID NO: 29432 - protein, 483 aa, Bacillus sp.
HHNGTNGTMMQYFEWYLPNDGNHWNRLNSDASNLKSKGITAVWIPPAWKGASQNDVGYGAYDLYDLGEFNQKGTVRTKYGTRSQLQAAVTSLKNNGIQVYGDVVMNHKGGADATEMVRAVEVNPNNRNQEVTGEYTIEAWTRFDFPGRGNTHSSFKWRWYHFDGVDWDQSRRLNNRIYKFRGKAWEWEVDTENGFYDYLMYADIDYDHPEVVNELRNWGVWYTNTLGLDGFRIDAVKHIKYSFTRDWINHVRSATGKNMFAVAEFWKNDLGAIENYLQKTNWNHSVFDVPLHYNLYNASKSGGNYDMRNIFNGTVVQRHPSHAVTFVDNHDSQPEEALESFVEEWFKPLAYALTLTREQGYPSVFYGDYYGIPTHGVPAMRSKIDPILEARQKYAYGPQHDYLDHPDVIGWTREGDSSHPKSGLATLITDGPGGSKRMYAGLKNAGETWYDITGNRSDTVKIGSDGWGEFHVNDGSVSIYVQK

SEQ ID NO: 29433 - protein, 485 aa, Bacillus sp.
HHNGTNGTMMQYFEWYLPNDGNHWNRLNSDASNLKSKGITAVWIPPAWKGASQNDVGYGAYDLYDLGEFNQKGTVRTKYGTRSQLQAAVTSLKNNGIQVYGDVVMNHKGGADATEMVRAVEVNPNNRNQEVTGEYTIEAWTRFDFPGRGNTHSSFKWRWYHFDGVDFDQSRRLNNRIYKFRGHGKAWDWEVDTEFGNYDYLMYADYDMDHPEVVNELRNWGVWYTNTLGLDGFRIDAVKHIKYSFTRDWINHVRSATGKNMFAVAEFWKNDLGAIENYLQKTNWNHSVFDVPLHYNLYNASKSGGNYDMRNIFNGTVVQRHPSHAVTFVDNHDSQPEEALESFVDEWFKPLAYALTLTREQGYPSVFYGDYYGIPTHGVPAMRSKIDPILEARQKYAYGPQHDYLDHPDVIGWTREGDSSHPKSGLATLITDGPGGSKRMYAGLKNAGETWYDITGNRSDTVKIGSDGWGEFHVNKSSVSIYVQK

SEQ ID NO: 29434 - protein, 485 aa, Bacillus sp.
HHNGTNGTMMQYFEWYLPNDGNHWNRLNSDASNLKSKGITAVWIPPAWKAASQNDVGYGAYDLYDLGEFNQKGTVRTKYGTRSQLQAAVTSLKNNGIQVYGDVVMNHKGGADATEMVRAVEVNPNNRNQEVTGEYTIEAYTRFDFPGRGNTHSSFKWRWYHFDGVDWDQSRDLDNRIYKFRGHGKAWDWEVDTEFGNYDYLMYADYDMDHPEVVNELRNWGVWYTNTLGLDGFRIDAVKHIKYSFTRDWINHVRSATGKNMFAVAEFWKNDLGAIENYLQKTNWNHSVFDVPLHYNLYNASKSGGNYDMRNIFNGTVVQRHPSHAVTFVDNHDSQPEEALESFVEEWFKPLAYALTLTREQGYPSVFYGDYYGIPTHGVPAMRSKIDPILEARQKYAYGPQHDYLDHPDVIGWTREGDSSHPKSGLATLITDGPGGSKRMYAGLKNAGETWYDITGNRSDTVKIGSDGWGEFHVNDGSVSIYVQK

SEQ ID NO: 29435 - protein, 483 aa, Bacillus sp.
HHNGTNGTMMQYFEWYLPNDGNHWNRLNSDASNLKSKGITAVWIPPAWKATSQNDVGYGAYDLYDLGEFNQKGTVRTKYGTRSQLQAAVTSLKNNGIQVYGDVVMNHKGGADATEMVRAVEVNPNNRNQEVTGEYTIEAWTRFDFPGRGNTHSSFKWRWYHFDGVDWDQSRELNNRIYKFRGKAWDWEVDTEFGNYDYLMYTDYDMDHPEVVNELRNWGVWYTNTLGLDGFRIDAVKHIKYSFTRDWINHVRSATGKNMFAVAEFWKNDLGAIENYLQKTNWNHSVFDVPLHYNLYNASKSGGNYDMRNIFNGTVVQRHPSHAVTFVDNHDSQPEEALESFVDEWFKPLAYALTLTREQGYPSVFYGDYYGIPTHGVPAMRSKIDPILEARQKYAYGPQHDYLDHPDVIGWTREGDSSHPKSGLATLITDGPGGSKRMYAGLKNAGETWYDITGNRSDTVKIGSDGWGEFHVNKSSVSIYVQK

SEQ ID NO: 29436 - protein, 483 aa, Bacillus sp.
HHNGTNGTMMQYFEWYLPNDGNHWNRLNSDASNLKSKGITAVWIPPAWKGASQNDVGYGAYDLYDLGEFNQKGTVRTKYGTRSQLQAAVTSLKNNGIQVYGDVVMNHKGGADATEMVRAVEVNPNNRNQEVTGEYTIEAWTRFDFPGRGNTHSSFKWRWYHFDGVDWDQSRRTNNRIYKFRGKAWDWEVDTEFGNYDYLMYTDYDMDHPEVVNELRNWGVWYTNTLGLDGFRIDAVKHIKYSFTRDWINHVRSATGKNMFAVAEFWKNDLGAIENYLQKTNWNHSVFDVPLHYNLYNASKSGGNYDMRNIFNGTVVQRHPSHAVTFVDNHDSQPEEALESFVDEWFKPLAYALTLTREQGYPSVFYGDYYGIPTHGVPAMRSKIDPILEARQKYAYGPQHDYLDHPDVIGWTREGDSSHPKSGLATLITDGPGGSKRMYAGLKNAGETWYDITGNRSDTVKIGSDGWGEFHVNKSSVSIYVQK

SEQ ID NO: 29437 - protein, 485 aa, Bacillus sp.
HHNGTNGTMMQYFEWYLPNDGNHWNRLNSDASNLKSKGITAVWIPPAWKGASQNDVGYGAYDLYDLGEFNQKGTVRTKYGTRSQLQAAVTSLKNNGIQVYGDVVMNHKGGADATEMVRAVEVNPNNRNQEVTGEYTIEAWTRFDFPGRGNTHSSFKWRWYHFDGVDWDQSERLNNRIYKFRGHGKAWDWEVDTEFGNYDYLMYADYDMDHPEVVNELRNWGVWYTNTLGLDGFRIDAVKHIKYSFTRDWINHVRSATGKNMFAVAEFWKNDLGAIENYLQKTNWNHSVFDVPLHYNLYNASKSGGNYDMRNIFNGTVVQRHPSHAVTFVDNHDSQPEEALESFVEEWFKPLAYALTLTREQGYPSVFYGDYYGIPTHGVPAMRSKIDPILLARQKYAYGPQHDYLDHPDVIGWTREGDSSHPKSGLATLITDGPGGSKRMYAGLKNAGETWYDITGNRSDTVKIGSDGWGEFHVNDGSVSIYVQK

SEQ ID NO: 29438 - protein, 485 aa, Bacillus sp.
HHNGTNGTMMQYFEWYLPNDGNHWNRLNSDASNLKSKGITAVWIPPAWKGASQNDVGYGAYDLYDLGEFNQKGTVRTKYGTRSQLQAAVTSLKNNGIQVYGDVVMNHKGGADATEMVRAVEVNPNNRNQEVTGEYTIEAWTRFDFPGRGNTHSSFKWRWYHFDGVDWDQSRRLNNRIYKFRGHGKAWDWEVDTEFGNYDYLMYADYDMDHPEVVNELRNWGVWYTNTLGLDGFRIDAVKHIKYSFTRDWINHVRSATGKNMFAVAEFWKNDLGAIENYLQKTNWNHSVFDVPLHYNLYNASKSGGNYDMRNIFNGTVVQRHPSHAVTFVDNHDSQPEEALESFVDPWFKPLAYALTLTREQGYPSVFYGDYYGIPTHGVPAMRSKIDPILEARQKYAYGPQHDYLDHPDVIGWTREGDSSHPKSGLATLITDGPGGSKRMYAGLKNAGETWYDITGNRSDTVKIGSDGWGEFHVNQSSVSIYVQK

SEQ ID NO: 29439 - protein, 483 aa, Bacillus sp.
HHNGTNGTMMQYFEWYLPNDGNHWNRLNSDASNLKSKGITAVWIPPAWKGASQNDVGYGAYDLYDLGEFNQKGTVRTKYGTRSQLQAAVTSLKNNGIQVYGDVVMNHKGGADATEMVRAVEVNPNNRNQEVTGEYTIEAWTRFDFPGRGNTHSSFKWRWYHFDGVDWDQSRRLNNRIYKFRAKAWDWEVDTEFGNYDYLMYADYDMDHPEVVNELRNWGVWYTNTLGLDGFRIDAVKHIKYSFTRDWINHVRSATGKNMFAVAEFWKNDLGAIENYLQKTNWNHSVFDVPLHYNLYNASKSGGNYDMRNIFNGTVVQRHPSHAVTFVDNHDSQPEEALESFVEEWFKPLAYALTLTREQGYPSVFYGDYYGIPTHGVPAMRSKIDPILEARQKYAYGPQHDYLDHPDVIGWTREGDSSHPKSGLATLITHGPGGSKRMYAGLKNAGETWYDITGNRSDTVKIGSDGWGEFHVNDGSVSIYVQK

SEQ ID NO: 29440 - protein, 483 aa, Bacillus sp.
HHNGTNQTMMQYFEWYLPNDGNHWNRLNSDASNLKSKGITAVWIPPAWKGASQNDVGYGAYDLYDLGEFNQKGTVRTKYGTRSQLQAAVTSLKNNGIQVYGDVVMNHKGGADATEMVRAVEVNPNNRNQEVTGEYTIEAWTRFDFPGRGNTHSSFKWRWYHFDGVDWDQSRRLNNRIYKFRGKAWDWEVDTEFGNYDYLMYADYDMDHPEVVNELRNWGVWYTNTLGLDGFRIDAVKHIKYSFTRDWINHVRSATGKNMFAVAEFWKNDLGAIENYLQKTNWNHSVFDVPLHYNLYNASKSGGNYDMRNIFNGTVVQMHPNWAVTFVDNHDSQPEEALESFVEEWFKPLAYALTLTREQGYPSVFYGDYYGIPTHGVPAMRSKIDPILEARQKYAYGPQHDYLDHPDVIGWTREGDSSHPKSGLATLITDGPGGSKRMYAGLKNAGETWYDITGNRSDTVKIGSDGWGEFHVNDGSVSIYVQK

SEQ ID NO: 29441 - protein, 485 aa, Bacillus sp.
HHNGTNGTMMQYFEWYLPNDGNHWNRLNSDASNLKSKGITAVWIPPAWKAASQNDVGYGAYDLYDLGEFNQKGTVRTKYGTRSQLQAAVTSLKNNGIQVYGDVVMNHKGGADATEMVRAVEVNPNNRNQEVTGEYTIEAWTRFDFPGRGNTHSSFKWRWYHFDGVDWDQSRDLQNRIYKFRGHGKAWDWEVDTEFGNYDYLMYADYDMDHPEVVNELRNWGVWYTNTLGLDGFRIDAVKHIKYSFTRDWINHVRSATGKNMFAVAEFWKNDLGAIENYLQKTNWNHSVFDVPLHYNLYNASKSGGNYDMRNIFNGTVVQRHPSHAVTFVDNHDSQPEEALESFVETWFKPLAYALTLTREQGYPSVFYGDYYGIPTHGVPAMRSKIDPILEARQKYAYGPQHDYLDHPDVIGWTREGDSSHPKSGLATLITDGPGGSKRMYAGLKNAGETWYDITGNRSDTVKIGSDGWGEFHVNDASVSIYVQK

SEQ ID NO: 29442 - protein, 483 aa, Bacillus sp.
HHNGTNGTMMQYFEWYLPNDGNHWNRLNSDASNLKSKGITAVWIPPAWKGASQNDVGYGAYDVYDLGEFNQKGTVRTKYGTRSQLQAAVTSLKNNGIQVYGDVVMNHKGGADATEMVRAVEVNPNNRNQEVTGEYTIEAWTRFDFPGRGNTHSSFKWRWYHFDGVDWDQSRRLNNRIYKFRGKAWDWEVDTENGNYDYLMYADIDYDHPEVVNELRNWGVWYTNTLGLDGFRIDAVKHIKYSFTRVWINHVRSATGKNMFAVAEFWKNDLGAIENYLQKTNWNHSVFDVPLHYNLYNASKSGGNYDMRNIFNGTVVQRHPSHAVTFVDNHDSQPEEALESFVEEWFKPLAYALTLTREQGYPSVFYGDYYGIPTHGVPAMRSKIDPILEARQKYAYGPQHDYLDHPDVIGWTREGDSSHPKSGLATLITDGPGGSKRMYAGLKNAGETWYDITGNRSDTVKIGSDGWGEFHVNDGSVSIYVQK

SEQ ID NO: 29443 - protein, 483 aa, Synthetic construct
HHNGTNGTMMQYFEWYLPNDGNHWNRLNSDASNLKSKGITAVWIPPAWKGASQNDVGYGAYDVYDLGEFNQKGTVRTKYGTRSQLQAAVTSLKNNGIQVYGDVVMNHKGGADATEMVRAVEVNPNNRNQEVTGEYTIEAWTRFDFPGRGNTHSSFKWRWYHFDGVDWDQSRRLNNRIYKFRGKAWDWEVDTENGNYDYLMYADYDMDHPEVVNELRNWGVWYTNTLGLDGFRIDAVKHIKVSFLRDWINHVRSATGKNMFAVAEFWKNDLGAIENYLQKTNWNHSVFDVPLHYNLYNASKSGGNYDMRNIFNGTVVQRHPSHAVTFVDNHDSQPEEALESFVEEWFKPLAYALTLTREQGYPSVFYGDYYGIPTHGVPAMRSKIDPILEARQKYAYGPQHDYLDHPDVIGWTREGDSSHPKSGLATLITDGPGGSKRMYAGLKNAGETWYDITGNRSDTVKIGSDGWGEFHVNDGSVSIYVQK

SEQ ID NO: 29444 - protein, 483 aa, Bacillus sp.
HHNGTNGTMMQYFEWYLPNDGNHWNRLNSDASNLKSKGITAVWIPPAWKGASQNDVGYGAYDLYDLGEFNQKGTVRTKYGTRSQLQAAVTSLKNNGIQVYGDVVMNHKGGADATEMVRAVEVNPNNRNQEVTGEYTIEAWTRFDFPGRGNTHSSFKWRWYHFDGVDWDQSRRLNNRIYKFRGKAWDWEVDTEFGNYDYLMYADYDMDHPEVVNELRNWGVWYTNTLGLDGFRIDAVKHIKYSFTRDWINHVRSATGKNMFAVAEFWKNDLGAIENYLQKTNWNHSVFDVPLHYNLYNASKSGGNYDMRNIFNGTVVQRHPSHAVTFVDNHDSQPEEALESFVDTWFKPLAYALTLTREQGYPSVFYGDYYGIPTHGVPAMRSKIDPILEARQKYAYGPQHDYLDHPDVIGWTREGDSSHPKSGLATLITDGPGGSKRMYAGLKNAGETWYDITGNRSDTVKIGSDGWGEFHVNQASVSIYVQK

SEQ ID NO: 29445 - protein, 483 aa, Bacillus sp.
HHNGTNGTMMQYFEWYLPNDGNHWNRLNSDASNLKSKGITAVWIPPAWKGASQNDVGYGAYDLYDLGEFNQKGTVRTKYGTRSQLQAAVTSLKNNGIQVYGDVVMNHKGGADATEMVRAVEVNPNNRNQEVTGEYTIEAWTRFDFPGRGNTHSSFKWRWYHFDGVDWDQSRRLNNRIYKFRGKAWDWEVDTEFGNYDYLMYADYDMDHPEVVNELRNWGVWYTNTLGLDGFRIDAVKHIKYSFTRDWINHVRSATGKNMFAVAEFWKNDLGAIENYLQKTNWNHSVFDVPLHYNLYNASKSQGNYDMRNIFNGTVVQRHPSHAVTFVDNHDSQPEEALESFVDTWFKPLAYALTLTREQGYPSVFYGDYYGIPTHGVPAMRSKIDPILEARQKYAYGPQHDYLDHPDVIGWTREGDSSHPKSGLATLITDGPGGSKRMYAGLKNAGETWYDITGNRSDTVKIGSDGWGEFHVNGSSVSIYVQK

SEQ ID NO: 29446 - protein, 483 aa, Bacillus sp.
HHNGTNGTMMQYFEWYLPNDGNHWNRLNSDASNLKSKGITAVWIPPAWKGASQNDVGYGAYDLYDLGEFNQKGTVRTKYGTRSQLQAAVTSLKNNGIQVYGDVVMNHKGGADATEMVRAVEVNPNNRNQEVTGEYTIEAWTRFDFPGRGNTHSSFKWRWYHFDGVDWDQSRRLNNRIYKFRGKAWDWEVDTEFGNYDYLMYADYDMDHPEVVNELRNWGVWYTNTLGLDGFRIDAVKHIKYSFTRDWINHVRSATGKNMFAVAEFWKNDLGAIENYLQKTNWNHSVFDVPLHYNLYNASKSGGNYDMRNIFNGTVVQRHPSHAVTFVDNHDSQPEEALESFVDPWFKPLAYALTLTREQGYPSVFYGDYYGIPTHGVPAMRSKIDPILEARQKYAYGPQHDYLDHPDVIGWTREGDSSHPKSGLATLITDGPGGSKRMYAGLKNAGETWYDITGNRSDTVKIGSDGWGEFHVNKQSVSIYVQK

SEQ ID NO: 29447 - protein, 485 aa, Bacillus sp.
HHNGTNGTMMQYFEWYLPNDGNHWNRLNSDASNLKSKGITAVWIPPAWKAVSQNDVGYGAYDLYDLGEFNQKGTVRTKYGTRSQLQAAVTSLKNNGIQVYGDVVMNHKGGADATEMVDAVEVNPNNRNQEVTGEYTIEAWTRFDFPGRGNTHSSFKWRWYHFDGVDWDQSRNLTNRIYKFRGHGKAWDWEVDTEFGNYDYLMYTDYDMDHPEVVNELRNWGVWYTNTLGLDGFRIDAVKHIKYSFTRDWINHVRSATGKNMFAVAEFWKNDLGAIENYLQKTNWNHSVFDVPLHYNLYNASKSGGNYDMRNIFNGTVVQRHPSHAVTFVDNHDSQPEEALESFVEEWFKPLAYALTLTREQGYPSVFYGDYYGIPTHGVPAMRSKIDPILEARQKYAYGPQHDYLDHPDVIGWTREGDSSHPKSGLATLITDGPGGSKRMYAGLKNAGETWYDITGNRSDTVKIGSDGWGEFHVNDGSVSIYVQK

SEQ ID NO: 29448 - protein, 483 aa, Bacillus sp.
HHNGTNGTMMQYFEWYLPNDGNHWNRLNSDASNLKSKGITAVWIPPAWKGASQNDVGYGAYDLYDLGEFNQKGTVRTKYGTRSQLQAAVTSLKNNGIQVYGDVVMNHKGGADATEMVRAVEVNPNNRNQEVTGEYTIEAWTRFDFPGRGNTHSSFKWRWYHFDGVDWDQSRRLNNRIYKFRGKAWDWEVDTEFGNYDYLMYADYDMDHPEVVNELRNWGVWYTNTLGLDGFRIDAVKHIKYSFTRDWINHVRSATGKNMFAVAEFWKNDLGAIENYLQKTNWNHSVFDVPLHYNLYNASKSAGNYDMRNIFNGTVVQRHPSHAVTFVDNHDSQPEEALESFVDTWFKPLAYALTLTREQGYPSVFYGDYYGIPTHGVPAMRSKIDPILEARQKYAYGPQHDYLDHPDVIGWTREGDSSHPKSGLATLITDGPGGSKRMYAGLKNAGETWYDITGNRSDTVKIGSDGWGEFHVNGTSVSIYVQK

SEQ ID NO: 29449 - protein, 483 aa, Bacillus sp.
HHNGTNGTMMQYFEWYLPNDGNHWNRLNSDASNLKSKGITAVWIPPAWKGASQNDVGYGAYDLYDLGEFNQKGTVRTKYGTRSQLQAAVTSLKNNGIQVYGDVVMNHKGGADATEMVRAVEVNPNNRNQEVTGEYTIEAWTRFDFPGRGNTHSSFKWRWYHFDGVDWDQSRRLNNRIYKFRGKAWDWEVDTEFGNYDYLMYADYDMDHPEVVNELRNWGVWYTNTLGLDGFRIDAVKHIKYSFTRDWINHVRSATGKNMFAVAEFWKNDLGAIENYLQKTNWNHSVFDVPLHYNLYNASKSAGNYDMRNIFNGTVVQRHPSHAVTFVDNHDSQPEEALESFVDEWFKPLAYALTLTREQGYPSVFYGDYYGIPTHGVPAMRSKIDPILEARQKYAYGPQHDYLDHPDVIGWTREGDSSHPKSGLATLITDGPGGSKRMYAGLKNAGETWYDITGNRSDTVKIGSDGWGEFHVNKSSVSIYVQK

SEQ ID NO: 29450 - protein, 483 aa, Bacillus sp.
HHNGTNGTMMQYFEWYLPNDGNHWNRLNSDASNLKSKGITAVWIPPAWKGASQNDVGYGAYDLYDLGEFNQKGTVRTKYGTRSQLQAAVTSLKNNGIQVYGDVVMNHKGGADATEMVRAVEVNPNNRNQEVTGEYTIEAWTRFDFPGRGNTHSSFKWRWYHFDGVDWDQSRRLNNRIYKFRGKAWDWEVDTEFGNYDYLMYADYDMDHPEVVNELRNWGVWYTNTLGLDGFRIDAVKHIKYSFTRDWINHVRSATGKNMFAVAEFWVNDLGYIENYLQKTNWNHSVFDVPLHYNLYNASKSGGNYDMRNIFNGTVVQRHPSHAVTFVDNHDSQPEEALESFVEEWFKPLAYALTLTREQGYPSVFYGDYYGIPTHGVPAMRSKIDPILEARQKYAYGPQHDYLDHPDVIGWTREGDSSHPKSGLATLITDGPGGSKRMYAGLKNAGETWYDITGNRSDTVKIGSDGWGEFHVNDGSVSIYVQK

SEQ ID NO: 29451 - protein, 485 aa, Bacillus sp.
HHNGTNGTMMQYFEWYLPNDGNHWNRLNSDASNLKSKGITAVWIPPAWKGASQNDVGYGAYDLYDLGEFNQKGTVRTKYGTRSQLQAAVTSLKNNGIQVYGDVVMNHKGGADATEMVRAVEVNPNNRNQEVTGEYTIEAWTRFDFPGRGNTHSSFKWRWYHFDGVDWDQSRRLNNRIYKFRGHGKAWDWEVDTEFGNYDYLMYADYDMDHPEVVNELRNWGVWYTNTLGLDGFRIDAVKHIKYSFTRDWINHVRSATGKNMFAVAEFWLNDLGLIENYLQKTNWNHSVFDVPLHYNLYNASKSGGNYDMRNIFNGTVVQRHPSHAVTFVDNHDSQPEEALESFVEEWFKPLAYALTLTREQGYPSVFYGDYYGIPTHGVPAMRSKIDPILEARQKYAYGPQHDYLDHPDVIGWTREGDSSHPKSGLATLITDGPGGSKRMYAGLKNAGETWYDITGNRSDTVKIGSDGWGEFHVNDGSVSIYVQK

SEQ ID NO: 29452 - protein, 483 aa, Bacillus sp.
HHNGTNGTMMQYFEWYLPNDGNHWNRLNSDASNLKSKGITAVWIPPAWKGASQNDVGYGAYDLYDLGEFNQKGTVRTKYGTRSQLQAAVTSLKNNGIQVYGDVVMNHKGGADATEMVRAVEVNPNNRNQEVTGEYTIEAWTRFDFPGRGNTHSSFKWRWYHFDGVDWDQSRRLNNRIYKFRGKAWDWEVDTEFGNYDYLMYADYDMDHPEVVNELRNWGVWYTNTLGLDGFRIDAVKHIKYSFTRDWINHVRSATGKNMFAVAEFWHNDLGCIENYLQKTNWNHSVFDVPLHYNLYNASKSGGNYDMRNIFNGTVVQRHPSHAVTFVDNHDSQPEEALESFVEEWFKPLAYALTLTREQGYPSVFYGDYYGIPTHGVPAMRSKIDPILEARQKYAYGPQHDYLDHPDVIGWTREGDSSHPKSGLATLITDGPGGSKRMYAGLKNAGETWYDITGNRSDTVKIGSDGWGEFHVNDGSVSIYVQK

SEQ ID NO: 29453 - protein, 485 aa, Bacillus sp.
HHNGTNGTMMQYFEWYLPNDGNHWNRLNSDASNLKSKGITAVWIPPAWKAVSQNDVGYGAYDLYDLGEFNQKGTVRTKYGTRSQLQAAVTSLKNNGIQVYGDVVMNHKGGADATEMVRAVEVNPNNRNQEVTGEYTIEAWTRFDFPGRGNTHSSFKWRWYHFDGVDFDQSREFTNRIYKFRGHGKAWDWEVDTEFGNYDYLMYVDYDMDHPEVVNELRNWGVWYTNTLGLDGFRIDAVKHIKYSFTRDWINHVRSATGKNMFAVAEFWKNDLGAIENYLQKTNWNHSVFDVPLHYNLYNASKSGGNYDMRNIFNGTVVQAHPNHAVTFVDNHDSQPEEALESFVEEWFKPLAYALTLTREQGYPSVFYGDYYGIPTHGVPAMRSKIDPILEARQKYAYGPQHDYLDHPDVIGWTREGDSSHPKSGLATLITDGPGGSKRMYAGLKNAGETWYDITGNRSDTVKIGSDGWGEFHVNDGSVSIYVQK

SEQ ID NO: 29454 - protein, 485 aa, Bacillus sp.
HHNGTNGTMMQYFEWYLPNDGNHWNRLNSDASNLKSKGITAVWIPPAWKGASQNDVGYGAYDLYDLGEFNQKGTVRTKYGTRSQLQAAVTSLKNNGIQVYGDVVMNHKGGADATEMVRAVEVNPNNRNQEVTGEYTIEAWTRFDFPGRGNTHSSFKWRWYHFDGVDWDQSRRLNNRIYKFRGHGKAWDWEVDTEFGNYDYLMYADYDMDHPEVVNELRNWGVWYTNTLGLDGFRIDAVKHIKYSFTRDWINHVRSATGKNMFAVAEFWRNDLGGIENYLQKTNWNHSVFDVPLHYNLYNASKSGGNYDMRNIFNGTVVQRHPSHAVTFVDNHDSQPEEALESFVEEWFKPLAYALTLTREQGYPSVFYGDYYGIPTHGVPAMRSKIDPILEARQKYAYGPQHDYLDHPDVIGWTREGDSSHPKSGLATLITDGPGGSKRMYAGLKNAGETWYDITGNRSDTVKIGSDGWGEFHVNDGSVSIYVQK

SEQ ID NO: 29455 - protein, 483 aa, Bacillus sp.
HHNGTNGTMMQYFEWYLPNDGNHWNRLNSDASNLKSKGITAVWIPPAWKGASQNDVGYGAYDLYDLGEFNQKGTVRTKYGTRSQLQAAVTSLKNNGIQVYGDVVMNHKGGADATEMVRAVEVNPNNRNQEVTGEYTIEAWTRFDFPGRGNTHSSFKWRWYHFDGVDFDMSRELSNRIYKFRGKAWDWEVDTEFGNYDYLMYADYDMDHPEVVNELRNWGVWYTNTLGLDGFRIDAVKHIKYSFTRDWINHVRSATGKNMFAVAEFWKNDLGAIENYLQKTNWNHSVFDVPLHYNLYNASKSGGNYDMRNIFNGTVVQRHPSHAVTFVDNHDSQPEEALESFVEEWFKPLAYALTLTREQGYPSVFYGDYYGIPTHGVPAMRSKIDPILEARQKYAYGPQHDYLDHPDVIGWTREGDSSHPKSGLATLITDGPGGSKRMYAGLKNAGETWYDITGNRSDTVKIGSDGWGEFHVNDGSVSIYVQK

SEQ ID NO: 29456 - protein, 485 aa, Bacillus sp.
HHNGTNGTMMQYFEWYLPNDGNHWNRLNSDASNLKSKGITAVWIPPAWKGASQNDVGYGAYDLYDLGEFNQKGTVRTKYGTRSQLQAAVTSLKNNGIQVYGDVVMNHKGGADATEMVRAVEVNPNNRNQEVTGEYTIEAWTRFDFPGRGNTHSSFKWRWYHFDGVDFDQSRRLNNRIYKFRGHGKAWDWEVDTEFGNYDYLMYADYDMDHPEVVNELRNWGVWYTNTLGLDGFRIDAVKHIKYSFTRDWINHVRIATGKNMFAVAEFWKNDLGAIENYLQKTNWNHSVFDVPLHYNLYNASKSGGNYDMRNIFNGTVVQRHPSHAVTFVDNHDSQPEEALESFVDEWFKPLAYALTLTREQGYPSVFYGDYYGIPTHGVPAMRSKIDPILEARQKYAYGPQHDYLDHPDVIGWTREGDSSHPKSGLATLITDGPGGSKRMYAGLKNAGETWYDITGNRSDTVKIGSDGWGEFHVNDQSVSIYVQK

SEQ ID NO: 29457 - protein, 483 aa, Bacillus sp.
HHNGTNETMMQYFEWYLPNDGNHWNRLNSDASNLKSKGITAVWIPPAWKGASQNDVGYGAYDLYDLGEFNQKGTVRTKYGTRSQLQAAVTSLKNNGIAVYGDVVMNHKGGADATEMVRAVEVNPNNRNQEVTGEYTIEAWTRFDFPGRGNTHSSFKWRWYHFDGVDWDQSRRLNNRIYKFRGKAWDWEVDTEFGNYDYLMYADYDMDHPEVVNELRNWGVWYTNTLGLDGFRIDAVKHIKYSFTRDWINHVRSATGKNMFAVAEFWKNDLGAIENYLQKTNWNHSVFDVPLHYNLYNASKSGGNYDMRNIFNGTVVQMHPSHAVTFVDNHDSQPEEALESFVEEWFKPLAYALTLTREQGYPSVFYGDYYGIPTHGVPAMRSKIDPILEARQKYAYGPQHDYLDHPDVIGWTREGDSSHPKSGLATLITDGPGGSKRMYAGLKNAGETWYDITGNRSDTVKIGSDGWGEFHVNDGSVSIYVQK

SEQ ID NO: 29458 - protein, 485 aa, Bacillus sp.
HHNGTNGTMMQYFEWYLPNDGNHWNRLNSDASNLKSKGITAVWIPPAWKAASQNDVGYGAYDLYDLGEFNQKGTVRTKYGTRSQLQAAVTSLKNNGIQVYGDVVMNHKGGADATEMVRAVEVNPNNRNQEVTGEYTIEAWTRFDFPGRGNTHSSFKWRWYHFDGVDWDQSRDLQNRIYKFRGHGKAWDWEVDTEFGNYDYLMYADYDMDHPEVVNELRNWGVWYTNTLGLDGFRIDAVKHIKYSFTRDWINHVRSATGKNMFAVAEFWKNDLGAIENYLQKTNWNHSVFDVPLHYNLYNASKSGGNYDMRNIFNGTVVQRHPSHAVTFVDNHDSQPEEALESFVETWFKPLAYALTLTREQGYPSVFYGDYYGIPTHGVPAMRSKIDPILEARQKYAYGPQHDYLDHPDVIGWTREGDSSHPKSGLATLITDGPGGSKRMYAGLKNAGETWYDITGNRSDTVKIGSDGWGEFHVNKASVSIYVQK

SEQ ID NO: 29459 - protein, 483 aa, Bacillus sp.
HHNGTNGTMMQYFEWYLPNDGNHWNRLNSDASNLKSKGITAVWIPPAWKAVSQNDVGYGAYDLYDLGEFNQKGTVRTKYGTRSQLQAAVTSLKNNGIQVYGDVVMNHKGGADLTEMVDAVEVNPNNRNQEVTGEYTIEAWTRFDFPGRGNTHSSFKWRWYHFDGVDFDQSRDFNNRIYKFRGKAWDWEVDTEFGNYDYLMYADYDMDHPEVVNELRNWGVWYTNTLGLDGFRIDAVKHIKYSFTRDWINHVRSATGKNMFAVAEFWKNDLGAIENYLQKTNWNHSVFDVPLHYNLYNASKSGGNYDMRNIFNGTVVQRHPSHAVTFVDNHDSQPEEALESFVEEWFKPLAYALTLTREQGYPSVFYGDYYGIPTHGVPAMRSKIDPILEARQKYAYGPQHDYLDHPDVIGWTREGDSSHPKSGLATLITDGPGGSKRMYAGLKNAGETWYDITGNRSDTVKIGSDGWGEFHVNDGSVSIYVQK

SEQ ID NO: 29460 - protein, 485 aa, Bacillus sp.
HHNGTNGTMMQYFEWYLPNDGNHWNRLNSDASNLKSKGITAVWIPPAWKGASQNDVGYGAYDLYDLGEFNQKGTVRTKYGTRSQLQAAVTSLKNNGIQVYGDVVMNHKGGADYTEMVRAVEVNPNNRNQEVTGEYTIEAWTRFDFPGRGNTHSSFKWRWYHFDGVDWDQSERLNNRIYKFRGHGKAWDWEVDTEFGNYDYLMYADYDMDHPEVVNELRNWGVWYTNTLGLDGFRIDAVKHIKYSFTRDWINHVRSATGKNMFAVAEFWKNDLGAIENYLQKTNWNHSVFDVPLHYNLYNASKSGGNYDMRNIFNGTVVQRHPSHAVTFVDNHDSQPEEALESFVEEWFKPLAYALTLTREQGYPSVFYGDYYGIPTHGVPAMRSKIDPILEARQKYAYGPQHDYLDHPDVIGWTREGDSSHPKSGLATLITDGPGGSKRMYAGLKNAGETWYDITGNRSDTVKIGSDGWGEFHVNDGSVSIYVQK

SEQ ID NO: 29461 - protein, 485 aa, Bacillus sp.
HHNGTNGTMMQYFEWYLPNDGNHWNRLNSDASNLKSKGITAVWIPPAWKGASQNDVGYGAYDLYDLGEFNQKGTVRTKYGTRSQLQAAVTSLKNNGIQVYGDVVMNHKGGADATEMVRAVEVNPNNRNQEVTGEYTIEAWTRFDFPGRGNTHSSFKWRWYHFDGVDWDQSRRLNNRIYKFRGHGKAWDWEVDTEFGNYDYLMYADYDMDHPEVVNELRNWGVWYTNTLGLDGFRIDAVKHIKYSFTRDWINHVRSATGKNMFAVAEFWKNDLGAIENYLQKTNWNHSVFDVPLHYNLYNASQSGGNYDMRNIFNGTVVQRHPSHAVTFVDNHDSQPEEALESFVDTWFKPLAYALTLTREQGYPSVFYGDYYGIPTHGVPAMRSKIDPILEARQKYAYGPQHDYLDHPDVIGWTREGDSSHPKSGLATLITDGPGGSKRMYAGLKNAGETWYDITGNRSDTVKIGSDGWGEFHVNKKSVSIYVQK

SEQ ID NO: 29462 - protein, 483 aa, Bacillus sp.
HHNGTNGTMMQYFEWYLPNDGNHWNRLNSDASNLKSKGITAVWIPPAWKGASQNDVGYGAYDLYDLGEFNQKGTVRTKYGTRSQLQAAVTSLKNNGIQVYGDVVMNHKGGADATEMVRAVEVNPNNRFQEVTGEYTIEAWTRFDFPGRGNTHSSFKWRWYHFDGVDWDQSRRLNNRIYLFRGKAWDWEVDTEFGNYDYLMYADYDMDHPEVVNELRNWGVWYTNTLGLDGFRIDAVKHIKYSFTRDWINHVRSATGKNMFAVAEFWKNDLGAIENYLQKTNWNHSVFDVPLHYNLYNASKSGGNYDMRNIFNGTVVQRHPSHAVTFVDNHDSQPEEALESFVEEWFKPLAYALTLTREQGYPSVFYGDYYGIPTHGVPAMRSKIDPILEARQKYAYGPQHDYLDHPDVIGWTREGDSSHPKSGLATLITDGPGGSKRMYAGLKNAGETWYDITGNRSDTVKIGSDGWGEFHVNDGSVSIYVQK

SEQ ID NO: 29463 - protein, 485 aa, Bacillus sp.
HHNGTNGTMMQYFEWYLPNDGNHWNRLNSDASNLKSKGITAVWIPPAWKGASQNDVGYGAYDLYDLGEFNQKGTVRTKYGTRSQLQAAVTSLKNNGIQVYGDVVMNHKGGADATEMVRAVEVNPNNRNQEVTGEYTIEAWTRFDFPGRGNTHSSFKWRWYHFDGVDWDQSRRLNNRIYKFRGHGKAWDWEVDTEFGNYDYLMYADYDMDHPEVVNELRNWGVWYTNTLGLDGFRIDAVKHIKYSFTRDWINHVRSATGKNMFAVAEFWKNDLGAIENYLQKTNWNHSVFDVPLHYNLYNASKSGGNYDMRNIFNGTVVQRHPSHAVTFVDNHDSQPEEALESFVDPWFKPLAYALTLTREQGYPSVFYGDYYGIPTHGVPAMRSKIDPILEARQKYAYGPQHDYLDHPDVIGWTREGDSSHPKSGLATLITDGPGGSKRMYAGLKNAGETWYDITGNRSDTVKIGSDGWGEFHVNDKSVSIYVQK

SEQ ID NO: 29464 - protein, 485 aa, Bacillus sp.
HHNGTNGTMMQYFEWYLPNDGNHWNRLNSDASNLKSKGITAVWIPPAWKGASQNDVGYGAYDLYDLGEFNQKGTVRTKYGTRSQLQAAVTSLKNNGIQVYGDVVMNHKGGADATEMVRAVEVNPNNRNQEVTGEYTIEAWTRFDFPGRGNTHSSFKWRWYHFDGVDWDQSRRLNNRIYKFRGHGKAWDWEVDTEFGNYDYLMYADYDMDHPEVVNELRNWGVWYTNTLGLDGFRIDAVKHIKYSFTRDWINHVRSATGKNMFAVAEFWKNDLGAIENYLQKTNWNHSVFDVPLHYNLYNASKSGGNYDMRNIFNGTVVQRHPSHAVTFVDNHDSQPEEALESFVEPWFKPLAYALTLTREQGYPSVFYGDYYGIPTHGVPAMRSKIDPILEARQKYAYGPQHDYLDHPDVIGWTREGDSSHPKSGLATLITDGPGGSKRMYAGLKNAGETWYDITGNRSDTVKIGSDGWGEFHVNDSSVSIYVQK

SEQ ID NO: 29465 - protein, 483 aa, Bacillus sp.
HHNGTNGTMMQYFEWYLPNDGNHWNRLNSDASNLKSKGITAVWIPPAWKGASQNDVGYGAYDLYDLGEFNQKGTVRTKYGTRSQLQAAVTSLKNNGIQVYGDVVMNHKGGADATEMVRAVEVNPNNRNQEVTGEYTIEAWTRFDFPGRGNTHSSFKWRWYHFDGVDWDQSRRLNNRIYKFRGKAWDWEVDTEFGNYDYLMYADYDMDHPEVVNELRNWGVWYTNTLGLDGFRIDAVKHIKYSFTRDWINHVRSATGKNMFAVAEFWKNDLGAIENYLQKTNWNHSVFDVPLHYNLYNASKSGGNYDMRNIFNGTVVQRHPSHAVTFVDNHDSQPEEALESFVDPWFKPLAYALTLTREQGYPSVFYGDYYGIPTHGVPAMRSKIDPILEARQKYAYGPQHDYLDHPDVIGWTREGDSSHPKSGLATLITDGPGGSKRMYAGLKNAGETWYDITGNRSDTVKIGSDGWGEFHVNQTSVSIYVQK

SEQ ID NO: 29466 - protein, 485 aa, Synthetic construct
HHNGTNGTMMQYFEWYLPNDGNHWNRLNSDASNLKSKGITAVWIPPAWKGASQNDVGYGAYDLYDLGEFNQKGTVRTKYGTRSQLQAAVTSLKNNGIQVYGDVVMNHKGGADATEMVRAVEVNPNNRNQEVTGEYTIEAWTRFDFPGRGNTHSSFKWRWYHFDGVDWDQSRRLNNRIYKFRGHGKAWDWEVDTEFGNYDYLMYADIDMDHPEIPNELRNWGVWYTNTLGLDGFRIDAVKHIKYSFTRDWINHVRSATGKNMFAVAEFWKNDLGAIENYLQKTNWNHSVFDVPLHYNLYNASKSGGNYDMRNIFNGTVVQRHPSHAVTFVDNHDSQPEEALESFVEEWFKPLAYALTLTREQGYPSVFYGDYYGIPTHGVPAMRSKIDPILEARQKYAYGPQHDYLDHPDVIGWTREGDSSHPKSGLATLITDGPGGSKRMYAGLKNAGETWYDITGNRSDTVKIGSDGWGEFHVNDGSVSIYVQK

SEQ ID NO: 29467 - protein, 483 aa, Bacillus sp.
HHNGTNGTMMQYFEWYLPNDGNHWNRLNSDASNLKSKGITAVWIPPAWKGASQNDVGYGAYDLYDLGEFNQKGTVRTKYGTRSQLQAAVTSLKNNGIQVYGDVVMNHKGGADATEMVRAVEVNPNNRNQEVTGEYTIEAWTRFDFPGRGNTHSSFKWRWYHFDGVDWDQSRRLNNRIYLFRGKAWHWEVPTENGNYDYLMYADIDMDHPEVVNELRNWGVWYTNTLGLDGFRIDAVKHIKYSFTRDWINHVRSATGKNMFAVAEFWKNDLGAIENYLQKTNWNHSVFDVPLHYNLYNASKSGGNYDMRNIFNGTVVQRHPSHAVTFVDNHDSQPEEALESFVEEWFKPLAYALTLTREQGYPSVFYGDYYGIPTHGVPAMRSKIDPILEARQKYAYGPQHDYLDHPDVIGWTREGDSSHPKSGLATLITDGPGGSKRMYAGLKNAGETWYDITGNRSDTVKIGSDGWGEFHVNDGSVSIYVQK

SEQ ID NO: 29468 - protein, 483 aa, Bacillus sp.
HHNGTNGTMMQYFEWYLPNDGNHWNRLNSDASNLKSKGITAVWIPPAWKGASQNDVGYGAYDLYDLGEFNQKGTVRTKYGTRSQLQAAVTSLKNNGIQVYGDVVMNHKGGADATEMVRAVEVNPNNRNQEVTGEYTIEAWTRFDFPGRGNTHSSFKWRWYHFDGVDWDQSRRLNNRIYKFRGKAWDWEVDTEFGNYDYLMYADYDMDHPEVVNELRNWGVWYTNTLGLDGFRIDAVKHIKYSFTRDWINHVRSATGKNMFAVAEFWKNDLGAIENYLQKTNWNHSVFDVPLHYNLYNASKSGGNYDMRNIFNGTVVQRHPSHAVTFVDNHDSQPEEALESFVETWFKPLAYALTLTREQGYPSVFYGDYYGIPTHGVPAMRSKIDPILEARQKYAYGPQHDYLDHPDVIGWTREGDSSHPKSGLATLITDGPGGSKRMYAGLKNAGETWYDITGNRSDTVKIGSDGWGEFHVNQASVSIYVQK

SEQ ID NO: 29469 - protein, 483 aa, Bacillus sp.
HHNGTNGTMMQYFEWYLPNDGNHWNRLNSDASNLKSKGITAVWIPPAWKAASQNDVGYGAYDLYDLGEFNQKGTVRTKYGTRSQLQAAVTSLKNNGIQVYGDVVMNHKGGADATEMVRAVEVNPNNRNQEVTGEYTIEAWTRFDFPGRGNTHSSFKWRWYHFDGVDWDQSRDLTNRIYKFRGKAWDWEVDTEFGNYDYLMYADYDMDHPEVVNELRNWGVWYTNTLGLDGFRIDAVKHIKYSFTRDWINHVRIATGKNMFAVAEFWKNDLGAIENYLQKTNWNHSVFDVPLHYNLYNASKSGGNYDMRNIFNGTVVQRHPSHAVTFVDNHDSQPEEALESFVDEWFKPLAYALTLTREQGYPSVFYGDYYGIPTHGVPAMRSKIDPILEARQKYAYGPQHDYLDHPDVIGWTREGDSSHPKSGLATLITDGPGGSKRMYAGLKNAGETWYDITGNRSDTVKIGSDGWGEFHVNDQSVSIYVQK

SEQ ID NO: 29470 - protein, 485 aa, Bacillus sp.
HHNGTNGTMMQYFEWYLPNDGNHWNRLNSDASNLKSKGITAVWIPPAWKGASQNDVGYGAYDLYDLGEFNQKGTVRTKYGTRSQLQAAVTSLKNNGIQVYGDVVMNHKGGADATEMVRAVEVNPNNRNQEVTGEYTIEAWTRFDFPGRGNTHSSFKWRWYHFDGVDWDQSRDLQNRIYKFRGHGKAWDWEVDTEFGNYDYLMYVDYDMDHPEVVNELRNWGVWYTNTLGLDGFRIDAVKHIKYSFTRDWINHVRSATGKNMFAVAEFWKNDLGAIENYLQKTNWNHSVFDVPLHYNLYNASKSGGNYDMRNIFNGTVVQRHPSHAVTFVDNHDSQPEEALESFVETWFKPLAYALTLTREQGYPSVFYGDYYGIPTHGVPAMRSKIDPILEARQKYAYGPQHDYLDHPDVIGWTREGDSSHPKSGLATLITDGPGGSKRMYAGLKNAGETWYDITGNRSDTVKIGSDGWGEFHVNDASVSIYVQK

SEQ ID NO: 29471 - protein, 485 aa, Bacillus sp.
HHNGTNGTMMQYFEWYLPNDGNHWNRLNSDASNLKSKGITAVWIPPAWKAASQNDVGYGAYDLYDLGEFNQKGTVRTKYGTRSQLQAAVTSLKNNGIQVYGDVVMNHKGGADATEMVRAVEVNPNNRNQEVTGEYTIEAYTRFDFPGRGNTHSSFKWRWYHFDGVDWDQSRDLTNRIYKFRGHGKAWDWEVDTEFGNYDYLMYADYDMDHPEVVNELRNWGVWYTNTLGLDGFRIDAVKHIKYSFTRDWINHVRSATGKNMFAVAEFWKNDLGAIENYLQKTNWNHSVFDVPLHYNLYNASKSGGNYDMRNIFNGTVVQRHPSHAVTFVDNHDSQPEEALESFVDPWFKPLAYALTLTREQGYPSVFYGDYYGIPTHGVPAMRSKIDPILEARQKYAYGPQHDYLDHPDVIGWTREGDSSHPKSGLATLITDGPGGSKRMYAGLKNAGETWYDITGNRSDTVKIGSDGWGEFHVNGGSVSIYVQK

SEQ ID NO: 29472 - protein, 483 aa, Bacillus sp.
HHNGTNNTMMQYFEWYLPNDGNHWNRLNSDASNLKSKGITAVWIPPAWKGASQNDVGYGAYDLYDLGEFNQKGTVRTKYGTRSQLQAAVTSLKNNGISVYGDVVMNHKGGADATEMVRAVEVNPNNRNQEVTGEYTIEAWTRFDFPGRGNTHSSFKWRWYHFDGVDWDQSRRLNNRIYKFRGKAWDWEVDTEFGNYDYLMYADYDMDHPEVVNELRNWGVWYTNTLGLDGFRIDAVKHIKYSFTRDWINHVRSATGKNMFAVAEFWKNDLGAIENYLQKTNWNHSVFDVPLHYNLYNASKSGGNYDMRNIFNGTVVQMHPNHAVTFVDNHDSQPEEALESFVEEWFKPLAYALTLTREQGYPSVFYGDYYGIPTHGVPAMRSKIDPILEARQKYAYGPQHDYLDHPDVIGWTREGDSSHPKSGLATLITDGPGGSKRMYAGLKNAGETWYDITGNRSDTVKIGSDGWGEFHVNDGSVSIYVQK

SEQ ID NO: 29473 - protein, 483 aa, Bacillus sp.
HHNGTNGTMMQYFEWYLPNDGNHWNRLNSDASNLKSKGITAVWIPPAWKGASQNDVGYGAYDLYDLGEFNQKGTVRTKYGTRSQLQAAVTSLKNNGIQVYGDVVMNHKGGADTTEMVRAVEVNPNNRNQEVTGEYTIEAWTRFDFPGRGNTHSSFKWRWYHFDGVDWDQSRRLNNRIYKFRGKAWDWEVDTEFGNYDYLMYADYDMDHPEVVNELRNWGVWYTNTLGLDGFRIDAVKHIKYSFTRDWINHVRSATGKNMFAVAEFWKNDLGAIENYLQKTNWNHSVFDVPLHYNLYNASQSGGNYDMRNIFNGTVVQRHPSHAVTFVDNHDSQPEEALESFVETWFKPLAYALTLTREQGYPSVFYGDYYGIPTHGVPAMRSKIDPILEARQKYAYGPQHDYLDHPDVIGWTREGDSSHPKSGLATLITDGPGGSKRMYAGLKNAGETWYDITGNRSDTVKIGSDGWGEFHVNGKSVSIYVQK

SEQ ID NO: 29474 - protein, 485 aa, Bacillus sp.
HHNGTNGTMMQYFEWYLPNDGNHWNRLNSDASNLKSKGITAVWIPPAWKAASQNDVGYGAYDLYDLGEFNQKGTVRTKYGTRSQLQAAVTSLKNNGIQVYGDVVMNHKGGADATEMVRAVEVNPNNRNQEVTGEYTIEAWTRFDFPGRGNTHSSFKWRWYHFDGVDWDQSRQLTNRIYKFRGHGKAWDWEVDTEFGNYDYLMYADYDMDHPEVVNELRNWGVWYTNTLGLDGFRIDAVKHIKYSFTRDWINHVRSATGKNMFAVAEFWKNDLGAIENYLQKTNWNHSVFDVPLHYNLYNASKSQGNYDMRNIFNGTVVQRHPSHAVTFVDNHDSQPEEALESFVDTWFKPLAYALTLTREQGYPSVFYGDYYGIPTHGVPAMRSKIDPILEARQKYAYGPQHDYLDHPDVIGWTREGDSSHPKSGLATLITDGPGGSKRMYAGLKNAGETWYDITGNRSDTVKIGSDGWGEFHVNGSSVSIYVQK

SEQ ID NO: 29475 - protein, 483 aa, Bacillus sp.
HHNGTNGTMMQYFEWYLPNDGNHWNRLNSDASNLKSKGITAVWIPPAWKGASQNDVGYGAYDLYDLGEFNQKGTVRTKYGTRSQLQAAVTSLKNNGIQVYGDVVMNHKGGADATEMVRAVEVNPNNRNQEVTGEYTIEAWTRFDFPGRGNTHSSFKWRWYHFDGVDWDQSRRLNNRIYKFRGKAWDWEVDTEFGNYDYLMYADYDMDHPEVVNELRNWGVWYTNTLGLDGFRIDAVKHIKYSFTRDWINHVRSATGKNMFAVAEFWQNDLGGIENYLQKTNWNHSVFDVPLHYNLYNASKSGGNYDMRNIFNGTVVQRHPSHAVTFVDNHDSQPEEALESFVEEWFKPLAYALTLTREQGYPSVFYGDYYGIPTHGVPAMRSKIDPILEARQKYAYGPQHDYLDHPDVIGWTREGDSSHPKSGLATLITDGPGGSKRMYAGLKNAGETWYDITGNRSDTVKIGSDGWGEFHVNDGSVSIYVQK

SEQ ID NO: 29476 - protein, 485 aa, Bacillus sp.
HHNGTNETMMQYFEWYLPNDGNHWNRLNSDASNLKSKGITAVWIPPAWKGASQNDVGYGAYDLYDLGEFNQKGTVRTKYGTRSQLQAAVTSLKNNGIAVYGDVVMNHKGGADATEMVRAVEVNPNNRNQEVTGEYTIEAWTRFDFPGRGNTHSSFKWRWYHFDGVDWDQSRRLNNRIYKFRGHGKAWDWEVDTEFGNYDYLMYADYDMDHPEVVNELRNWGVWYTNTLGLDGFRIDAVKHIKYSFTRDWINHVRSATGKNMFAVAEFWKNDLGAIENYLQKTNWNHSVFDVPLHYNLYNASKSGGNYDMRNIFNGTVVQMHPSHAVTFVDNHDSQPEEALESFVEEWFKPLAYALTLTREQGYPSVFYGDYYGIPTHGVPAMRSKIDPILEARQKYAYGPQHDYLDHPDVIGWTREGDSSHPKSGLATLITDGPGGSKRMYAGLKNAGETWYDITGNRSDTVKIGSDGWGEFHVNDGSVSIYVQK

SEQ ID NO: 29477 - protein, 485 aa, Bacillus sp.
HHNGTNGTMMQYFEWYLPNDGNHWNRLNSDASNLKSKGITAVWIPPAWKGASQNDVGYGAYDLYDLGEFNQKGTVRTKYGTRSQLQAAVTSLKNNGIQVYGDVVMNHKGGADATEMVRAVEVNPNNRNQEVTGEYTIEAWTRFDFPGRGNTHSSFKWRWYHFDGVDWDQSRRLNNRIYKFRGHGKAWDWEVDTEFGNYDYLMYADYDMDHPEVVNELRNWGVWYTNTLGLDGFRIDAVKHIKYSFTRDWINHVRSATGKNMFAVAEFWKNDLGAIENYLQKTNWNHSVFDVPLHYNLYNASKSGGNYDMRNIFNGTVVQRHPSHAVTFVDNHDSQPEEALESFVEPWFKPLAYALTLTREQGYPSVFYGDYYGIPTHGVPAMRSKIDPILEARQKYAYGPQHDYLDHPDVIGWTREGDSSHPKSGLATLITDGPGGSKRMYAGLKNAGETWYDITGNRSDTVKIGSDGWGEFHVNQTSVSIYVQK

SEQ ID NO: 29478 - protein, 485 aa, Bacillus sp.
HHNGTNGTMMQYFEWYLPNDGNHWNRLNSDASNLKSKGITAVWIPPAWKGASQNDVGYGAYDLYDLGEFNQKGTVRTKYGTRSQLQAAVTSLKNNGIQVYGDVVMNHKGGADLTEMVRAVEVNPNNRNQEVTGEYTIEAWTRFDFPGRGNTHSSFKWRWYHFDGVDWDQSRRLNNRIYKFRGHGKAWDWEVDTEFGNYDYLMYADYDMDHPEVVNELRNWGVWYTNTLGLDGFRIDAVKHIKYSFTRDWINHVRIATGKNMFAVAEFWKNDLGAIENYLQKTNWNHSVFDVPLHYNLYNASKSGGNYDMRNIFNGTVVQRHPSHAVTFVDNHDSQPEEALESFVDEWFKPLAYALTLTREQGYPSVFYGDYYGIPTHGVPAMRSKIDPILEARQKYAYGPQHDYLDHPDVIGWTREGDSSHPKSGLATLITDGPGGSKRMYAGLKNAGETWYDITGNRSDTVKIGSDGWGEFHVNDQSVSIYVQK

SEQ ID NO: 29479 - protein, 485 aa, Bacillus sp.
HHNGTNGTMMQYFEWYLPNDGNHWNRLNSDASNLKSKGITAVWIPPAWKGASQNDVGYGAYDLYDLGEFNQKGTVRTKYGTRSQLQAAVTSLKNNGIQVYGDVVMNHKGGADATEMVRAVEVNPNNRNQEVTGEYTIEAWTRFDFPGRGNTHSSFKWRWYHFDGVDWDQSRRLNNRIYKFRGHGKAWDWEVDTEFGNYDYLMYADYDMDHPEVVNELRNWGVWYTNTLGLDGFRIDAVKHIKYSFTRDWINHVRSATGKNMFAVAEFWKNDLGAIENYLQKTNWNHSVFDVPLHYNLYNASKSGGNYDMRNIFNGTVVQRHPSHAVTFVDNHDSQPEEALESFVDPWFKPLAYALTLTREQGYPSVFYGDYYGIPTHGVPAMRSKIDPILEARQKYAYGPQHDYLDHPDVIGWTREGDSSHPKSGLATLITDGPGGSKRMYAGLKNAGETWYDITGNRSDTVKIGSDGWGEFHVNDQSVSIYVQK

SEQ ID NO: 29480 - protein, 483 aa, Bacillus sp.
HHNGTNGTMMQYFEWYLPNDGNHWNRLNSDASNLKSKGITAVWIPPAWKGASQNDVGYGAYDLYDLGEFNQKGTVRTKYGTRSQLQAAVTSLKNNGIQVYGDVVMNHKGGADATEMVRAVEVNPNNRNQEVTGEYTIEAWTRFDFPGRGNTHSSFKWRWYHFDGVDWDQSRRLNNRIYKFRNKAWDWEVDTEFGNYDYLMYADYDMDHPESVNELRNWGVWYTNTLGLDGFRIDAVKHIKYSFTRDWINHVRSATGKNMFAVAEFWKNDLGAIENYLQKTNWNHSVFDVPLHYNLYNASKSGGNYDMRNIFNGTVVQRHPSHAVTFVDNHDSQPEEALESFVEEWFKPLAYALTLTREQGYPSVFYGDYYGIPTHGVPAMRSKIDPILEARQKYAYGPQHDYLDHPDVIGWTREGDSSHPKSGLATLITDGPGGSKRMYAGLKNAGETWYDITGNRSDTVKIGSDGWGEFHVNDGSVSIYVQK

SEQ ID NO: 29481 - protein, 483 aa, Bacillus sp.
HHNGTNGTMMQYFEWYLPNDGNHWNRLNSDASNLKSKGITAVWIPPAWKAASQNDVGYGAYDLYDLGEFNQKGTVRTKYGTRSQLQAAVTSLKNNGIQVYGDVVMNHKGGANATEMVRAVEVNPNNRNQEVTGEYTIEAWTRFDFPGRGNTHSSFKWRWYHFDGVDWDQSRRLNNRIYKFRGKAWDWEVDTEFGNYDYLMYADYDMDHPEVVNELRNWGVWYTNTLGLDGFRIDAVKHIKYSFTRDWINHVRSATGKNMFAVAEFWKNDLGAIENYLQKTNWNHSVFDVPLHYNLYNASKSGGNYDMRNIFNGTVVQRHPSHAVTFVDNHDSQPEEALESFVEEWFKPLAYALTLTREQGYPSVFYGDYYGIPTHGVPAMRSKIDPILEARQKYAYGPQHDYLDHPDVIGWTREGDSSHPKSGLATLITDGPGGSKRMYAGLKNAGETWYDITGNRSDTVKIGSDGWGEFHVNDGSVSIYVQK

SEQ ID NO: 29482 - protein, 483 aa, Bacillus sp.
HHNGTNGTMMQYFEWYLPNDGNHWNRLNSDASNLKSKGITAVWIPPAWKGASQNDVGYGAYDLYDLGEFNQKGTVRTKYGTRSQLQAAVTSLKNNGIQVYGDVVMNHKGGADATEMVRAVEVNPNNRNQEVTGEYTIEAWTRFDFPGRGNTHSSFKWRWYHFDGVDWDQSRRLNNRIYKFRGKAWDWEVDTEFGNYDYLMYADYDMDHPEVVNELRNWGVWYTNTLGLDGFRIDAVKHIKYSFTRDWINHVRSATGKNMFAVAEFWLNDLGWIENYLQKTNWNHSVFDVPLHYNLYNASKSGGNYDMRNIFNGTVVQRHPSHAVTFVDNHDSQPEEALESFVEEWFKPLAYALTLTREQGYPSVFYGDYYGIPTHGVPAMRSKIDPILEARQKYAYGPQHDYLDHPDVIGWTREGDSSHPKSGLATLITDGPGGSKRMYAGLKNAGETWYDITGNRSDTVKIGSDGWGEFHVNDGSVSIYVQK

SEQ ID NO: 29483 - protein, 485 aa, Bacillus sp.
HHNGTNGTMMQYFEWYLPNDGNHWNRLNSDASNLKSKGITAVWIPPAWKGASQNDVGYGAYDLYDLGEFNQKGTVRTKYGTRSQLQAAVTSLKNNGIQVYGDVVMNHKGGADATEMVRAVEVNPNNRNQEVTGEYTIEAWTRFDFPGRGNTHSSFKWRWYHFDGVDWDQSRRLNNRIYKFRGHGKAWDWEVDTEFGNYDYLMYADYDMDHPEVVNELRNWGVWYTNTLGLDGFRIDAVKHIKYSFTRDWINHVRSATGKNMFAVAEFWKNDLGAIENYLQKTNWNHSVFDVPLHYNLYNASKSGGNYDMRNIFNGTVVQRHPSHAVTFVDNHDSQPEEALESFVDTWFKPLAYALTLTREQGYPSVFYGDYYGIPTHGVPAMRSKIDPILEARQKYAYGPQHDYLDHPDVIGWTREGDSSHPKSGLATLITDGPGGSKRMYAGLKNAGETWYDITGNRSDTVKIGSDGWGEFHVNQQSVSIYVQK

SEQ ID NO: 29484 - protein, 485 aa, Bacillus sp.
HHNGTNGTMMQYFEWYLPNDGNHWNRLNSDASNLKSKGIKAVWIPPAWKGASQNDVGYGAYDLYDLGEFNQRGTVRTKYGTRSQLQAAVTSLKNNGIQVYGDVVMNHKGGADATEMVRAVEVNPNNRNQEVTGEYTIEAWTRFDFPGRGNTHSSFKWRWYHFDGVDWDQSRRLNNRIYKFRGHGKAWDWEVDTEFGNYDYLMYADYDMDHPEVVNELRNWGVWYTNTLGLDGFRIDAVKHIKYSFTRDWINHVRSATGKNMFAVAEFWKNDLGAIENYLQKTNWNHSVFDVPLHYNLYNASKSGGNYDMRNIFNGTVVQRHPSHAVTFVDNHDSQPEEALESFVEEWFKPLAYALTLTREQGYPSVFYGDYYGIPTHGVPAMRSKIDPILEARQKYAYGPQHDYLDHPDVIGWTREGDSSHPKSGLATLITDGPGGSKRMYAGLKNAGETWYDITGNRSDTVKIGSDGWGEFHVNDGSVSIYVQK

SEQ ID NO: 29485 - protein, 485 aa, Bacillus sp.
HHNGTNGTMMQYFEWYLPNDGNHWNRLNSDASNLKSKGITAVWIPPAWKGASQNDVGYGAYDLYDLGEFNQKGTVRTKYGTRSQLQAAVTSLKNNGIQVYGDVVMNHKGGADATEMVRAVEVNPNNRNQEVTGEYTIEAWTRFDFPGRGNTHSSFKWRWYHFDGVDWDQSRRLNNRIYKFRGHGKAWDWEVDTEFGNYDYLMYADYDMDHPEVVNELRNWGVWYTNTLGLDGFRIDAVKHIKYSFTRDWINHVRSATGKNMFAVAEFWGGDLGAIENYLQKTNWNHSVFDVPLHYNLYNASKSGGNYDMRNIFNGTVVQRHPSHAVTFVDNHDSQPEEALESFVEEWFKPLAYALTLTREQGYPSVFYGDYYGIPTHGVPAMRSKIDPILEARQKYAYGPQHDYLDHPDVIGWTREGDSSHPKSGLATLITDGPGGSKRMYAGLKNAGETWYDITGNRSDTVKIGSDGWGEFHVNDGSVSIYVQK

SEQ ID NO: 29486 - protein, 485 aa, Bacillus sp.
HHNGTNGTMMQYFEWYLPNDGNHWNRLNSDASNLKSKGITAVWIPPAWKGASQNDVGYGAYDLYDLGEFNQKGTVRTKYGTRSQLQAAVTSLKNNGIQVYGDVVMNHKGGADATEMVRAVEVNPNNRNQEVTGEYTIEAWTRFDFPGRGNTHSSFKWRWYHFDGVDWDQSRNVNNRIYKFRGHGKAWDWEVDTEFGNYDYLMYADYDMDHPEVVNELRNWGVWYTNTLGLDGFRIDAVKHIKYSFTRDWINHVRSATGKNMFAVAEFWKNDLGAIENYLQKTNWNHSVFDVPLHYNLYNASKSGGNYDMRNIFNGTVVQRHPSHAVTFVDNHDSQPEEALESFVETWFKPLAYALTLTREQGYPSVFYGDYYGIPTHGVPAMRSKIDPILEARQKYAYGPQHDYLDHPDVIGWTREGDSSHPKSGLATLITDGPGGSKRMYAGLKNAGETWYDITGNRSDTVKIGSDGWGEFHVNKASVSIYVQK

SEQ ID NO: 29487 - protein, 483 aa, Bacillus sp.
HHNGTNGTMMQYFEWYLPNDGNHWNRLNSDASNLKSKGITAVWIPPAWKGASQNDVGYGAYDLYDLGEFNQKGTVRTKYGTRSQLQAAVTSLKNNGIAVYGDVVMNHKGGADATEMVRAVEVNPNNRNQEVTGEYTIEAWTRFDFPGRGNTHSSFKWRWYHFDGVDWDQSRRLNNRIYKFRGKAWDWEVDTEFGNYDYLMYADYDMDHPEVVNELRNWGVWYTNTLGLDGFRIDAVKHIKYSFTRDWINHVRSATGKNMFAVSEFWKNDLGAIENYLQKTNWNHSVFDVPLHYNLYNASKSGGNYDMRNIFNGTVVQAHPSHAVTFVDNHDSQPEEALESFVEEWFKPLAYALTLTREQGYPSVFYGDYYGIPTHGVPAMRSKIDPILEARQKYAYGPQHDYLDHPDVIGWTREGDSSHPKSGLATLITDGPGGSKRMYAGLKNAGETWYDITGNRSDTVKIGSDGWGEFHVNDGSVSIYVQK

SEQ ID NO: 29488 - protein, 485 aa, Synthetic construct
HHNGTNGTMMQYFEWYLPNDGNHWNRLNSDASNLKSKGITAVWIPPAWKGASQNDVGYGAYDLYDLGEFNQKGTVRTKYGTRSQLQAAVTSLKNNGIQVYGDVVMNHKGGADATEMVRAVEVNPNNRNQEVTGEYTIEAWTRFDFPGRGNTHSSFKWRWYHFDGVDWDQSRRLNNRIYKFRGHGKAWDWEVDTENGNYDYLMYADIDYDHPEAVNEQRNWGVWYTNTLGLDGFRIDAVKHIKYSFTRDWINHVRSATGKNMFAVAEFWKNDLGAIENYLQKTNWNHSVFDVPLHYNLYNASKSGGNYDMRNIFNGTVVQRHPSHAVTFVDNHDSQPEEALESFVEEWFKPLAYALTLTREQGYPSVFYGDYYGIPTHGVPAMRSKIDPILEARQKYAYGPQHDYLDHPDVIGWTREGDSSHPKSGLATLITDGPGGSKRMYAGLKNAGETWYDITGNRSDTVKIGSDGWGEFHVNDGSVSIYVQK

SEQ ID NO: 29489 - protein, 483 aa, Synthetic construct
HHNGTNGTMMQYFEWYLPNDGNHWNRLNSDASNLKSKGITAVWIPPAWKGASQNDVGYGAYDLYDLGEFNQKGTVRTKYGTRSQLQAAVTSLKNNGIQVYGDVVMNHKGGADATEMVRAVEVNPNNRNQEVTGEYTIEAWTRFDFPGRGNTHSSFKWRWYHFDGVDWDQSRRLNNRIYKFRGKAWDWEVDTEFGNYDYLMYADIDMDHPEGTNELRNWGVWYTNTLGLDGFRIDAVKHIKYSFTRDWINHVRSATGKNMFAVAEFWKNDLGAIENYLQKTNWNHSVFDVPLHYNLYNASKSGGNYDMRNIFNGTVVQRHPSHAVTFVDNHDSQPEEALESFVEEWFKPLAYALTLTREQGYPSVFYGDYYGIPTHGVPAMRSKIDPILEARQKYAYGPQHDYLDHPDVIGWTREGDSSHPKSGLATLITDGPGGSKRMYAGLKNAGETWYDITGNRSDTVKIGSDGWGEFHVNDGSVSIYVQK

SEQ ID NO: 29490 - protein, 483 aa, Bacillus sp.
HHNGTNGTMMQYFEWYLPNDGNHWNRLNSDASNLKSKGITAVWIPPAWKGASQNDVGYGAYDLYDLGEFNQKGTVRTKYGTRSQLQAAVTSLKNNGIQVYGDVVMNHKGGADATEMVRAVEVNPNNRNQEVTGEYTIEAWTRFDFPGRGNTHSSFKWRWYHFDGVDWDQSRRLNNRIYKFRGKAWDWEVDTEFGNYDYLMYADYDMDHPEVVNELRNWGVWYTNTLGLDGFRIDAVKHIKYSFTRDWINHVRSATGKNMFAVAEFWKNDLGAIENYLQKTNWNHSVFDVPLHYNLYNASQSAGNYDMRNIFNGTVVQRHPSHAVTFVDNHDSQPEEALESFVEPWFKPLAYALTLTREQGYPSVFYGDYYGIPTHGVPAMRSKIDPILEARQKYAYGPQHDYLDHPDVIGWTREGDSSHPKSGLATLITDGPGGSKRMYAGLKNAGETWYDITGNRSDTVKIGSDGWGEFHVNDGSVSIYVQK

SEQ ID NO: 29491 - protein, 485 aa, Bacillus sp.
HHNGTNGTMMQYFEWYLPNDGNHWNRLNSDASNLKSKGITAVWIPPAWKGASQNDVGYGAYDLYDLGEFNQKGTVRTKYGTRSQLQAAVTSLKNNGIQVYGDVVMNHKGGADATEMVRAVEVNPNNRNQEVTGEYTIEAWTRFDFPGRGNTHSSFKWRWYHFDGVDWDQSRRLNNRIYKFRGHGKAWDWEVDTEFGNYDYLMYADYDMDHPEVVNELRNWGVWYTNTLGLDGFRIDAVKHIKYSFTRDWINHVRSATGKNMFAVAEFWKNDLGAIENYLQKTNWNHSVFDVPLHYNLYNASKSGGNYDMRNIFNGTVVQRHPSHAVTFVDNHDSQPEEALESFVEPWFKPLAYALTLTREQGYPSVFYGDYYGIPTHGVPAMRSKIDPILEARQKYAYGPQHDYLDHPDVIGWTREGDSSHPKSGLATLITDGPGGSKRMYAGLKNAGETWYDITGNRSDTVKIGSDGWGEFHVNGQSVFIYVQK

SEQ ID NO: 29492 - protein, 483 aa, Bacillus sp.
HHNGTNDTMMQYFEWYLPNDGNHWNRLNSDASNLKSKGITAVWIPPAWKGASQNDVGYGAYDLYDLGEFNQKGTVRTKYGTRSQLQAAVTSLKNNGIAVYGDVVMNHKGGADATEMVRAVEVNPNNRNQEVTGEYTIEAWTRFDFPGRGNTHSSFKWRWYHFDGVDWDQSRRLNNRIYKFRGKAWDWEVDTEFGNYDYLMYADYDMDHPEVVNELRNWGVWYTNTLGLDGFRIDAVKHIKYSFTRDWINHVRSATGKNMFAVAEFWKNDLGAIENYLQKTNWNHSVFDVPLHYNLYNASKSGGNYDMRNIFNGTVVQMHPSHAVTFVDNHDSQPEEALESFVEEWFKPLAYALTLTREQGYPSVFYGDYYGIPTHGVPAMRSKIDPILEARQKYAYGPQHDYLDHPDVIGWTREGDSSHPKSGLATLITDGPGGSKRMYAGLKNAGETWYDITGNRSDTVKIGSDGWGEFHVNDGSVSIYVQK

SEQ ID NO: 29493 - protein, 485 aa, Bacillus sp.
HHNGTNGTMMQYFEWYLPNDGNHWNRLNSDASNLKSKGITAVWIPPAWKAASQNDVGYGAYDLYDLGEFNQKGTVRTKYGTRSQLQAAVTSLKNNGIQVYGDVVMNHKGGADATEMVRAVEVNPNNRNQEVTGEYTIEAWTRFDFPGRGNTHSSFKWRWYHFDGVDWDQSRNLNNRIYKFRGHGKAWDWEVDTEFGNYDYLMYTDYDMDHPEVVNELRNWGVWYTNTLGLDGFRIDAVKHIKYSFTRDWINHVRSATGKNMFAVAEFWKNDLGAIENYLQKTNWNHSVFDVPLHYNLYNASKSGGNYDMRNIFNGTVVQRHPSHAVTFVDNHDSQPEEALESFVEEWFKPLAYALTLTREQGYPSVFYGDYYGIPTHGVPAMRSKIDPILEARQKYAYGPQHDYLDHPDVIGWTREGDSSHPKSGLATLITDGPGGSKRMYAGLKNAGETWYDITGNRSDTVKIGSDGWGEFHVNDGSVSIYVQK

SEQ ID NO: 29494 - protein, 485 aa, Bacillus sp.
HHNGTNGTMMQYFEWYLPNDGNHWNRLNSDASNLKSKGITAVWIPPAWKGASQNDVGYGAYDLYDLGEFNQKGTVRTKYGTRSQLQAAVTSLKNNGIQVYGDVVMNHKGGADATEMVRAVEVNPNNRNQEVTGEYTIEAWTRFDFPGRGNTHSSFKWRWYHFDGVDWDQSRRLNNRIYKFRGHGKAWDWEVDTEFGNYDYLMYADYDMDHPEVVNELRNWGVWYTNTLGLDGFRIDAVKHIKYSFTRDWINHVRSATGKNMFAVAEFWKNDLGAIENYLQKTNWNHSVFDVPLHYNLYNASQSGGNYDMRNIFNGTVVQRHPSHAVTFVDNHDSQPEEALESFVEPWFKPLAYALTLTREQGYPSVFYGDYYGIPTHGVPAMRSKIDPILEARQKYAYGPQHDYLDHPDVIGWTREGDSSHPKSGLATLITDGPGGSKRMYAGLKNAGETWYDITGNRSDTVKIGSDGWGEFHVNDASVSIYVQK

SEQ ID NO: 29495 - protein, 483 aa, Bacillus sp.
HHNGTNGTMMQYFEWYLPNDGNHWNRLNSDASNLKSKGITAVWIPPAWKGASQNDVGYGAYDLYDLGEFNQKGTVRTKYGTRSQLQAAVTSLKNNGIQVYGDVVMNHKGGADATEMVRAVEVNPNNRNQEVTGEYTIEAWTRFDFPGRGNTHSSFKWRWYHFDGVDWDQSRRLNNRIYKFRGKAWDWEVDTEFGNYDYLMYADYDMDHPEVVNELRNWGVWYTNTLGLDGFRIDAVKHIKYSFTRDWINHVRSATGKNMFAVAEFWKNDLGAIENYLQKTNWNHSVFDVPLHYNLYNASQSGGNYDMRNIFNGTVVQRHPSHAVTFVDNHDSQPEEALESFVEPWFKPLAYALTLTREQGYPSVFYGDYYGIPTHGVPAMRSKIDPILEARQKYAYGPQHDYLDHPDVIGWTREGDSSHPKSGLATLITDGPGGSKRMYAGLKNAGETWYDITGNRSDTVKIGSDGWGEFHVNKQSVSIYVQK

SEQ ID NO: 29496 - protein, 483 aa, Bacillus sp.
HHNGTNGTMMQYFEWYLPNDGNHWNRLNSDASNLKSKGITAVWIPPAWKGASQNDVGYGAYDLYDLGEFNQKGTVRTKYGTRSQLQAAVTSLKNNGIQVYGDVVMNHKGGADATEMVRAVEVNPNNRNQEVTGEYTIEAWTRFDFPGRGNTHSSFKWRWYHFDGVDWDQSRRLNNRIYKFRGKAWDWEVDTEFGNYDYLMYADYDMDHPEVVNELRNWGVWYTNTLGLDGFRIDAVKHIKYSFTRDWINHVRSATGKNMFAVAEFWQNDLGVIENYLQKTNWNHSVFDVPLHYNLYNASKSGGNYDMRNIFNGTVVQRHPSHAVTFVDNHDSQPEEALESFVEEWFKPLAYALTLTREQGYPSVFYGDYYGIPTHGVPAMRSKIDPILEARQKYAYGPQHDYLDHPDVIGWTREGDSSHPKSGLATLITDGPGGSKRMYAGLKNAGETWYDITGNRSDTVKIGSDGWGEFHVNDGSVSIYVQK

SEQ ID NO: 29497 - protein, 483 aa, Bacillus sp.
HHNGTNGTMMQYFEWYLPNDGNHWNRLNSDASNLKSKGITAVWIPPAWKGASQNDVGYGAYDLYDLGEFNQKGTVRTKYGTRSQLQAAVTSLKNNGIQVYGDVVMNHKGGADATEMVRAVEVNPNNRNQEVTGEYTIEAWTRFDFPGRGNTHSSFKWRWYHFDGVDWDQSRRLNNRIYKFRSKAWDWEVDTEFGNYDYLMYADYDMDYPEVVNELRNWGVWYTNTLGLDGFRIDAVKHIKYSFTRDWINHVRSATGKNMFAVAEFWKNDLGAIENYLQKTNWNHSVFDVPLHYNLYNASKSGGNYDMRNIFNGTVVQRHPSHAVTFVDNHDSQPEEALESFVEEWFKPLAYALTLTREQGYPSVFYGDYYGIPTHGVPAMRSKIDPILEARQKYAYGPQHDYLDHPDVIGWTREGDSSHPKSGLATLITDGPGGSKRMYAGLKNAGETWYDITGNRSDTVKIGSDGWGEFHVNDGSVSIYVQK

SEQ ID NO: 29498 - protein, 485 aa, Bacillus sp.
HHNGTNGTMMQYFEWYLPNDGNHWNRLNSDASNLKSKGITAVWIPPAWKGASQNDVGYGAYDLYDLGEFNQKGTVRTKYGTRSQLQAAVTSLKNNGITVYGDVVMNHKGGADATEMVRAVEVNPNNRNQEVTGEYTIEAWTRFDFPGRGNTHSSFKWRWYHFDGVDWDQSRRLNNRIYKFRGHGKAWDWEVDTEFGNYDYLMYADYDMDHPEVVNELRNWGVWYTNTLGLDGFRIDAVKHIKYSFTRDWINHVRSATGKNMFAVAEFWKNDLGAIENYLQKTNWNHSVFDVPLHYNLYNASKSGGNYDMRNIFNGTVVQAHPSLAVTFVDNHDSQPEEALESFVEEWFKPLAYALTLTREQGYPSVFYGDYYGIPTHGVPAMRSKIDPILEARQKYAYGPQHDYLDHPDVIGWTREGDSSHPKSGLATLITDGPGGSKRMYAGLKNAGETWYDITGNRSDTVKIGSDGWGEFHVNDGSVSIYVQK

SEQ ID NO: 29499 - protein, 485 aa, Bacillus sp.
HHNGTNGTMMQYFEWYLPNDGNHWNRLNSDASNLKSKGITAVWIPPAWKGASQNDVGYGAYDLYDLGEFNQKGTVRTKYGTRSQLQAAVTSLKNNGIQVYGDVVMNHKGGADATEMVRAVEVNPNNRNQEVTGEYTIEAWTRFDFPGRGNTHSSFKWRWYHFDGVDWDQSRKLNNRIYKFRGHGKAWDWEVDTEFGNYDYLMYVDYDMDHPEVVNELRNWGVWYTNTLGLDGFRIDAVKHIKYSFTRDWINHVRIATGKNMFAVAEFWKNDLGAIENYLQKTNWNHSVFDVPLHYNLYNASKSGGNYDMRNIFNGTVVQRHPSHAVTFVDNHDSQPEEALESFVDEWFKPLAYALTLTREQGYPSVFYGDYYGIPTHGVPAMRSKIDPILEARQKYAYGPQHDYLDHPDVIGWTREGDSSHPPSGLATLITDGPGGSKRMYAGLKNAGETWYDITGNRSDTVKIGSDGWGEFHVNDQSVSIYVQK

SEQ ID NO: 29500 - protein, 485 aa, Bacillus sp.
HHNGTNGTMMQYFEWYLPNDGNHWNRLNSDASNLKSKGIKAVWIPPAWKGASQNDVGYGAYDLYDLGEFNQRGTVRTKYGTRSQLQAAVTSLKNNGINVYGDVVMNHKGGADATEMVRAVEVNPNNRNQEVTGEYTIEAWTRFDFPGRGNTHSSFKWRWYHFDGVDWDQSRRLNNRIYKFRGHGKAWDWEVDTEFGNYDYLMYADYDMDHPEVVNELRNWGVWYTNTLGLDGFRIDAVKHIKYSFTRDWINHVRSATGKNMFAVAEFWKNDLGAIENYLQKTNWNHSVFDVPLHYNLYNASKSGGNYDMRNIFNGTVVQAHPMHAVTFVDNHDSQPEEALESFVEEWFKPLAYALTLTREQGYPSVFYGDYYGIPTHGVPAMRSKIDPILEARQKYAYGPQHDYLDHPDVIGWTREGDSSHPKSGLATLITDGPGGSKRMYAGLKNAGETWYDITGNRSDTVKIGSDGWGEFHVNDGSVSIYVQK

SEQ ID NO: 29501 - protein, 485 aa, Bacillus sp.
HHNGTNGTMMQYFEWYLPNDGNHWNRLNSDASNLKSKGITAVWIPPAWKGASQNDVGYGAYDLYDLGEFNQKGTVRTKYGTRSQLQAAVTSLKNNGIQVYGDVVMNHKGGADATEMVRAVEVNPNNRNQEVTGEYTIEAWTRFDFPGRGNTHSSFKWRWYHFDGVDWDQSRRLNNRIYKFRGHGKAWDWEVDTEFGNYDYLMYADYDMDHPEVVNELRNWGVWYTNTLGLDGFRIDAVKHIKYSFTRDWINHVRSATGKNMFAVAEFWQNDLGHIENYLQKTNWNHSVFDVPLHYNLYNASKSGGNYDMRNIFNGTVVQRHPSHAVTFVDNHDSQPEEALESFVEEWFKPLAYALTLTREQGYPSVFYGDYYGIPTHGVPAMRSKIDPILEARQKYAYGPQHDYLDHPDVIGWTREGDSSHPKSGLATLITDGPGGSKRMYAGLKNAGETWYDITGNRSDTVKIGSDGWGEFHVNDGSVSIYVQK

SEQ ID NO: 29502 - protein, 485 aa, Bacillus sp.
HHNGTNGTMMQYFEWYLPNDGNHWNRLNSDASNLKSKGITAVWIPPAWKAVSQNDVGYGAYDLYDLGEFNQKGTVRTKYGTRSQLQAAVTSLKNNGIQVYGDVVMNHKGGADATEMVRAVEVNPNNRNQEVTGEYTIEAYTRFDFSGRGNTHSSFKWRWYHFDGVDWDQSRRFDNRIYKFRGHGKAWDWEVDTEFGNYDYLMYADYDMDHPEVVNELRNWGVWYTNTLGLDGFRIDAVKHIKYSFTRDWINHVRSATGKNMFAVAEFWKNDLGAIENYLQKTNWNHSVFDVPLHYNLYNASKSGGNYDMRNIFNGTVVQRHPSHAVTFVDNHDSQPEEALESFVEEWFKPLAYALTLTREQGYPSVFYGDYYGIPTHGVPAMRSKIDPILEARQKYAYGPQHDYLDHPDVIGWTREGDSSHPKSGLATLITDGPGGSKRMYAGLKNAGETWYDITGNRSDTVKIGSDGWGEFHVNDGSVSIYVQK

SEQ ID NO: 29503 - protein, 483 aa, Bacillus sp.
HHNGTNGTMMQYFEWYLPNDGNHWNRLNSDASNLKSKGITAVWIPPAWKGASQNDVGYGAYDLYDLGEFNQKGTVRTKYGTRSQLQAAVTSLKNNGIQVYGDVVMNHKGGADATEMVRAVEVNPNNRNQEVTGEYTIEAWTRFDFPGRGNTHSSFKWRWYHFDGVDWDQSRRLNNRIYKFRGKAWDWEVDTEFGNYDYLMYADYDMDHPEVVNELRNWGVWYTNTLGLDGFRIDAVKHIKYSFTRDWINHVRSATGKNMFAVAEFWHNDLGRIENYLQKTNWNHSVFDVPLHYNLYNASKSGGNYDMRNIFNGTVVQRHPSHAVTFVDNHDSQPEEALESFVEEWFKPLAYALTLTREQGYPSVFYGDYYGIPTHGVPAMRSKIDPILEARQKYAYGPQHDYLDHPDVIGWTREGDSSHPKSGLATLITDGPGGSKRMYAGLKNAGETWYDITGNRSDTVKIGSDGWGEFHVNDGSVSIYVQK

SEQ ID NO: 29504 - protein, 485 aa, Bacillus sp.
HHNGTNKTMMQYFEWYLPNDGNHWNRLNSDASNLKSKGITAVWIPPAWKGASQNDVGYGAYDLYDLGEFNQKGTVRTKYGTRSQLQAAVTSLKNNGIQVYGDVVMNHKGGADATEMVRAVEVNPNNRNQEVTGEYTIEAWTRFDFPGRGNTHSSFKWRWYHFDGVDWDQSRRLNNRIYKFRGHGKAWDWEVDTEFGNYDYLMYADYDMDHPEVVNELRNWGVWYTNTLGLDGFRIDAVKHIKYSFTRDWINHVRSATGKNMFAVAEFWKNDLGAIENYLQKTNWNHSVFDVPLHYNLYNASKSGGNYDMRNIFNGTVVQAHPSLAVTFVDNHDSQPEEALESFVEEWFKPLAYALTLTREQGYPSVFYGDYYGIPTHGVPAMRSKIDPILEARQKYAYGPQHDYLDHPDVIGWTREGDSSHPKSGLATLITDGPGGSKRMYAGLKNAGETWYDITGNRSDTVKIGSDGWGEFHVNDGSVSIYVQK

SEQ ID NO: 29505 - protein, 485 aa, Bacillus sp.
HHNGTNGTMMQYFEWYLPNDGNHWNRLNSDASNLKSKGITAVWIPPAWKAVSQNDVGYGAYDLYDLGEFNQKGTVRTKYGTRSQLQAAVTSLKNNGIQVYGDVVMNHKGGADATEMVRAVEVNPNNRNQEVTGEYTIEAYTRFDFPGRGNTHSSFKWRWYHFDGVDWDQSREFTNRIYKFRGHGKAWDWEVDTEFGNYDYLMYVDYDMDHPEVVNELRNWGVWYTNTLGLDGFRIDAVKHIKYSFTRDWINHVRSATGKNMFAVAEFWKNDLGAIENYLQKTNWNHSVFDVPLHYNLYNASKSGGNYDMRNIFNGTVVQRHPSHAVTFVDNHDSQPEEALESFVEEWFKPLAYALTLTREQGYPSVFYGDYYGIPTHGVPAMRSKIDPILEARQKYAYGPQHDYLDHPDVIGWTREGDSSHPKSGLATLITDGPGGSKRMYAGLKNAGETWYDITGNRSDTVKIGSDGWGEFHVNDGSVSIYVQK

SEQ ID NO: 29506 - protein, 483 aa, Bacillus sp.
HHNGTNGTMMQYFEWYLPNDGNHWNRLNSDASNLKSKGITAVWIPPAWKGASQNDVGYGAYDLYDLGEFNQKGTVRTKYGTRSQLQAAVTSLKNNGIQVYGDVVMNHKGGADATEMVRAVEVNPNNRNQEVTGEYTIEAWTRFDFPGRGNTHSSFKWRWYHFDGVDWDQSRRLNNRIYKFRGKAWDWEVDTENGNYDYLMYADIDYDLPEVVSELRNWGVWYTNTLGLDGFRIDAVKHIKYSFTRDWINHVRSATGKNMFAVAEFWKNDLGAIENYLQKTNWNHSVFDVPLHYNLYNASKSGGNYDMRNIFNGTVVQRHPSHAVTFVDNHDSQPEEALESFVEEWFKPLAYALTLTREQGYPSVFYGDYYGIPTHGVPAMRSKIDPILEARQKYAYGPQHDYLDHPDVIGWTREGDSSHPKSGLATLITDGPGGSKRMYAGLKNAGETWYDITGNRSDTVKIGSDGWGEFHVNDGSVSIYVQK

SEQ ID NO: 29507 - protein, 483 aa, Synthetic construct
HHNGTNGTMMQYFEWYLPNDGNHWNRLNSDASNLKSKGITAVWIPPAWKGASQNDVGYGAYDLYDLGEFNQKGTVRTKYGTRSQLQAAVTSLKNNGIQVYGDVVMNHKGGADATEMVRAVEVNPNNRNQEVTGEYTIEAWTRFDFPGRGNTHSSFKWRWYHFDGVDWDQSRRLNNRIYKFRGKAWDWEVDTENGNYDYLMYADIDMDYPESVNEMRNWGVWYTNTLGLDGFRIDAVKHIKYSFTRDWINHVRSATGKNMFAVAEFWKNDLGAIENYLQKTNWNHSVFDVPLHYNLYNASKSGGNYDMRNIFNGTVVQRHPSHAVTFVDNHDSQPEEALESFVEEWFKPLAYALTLTREQGYPSVFYGDYYGIPTHGVPAMRSKIDPILEARQKYAYGPQHDYLDHPDVIGWTREGDSSHPKSGLATLITDGPGGSKRMYAGLKNAGETWYDITGNRSDTVKIGSDGWGEFHVNDGSVSIYVQK

SEQ ID NO: 29508 - protein, 485 aa, Bacillus sp.
HHNGTNGTMMQYFEWYLPNDGNHWNRLNSDASNLKSKGITAVWIPPAWKGASQNDVGYGAYDLYDLGEFNQKGTVRTKYGTRSQLQAAVTSLKNNGIQVYGDVVMNHKGGADATEMVRAVEVNPNNRNQEVTGEYTIEAWTRFDFPGRGNTHSSFKWRWYHFDGVDWDQSRRLNNRIYKFRGHGKAWDWEVDTEFGNYDYLMYADYDMDHPEVVNELRNWGVWYTNTLGLDGFRIDAVKHIKYSFTRDWINHVRSATGKNMFAVAEFWKNDLGAIENYLQKTNWNHSVFDVPLHYNLYNASKSAGNYDMRNIFNGTVVQRHPSHAVTFVDNHDSQPEEALESFVEPWFKPLAYALTLTREQGYPSVFYGDYYGIPTHGVPAMRSKIDPILEARQKYAYGPQHDYLDHPDVIGWTREGDSSHPKSGLATLITDGPGGSKRMYAGLKNAGETWYDITGNRSDTVKIGSDGWGEFHVNGSSVSIYVQK

SEQ ID NO: 29509 - protein, 483 aa, Bacillus sp.
HHNGTNGTMMQYFEWYLPNDGNHWNRLNSDASNLKSKGITAVWIPPAWKGASQNDVGYGAYDLYDLGEFNQKGTVRTKYGTRSQLQAAVTSLKNNGIQVYGDVVMNHKGGADATEMVRAVEVNPNNRNQEVTGEYTIEAWTRFDFPGRGNTHSSFKWRWYHFDGVDWDQSRRLNNRIYKFRGKAWDWEVDTEFGNYDYLMYADYDMDHPEVVNELRNWGVWYTNTLGLDGFRIDAVKHIKYSFTRDWINHVRSATGKNMFAVAEFWKNDLGAIENYLQKTNWNHSVFDVPLHYNLYNASKSGGNYDMRNIFNGTVVQRHPSHAVTFVDNHDSQPEEALESFVETWFKPLAYALTLTREQGYPSVFYGDYYGIPTHGVPAMRSKIDPILEARQKYAYGPQHDYLDHPDVIGWTREGDSSHPKSGLATLITDGPGGSKRMYAGLKNAGETWYDITGNRSDTVKIGSDGWGEFHVNDKSVSIYVQK

SEQ ID NO: 29510 - protein, 483 aa, Bacillus sp.
HHNGTNGTMMQYFEWYLPNDGNHWNRLNSDASNLKSKGITAVWIPPAWKGASQNDVGYGAYDLYDLGEFNQKGTVRTKYGTRSQLQAAVTSLKNNGIQVYGDVVMNHKGGADATEMVRAVEVNPNNRNQEVTGEYTIEAWTRFDFPGRGNTHSSFKWRWYHFDGVDWDQSRRLNNRIYKFRGKAWDWEVDTEFGNYDYLMYADYDMDHPEVVNELRNWGVWYTNTLGLDGFRIDAVKHIKYSFTRDWINHVRSATGKNMFAVAEFWKNDLGAIENYLQKTNWNHSVFDVPLHYNLYNASKSAGNYDMRNIFNGTVVQRHPSHAVTFVDNHDSQPEEALESFVDPWFKPLAYALTLTREQGYPSVFYGDYYGIPTHGVPAMRSKIDPILEARQKYAYGPQHDYLDHPDVIGWTREGDSSHPKSGLATLITDGPGGSKRMYAGLKNAGETWYDITGNRSDTVKIGSDGWGEFHVNGKSVSIYVQK

SEQ ID NO: 29511 - protein, 485 aa, Bacillus sp.
HHNGTNGTMMQYFEWYLPNDGNHWNRLNSDASNLKSKGITAVWIPPAWKGASQNDVGYGAYDLYDLGEFNQKGTVRTKYGTRSQLQAAVTSLKNNGIQVYGDVVMNHKGGADATEMVDAVEVNPNNRNQEVTGEYTIEAWTRFDFPGRGNTHSSFKWRWYHFDGVDFDQSRRLNNRIYKFRGHGKAWDWEVDTEFGNYDYLMYADYDMDHPEVVNELRNWGVWYTNTLGLDGFRIDAVKHIKYSFTRDWINHVRIATGKNMFAVAEFWKNDLGAIENYLQKTNWNHSVFDVPLHYNLYNASKSGGNYDMRNIFNGTVVQRHPSHAVTFVDNHDSQPEEALESFVDEWFKPLAYALTLTREQGYPSVFYGDYYGIPTHGVPAMRSKIDPILEARQKYAYGPQHDYLDHPDVIGWTREGDSSHPKSGLATLITDGPGGSKRMYAGLKNAGETWYDITGNRSDTVKIGSDGWGEFHVNDQSVSIYVQK

SEQ ID NO: 29512 - protein, 485 aa, Bacillus sp.
HHNGTNGTMMQYFEWYLPNDGNHWNRLNSDASNLKSKGITAVWIPPAWKAVSQNDVGYGAYDLYDLGEFNQKGTVRTKYGTRSQLQAAVTSLKNNGIQVYGDVVMNHKGGADLTEMVDAVEVNPNNRNQEVTGEYTIEAWTRFDFPGRGNTHSSFKWRWYHFDGVDFDQSRDFNNRIYKFRGHGKAWDWEVDTEFGNYDYLMYADYDMDHPEVVNELRNWGVWYTNTLGLDGFRIDAVKHIKYSFTRDWINHVRSATGKNMFAVAEFWKNDLGAIENYLQKTNWNHSVFDVPLHYNLYNASKSGGNYDMRNIFNGTVVQRHPSHAVTFVDNHDSQPEEALESFVEEWFKPLAYALTLTREQGYPSVFYGDYYGIPTHGVPAMRSKIDPILEARQKYAYGPQHDYLDHPDVIGWTREGDSSHPKSGLATLITDGPGGSKRMYAGLKNAGETWYDITGNRSDTVKIGSDGWGEFHVNDGSVSIYVQK

SEQ ID NO: 29513 - protein, 483 aa, Bacillus sp.
HHNGTNGTMMQYFEWYLPNDGNHWNRLNSDASNLKSKGITAVWIPPAWKGASQNDVGYGAYDLYDLGEFNQKGTVRTKYGTRSQLQAAVTSLKNNGIQVYGDVVMNHKGGADLTEMVRAVEVNPNNRNQEVTGEYTIEAWTRFDFPGRGNTHSSFKWRWYHFDGVDFDQSRQLNNRIYKFRGKAWDWEVDTEFGNYDYLMYADYDMDHPEVVNELRNWGVWYTNTLGLDGFRIDAVKHIKYSFTRDWINHVRSATGKNMFAVAEFWKNDLGAIENYLQKTNWNHSVFDVPLHYNLYNASKSGGNYDMRNIFNGTVVQRHPSHAVTFVDNHDSQPEEALESFVEEWFKPLAYALTLTREQGLPSVFYGDYYGIPTHGVPAMRSKIDPILEARQKYAYGPQHDYLDHPDVIGWTREGDSSHPKSGLATLITDGPGGSKRMYAGLKNAGETWYDITGNRSDTVKIGSDGWGEFHVNDGSVSIYVQK

SEQ ID NO: 29514 - protein, 485 aa, Bacillus sp.
HHNGTNGTMMQYFEWYLPNDGNHWNRLNSDASNLKSKGITAVWIPPAWKGTSQNDVGYGAYDLYDLGEFNQKGTVRTKYGTRSQLQAAVTSLKNNGIQVYGDVVMNHKGGADATEMVRAVEVNPNNRNQEVTGEYTIEAWTRFDFPGRGNTHSSFKWRWYHFDGVDWDQSRNLNNRIYKFRGHGKAWDWEVDTEFGNYDYLMYVDYDMDHPEVVNELRNWGVWYTNTLGLDGFRIDAVKHIKYSFTRDWINHVRSATGKNMFAVAEFWKNDLGAIENYLQKTNWNHSVFDVPLHYNLYNASKSQGNYDMRNIFNGTVVQRHPSHAVTFVDNHDSQPEEALESFVDTWFKPLAYALTLTREQGYPSVFYGDYYGIPTHGVPAMRSKIDPILEARQKYAYGPQHDYLDHPDVIGWTREGDSSHPKSGLATLITDGPGGSKRMYAGLKNAGETWYDITGNRSDTVKIGSDGWGEFHVNGSSVSIYVQK

SEQ ID NO: 29515 - protein, 485 aa, Bacillus sp.
HHNGTNGTMMQYFEWYLPNDGNHWNRLNSDASNLKSKGITAVWIPPAWKGASQNDVGYGAYDLYDLGEFNQKGTVRTKYGTRSQLQAAVTSLKNNGIQVYGDVVMNHKGGADATEMVRAVEVNPNNRNQEVTGEYTIEAWTRFDFPGRGNTHSSFKWRWYHFDGVDWDQSRRLNNRIYKFRGHGKAWDWEVDTEFGNYDYLMYADYDMDHPEVVNELRNWGVWYTNTLGLDGFRIDAVKHIKYSFTRDWINHVRSATGKNMFAVAEFWKNDLGAIENYLQKTNWNHSVFDVPLHYNLYNASQSGGNYDMRNIFNGTVVQRHPSHAVTFVDNHDSQPEEALESFVEPWFKPLAYALTLTREQGYPSVFYGDYYGIPTHGVPAMRSKIDPILEARQKYAYGPQHDYLDHPDVIGWTREGDSSHPKSGLATLITDGPGGSKRMYAGLKNAGETWYDITGNRSDTVKIGSDGWGEFHVNDQSVSIYVQK

SEQ ID NO: 29516 - protein, 483 aa, Bacillus sp.
HHNGTNGTMMQYFEWYLPNDGNHWNRLNSDASNLKSKGITAVWIPPAWKAVSQNDVGYGAYDLYDLGEFNQKGTVRTKYGTRSQLQAAVTSLKNNGIQVYGDVVMNHKGGADLTEMVRAVEVNPNNRNQEVTGEYTIEAWTRFDFPGRGNTHSSFKWRWYHFDGVDWDQSREFTNRIYKFRGKAWDWEVDTEFGNYDYLMYVDYDMDHPEVVNELRNWGVWYTNTLGLDGFRIDAVKHIKYSFTRDWINHVRSATGKNMFAVAEFWKNDLGAIENYLQKTNWNHSVFDVPLHYNLYNASKSGGNYDMRNIFNGTVVQRHPSHAVTFVDNHDSQPEEALESFVDPWFKPLAYALTLTREQGYPSVFYGDYYGIPTHGVPAMRSKIDPILEARQKYAYGPQHDYLDHPDVIGWTREGDSSHPKSGLATLITDGPGGSKRMYAGLKNAGETWYDITGNRSDTVKIGSDGWGEFHVNGGSVSIYVQK

SEQ ID NO: 29517 - protein, 483 aa, Bacillus sp.
HHNGTNGTMMQYFEWYLPNDGNHWNRLNSDASNLKSKGITAVWIPPAWKAASQNDVGYGAYDLYDLGEFNQKGTVRTKYGTRSQLQAAVTSLKNNGIQVYGDVVMNHKGGADATEMVRAVEVNPNNRNQEVTGEYTIEAWTRFDFPGRGNTHSSFKWRWYHFDGVDWDQSRDLDNRIYKFRGKAWDWEVDTEFGNYDYLMYADYDMDHPEVVNELRNWGVWYTNTLGLDGFRIDAVKHIKYSFTRDWINHVRIATGKNMFAVAEFWKNDLGAIENYLQKTNWNHSVFDVPLHYNLYNASKSGGNYDMRNIFNGTVVQRHPSHAVTFVDNHDSQPEEALESFVDEWFKPLAYALTLTREQGYPSVFYGDYYGIPTHGVPAMRSKIDPILEARQKYAYGPQHDYLDHPDVIGWTREGDSSHPKSGLATLITDGPGGSKRMYAGLKNAGETWYDITGNRSDTVKIGSDGWGEFHVNDQSVSIYVQK

SEQ ID NO: 29518 - protein, 483 aa, Bacillus sp.
HHNGTNGTMMQYFEWYLPNDGNHWNRLNSDASNLKSKGITAVWIPPAWKAVSQNDVGYGAYDLYDLGEFNQKGTVRTKYGTRSQLQAAVTSLKNNGIQVYGDVVMNHKGGADATEMVRAVEVNPNNRNQEVTGEYTIEAWTRFDFPGRGNTHSSFKWRWYHFDGVDWDQSRNLTNRIYKFRGKAWDWEVDTEFGNYDYLMYTDYDMDHPEVVNELRNWGVWYTNTLGLDGFRIDAVKHIKYSFTRDWINHVRSATGKNMFAVAEFWKNDLGAIENYLQKTNWNHSVFDVPLHYNLYNASKSGGNYDMRNIFNGTVVQRHPSHAVTFVDNHDSQPEEALESFVEEWFKPLAYALTLTREQGYPSVFYGDYYGIPTHGVPAMRSKIDPILEARQKYAYGPQHDYLDHPDVIGWTREGDSSHPKSGLATLITDGPGGSKRMYAGLKNAGETWYDITGNRSDTVKIGSDGWGEFHVNDGSVSIYVQK

SEQ ID NO: 29519 - protein, 483 aa, Bacillus sp.
HHNGTNGTMMQYFEWYLPNDGNHWNRLNSDASNLKSKGITAVWIPPAWKAASQNDVGYGAYDLYDLGEFNQKGTVRTKYGTRSQLQAAVTSLKNNGIQVYGDVVMNHKGGADATEMVRAVEVNPNNRNQEVTGEYTIEAYTRFDFPGRGNTHSSFKWRWYHFDGVDWDQSRNLTNRIYKFRGKAWDWEVDTEFGNYDYLMYADYDMDHPEVVNELRNWGVWYTNTLGLDGFRIDAVKHIKYSFTRDWINHVRSATGKNMFAVAEFWKNDLGAIENYLQKTNWNHSVFDVPLHYNLYNASKSGGNYDMRNIFNGTVVQRHPSHAVTFVDNHDSQPEEALESFVEEWFKPLAYALTLTREQGYPSVFYGDYYGIPTHGVPAMRSKIDPILEARQKYAYGPQHDYLDHPDVIGWTREGDSSHPKSGLATLITDGPGGSKRMYAGLKNAGETWYDITGNRSDTVKIGSDGWGEFHVNDGSVSIYVQK

SEQ ID NO: 29520 - protein, 485 aa, Bacillus sp.
HHNGTNGTMMQYFEWYLPNDGNHWNRLNSDASNLKSKGITAVWIPPAWKGASQNDVGYGAYDLYDLGEFNQKGTVRTKYGTRSQLQAAVTSLKNNGIQVYGDVVMNHKGGADATEMVRAVEVNPNNRNQEVTGEYTIEAWTRFDFPGRGNTHSSFKWRWYHFDGVDWDQSRRLNNRIYKFRGHGKAWDWEVDTEFGNYDYLMYADYDMDHPEVVNELRNWGVWYTNTLGLDGFRIDAVKHIKYSFTRDWINHVRSATGKNMFAVAEFWQNDLGLIENYLQKTNWNHSVFDVPLHYNLYNASKSGGNYDMRNIFNGTVVQRHPSHAVTFVDNHDSQPEEALESFVEEWFKPLAYALTLTREQGYPSVFYGDYYGIPTHGVPAMRSKIDPILEARQKYAYGPQHDYLDHPDVIGWTREGDSSHPKSGLATLITDGPGGSKRMYAGLKNAGETWYDITGNRSDTVKIGSDGWGEFHVNDGSVSIYVQK

SEQ ID NO: 29521 - protein, 485 aa, Bacillus sp.
HHNGTNGTMMQYFEWYLPNDGNHWNRLNSDASNLKSKGITAVWIPPAWKATSQNDVGYGAYDLYDLGEFNQKGTVRTKYGTRSQFQAAVTSLKNNGIQVYGDVVMNHKGGADATEMVRAVEVNPNNRNQEVTGEYTIEAWTRFDFPGRGNTHSSFKWRWYHFDGVDWDQSRNVNNRIYKFRGHGKAWDWEVDTEFGNYDYLMYADYDMDHPEVVNELRNWGVWYTNTLGLDGFRIDAVKHIKYSFTRDWINHVRSATGKNMFAVAEFWKNDLGAIENYLQKTNWNHSVFDVPLHYNLYNASKSGGNYDMRNIFNGTVVKAHPNHAVTFVDNHDSQPEEALESFVEEWFKPLAYALTLTREQGYPSVFYGDYYGIPTHGVPAMRSKIDPILEARQKYAYGPQHDYLDHPDVIGWTREGDSSHPKSGLATLITDGPGGSKRMYAGLKNAGETWYDITGNRSDTVKIGSDGWGEFHVNDGSVSIYVQK

SEQ ID NO: 29522 - protein, 485 aa, Bacillus sp.
HHNGTNGTMMQYFEWYLPNDGNHWNRLNSDASNLKSKGITAVWIPPAWKGASQNDVGYGAYDLYDLGEFNQKGTVRTKYGTRSQLQAAVTSLKNNGIQVYGDVVMNHKGGADATEMVRAVEVNPNNRNQEVTGEYTIEAWTRFDFPGRGNTHSSFKWRWYHFDGVDWDQSRRLNNRIYKFRGHGKAWDWEVDTEFGNYDYLMYADYDMDHPEVVNELRNWGVWYTNTLGLDGFRIDAVKHIKYSFTRDWINHVRSATGKNMFAVAEFWKNDLGAIENYLQKTNWNHSVFDVPLHYNLYNASKSQGNYDMRNIFNGTVVQRHPSHAVTFVDNHDSQPEEALESFVDTWFKPLAYALTLTREQGYPSVFYGDYYGIPTHGVPAMRSKIDPILEARQKYAYGPQHDYLDHPDVIGWTREGDSSHPKSGLATLITDGPGGSKRMYAGLKNAGETWYDITGNRSDTVKIGSDGWGEFHVNGTSVSIYVQK

SEQ ID NO: 29523 - protein, 483 aa, Bacillus sp.
HHNGTNGTMMQYFEWYLPNDGNHWNRLNSDASNLKSKGITAVWIPPAWKGASQNDVGYGAYDLYDLGEFNQKGTVRTKYGTRSQLQAAVTSLKNNGIQVYGDVVMNHKGGADATEMVRAVEVNPNNRNQEVTGEYTIEAWTRFDFPGRGNTHSSFKWRWYHFDGVDWDQSRRLNNRIYKFRGKAWDWEVDTEFGNYDYLMYADYDMDHPEVVNELRNWGVWYTNTLGLDGFRIDAVKHIKYSFTRDWINHVRSATGKNMFAVAEFWKNDLGAIENYLQKTNWNHSVFDVPLHYNLYNASKSAGNYDMRNIFNGTVVQRHPSHAVTFVDNHDSQPEEALESFVDPWFKPLAYALTLTREQGYPSVFYGDYYGIPTHGVPAMRSKIDPILEARQKYAYGPQHDYLDHPDVIGWTREGDSSHPKSGLATLITDGPGGSKRMYAGLKNAGETWYDITGNRSDTVKIGSDGWGEFHVNKGSVSIYVQK

SEQ ID NO: 29524 - protein, 485 aa, Bacillus sp.
HHNGTNGTMMQYFEWYLPNDGNHWNRLNSDASNLKSKGIKAVWIPPAWKGASQNDVGYGAYDLYDLGEFNQKGTVRTKYGTRSQLQAAVTSLKNNGIQVYGDVVMNHKGGADATEMVRAVEVNPNNRNQEVTGEYTIEAWTRFDFPGRGNTHSSFKWRWYHFDGVDWDQSRRLNNRIYKFRGHGKAWDWEVDTEFGNYDYLMYADYDMDHPEVVNELRNWGVWYTNTLGLDGFRIDAVKHIKYSFTRDWINHVRSATGKNMFAVAEFWKNDLGAIENYLQKTNWNHSVFDVPLHYNLYNASKSGGNYDMRNIFNGTVVQRHPSHAVTFVDNHDSQPEEALESFVETWFKPLAYALTLTREQGYPSVFYGDYYGIPTHGVPAMRSKIDPILEARQKYAYGPQHDYLDHPDVIGWTREGDSSHPKSGLATLITDGPGGSKRMYAGLKNAGETWYDITGNRSDTVKIGSDGWGEFHVNDGSVSIYVQK

SEQ ID NO: 29525 - protein, 485 aa, Bacillus sp.
HHNGTNGTMMQYFEWYLPNDGNHWNRLNSDASNLKSKGITAVWIPPAWKAASQNDVGYGAYDLYDLGEFNQKGTVRTKYGTRSQLQAAVTSLKNNGIQVYGDVVMNHKGGANATEMVRAVEVNPNNRNQEVTGEYTIEAWTRFDFPGRGNTHSSFKWRWYHFDGVDWDQSRRLNNRIYKFRGHGKAWDWEVDTEFGNYDYLMYADYDMDHPEVVNELRNWGVWYTNTLGLDGFRIDAVKHIKYSFTRDWINHVRSATGKNMFAVAEFWKNDLGAIENYLQKTNWNHSVFDVPLHYNLYNASKSGGNYDMRNIFNGTVVQRHPSHAVTFVDNHDSQPEEALESFVEEWFKPLAYALTLTREQGYPSVFYGDYYGIPTHGVPAMRSKIDPILEARQKYAYGPQHDYLDHPDVIGWTREGDSSHPKSGLATLITDGPGGSKRMYAGLKNAGETWYDITGNRSDTVKIGSDGWGEFHVNDGSVSIYVQK

SEQ ID NO: 29526 - protein, 483 aa, Bacillus sp.
HHNGTNGTMMQYFEWYLPNDGNHWNRLNSDASNLKSKGITAVWIPPAWKGASQNDVGYGAYDLYDLGEFNQKGTVRTKYGTRSQLQAAVTSLKNNGIQVYGDVVMNHKGGADATEMVRAVEVNPNNRNQEVTGEYTIEAWTRFDFPGRGNTHSSFKWRWYHFDGVDWDQSRRLNNRIYKFRGKAWDWEVDTEFGNYDYLMYADYDMDHPEVVNELRNWGVWYTNTLGLDGFRIDAVKHIKYSFTRDWINHVRSATGKNMFAVAEFWKYDLGAIENYLQKTNWNHSVFDVPLHNNLYNASKSGGNYDMRNIFNGTVVQRHPSHAVTFVDNHDSQPEEALESFVEEWFKPLAYALTLTREQGYPSVFYGDYYGIPTHGVPAMRSKIDPILEARQKYAYGPQHDYLDHPDVIGWTREGDSSHPKSGLATLITDGPGGSKRMYAGLKNAGETWYDITGNRSDTVKIGSDGWGEFHVNDGSVSIYVQK

SEQ ID NO: 29527 - protein, 485 aa, Bacillus sp.
HHNGTNGTMMQYFEWYLPNDGNHWNRLNSDASNLKSKGITAVWIPPAWKGASQNDVGYGAYDLYDLGEFNQKGTVRTKYGTRSQLQAAVTSLKNNGIQVYGDVVMNHKGGADATEMVRAVEVNPNNRNQEVTGEYTIEAWTRFDFPGRGNTHSSFKWRWYHFDGVDWDQSRRLNNRIYKFRGHGKAWDWEVDTEFGNYDYLMYADYDMDHPEVVNELRNWGVWYTNTLGLDGFRIDAVKHIKYSFTRDWINHVRSATGKNMFAVAEFWKNDLGAIENYLQKTNWNHSVFDVPLHYNLYNASKSAGNYDMRNIFNGTVVQRHPSHAVTFVDNHDSQPEEALESFVDTWFKPLAYALTLTREQGYPSVFYGDYYGIPTHGVPAMRSKIDPILEARQKYAYGPQHDYLDHPDVIGWTREGDSSHPKSGLATLITDGPGGSKRMYAGLKNAGETWYDITGNRSDTVKIGSDGWGEFHVNGKSVSIYVQK

SEQ ID NO: 29528 - protein, 485 aa, Synthetic construct
HHNGTNGTMMQYFEWYLPNDGNHWNRLNSDASNLKSKGITAVWIPPAWKGASQNDVGYGAYDLYDLGEFNQKGTVRTKYGTRSQLQAAVTSLKNNGIQVYGDVVMNHKGGADATEMVRAVEVNPNNRNQEVTGEYTIEAWTRFDFPGRGNTHSSFKWRWYHFDGVDWDQSRRLNNRIYKFRGHGKAWDWEVDTENGNYDYLMYADIDMDHPEVVNELRNWGVWYTNTLGLDGFRIDAVKHIKYSFTRDWINHVRSATGKNMFAVAEFWKNDLGAIENYLQKTNWNHSVFDVPLHYNLYNASKSGGNYDMRNIFNGTVVQRHPSHAVTFVDNHDSQPEEALESFVEEWFKPLAYALTLTREQGYPSVFYGDYYGIPTHGVPAMRSKIDPILEARQKYAYGPQHDYLDHPDVIGWTREGDSSAAKSGLAALITDGPGGSKRMYAGLKNAGETWYDITGNRSDTVKIGSDGWGEFHVNDGSVSIYVQK

SEQ ID NO: 29529 - protein, 485 aa, Bacillus sp.
HHNGTNGTMMQYFEWYLPNDGNHWNRLNSDASNLKSKGITAVWIPPAWKGASQNDVGYGAYDLYDLGEFNQKGTVRTKYGTRSQLQAAVTSLKNNGIQVYGDVVMNHKGGADATEMVRAVEVNPNNRNQEVTGEYTIEAWTRFDFPGRGNTHSSFKWRWYHFDGVDWDQSRRLNNRIYKFRGHGKAWDWEVDTEFGNYDYLMYADYDMDHPEVVNELRNWGVWYTNTLGLDGFRIDAVKHIKYSFTRDWINHVRSATGKNMFAVAEFWKNDLGAIENYLQKTNWNHSVFDVPLHYNLYNASKSQGNYDMRNIFNGTVVQRHPSHAVTFVDNHDSQPEEALESFVDPWFKPLAYALTLTREQGYPSVFYGDYYGIPTHGVPAMRSKIDPILEARQKYAYGPQHDYLDHPDVIGWTREGDSSHPKSGLATLITDGPGGSKRMYAGLKNAGETWYDITGNRSDTVKIGSDGWGEFHVNGTSVSIYVQK

SEQ ID NO: 29530 - protein, 485 aa, Bacillus sp.
HHNGTNGTMMQYFEWYLPNDGNHWNRLNSDASNLKSKGITAVWIPPAWKGASQNDVGYGAYDLYDLGEFNQKGTVRTKYGTRSQLQAAVTSLKNNGIQVYGDVVMNHKGGADATEMVRAVEVNPNNRNQEVTGEYTIEAWTRFDFPGRGNTHSSFKWRWYHFDGVDWDQSRKLNNRIYKFRGHGKAWDWEVDTEFGNYDYLMYVDYDMDHPEVVNELRNWGVWYTNTLGLDGFRIDAVKHIKYSFTRDWINHVRIATGKNMFAVAEFWKNDLGAIENYLQKTNWNHSVFDVPLHYNLYNASKSGGNYDMRNIFNGTVVQRHPSHAVTFVDNHDSQPEEALESFVDEWFKPLAYALTLTREQGYPSVFYGDYYGIPTHGVPAMRSKIDPILEARQKYAYGPQHDYLDHPDVIGWTREGDSSHPKSGLATLITDGPGGSKRMYAGLKNAGETWYDITGNRSDTVKIGSDGWGEFHVNDQSVSIYVQK

SEQ ID NO: 29531 - protein, 483 aa, Bacillus sp.
HHNGTNGTMMQYFEWYLPNDGNHWNRLNSDASNLKSKGITAVWIPPAWKGASQNDVGYGAYDLYDLGEFNQKGTVRTKYGTRSQLQAAVTSLKNNGIQVYGDVVMNHKGGADATEMVRAVEVNPNNRNQEVTGEYTIEAWTRFDFPGRGNTHSSFKWRWYHFDGVDWDQSRRLNNRIYKFRGKAWDWEVDTEFGNYDYLMYADYDMDHPEVVNELRNWGVWYTNTLGLDGFRIDAVKHIKYSFTRDWINHVRSATGKNMFAVAEFWKNDLGAIENYLQKTNWNHSVFDVPLHYNLYNASKSAGNYDMRNIFNGTVVQRHPSHAVTFVDNHDSQPEEALESFVEPWFKPLAYALTLTREQGYPSVFYGDYYGIPTHGVPAMRSKIDPILEARQKYAYGPQHDYLDHPDVIGWTREGDSSHPKSGLATLITDGPGGSKRMYAGLKNAGETWYDITGNRSDTVKIGSDGWGEFHVNDGSVSIYVQK

SEQ ID NO: 29532 - protein, 483 aa, Bacillus sp.
HHNGTNGTMMQYFEWYLPNDGNHWNRLNSDASNLKSKGITAVWIPPAWKGASQNDVGYGAYDLYDLGEFNQKGTVRTKYGTRSQLQAAVTSLKNNGIQVYGDVVMNHKGGADATEMVRAVEVNPNNRNQEVTGEYTIEAWTRFDFPGRGNTHSSFKWRWYHFDGVDWDQSRDLTNRIYKFRGKAWDWEVDTEFGNYDYLMYADYDMDHPEVVNELRNWGVWYTNTLGLDGFRIDAVKHIKYSFTRDWINHVRSATGKNMFAVAEFWKNDLGAIENYLQKTNWNHSVFDVPLHYNLYNASKSGGNYDMRNIFNGTVVQRHPSHAVTFVDNHDSQPEEALESFVETWFKPLAYALTLTREQGYPSVFYGDYYGIPTHGVPAMRSKIDPILEARQKYAYGPQHDYLDHPDVIGWTREGDSSHPKSGLATLITDGPGGSKRMYAGLKNAGETWYDITGNRSDTVKIGSDGWGEFHVNKASVSIYVQK

SEQ ID NO: 29533 - protein, 485 aa, Bacillus sp.
HHNGTNGTMMQYFEWYLPNDGNHWNRLNSDASNLKSKGITAVWIPPAWKAVSQNDVGYGAYDLYDLGEFNQKGTVRTKYGTRSQLQAAVTSLKNNGIQVYGDVVMNHKGGADATEMVRAVEVNPNNRNQEVTGEYTIEAWTRFDFPGRGNTHSSFKWRWYHFDGVDFDQSREFTNRIYKFRGHGKAWDWEVDTEFGNYDYLMYVDYDMDHPEVVNELRNWGVWYTNTLGLDGFRIDAVKHIKYSFTRDWINHVRSATGKNMFAVAEFWKNDLGAIENYLQKTNWNHSVFDVPLHYNLYNASKSGGNYDMRNIFNGTVVQRHPSHAVTFVDNHDSQPEEALESFVEEWFKPLAYALTLTREQGYPSVFYGDYYGIPTHGVPAMRSKIDPILEARQKYAYGPQHDYLDHPDVIGWTREGDSSHPKSGLATLITDGPGGSKRMYAGLKNAGETWYDITGNRSDTVKIGSDGWGEFHVNDGSVSIYVQK

SEQ ID NO: 29534 - protein, 483 aa, Bacillus sp.
HHNGTNGTMMQYFEWYLPNDGNHWNRLNSDASNLKSKGITAVWIPPAWKGASQNDVGYGAYDLYDLGEFNQKGTVRTKYGTRSQLQAAVTSLKNNGIQVYGDVVMNHKGGADATEMVRAVEVNPNNRNQEVTGEYTIEAWTRFDFPGRGNTHSSFKWRWYHFDGVDWDQSRRLNNRIYKFRGKAWDWEVDTEFGNYDYLMYADYDMDHPEVVNELRNWGVWYTNTLGLDGFRIDAVKHIKYSFTRDWINHVRSATGKNMFAVAEFWRNDLGGIENYLQKTNWNHSVFDVPLHYNLYNASKSGGNYDMRNIFNGTVVQRHPSHAVTFVDNHDSQPEEALESFVEEWFKPLAYALTLTREQGYPSVFYGDYYGIPTHGVPAMRSKIDPILEARQKYAYGPQHDYLDHPDVIGWTREGDSSHPKSGLATLITDGPGGSKRMYAGLKNAGETWYDITGNRSDTVKIGSDGWGEFHVNDGSVSIYVQK

SEQ ID NO: 29535 - protein, 485 aa, Bacillus sp.
HHNGTNGTMMQYFEWYLPNDGNHWNRLNSDASNLKSKGITAVWIPPAWKGASQNDVGYGAYDLYDLGEFNQKGTVRTKYGTRSQLQAAVTSLKNNGIQVYGDVVMNHKGGADATEMVRAVEVNPNNRNQEVTGEYTIEAWTRFDFPGRGNTHSSFKWRWYHFDGVDWDQSRRLNNRIYKFRGHGKAWDWEVDTEFGNYDYLMYADYDMDHPEVVNELRNWGVWYTNTLGLDGFRIDAVKHIKYSFTRDWINHVRSATGKNMFAVAEFWLNDLGWIENYLQKTNWNHSVFDVPLHYNLYNASKSGGNYDMRNIFNGTVVQRHPSHAVTFVDNHDSQPEEALESFVEEWFKPLAYALTLTREQGYPSVFYGDYYGIPTHGVPAMRSKIDPILEARQKYAYGPQHDYLDHPDVIGWTREGDSSHPKSGLATLITDGPGGSKRMYAGLKNAGETWYDITGNRSDTVKIGSDGWGEFHVNDGSVSIYVQK

SEQ ID NO: 29536 - protein, 483 aa, Bacillus sp.
HHNGTNGTMMQYFEWYLPNDGNHWNRLNSDASNLKSKGITAVWIPPAWKGVSQNDVGYGAYDLYDLGEFNQKGTVRTKYGTRSQLQAAVTSLKNNGIQVYGDVVMNHKGGADATEMVRAVEVNPNNRNQEVTGEYTIEAWTRFDFPGRGNTHSSFKWRWYHFDGVDWDQSRDLSNRIYKFRGKAWDWEVDTEFGNYDYLMYADYDMDHPEVVNELRNWGVWYTNTLGLDGFRIDAVKHIKYSFTRDWINHVRSATGKNMFAVAEFWKNDLGAIENYLQKTNWNHSVFDVPLHYNLYNASKSGNNYDMRNIFNGTVVQRHPSHAVTFVDNHDSQPEEALESFVEEWFKPLAYALTLTREQGYPSVFYGDYYGIPTHGVPAMRSKIDPILEARQKYAYGPQHDYLDHPDVIGWTREGDSSHPKSGLATLITDGPGGSKRMYAGLKNAGETWYDITGNRSDTVKILSGGWGEFHVNDGSVSIYVQK

SEQ ID NO: 29537 - protein, 485 aa, Bacillus sp.
HHNGTNGTMMQYFEWYLPNDGNHWNRLNSDASNLKSKGITAVWIPPAWKGASQNDVGYGAYDLYDLGEFNQKGTVRTKYGTRSQLQAAVTSLKNNGIQVYGDVVMNHKGGADATEMVRAVEVNPNNRNQEVTGEYTIEAWTRFDFPGRGNTHSSFKWRWYHFDGVDWDQSRRLNNRIYKFRGHGKAWDWEVDTEFGNYDYLMYADYDMDHPEVVNELRNWGVWYTNTLGLDGFRIDAVKHIKYSFTRDWINHVRSATGKNMFAVAEFWKNDLGAIENYLQKTNWNHSVFDVPLHYNLYNASKSAGNYDMRNIFNGTVVQRHPSHAVTFVDNHDSQPEEALESFVEPWFKPLAYALTLTREQGYPSVFYGDYYGIPTHGVPAMRSKIDPILEARQKYAYGPQHDYLDHPDVIGWTREGDSSHPKSGLATLITDGPGGSKRMYAGLKNAGETWYDITGNRSDTVKIGSDGWGEFHVNDGSVSIYVQK

SEQ ID NO: 29538 - protein, 485 aa, Bacillus sp.
HHNGTNGTMMQYFEWYLPNDGNHWNRLNSDASNLKSKGITAVWIPPAWKALSQNDVGYGAYDLYDLGEFNQKGTVRTKYGTRSQLQAAVTSLKNNGIQVYGDVVMNHKGGADATEMVRAVEVNPNNRNQEVTGEYTIEAWTRFDFPGRGNTHSSFKWRWYHFDGVDWDQSRRLSNRIYKFRGHGKAWDWEVDTEFGNYDYLMYADYDMDHPEVVNELRNWGVWYTNTLGLDGFRIDAVKHIKYSFTRDWINHVRSATGKNMFAVAEFWKNDLGAIENYLQKTNWNHSVFDVPLHYNLYNASKSGGNYDMRNIFNGTVVQRHPSHAVTFVDNHDSQPEEALESFVEEWFKPLAYALTLTREQGYPSVFYGDYYGIPTHGVPAMRSKIDPILEARQKYAYGPQHDYLDHPDVIGWTREGDSSHPKSGLATLITDGPGGSKRMYAGLKNVGETWYDITGNRSDTVKIGSDGWGEFHVNDGSVSIYVQK

SEQ ID NO: 29539 - protein, 485 aa, Synthetic construct
HHNGTNGTMMQYFEWYLPNDGNHWNRLNSDASNLKSKGITAVWIPPAWKGASQNDVGYGAYDLYDLGEFNQKGTVRTKYGTRSQLQAAVTSLKNNGIQVYGDVVMNHKGGADATEMVRAVEVNPNNRNQEVTGEYTIEAWTRFDFPGRGNTHSSFKWRWYHFDGVDWDQSRRLNNRIYKFRGHGKAWDWEVDTEFGNYDYLMYADIDMDHPEGTNELRNWGVWYTNTLGLDGFRIDAVKHIKYSFTRDWINHVRSATGKNMFAVAEFWKNDLGAIENYLQKTNWNHSVFDVPLHYNLYNASKSGGNYDMRNIFNGTVVQRHPSHAVTFVDNHDSQPEEALESFVEEWFKPLAYALTLTREQGYPSVFYGDYYGIPTHGVPAMRSKIDPILEARQKYAYGPQHDYLDHPDVIGWTREGDSSHPKSGLATLITDGPGGSKRMYAGLKNAGETWYDITGNRSDTVKIGSDGWGEFHVNDGSVSIYVQK

SEQ ID NO: 29540 - protein, 485 aa, Bacillus sp.
HHNGTNGTMMQYFEWYLPNDGNHWNRLNSDASNLKSKGITAVWIPPAWKGASQNDVGYGAYDLYDLGEFNQKGTVRTKYGTRSQLQAAVTSLKNNGIQVYGDVVMNHKGGADATEMVRAVEVNPNNRNQEVTGEYTIEAWTRFDFPGRGNTHSSFKWRWYHFDGVDWDQSRRLNNRIYKFRGHGKAWDWEVDTEFGNYDYLMYADYDMDHPEVVNELRNWGVWYTNTLGLDGFRIDAVKHIKYSFTRDWINHVRSATGKNMFAVAEFWKNDLGAIENYLQKTNWNHSVFDVPLHYNLYNASKSAGNYDMRNIFNGTVVQRHPSHAVTFVDNHDSQPEEALESFVDTWFKPLAYALTLTREQGYPSVFYGDYYGIPTHGVPAMRSKIDPILEARQKYAYGPQHDYLDHPDVIGWTREGDSSHPKSGLATLITDGPGGSKRMYAGLKNAGETWYDITGNRSDTVKIGSDGWGEFHVNGTSVSIYVQK

SEQ ID NO: 29541 - protein, 485 aa, Bacillus sp.
HHNGTNGTMMQYFEWYLPNDGNHWNRLNSDASNLKSKGITAVWIPPAWKGASQNDVGYGAYDLYDLGEFNQKGTVRTKYGTRSQLQAAVTSLKNNGIQVYGDVVMNHKGGADATEMVRAVEVNPNNRNQEVTGEYTIEAWTRFDFPGRGNTHSSFKWRWYHFDGVDWDQSRRLNNRIYKFRGHGKAWDWEVDTEFGNYDYLMYADYDMDHPEVVNELRNWGVWYTNTLGLDGFRIDAVKHIKYSFTRDWINHVRSATGKNMFAVAEFWKNDLGAIENYLQKTNWNHSVFDVPLHYNLYNASKSQGNYDMRNIFNGTVVQRHPSHAVTFVDNHDSQPEEALESFVEPWFKPLAYALTLTREQGYPSVFYGDYYGIPTHGVPAMRSKIDPILEARQKYAYGPQHDYLDHPDVIGWTREGDSSHPKSGLATLITDGPGGSKRMYAGLKNAGETWYDITGNRSDTVKIGSDGWGEFHVNGKSVSIYVQK

SEQ ID NO: 29542 - protein, 485 aa, Bacillus sp.
HHNGTNQTMMQYFEWYLPNDGNHWNRLNSDASNLKSKGITAVWIPPAWKGASQNDVGYGAYDLYDLGEFNQKGTVRTKYGTRSQLQAAVTSLKNNGITVYGDVVMNHKGGADATEMVRAVEVNPNNRNQEVTGEYTIEAWTRFDFPGRGNTHSSFKWRWYHFDGVDWDQSRRLNNRIYKFRGHGKAWDWEVDTEFGNYDYLMYADYDMDHPEVVNELRNWGVWYTNTLGLDGFRIDAVKHIKYSFTRDWINHVRSATGKNMFAVAEFWKNDLGAIENYLQKTNWNHSVFDVPLHYNLYNASKSGGNYDMRNIFNGTVVQAHPSHAVTFVDNHDSQPEEALESFVEEWFKPLAYALTLTREQGYPSVFYGDYYGIPTHGVPAMRSKIDPILEARQKYAYGPQHDYLDHPDVIGWTREGDSSHPKSGLATLITDGPGGSKRMYAGLKNAGETWYDITGNRSDTVKIGSDGWGEFHVNDGSVSIYVQK

SEQ ID NO: 29543 - protein, 485 aa, Bacillus sp.
HHNGTNGTMMQYFEWYLPNDGNHWNRLNSDASNLKSKGITAVWIPPAWKGASQNDVGYGAYDLYDLGEFNQKGTVRTKYGTRSQLQAAVTSLKNNGIQVYGDVVMNHKGGADATEMVRAVEVNPNNRNQEVTGEYTIEAWTRFDFPGRGNTHSSFKWRWYHFDGVDWDQSRRLNNRIYKFRGHGKAWDWEVDTEFGNYDYLMYADYDMDHPEVVNELRNWGVWYTNTLGLDGFRIDAVKHIKYSFTRDWINHVRSATGKNMFAVAEFWKNDLGAIENYLQKTNWNHSVFDVPLHYNLYNASKSGGNYDMRNIFNGTVVQRHPSHAVTFVDNHDSQPEEALESFVETWFKPLAYALTLTREQGYPSVFYGDYYGIPTHGVPAMRSKIDPILEARQKYAYGPQHDYLDHPDVIGWTREGDSSHPKSGLATLITDGPGGSKRMYAGLKNAGETWYDITGNRSDTVKIGSDGWGEFHVNDASVSIYVQK

SEQ ID NO: 29544 - protein, 485 aa, Bacillus sp.
HHNGTNGTMMQYFEWYLPNDGNHWNRLNSDASNLKSKGITAVWIPPAWKGASQNDVGYGAYDLYDLGEFNQKGTVRTKYGTRSQLQAAVTSLKNNGIQVYGDVVMNHKGGADATEMVRAVEVNPNNRNQEVTGEYTIEAWTRFDFPGRGNTHSSFKWRWYHFDGVDWDQSRRLNNRIYKFRGHGKAWDWEVDTEFGNYDYLMYADYDMDHPEVVNELRNWGVWYTNTLGLDGFRIDAVKHIKYSFTRDWINHVRSATGKNMFAVAEFWNNDLGMIENYLQKTNWNHSVFDVPLHYNLYNASKSGGNYDMRNIFNGTVVQRHPSHAVTFVDNHDSQPEEALESFVEEWFKPLAYALTLTREQGYPSVFYGDYYGIPTHGVPAMRSKIDPILEARQKYAYGPQHDYLDHPDVIGWTREGDSSHPKSGLATLITDGPGGSKRMYAGLKNAGETWYDITGNRSDTVKIGSDGWGEFHVNDGSVSIYVQK

SEQ ID NO: 29545 - protein, 485 aa, Bacillus sp.
HHNGTNGTMMQYFEWYLPNDGNHWNRLNSDASNLKSKGITAVWIPPAWKAVSQNDVGYGAYDLYDLGEFNQKGTVRTKYGTRSQLQAAVTSLKNNGIQVYGDVVMNHKGGADLTEMVRAVEVNPNNRNQEVTGEYTIEAWTRFDFPGRGNTHSSFKWRWYHFDGVDWDQSREFTNRIYKFRGHGKAWDWEVDTEFGNYDYLMYVDYDMDHPEVVNELRNWGVWYTNTLGLDGFRIDAVKHIKYSFTRDWINHVRSATGKNMFAVAEFWKNDLGAIENYLQKTNWNHSVFDVPLHYNLYNASKSGGNYDMRNIFNGTVVQRHPSHAVTFVDNHDSQPEEALESFVEEWFKPLAYALTLTREQGYPSVFYGDYYGIPTHGVPAMRSKIDPILEARQKYAYGPQHDYLDHPDVIGWTREGDSSHPKSGLATLITDGPGGSKRMYAGLKNAGETWYDITGNRSDTVKIGSDGWGEFHVNDGSVSIYVQK

SEQ ID NO: 29546 - protein, 483 aa, Bacillus sp.
HHNGTNGTMMQYFEWYLPNDGNHWNRLNSDASNLKSKGITAVWIPPAWKAASQNDVGYGAYDLYDLGEFNQKGTVRTKYGTRSQLQAAVTSLKNNGIQVYGDVVMNHKGGADATEMVRAVEVNPNNRNQEVTGEYTIEAWTRFDFPGRGNTHSSFKWRWYHFDGVDWDQSRRVNNRIYKFRGKAWDWEVDTEFGNYDYLMYTDYDMDHPEVVNELRNWGVWYTNTLGLDGFRIDAVKHIKYSFTRDWINHVRSATGKNMFAVAEFWKNDLGAIENYLQKTNWNHSVFDVPLHYNLYNASKSGGNYDMRNIFNGTVVQRHPSHAVTFVDNHDSQPEEALESFVEEWFKPLAYALTLTREQGYPSVFYGDYYGIPTHGVPAMRSKIDPILEARQKYAYGPQHDYLDHPDVIGWTREGDSSHPKSGLATLITDGPGGSKRMYAGLKNAGETWYDITGNRSDTVKIGSDGWGEFHVNDGSVSIYVQK

SEQ ID NO: 29547 - protein, 485 aa, Bacillus sp.
HHNGTNNTVMQYFEWYLPNDGNHWNRLNSDASNLKSKGITAVWIPPAWKGASQNDVGYGAYDLYDLGEFNQKGTVRTKYGTRSQLQAAVTSLKNNGIAVYGDVVMNHKGGADATEMVRAVEVNPNNRNQEVTGEYTIEAWTRFDFPGRGNTHSSFKWRWYHFDGVDWDQSRRLNNRIYKFRGHGKAWDWEVDTEFGNYDYLMYADYDMDHPEVVNELRNWGVWYTNTLGLDGFRIDAVKHIKYSFTRDWINHVRSATGKNMFAVAEFWKNDLGAIENYLQKTNWNHSVFDVPLHYNLYNASKSGGNYDMRNIFNGTVVQSHPMHAVTFVDNHDSQPEEALESFVEEWFKPLAYALTLTREQGYPSVFYGDYYGIPTHGVPAMRSKIDPILEARQKYAYGPQHDYLDHPDVIGWTREGDSSHPKSGLATLITDGPGGSKRMYAGLKNAGETWYDITGNRSDTVKIGSDGWGEFHVNDGSVSIYVQK

SEQ ID NO: 29548 - protein, 485 aa, Bacillus sp.
HHNGTNGTMMQYFEWYLPNDGNHWNRLNSDASNLKSKGIKAVWIPPAWKGASQNDVGYGAYDLYDLGEFNQKGTVRTKYGTRSQLQAAVTSLKNNGIQVYGDVVMNHKGGADATEMVRAVEVNPNNRNQEVTGEYTIEAWTRFDFPGRGNTHSSFKWRWYHFDGVDWDQSERLNNRIYKFRGHGKAWDWEVDTEFGNYDYLMYADYDMDHPEVVNELRNWGVWYTNTLGLDGFRIDAVKHIKYSFTRDWINHVRSATGKNMFAVAEFWKNDLGAIENYLQKTNWNHSVFDVPLHYNLYNASKSGGNYDMRNIFNGTVVQRHPSHAVTFVDNHDSQPEEALESFVEEWFKPLAYALTLTREQGYPSVFYGDYYGIPTHGVPAMRSKIDPILEARQKYAYGPQHDYLDHPDVIGWTREGDSSHPKSGLATLITDGPGGSKRMYAGLKNAGETWYDITGNRSDTVKIGSDGWGEFHVNDGSVSIYVQK

SEQ ID NO: 29549 - protein, 485 aa, Bacillus sp.
HHNGTNGTMMQYFEWYLPNDGNHWNRLNSDASNLKSKGITAVWIPPAWKGASQNDVGYGAYDLYDLGEFNQKGTVRTKYGTRSQLQAAVTSLKNNGIQVYGDVVMNHKGGADATEMVRAVEVNPNNRNQEVTGEYTIEAWTRFDFPGRGNTHSSFKWRWYHFDGVDWDQSRRLNNRIYKFRGHGKAWDWEVDTEFGNYDYLMYADYDMDHPEVVNELRNWGVWYTNTLGLDGFRIDAVKHIKYSFTRDWINHVRSATGKNMFAVAEFWKNDLGAIENYLQKTNWNHSVFDVPLHYNLYNASKSQGNYDMRNIFNGTVVQRHPSHAVTFVDNHDSQPEEALESFVETWFKPLAYALTLTREQGYPSVFYGDYYGIPTHGVPAMRSKIDPILEARQKYAYGPQHDYLDHPDVIGWTREGDSSHPKSGLATLITDGPGGSKRMYAGLKNAGETWYDITGNRSDTVKIGSDGWGEFHVNDGSVSIYVQK

SEQ ID NO: 29550 - protein, 483 aa, Bacillus sp.
HHNGTNGTMMQYFEWYLPNDGNHWNRLNSDASNLKSKGITAVWIPPAWKGASQNDVGYGAYDLYDLGEFNQKGTVRTKYGTRSQLQAAVTSLKNNGIQVYGDVVMNHKGGADATEMVRAVEVNPNNRNQEVTGEYTIEAWTRFDFPGRGNTHSSFKWRWYHFDGVDWDQSERLNNRIYKFRGKAWDWEVDTEFGNYDYLMYADYDMDHPEVVNELRNWGVWYTNTLGLDGFRIDAVKHIKYSFTRDWINHVRSATGKNMFAVAEFWKNDLGAIENYLQKTNWNHSVFDVPLHYNLYNASKSGGNYDMRNIFNGTVVQRHPSHAVTFVDNHDSQPEEALESFVEEWFKPLAYALTLTREQGYPSVFYGDYYGIPTHGVPAMRSKIDPILLARQKYAYGPQHDYLDHPDVIGWTREGDSSHPKSGLATLITDGPGGSKRMYAGLKNAGETWYDITGNRSDTVKIGSDGWGEFHVNDGSVSIYVQK

SEQ ID NO: 29551 - protein, 483 aa, Bacillus sp.
HHNGTNGTMMQYFEWYLPNDGNHWNRLNSDASNLKSKGITAVWIPPAWKGASQNDVGYGAYDLYDLGEFNQKGTVRTKYGTRSQLQAAVTSLKNNGIQVYGDVVMNHKGGADATEMVRAVEVNPNNRNQEVTGEYTIEAWTRFDFPGRGNTHSSFKWRWYHFDGVDWDQSRRLNNRIYKFRGKAWDWEVDTEFGNYDYLMYADYDMDHPEVVNELRNWGVWYTNTLGLDGFRIDAVKHIKYSFTRDWINHVRSATGKNMFAVAEFWKNDLGAIENYLQKTNWNHSVFDVPLHYNLYNASKSQGNYDMRNIFNGTVVQRHPSHAVTFVDNHDSQPEEALESFVEPWFKPLAYALTLTREQGYPSVFYGDYYGIPTHGVPAMRSKIDPILEARQKYAYGPQHDYLDHPDVIGWTREGDSSHPKSGLATLITDGPGGSKRMYAGLKNAGETWYDITGNRSDTVKIGSDGWGEFHVNGSSVSIYVQK

SEQ ID NO: 29552 - protein, 485 aa, Bacillus sp.
HHNGTNGTMMQYFEWYLPNDGNHWNRLNSDASNLKSKGITAVWIPPAWKGASQNDVGYGAYDLYDLGEFNQKGTVRTKYGTRSQLQAAVTSLKNNGIQVYGDVVMNHKGGADATEMVRAVEVNPNNRNQEVTGEYTIEAWTRFDFPGRGNTHSSFKWRWYHFDGVDWDQSRRLNNRIYKFRSHGKAWDWEVDTEFGNYDYLMYADYDMDDPEVINELRNWGVWYTNTLGLDGFRIDAVKHIKYSFTRDWINHVRSATGKNMFAVAEFWKNDLGAIENYLQKTNWNHSVFDVPLHYNLYNASKSGGNYDMRNIFNGTVVQRHPSHAVTFVDNHDSQPEEALESFVEEWFKPLAYALTLTREQGYPSVFYGDYYGIPTHGVPAMRSKIDPILEARQKYAYGPQHDYLDHPDVIGWTREGDSSHPKSGLATLITDGPGGSKRMYAGLKNAGETWYDITGNRSDTVKIGSDGWGEFHVNDGSVSIYVQK

SEQ ID NO: 29553 - protein, 483 aa, Bacillus sp.
HHNGTNGTMMQYFEWYLPNDGNHWNRLNSDASNLKSKGITAVWIPPAWKGASQNDVGYGAYDLYDLGEFNQKGTVRTKYGTRSQLQAAVTSLKNNGIQVYGDVVMNHKGGADATEMVRAVEVNPNNRNQEVTGEYTIEAYTRFDFPGRGNTHSSFKWRWYHFDGVDFDQSRRLDNRIYKFRGKAWDWEVDTEFGNYDYLMYADYDMDHPEVVNELRNWGVWYTNTLGLDGFRIDAVKHIKYSFTRDWINHVRSATGKNMFAVAEFWKNDLGAIENYLQKTNWNHSVFDVPLHYNLYNASKSGGNYDMRNIFNGTVVQRHPSHAVTFVDNHDSQPEEALESFVEEWFKPLAYALTLTREQGYPSVFYGDYYGIPTHGVPAMRSKIDPILEARQKYAYGPQHDYLDHPDVIGWTREGDSSHPKSGLATLITDGPGGSKRMYAGLKNAGETWYDITGNRSDTVKIGSDGWGEFHVNDGSVSIYVQK

SEQ ID NO: 29554 - protein, 483 aa, Bacillus sp.
HHNGTNGTMMQYFEWYLPNDGNHWNRLNSDASNLKSKGITAVWIPPAWKAASQNDVGYGAYDLYDLGEFNQKGTVRTKYGTRSQLQAAVTSLKNNGIQVYGDVVMNHKGGADLTEMVRAVEVNPNNRNQEVTGEYTIEAWTRFDFPGRGNTHSSFKWRWYHFDGVDFDQSRQLNNRIYKFRGKAWDWEVDTEFGNYDYLMYADYDMDHPEVVNELRNWGVWYTNTLGLDGFRIDAVKHIKYSFTRDWINHVRSATGKNMFAVAEFWKNDLGAIENYLQKTNWNHSVFDVPLHYNLYNASKSGGNYDMRNIFNGTVVQRHPSHAVTFVDNHDSQPEEALESFVEEWFKPLAYALTLTREQGYPSVFYGDYYGIPTHGVPAMRSKIDPILEARQKYAYGPQHDYLDHPDVIGWTREGDSSHPKSGLATLITDGPGGSKRMYAGLKNAGETWYDITGNRSDTVKIGSDGWGEFHVNDGSVSIYVQK

SEQ ID NO: 29555 - protein, 483 aa, Bacillus sp.
HHNGTNGTMMQYFEWYLPNDGNHWNRLNSDASNLKSKGITAVWIPPAWKGASQNDVGYGAYDLYDLGEFNQKGTVRTKYGTRSQLQAAVTSLKNNGIQVYGDVVMNHKGGADATEMVRAVEVNPNNRNQEVTGEYTIEAWTRFDFPGRGNTHSSFKWRWYHFDGVDWDQSRRLNNRIYKFRGKAWDWEVDTEFGNYDYLMYADYDMDHPEVVNELRNWGVWYTNTLGLDGFRIDAVKHIKYSFTRDWINHVRSATGKNMFAVAEFWKNDLGAIENYLQKTNWNHSVFDVPLHYNLYNASKSGGNYDMRNIFNGTVVQRHPSHAVTFVDNHDSQPEEALESFVETWFKPLAYALTLTREQGYPSVFYGDYYGIPTHGVPAMRSKIDPILEARQKYAYGPQHDYLDHPDVIGWTREGDSSHPKSGLATLITDGPGGSKRMYAGLKNAGETWYDITGNRSDTVKIGSDGWGEFHVNKASVSIYVQK

SEQ ID NO: 29556 - protein, 485 aa, Bacillus sp.
HHNGTNGTMMQYFEWYLPNDGNHWNRLNSDASNLKSKGITAVWIPPAWKGASQNDVGYGAYDLYDLGEFNQKGTVRTKYGTRSQLQAAVTSLKNNGIQVYGDVVMNHKGGADATEMVRAVEVNPNNRNQEVTGEYTIEAWTRFDFPGRGNTHSSFKWRWYHFDGVDWDQSRRLNNRIYKFRGHGKAWDWEVDTEFGNYDYLMYADYDMDHPEVVNELRNWGVWYTNTLGLDGFRIDAVKHIKYSFTRDWINHVRSATGKNMFAVAEFWKNDLGAIENYLQKTNWNHSVFDVPLHYNLYNASKSGGNYDMRNIFNGTVVQRHPSHAVTFVDNHDSQPEEALESFVEPWFKPLAYALTLTREQGYPSVFYGDYYGIPTHGVPAMRSKIDPILEARQKYAYGPQHDYLDHPDVIGWTREGDSSHPKSGLATLITDGPGGSKRMYAGLKNAGETWYDITGNRSDTVKIGSDGWGEFHVNKTSVSIYVQK

SEQ ID NO: 29557 - protein, 483 aa, Bacillus sp.
HHNGTNGTMMQYFEWYLPNDGNHWNRLNSDASNLKSKGIKAVWIPPAWKGASQNDVGYGAYDLYDLGEFNQRGTVRTKYGTRSQLQAAVTSLKNNGIQVYGDVVMNHKGGADATEMVRAVEVNPNNRNQEVTGEYTIEAWTRFDFPGRGNTHSSFKWRWYHFDGVDFDQSRNFQNRIYKFRGKAWDWEVDTEFGNYDYLMYADYDMDHPEVVNELRNWGVWYTNTLGLDGFRIDAVKHIKYSFTRDWINHVRSATGKNMFAVAEFWKNDLGAIENYLQKTNWNHSVFDVPLHYNLYNASKSQGNYDMRNIFNGTVVQRHPSHAVTFVDNHDSQPEEALESFVDTWFKPLAYALTLTREQGYPSVFYGDYYGIPTHGVPAMRSKIDPILEARQKYAYGPQHDYLDHPDVIGWTREGDSSHPKSGLATLITDGPGGSKRMYAGLKNAGETWYDITGNRSDTVKIGSDGWGEFHVNGGSVSIYVQK

SEQ ID NO: 29558 - protein, 485 aa, Bacillus sp.
HHNGTNETMMQYFEWYLPNDGNHWNRLNSDASNLKSKGITAVWIPPAWKGASQNDVGYGAYDLYDLGEFNQKGTVRTKYGTRSQLQAAVTSLKNNGITVYGDVVMNHKGGADATEMVRAVEVNPNNRNQEVTGEYTIEAWTRFDFPGRGNTHSSFKWRWYHFDGVDWDQSRRLNNRIYKFRGHGKAWDWEVDTEFGNYDYLMYADYDMDHPEVVNELRNWGVWYTNTLGLDGFRIDAVKHIKYSFTRDWINHVRSATGKNMFAVAEFWKNDLGAIENYLQKTNWNHSVFDVPLHYNLYNASKSGGNYDMRNIFNGTVVQAHPSHAVTFVDNHDSQPEEALESFVEEWFKPLAYALTLTREQGYPSVFYGDYYGIPTHGVPAMRSKIDPILEARQKYAYGPQHDYLDHPDVIGWTREGDSSHPKSGLATLITDGPGGSKRMYAGLKNAGETWYDITGNRSDTVKIGSDGWGEFHVNDGSVSIYVQK

SEQ ID NO: 29559 - protein, 485 aa, Bacillus sp.
HHNGTNGTMMQYFEWYLPNDGNHWNRLNSDASNLKSKGITAVWIPPAWKGASQNDVGYGAYDLYDLGEFNQKGTVRTKYGTRSQLQAAVTSLKNNGIQVYGDVVMNHKGGADATEMVRAVEVNPNNRNQEVTGEYTIEAWTRFDFPGRGNTHSSFKWRWYHFDGVDWDQSRRLNNRIYKFRGHGKAWDWEVDTEFGNYDYLMYADYDMDHPEVVNELRNWGVWYTNTLGLDGFRIDAVKHIKYSFTRDWINHVRSATGKNMFAVAEFWVNDLGYIENYLQKTNWNHSVFDVPLHYNLYNASKSGGNYDMRNIFNGTVVQRHPSHAVTFVDNHDSQPEEALESFVEEWFKPLAYALTLTREQGYPSVFYGDYYGIPTHGVPAMRSKIDPILEARQKYAYGPQHDYLDHPDVIGWTREGDSSHPKSGLATLITDGPGGSKRMYAGLKNAGETWYDITGNRSDTVKIGSDGWGEFHVNDGSVSIYVQK

SEQ ID NO: 29560 - protein, 483 aa, Bacillus sp.
HHNGTNGTMMQYFEWYLPNDGNHWNRLNSDASNLKSKGITAVWIPPAWKAASQNDVGYGAYDLYDLGEFNQKGTVRTKYGTRSQLQAAVTSLKNNGIQVYGDVVMNHKGGADATEMVRAVEVNPNNRNQEVTGEYTIEAWTRFDFPGRGNTHSSFKWRWYHFDGVDWDQSRRLTNRIYKFRGKAWDWEVDTEFGNYDYLMYVDYDMDHPEVVNELRNWGVWYTNTLGLDGFRIDAVKHIKYSFTRDWINHVRSATGKNMFAVAEFWKNDLGAIENYLQKTNWNHSVFDVPLHYNLYNASKSGGNYDMRNIFNGTVVQRHPSHAVTFVDNHDSQPEEALESFVEEWFKPLAYALTLTREQGYPSVFYGDYYGIPTHGVPAMRSKIDPILEARQKYAYGPQHDYLDHPDVIGWTREGDSSHPKSGLATLITDGPGGSKRMYAGLKNAGETWYDITGNRSDTVKIGSDGWGEFHVNDGSVSIYVQK

SEQ ID NO: 29561 - protein, 485 aa, Bacillus sp.
HHNGTNLTMMQYFEWYLPNDGNHWNRLNSDASNLKSKGITAVWIPPAWKGASQNDVGYGAYDLYDLGEFNQKGTVRTKYGTRSQLQAAVTSLKNNGIQVYGDVVMNHKGGADATEMVRAVEVNPNNRNQEVTGEYTIEAWTRFDFPGRGNTHSSFKWRWYHFDGVDWDQSRRLNNRIYKFRGHGKAWDWEVDTEFGNYDYLMYADYDMDHPEVVNELRNWGVWYTNTLGLDGFRIDAVKHIKYSFTRDWINHVRSATGKNMFAVAEFWKNDLGAIENYLQKTNWNHSVFDVPLHYNLYNASKSGGNYDMRNIFNGTVVQSHPNWAVTFVDNHDSQPEEALESFVEEWFKPLAYALTLTREQGYPSVFYGDYYGIPTHGVPAMRSKIDPILEARQKYAYGPQHDYLDHPDVIGWTREGDSSHPKSGLATLITDGPGGSKRMYAGLKNAGETWYDITGNRSDTVKIGSDGWGEFHVNDGSVSIYVQK

SEQ ID NO: 29562 - protein, 483 aa, Bacillus sp.
HHNGTNGTMMQYFEWYLPNDGNHWNRLNSDASNLKSKGITAVWIPPAWKAASQNDVGYGAYDLYDLGEFNQKGTVRTKYGTRSQLQAAVTSLKNNGIQVYGDVVMNHKGGADATEMVRAVEVNPNNRNQEVTGEYTIEAWTRFDFPGRGNTHSSFKWRWYHFDGVDWDQSRRLENRIYKFRGKAWDWEVDTEFGNYDYLMYTDYDMDHPEVVNELRNWGVWYTNTLGLDGFRIDAVKHIKYSFTRDWINHVRSATGKNMFAVAEFWKNDLGAIENYLQKTNWNHSVFDVPLHYNLYNASKSGGNYDMRNIFNGTVVQRHPSHAVTFVDNHDSQPEEALESFVEEWFKPLAYALTLTREQGYPSVFYGDYYGIPTHGVPAMRSKIDPILEARQKYAYGPQHDYLDHPDVIGWTREGDSSHPKSGLATLITDGPGGSKRMYAGLKNAGETWYDITGNRSDTVKIGSDGWGEFHVNDGSVSIYVQK

SEQ ID NO: 29563 - protein, 485 aa, Synthetic construct
HHNGTNGTMMQYFEWYLPNDGNHWNRLNSDASNLKSKGITAVWIPPAWKGASQNDVGYGAYDLYDLGEFNQKGTVRTKYGTRSQLQAAVTSLKNNGIQVYGDVVMNHKGGADATEMVRAVEVNPNNRNQEVTGEYTIEAWTRFDFPGRGNTHSSFKWRWYHFDGVDWDQSRRLNNRIYLFRCHGKKWDWPVDTENGNYDYLMYADIDMDHPEVVNELRNWGVWYTNTLGLDGFRIDAVKHIKYSFTRDWINHVRSATGKNMFAVAEFWKNDLGAIENYLQKTNWNHSVFDVPLHYNLYNASKSGGNYDMRNIFNGTVVQRHPSHAVTFVDNHDSQPEEALESFVEEWFKPLAYALTLTREQGYPSVFYGDYYGIPTHGVPAMRSKIDPILEARQKYAYGPQHDYLDHPDVIGWTREGDSSHPKSGLATLITDGPGGSKRMYAGLKNAGETWYDITGNRSDTVKIGSDGWGEFHVNDGSVSIYVQK

SEQ ID NO: 29564 - protein, 485 aa, Bacillus sp.
HHNGTNGTMMQYFEWYLPNDGNHWNRLNSDASNLKSKGITAVWIPPAWKGASQNDVGYGAYDLYDLGEFNQKGTVRTKYGTRSQLQAAVTSLKNNGIQVYGDVVMNHKGGADATEMVRAVEVNPNNRNQEVTGEYTIEAWTRFDFPGRGNTHSSFKWRWYHFDGVDWDQSRRLNNRIYKFRGHGKAWDWEVDTEFGNYDYLMYADYDMDHPEVVNELRNWGVWYTNTLGLDGFRIDAVKHIKYSFTRDWINHVRSATGKNMFAVAEFWKNDLGAIENYLQKTNWNHSVFDVPLHYNLYNASKSQGNYDMRNIFNGTVVQRHPSHAVTFVDNHDSQPEEALESFVDTWFKPLAYALTLTREQGYPSVFYGDYYGIPTHGVPAMRSKIDPILEARQKYAYGPQHDYLDHPDVIGWTREGDSSHPKSGLATLITDGPGGSKRMYAGLKNAGETWYDITGNRSDTVKIGSDGWGEFHVNGSSVSIYVQK

SEQ ID NO: 29565 - protein, 485 aa, Bacillus sp.
HHNGTNGTMMQYFEWYLPNDGNHWNRLNSDASNLKSKGITAVWIPPAWKAVSQNDVGYGAYDLYDLGEFNQKGTVRTKYGTRSQLQAAVTSLKNNGIQVYGDVVMNHKGGADATEMVRAVEVNPNNRNQEVTGEYTIEAWTRFDFPGRGNTHSSFKWRWYHFDGVDFDQSREFTNRIYKFRGHGKAWDWEVDTEFGNYDYLMYVDYDMDHPEVVNELRNWGVWYTNTLGLDGFRIDAVKHIKYSFTRDWINHVRSATGKNMFAVAEFWKNDLGAIENYLQKTNWNHSVFDVPLHYNLYNASKSGGNYDMRNIFNGTVVQVHPSHAVTFVDNHDSQPEEALESFVEEWFKPLAYALTLTREQGYPSVFYGDYYGIPTHGVPAMRSKIDPILEARQKYAYGPQHDYLDHPDVIGWTREGDSSHPKSGLATLITDGPGGSKRMYAGLKNAGETWYDITGNRSDTVKIGSDGWGEFHVNYGSVSIYVQK

SEQ ID NO: 29566 - protein, 485 aa, Bacillus sp.
HHNGTNGTMMQYFEWYLPNDGNHWNRLNSDASNLKSKGITAVWIPPAWKATSQNDVGYGAYDLYDLGEFNQKGTVRTKYGTRSQLQAAVTSLKNNGIQVYGDVVMNHKGGADATEMVRAVEVNPNNRNQEVTGEYTIEAWTRFDFPGRANTHSSFKWRWYHFDGVDFDQSRNVNNRIYKFRGHGKAWDWEVDTEFGNYDYLMYADYDMDHPEVVNELRNWGVWYTNTLGLDGFRIDAVKHIKYSFTRDWINHVRSATGKNMFAVAEFWKNDLGAIENYLQKTNWNHSVFDVPLHYNLYNASKSGGNYDMRNIFNGTVVQRHPSHAVTFVDNHDSQPEEALESFVEEWFKPLAYALTLTREQGYPSVFYGDYYGIPTHGVPAMRSKIDPILEARQKYAYGPQHDYLDHPDVIGWTREGDSSHPKSGLATLITDGPGGSKRMYAGLKNAGETWYDITGNRSDTVKIGSDGWGEFHVNDGSVSIYVQK

SEQ ID NO: 29567 - protein, 483 aa, Synthetic construct
HHNGTNGTMMQYFEWYLPNDGNHWNRLNSDASNLKSKGITAVWIPPAWKGASQNDVGYGAYDLYDLGEFNQKGTVRTKYGTRSQLQAAVTSLKNNGIQVYGDVVMNHKGGADATEMVRAVEVNPNNRNQEVTGEYTIEAWTRFDFPGRGNTHSSFKWRWYHFDGVDWDQSRRLNNRIYKFRGKAWDWEVDTEFGNYDYLMYADIDMDHPEIPNELRNWGVWYTNTLGLDGFRIDAVKHIKYSFTRDWINHVRSATGKNMFAVAEFWKNDLGAIENYLQKTNWNHSVFDVPLHYNLYNASKSGGNYDMRNIFNGTVVQRHPSHAVTFVDNHDSQPEEALESFVEEWFKPLAYALTLTREQGYPSVFYGDYYGIPTHGVPAMRSKIDPILEARQKYAYGPQHDYLDHPDVIGWTREGDSSHPKSGLATLITDGPGGSKRMYAGLKNAGETWYDITGNRSDTVKIGSDGWGEFHVNDGSVSIYVQK

SEQ ID NO: 29568 - protein, 485 aa, Bacillus sp.
HHNGTNGTMMQYFEWYLPNDGNHWNRLNSDASNLKSKGITAVWIPPAWKAVSQNDVGYGAYDLYDLGEFNQKGTVRTKYGTRSQLQAAVTSLKNNGIQVYGDVVMNHKGGADATEMVRAVEVNPNNRNQEVTGEYTIEAWTRFDFPGRGNTHSSFKWRWYHFDGVDWDQSRNLTNRIYKFRGHGKAWDWEVDTEFGNYDYLMYTDYDMDHPEVVNELRNWGVWYTNTLGLDGFRIDAVKHIKYSFTRDWINHVRIATGKNMFAVAEFWKNDLGAIENYLQKTNWNHSVFDVPLHYNLYNASKSGGNYDMRNIFNGTVVQRHPSHAVTFVDNHDSQPEEALESFVDEWFKPLAYALTLTREQGYPSVFYGDYYGIPTHGVPAMRSKIDPILEARQKYAYGPQHDYLDHPDVIGWTREGDSSHPKSGLATLITDGPGGSKRMYAGLKNAGETWYDITGNRSDTVKIGSDGWGEFHVNDGSVSIYVQK

SEQ ID NO: 29569 - protein, 483 aa, Bacillus sp.
HHNGTNGTMMQYFEWYLPNDGNHWNRLNSDASNLKSKGITAVWIPPAWKAASQNDVGYGAYDLYDLGEFNQKGTVRTKYGTRSQLQAAVTSLKNNGIQVYGDVVMNHKGGADATEMVRAVEVNPNNRNQEVTGEYTIEAWTRFDFPGRGNTHSSFKWRWYHFDGVDFDQSRQITNRIYKFRGKAWDWEVDTEFGNYDYLMYTDYDMDHPEVVNELRNWGVWYTNTLGLDGFRIDAVKHIKYSFTRDWINHVRSATGKNMFAVAEFWKNDLGAIENYLQKTNWNHSVFDVPLHYNLYNASKSGGNYDMRNIFNGTVVQRHPSHAVTFVDNHDSQPEEALESFVEEWFKPLAYALTLTREQGYPSVFYGDYYGIPTHGVPAMRSKIDPILEARQKYAYGPQHDYLDHPDVIGWTREGDSSHPKSGLATLITDGPGGSKRMYAGLKNAGETWYDITGNRSDTVKIGSDGWGEFHVNDGSVSIYVQK

SEQ ID NO: 29570 - protein, 483 aa, Bacillus sp.
HHNGTNGTMMQYFEWYLPNDGNHWNRLNSDASNLKSKGITAVWIPPAWKATSQNDVGYGAYDLYDLGEFNQKGTVRTKYGTRSQLQAAVTSLKNNGIQVYGDVVMNHKGGADATEMVRAVEVNPNNRNQEVTGEYTIEAWTRFDFPGRGNTHSSFKWRWYHFDGVDWDQSRNVNNRIYKFRGKAWDWEVDTEFGNYDYLMYADYDMDHPEVVNELRNWGVWYTNTLGLDGFRIDAVKHIKYSFTRDWINHVRSATGKNMFAVAEFWKNDLGAIENYLQKTNWNHSVFDVPLHYNLYNASKSGGNYDMRNIFNGTVVQRHPSHAVTFVDNHDSQPEEALESFVETWFKPLAYALTLTREQGYPSVFYGDYYGIPTHGVPAMRSKIDPILEARQKYAYGPQHDYLDHPDVIGWTREGDSSHPKSGLATLITDGPGGSKRMYAGLKNAGETWYDITGNRSDTVKIGSDGWGEFHVNKASVSIYVQK

SEQ ID NO: 29571 - protein, 485 aa, Bacillus sp.
HHNGTNGTMMQYFEWYLPNDGNHWNRLNSDASNLKSKGITAVWIPPAWKAASQNDVGYGAYDLYDLGEFNQKGTVRTKYGTRSQLQAAVTSLKNNGIQVYGDVVMNHKGGADATEMVRAVEVNPNNRNQEVTGEYTIEAWTRFDFPGRGNTHSSFKWRWYHFDGVDWDQSRRLENRIYKFRGHGKAWDWEVDTEFGNYDYLMYTDYDMDHPEVVNELRNWGVWYTNTLGLDGFRIDAVKHIKYSFTRDWINHVRSATGKNMFAVAEFWKNDLGAIENYLQKTNWNHSVFDVPLHYNLYNASKSGGNYDMRNIFNGTVVQRHPSHAVTFVDNHDSQPEEALESFVEEWFKPLAYALTLTREQGYPSVFYGDYYGIPTHGVPAMRSKIDPILEARQKYAYGPQHDYLDHPDVIGWTREGDSSHPKSGLATLITDGPGGSKRMYAGLKNAGETWYDITGNRSDTVKIGSDGWGEFHVNDGSVSIYVQK

SEQ ID NO: 29572 - protein, 483 aa, Bacillus sp.
HHNGTNGTMMQYFEWYLPNDGNHWNRLNSDASNLKSKGITAVWIPPAWKAVSQNDVGYGAYDLYDLGEFNQKGTVRTKYGTRSQLQAAVTSLKNNGIQVYGDVVMNHKGGADATEMVDAVEVNPNNRNQEVTGEYTIEAWTRFDFPGRGNTHSSFKWRWYHFDGVDWDQSRNLTNRIYKFRGKAWDWEVDTEFGNYDYLMYTDYDMDHPEVVNELRNWGVWYTNTLGLDGFRIDAVKHIKYSFTRDWINHVRSATGKNMFAVAEFWKNDLGAIENYLQKTNWNHSVFDVPLHYNLYNASKSGGNYDMRNIFNGTVVQRHPSHAVTFVDNHDSQPEEALESFVEEWFKPLAYALTLTREQGYPSVFYGDYYGIPTHGVPAMRSKIDPILEARQKYAYGPQHDYLDHPDVIGWTREGDSSHPKSGLATLITDGPGGSKRMYAGLKNAGETWYDITGNRSDTVKIGSDGWGEFHVNDGSVSIYVQK

SEQ ID NO: 29573 - protein, 483 aa, Bacillus sp.
HHNGTNGTMMQYFEWYLPNDGNHWNRLNSDASNLKSKGITAVWIPPAWKGASQNDVGYGAYDLYDLGEFNQKGTVRTKYGTRSQLQAAVTSLKNNGIQVYGDVVMNHKGGADATEMVRAVEVNPNNRNQEVTGEYTIEAWTRFDFPGRGNTHSSFKWRWYHFDGVDWDQSRRLNNRIYKFRGKAWDWEVDTEFGNYDYLMYADYDMDHPEVVNELRNWGVWYTNTLGLDGFRIDAVKHIKYSFTRDWINHVRSATGKNMFAVAEFWKNDLGAIENYLQKTNWNHSVFDVPLHYNLYNASKSGGNYDMRNIFNGTVVQRHPSHAVTFVDNHDSQPEEALESFVEPWFKPLAYALTLTREQGYPSVFYGDYYGIPTHGVPAMRSKIDPILEARQKYAYGPQHDYLDHPDVIGWTREGDSSHPKSGLATLITDGPGGSKRMYAGLKNAGETWYDITGNRSDTVKIGSDGWGEFHVNKASVSIYVQK

SEQ ID NO: 29574 - protein, 483 aa, Bacillus sp.
HHNGTNGTMMQYFEWYLPNDGNHWNRLNSDASNLKSKGITAVWIPPAWKAASQNDVGYGAYDLYDLGEFNQKGTVRTKYGTRSQLQAAVTSLKNNGIQVYGDVVMNHKGGADATEMVRAVEVNPNNRNQEVTGEYTIEAWTRFDFPGRGNTHSSFKWRWYHFDGVDWDQSRNLTNRIYKFRGKAWDWEVDTEFGNYDYLMYADYDMDHPEVVNELRNWGVWYTNTLGLDGFRIDAVKHIKYSFTRDWINHVRSATGKNMFAVAEFWKNDLGAIENYLQKTNWNHSVFDVPLHYNLYNASKSGGNYDMRNIFNGTVVQANPNHAVTFVDNHDSQPEEALESFVEEWFKPLAYALTLTREQGYPSVFYGDYYGIPTHGVPAMRSKIDPILEARQKYAYGPQHDYLDHPDVIGWTREGDSSHPKSGLATLITDGPGGSKRMYAGLKNAGETWYDITGNRSDTVKIGSDGWGEFHVNDGSVSIYVQK

SEQ ID NO: 29575 - protein, 483 aa, Bacillus sp.
HHNGTNGTMMQYFEWYLPNDGNHWNRLNSDASNLKSKGITAVWIPPAWKGASQNDVGYGAYDLYDLGEFNQRGTVRTKYGTRSQLQAAVTSLKNNGINVYGDVVMNHKGGADATEMVRAVEVNPNNRNQEVTGEYTIEAWTRFDFPGRGNTHSSFKWRWYHFDGVDFDQSRRLNNRIYKFRGKAWDWEVDTEFGNYDYLMYADYDMDHPEVVNELRNWGVWYTNTLGLDGFRIDAVKHIKYSFTRDWINHVRSATGKNMFAVAEFWKNDLGAIENYLQKTNWNHSVFDVPLHYNLYNASKSGGNYDMRNIFNGTVVQAHPMHAVTFVDNHDSQPEEALESFVEEWFKPLAYALTLTREQGYPSVFYGDYYGIPTHGVPAMRSKIDPILEARQKYAYGPQHDYLDHPDVIGWTREGDSSHPKSGLATLITDGPGGSKRMYAGLKNAGETWYDITGNRSDTVKIGSDGWGEFHVNDGSVSIYVQK

SEQ ID NO: 29576 - protein, 485 aa, Bacillus sp.
HHNGTNGTMMQYFEWYLPNDGNHWNRLNSDASNLKSKGITAVWIPPAWKATSQNDVGYGAYDLYDLGEFNQKGTVRTKYGTRSQLQAAVTSLKNNGIQVYGDVVMNHKGGADATEMVRAVEVNPNNRNQEVTGEYTIEAWTRFDFPGRGNTHSSFKWRWYHFDGVDWDQSRNVNNRIYKFRGHGKAWDWEVDTEFGNYDYLMYADYDMDHPEVVNELRNWGVWYTNTLGLDGFRIDAVKHIKYSFTRDWINHVRSATGKNMFAVAEFWKNDLGAIENYLQKTNWNHSVFDVPLHYNLYNASKSGGNYDMRNIFNGTVVQRHPSHAVTFVDNHDSQPEEALESFVETWFKPLAYALTLTREQGYPSVFYGDYYGIPTHGVPAMRSKIDPILEARQKYAYGPQHDYLDHPDVIGWTREGDSSHPKSGLATLITDGPGGSKRMYAGLKNAGETWYDITGNRSDTVKIGSDGWGEFHVNKASVSIYVQK

SEQ ID NO: 29577 - protein, 485 aa, Bacillus sp.
HHNGTNGTMMQYFEWYLPNDGNHWNRLNSDASNLKSKGITAVWIPPAWKAASQNDVGYGAYDLYDLGEFNQKGTVRTKYGTRSQLQAAVTSLKNNGIQVYGDVVMNHKGGADATEMVRAVEVNPNNRNQEVTGEYTIEAWTRFDFPGRGNTHSSFKWRWYHFDGVDWDQSRNLNNRIYKFRGHGKAWDWEVDTEFGNYDYLMYTDYDMDHPEVVNELRNWGVWYTNTLGLDGFRIDAVKHIKYSFTRDWINHVRSATGKNMFAVAEFWKNDLGAIENYLQKTNWNHSVFDVPLHYNLYNASKSGGNYDMRNIFNGTVVQRHPSHAVTFVDNHDSQPEEALESFVDPWFKPLAYALTLTREQGYPSVFYGDYYGIPTHGVPAMRSKIDPILEARQKYAYGPQHDYLDHPDVIGWTREGDSSHPKSGLATLITDGPGGSKRMYAGLKNAGETWYDITGNRSDTVKIGSDGWGEFHVNGGSVSIYVQK

SEQ ID NO: 29578 - protein, 483 aa, Bacillus sp.
HHNGTNGTMMQYFEWYLPNDGNHWNRLNSDASNLKSKGITAVWIPPAWKGASQNDVGYGAYDLYDLGEFNQKGTVRTKYGTRSQLQAAVTSLKNNGIQVYGDVVMNHKGGADATEMVRAVEVNPNNRNQEVTGEYTIEAWTRFDFPGRGNTHSSFKWRWYHFDGVDWDQSRRLNNRIYKFRGKAWDWEVDTEFGNYDYLMYADYDMDHPEVVNELRNWGVWYTNTLGLDGFRIDAVKHIKYSFTRDWINHVRSATGKNMFAVAEFWQNDLGCIENYLQKTNWNHSVFDVPLHYNLYNASKSGGNYDMRNIFNGTVVQRHPSHAVTFVDNHDSQPEEALESFVEEWFKPLAYALTLTREQGYPSVFYGDYYGIPTHGVPAMRSKIDPILEARQKYAYGPQHDYLDHPDVIGWTREGDSSHPKSGLATLITDGPGGSKRMYAGLKNAGETWYDITGNRSDTVKIGSDGWGEFHVNDGSVSIYVQK

SEQ ID NO: 29579 - protein, 483 aa, Bacillus sp.
HHNGTNGTMMQYFEWYLPNDGNHWNRLNSDASNLKSKGITAVWIPPAWKAVSQNDVGYGAYDLYDLGEFNQKGTVRTKYGTRSQLQAAVTSLKNNGIQVYGDVVMNHKGGADLTEMVRAVEVNPNNRNQEVTGEYTIEAWTRFDFPGRGNTHSSFKWRWYHFDGVDWDQSREFTNRIYKFRGKAWDWEVDTEFGNYDYLMYVDYDMDHPEVVNELRNWGVWYTNTLGLDGFRIDAVKHIKYSFTRDWINHVRSATGKNMFAVAEFWKNDLGAIENYLQKTNWNHSVFDVPLHYNLYNASKSGGNYDMRNIFNGTVVQAHPNHAVTFVDNHDSQPEEALESFVEEWFKPLAYALTLTREQGYPSVFYGDYYGIPTHGVPAMRSKIDPILEARQKYAYGPQHDYLDHPDVIGWTREGDSSHPKSGLATLITDGPGGSKRMYAGLKNAGETWYDITGNRSDTVKIGSDGWGEFHVNDGSVSIYVQK

SEQ ID NO: 29580 - protein, 483 aa, Bacillus sp.
HHNGTNGTMMQYFEWYLPNDGNHWNRLNSDASNLKSKGITAVWIPPAWKGASQNDVGYGAYDLYDLGEFNQKGTVRTKYGTRSQLQAAVTSLKNNGIQVYGDVVMNHKGGADATEMVRAVEVNPNNRNQEVTGEYTIEAWTRFDFPGRGNTHSSFKWRWYHFDGVDWDQSRRLNNRIYKFRGKAWDWEVDTEFGNYDYLMYADYDMDHPEVVNELRNWGVWYTNTLGLDGFRIDAVKHIKYSFTRDWINHVRSATGKNMFAVAEFWKNDLGAIENYLQKTNWNHSVFDVPLHYNLYNASKSGGNYDMRNIFNGTVVQRHPSHAVTFVDNHDSQPEEALESFVEPWFKPLAYALTLTREQGYPSVFYGDYYGIPTHGVPAMRSKIDPILEARQKYAYGPQHDYLDHPDVIGWTREGDSSHPKSGLATLITDGPGGSKRMYAGLKNAGETWYDITGNRSDTVKIGSDGWGEFHVNDTSVSIYVQK

SEQ ID NO: 29581 - protein, 483 aa, Bacillus sp.
HHNGTNGTMMQYFEWYLPNDGNHWNRLNSDASNLKSKGITAVWIPPAWKGASQNDVGYGAYDLYDLGEFNQKGTVRTKYGTRSQLQAAVTSLKNNGIQVYGDVVMNHKGGADATEMVRAVEVNPNNRNQEVTGEYTIEAWTRFDFPGRGNTHSSFKWRWYHFDGVDWDQSRRLNNRIYKFRGKAWDWEVDTEFGNYDYLMYADYDMDHPEVVNELRNWGVWYTNTLGLDGFRIDAVKHIKYSFTRDWINHVRSATGKNMFAVAEFWKNDLGAIENYLQKTNWNHSVFDVPLHYNLYNASQSGGNYDMRNIFNGTVVQRHPSHAVTFVDNHDSQPEEALESFVETWFKPLAYALTLTREQGYPSVFYGDYYGIPTHGVPAMRSKIDPILEARQKYAYGPQHDYLDHPDVIGWTREGDSSHPKSGLATLITDGPGGSKRMYAGLKNAGETWYDITGNRSDTVKIGSDGWGEFHVNKSSVSIYVQK

SEQ ID NO: 29582 - protein, 483 aa, Synthetic construct
HHNGTNGTMMQYFEWYLPNDGNHWNRLNSDASNLKSKGITAVWIPPAWKGASQNDVGYGAYDLYDLGEFNQKGTVRTKYGTRSQLQAAVTSLKNNGIQVYGDVVMNHKGGADATEMVRAVEVNPNNRNQEVTGEYTIEAWTRFDFPGRGNTHSSFKWRWYHFDGVDWDQSRRLNNRIYKFRGKAWDWEVDTEFGNYDYLMYADIDMDHPESTNELRNWGVWYTNTLGLDGFRIDAVKHIKYSFTRDWINHVRSATGKNMFAVAEFWKNDLGAIENYLQKTNWNHSVFDVPLHYNLYNASKSGGNYDMRNIFNGTVVQRHPSHAVTFVDNHDSQPEEALESFVEEWFKPLAYALTLTREQGYPSVFYGDYYGIPTHGVPAMRSKIDPILEARQKYAYGPQHDYLDHPDVIGWTREGDSSHPKSGLATLITDGPGGSKRMYAGLKNAGETWYDITGNRSDTVKIGSDGWGEFHVNDGSVSIYVQK

SEQ ID NO: 29583 - protein, 483 aa, Bacillus sp.
HHNGTNGTMMQYFEWYLPNDGNHWNRLNSDASNLKSKGITAVWIPPAWKGASQNDVGYGAYDLYDLGEFNQKGTVRTKYGTRSQLQAAVTSLKNNGIQVYGDVVMNHKGGADATEMVRAVEVNPNNRNQEVTGEYTIEAWTRFDFPGRGNTHSSFKWRWYHFDGVDWDQSRRLNNRIYKFRGKAWDWEVDTEFGNYDYLMYADYDMDHPEVVNELRNWGVWYTNTLGLDGFRIDAVKHIKYSFTRDWINHVRSATGKNMFAVAEFWQNDLGSIENYLQKTNWNHSVFDVPLHYNLYNASKSGGNYDMRNIFNGTVVQRHPSHAVTFVDNHDSQPEEALESFVEEWFKPLAYALTLTREQGYPSVFYGDYYGIPTHGVPAMRSKIDPILEARQKYAYGPQHDYLDHPDVIGWTREGDSSHPKSGLATLITDGPGGSKRMYAGLKNAGETWYDITGNRSDTVKIGSDGWGEFHVNDGSVSIYVQK

SEQ ID NO: 29584 - protein, 485 aa, Bacillus sp.
HHNGTNGTMMQYFEWYLPNDGNHWDRLNSDASNLKSKGITAVWIPPAWKGASQNDVGYGAYDLYDLGEFNQKGTVRTKYGTRSQLQAAVTSLKNNGIQVYGDVVMNHKGGADATEMVRAVEVNPNNRNQEVTGEYTIEAWTRFDFPGRGNTHSSFKWRWYHFDGVDWDQSRNLNNRIYKFRGHGKAWDWEVDTEFGNYDYLMYTDYDMDHPEVVNELRNWGVWYTNTLGLDGFRIDAVKHIKYSFTRDWINHVRSATGKNMFAVAEFWKNDLGAIENYLQKTNWNHSVFDVPLHYNLYNASKSGGNYDMRNIFNGTVVQRHPSHAVTFVDNHDSQPEEALESFVEEWFKPLAYALTLTREQGYPSVFYGDYYGIPTHGVPAMRSKIDPILEARQKYAYGPQHDYLDHPDVIGWTREGDSSHPKSGLATLITDGPGGSKRMYAGLKNAGETWYDITGNRSDTVKIGSDGWGEFHVNDGSVSIYVQK

SEQ ID NO: 29585 - protein, 483 aa, Bacillus sp.
HHNGTNGTMMQYFEWYLPNDGNHWNRLNSDASNLKSKGITAVWIPPAWKGASQNDVGYGAYDLYDLGEFNQKGTVRTKYGTRSQLQAAVTSLKNNGIQVYGDVVMNHKGGADATEMVRAVEVNPNNRNQEVTGEYTIEAWTRFDFPGRGNTHSSFKWRWYHFDGVDWDQSRRLNNRIYKFRGKAWDWEVDTEFGNYDYLMYADYDMDHPEVVNELRNWGVWYTNTLGLDGFRIDAVKHIKYSFTRDWINHVRSATGKNMFAVAEFWKNDLGAIENYLQKTNWNHSVFDVPLHYNLYNASKSGGNYDMRNIFNGTVVQRHPSHAVTFVDNHDSQPEEALESFVEPWFKPLAYALTLTREQGYPSVFYGDYYGIPTHGVPAMRSKIDPILEARQKYAYGPQHDYLDHPDVIGWTREGDSSHPKSGLATLITDGPGGSKRMYAGLKNAGETWYDITGNRSDTVKIGSDGWGEFHVNDSSVSIYVQK

SEQ ID NO: 29586 - protein, 485 aa, Bacillus sp.
HHNGTNGTMMQYFEWYLPNDGNHWNRLNSDASNLKSKGITAVWIPPAWKGASQNDVGYGAYDLYDLGEFNQKGTVRTKYGTRSQLQAAVTSLKNNGIQVYGDVVMNHKGGADATEMVRAVEVNPNNRNQEVTGEYTIEAWTRFDFPGRGNTHSSFKWRWYHFDGVDWDQSRRLNNRIYKFRGHGKAWDWEVDTEFGNYDYLMYADYDMDHPEVVNELRNWGVWYTNTLGLDGFRIDAVKHIKYSFTRDWINHVRSATGKNMFAVAEFWKNDLGAIENYLQKTNWNHSVFDVPLHYNLYNASQSGGNYDMRNIFNGTVVQRHPSHAVTFVDNHDSQPEEALESFVDPWFKPLAYALTLTREQGYPSVFYGDYYGIPTHGVPAMRSKIDPILEARQKYAYGPQHDYLDHPDVIGWTREGDSSHPKSGLATLITDGPGGSKRMYAGLKNAGETWYDITGNRSDTVKIGSDGWGEFHVNKQSVSIYVQK

SEQ ID NO: 29587 - protein, 483 aa, Bacillus sp.
HHNGTNGTMMQYFEWYLPNDGNHWNRLNSDASNLKSKGITAVWIPPAWKATSQNDVGYGAYDLYDLGEFNQKGTVRTKYGTRSQLQAAVTSLKNNGIQVYGDVVMNHKGGADATEMVRAVEVNPNNRNQEVTGEYTIEAWTRFDFPGRGNTHSSFKWRWYHFDGVDWDQSRNVNNRIYKFRGKAWDWEVDTEFGNYDYLMYADYDMDHPEVVNELRNWGVWYTNTLGLDGFRIDAVKHIKYSFTRDWINHVRSATGKNMFAVAEFWKNDLGAIENYLQKTNWNHSVFDVPLHYNLYNASKSGGNYDMRNIFNGTVVQRHPSHAVTFVDNHDSQPEEALESFVETWFKPLAYALTLTREQGYPSVFYGDYYGIPTHGVPAMRSKIDPILEARQKYAYGPQHDYLDHPDVIGWTREGDSSHPKSGLATLITDGPGGSKRMYAGLKNAGETWYDITGNRSDTVKIGSDGWGEFHVNDASVSIYVQK

SEQ ID NO: 29588 - protein, 485 aa, Bacillus sp.
HHNGTNGTMMQYFEWYLPNDGNHWNRLNSDASNLKSKGITAVWIPPAWKATSQNDVGYGAYDLYDLGEFNQKGTVRTKYGTRSQFQAAVTSLKNNGIQVYGDVVMNHKGGADATEMVRAVEVNPNNRNQEVTGEYTIEAWTRFDFPGRGNTHSSFKWRWYHFDGVDWDQSRELNNRIYKFRGHGKAWDWEVDTEFGNYDYLMYTDYDMDHPEVVNELRNWGVWYTNTLGLDGFRIDAVKHIKYSFTRDWINHVRSATGKNMFAVAEFWKNDLGAIENYLQKTNWNHSVFDVPLHYNLYNASKSGGNYDMRNIFNGTVVQRHPSHAVTFVDNHDSQPEEALESFVDPWFKPLAYALTLTREQGYPSVFYGDYYGIPTHGVPAMRSKIDPILEARQKYAYGPQHDYLDHPDVIGWTREGDSSHPKSGLATLITDGPGGSKRMYAGLKNAGETWYDITGNRSDTVKIGSDGWGEFHVNGGSVSIYVQK

SEQ ID NO: 29589 - protein, 483 aa, Bacillus sp.
HHNGTNGTMMQYFEWYLPNDGNHWNRLNSDASNLKSKGITAVWIPPAWKGASQNDVGYGAYDLYDLGEFNQKGTVRTKYGTRSQLQAAVTSLKNNGIKVYGDVVMNHKGGADATEMVRAVEVNPNNRNQEVTGEYTIEAWTRFDFPGRGNTHSSFKWRWYHFDGVDWDQSRRLNNRIYKFRGKAWDWEVDTEFGNYDYLMYADYDMDHPEVVNELRNWGVWYTNTLGLDGFRIDAVKHIKYSFTRDWINHVRSATGKNMFAVAEFWNNDLGAIENYLQKTNWNHSVFDVPLHYNLYNASKSGGNYDMRNIFNGTVVQAHPMQAVTFVDNHDSQPEEALESFVEEWFKPLAYALTLTREQGYPSVFYGDYYGIPTHGVPAMRSKIDPILEARQKYAYGPQHDYLDHPDVIGWTREGDSSHPKSGLATLITDGPGGSKRMYAGLKNAGETWYDITGNRSDTVKIGSDGWGEFHVNDGSVSIYVQK

SEQ ID NO: 29590 - protein, 483 aa, Bacillus sp.
HHNGTNGTMMQYFEWYLPNDGNHWNRLNSDASNLKSKGITAVWIPPAWKAVSQNDVGYGAYDLYDLGEFNQKGTVRTKYGTRSQLQAAVTSLKNNGIQVYGDVVMNHKGGADATEMVRAVEVNPNNRNQEVTGEYTIEAWTRFDFPGRGNTHSSFKWRWYHFDGVDWDQSRNLTNRIYKFRGKAWDWEVDTEFGNYDYLMYTDYDMDHPEVVNELRNWGVWYTNTLGLDGFRIDAVKHIKYSFTRDWINHVRSATGKNMFAVAEFWKNDLGAIENYLQKTNWNHSVFDVPLHYNLYNASKSGGNYDMRNIFNGTVVQVHPSHAVTFVDNHDSQPEEALESFVEEWFKPLAYALTLTREQGYPSVFYGDYYGIPTHGVPAMRSKIDPILEARQKYAYGPQHDYLDHPDVIGWTREGDSSHPKSGLATLITDGPGGSKRMYAGLKNAGETWYDITGNRSDTVKIGSDGWGEFHVNYGSVSIYVQK

SEQ ID NO: 29591 - protein, 485 aa, Bacillus sp.
HHNGTNGTMMQYFEWYLPNDGNHWNRLNSDASNLKSKGITAVWIPPAWKGASQNDVGYGAYDLYDLGEFNQKGTVRTKYGTRSQLQAAVTSLKNNGIQVYGDVVMNHKGGADATEMVRAVEVNPNNRNQEVTGEYTIEAWTRFDFPGRGNTHSSFKWRWYHFDGVDWDQSRRLNNRIYKFRAHGKAWDWEVDTEFGNYDYLMYADYDMDHPETSNELRNWGVWYTNTLGLDGFRIDAVKHIKYSFTRDWINHVRSATGKNMFAVAEFWKNDLGAIENYLQKTNWNHSVFDVPLHYNLYNASKSGGNYDMRNIFNGTVVQRHPSHAVTFVDNHDSQPEEALESFVEEWFKPLAYALTLTREQGYPSVFYGDYYGIPTHGVPAMRSKIDPILEARQKYAYGPQHDYLDHPDVIGWTREGDSSHPKSGLATLITDGPGGSKRMYAGLKNAGETWYDITGNRSDTVKIGSDGWGEFHVNDGSVSIYVQK

SEQ ID NO: 29592 - protein, 485 aa, Bacillus sp.
HHNGTNGTMMQYFEWYLPNDGNHWNRLNSDASNLKSKGITAVWIPPAWKGASQNDVGYGAYDLYDLGEFNQKGTVRTKYGTRSQLQAAVTSLKNNGIQVYGDVVMNHKGGADATEMVRAVEVNPNNRNQEVTGEYTIEAYTRFDFPGRGNTHSSFKWRWYHFDGVDFDQSRRLDNRIYKFRGHGKAWDWEVDTEFGNYDYLMYADYDMDHPEVVNELRNWGVWYTNTLGLDGFRIDAVKHIKYSFTRDWINHVRSATGKNMFAVAEFWKNDLGAIENYLQKTNWNHSVFDVPLHYNLYNASKSGGNYDMRNIFNGTVVQRHPSHAVTFVDNHDSQPEEALESFVEEWFKPLAYALTLTREQGYPSVFYGDYYGIPTHGVPAMRSKIDPILEARQKYAYGPQHDYLDHPDVIGWTREGDSSHPKSGLATLITDGPGGSKRMYAGLKNAGETWYDITGNRSDTVKIGSDGWGEFHVNDGSVSIYVQK

SEQ ID NO: 29593 - protein, 485 aa, Bacillus sp.
HHNGTNGTMMQYFEWYLPNDGNHWNRLNSDASNLKSKGITAVWIPPAWKAVSQNDVGYGAYDLYDLGEFNQKGTVRTKYGTRSQLQAAVTSLKNNGIQVYGDVVMNHKGGADATEMVPAVEVNPNNRNQEVTGEYTIEAWTRFDFPGRGNTHSSFKWRWYHFDGVDWDQSRNLTNRIYKFRGHSKAWDWEVDTEFGNYDYLMYTDYDMDHPEVVNELRNWGVWYTNTLGLDGFRIDAVKHIKYSFTRDWINHVRSATGKNMFAVAEFWKNDLGAIENYLQKTNWNHSVFDVPLHYNLYNASKSGGNYDMRNIFNGTVVQRHPSHAVTFVDNHDSQPEEALESFVEEWFKPLAYALTLTREQGYPSVFYGDYYGIPTHGVPAMRSKIDPILEARQKYAYGPQHDYLDHPDVIGWTREGDSSHPKSGLATLITDGPGGSKRMYAGLKNAGETWYDITGNRSDTVKIGSDGWGEFHVNDGSVSIYVQK

SEQ ID NO: 29594 - protein, 483 aa, Bacillus sp.
HHNGTNGTMMQYFEWYLPNDGNHWNRLNSDASNLKSKGITAVWIPPAWKALSQNDVGYGAYDLYDLGEFNQKGTVRTKYGTRSQLQAAVTSLKNNGIQVYGDVVMNHKGGADATEMVRAVEVNPNNRNQEVTGEYTIEAWTRFDFPGRGNTHSSFKWRWYHFDGVDWDQSRRLSNRIYKFRGKAWDWEVDTEFGNYDYLMYADYDMDHPEVVNELRNWGVWYTNTLGLDGFRIDAVKHIKYSFTRDWINHVRSATGKNMFAVAEFWKNDLGAIENYLQKTNWNHSVFDVPLHYNLYNASKSGGNYDMRNIFNGTVVQRHPSHAVTFVDNHDSQPEEALESFVEEWFKPLAYALTLTREQGYPSVFYGDYYGIPTHGVPAMRSKIDPILEARQKYAYGPQHDYLDHPDVIGWTREGDSSHPKSGLATLITDGPGGSKRMYAGLKNVGETWYDITGNRSDTVKIGSDGWGEFHVNDGSVSIYVQK

SEQ ID NO: 29595 - protein, 485 aa, Bacillus sp.
HHNGTNGTMMQYFEWYLPNDGNHWNRLNSDASNLKSKGITAVWIPPAWKGASQNDVGYGAYDLYDLGEFNQKGTVRTKYGTRSQLQAAVTSLKNNGIQVYGDVVMNHKGGADATEMVRAVEVNPNNRNQEVTGEYTIEAWTRFDFPGRGNTHSSFKWRWYHFDGVDWDQSRDLTNRIYKFRGHGKAWDWEVDTEFGNYDYLMYADYDMDHPEVVNELRNWGVWYTNTLGLDGFRIDAVKHIKYSFTRDWINHVRSATGKNMFAVAEFWKNDLGAIENYLQKTNWNHSVFDVPLHYNLYNASKSGGNYDMRNIFNGTVVQRHPSHAVTFVDNHDSQPEEALESFVETWFKPLAYALTLTREQGYPSVFYGDYYGIPTHGVPAMRSKIDPILEARQKYAYGPQHDYLDHPDVIGWTREGDSSHPKSGLATLITDGPGGSKRMYAGLKNAGETWYDITGNRSDTVKIGSDGWGEFHVNKASVSIYVQK

SEQ ID NO: 29596 - protein, 483 aa, Bacillus sp.
HHNGTNGTMMQYFEWYLPNDGNHWNRLNSDASNLKSKGITAVWIPPAWKGASQNDVGYGAYDLYDLGEFNQKGTVRTKYGTRSQLQAAVTSLKNNGIQVYGDVVMNHKGGADATEMVRAVEVNPNNRNQEVTGEYTIEAWTRFDFPGRGNTHSSFKWRWYHFDGVDWDQSRDLENRIYKFRGKAWDWEVDTEFGNYDYLMYADYDMDHPEVVNELRNWGVWYTNTLGLDGFRIDAVKHIKYSFTRDWINHVRSATGKNMFAVAEFWKNDLGAIENYLQKTNWNHSVFDVPLHYNLYNASQSGGNYDMRNIFNGTVVQRHPSHAVTFVDNHDSQPEEALESFVEPWFKPLAYALTLTREQGYPSVFYGDYYGIPTHGVPAMRSKIDPILEARQKYAYGPQHDYLDHPDVIGWTREGDSSHPKSGLATLITDGPGGSKRMYAGLKNAGETWYDITGNRSDTVKIGSDGWGEFHVNKSSVSIYVQK

SEQ ID NO: 29597 - protein, 483 aa, Bacillus sp.
HHNGTNGTMMQYFEWYLPNDGNHWNRLNSDASNLKSKGITAVWIPPAWKAASQNDVGYGAYDLYDLGEFNQKGTVRTKYGTRSQLQAAVTSLKNNGIQVYGDVVMNHKGGADATEMVRAVEVNPNNRNQEVTGEYTIEAWTRFDFPGRGNTHSSFKWRWYHFDGVDWDQSRDLQNRIYKFRGKAWDWEVDTEFGNYDYLMYADYDMDHPEVVNELRNWGVWYTNTLGLDGFRIDAVKHIKYSFTRDWINHVRSATGKNMFAVAEFWKNDLGAIENYLQKTNWNHSVFDVPLHYNLYNASKSGGNYDMRNIFNGTVVQRHPSHAVTFVDNHDSQPEEALESFVETWFKPLAYALTLTREQGYPSVFYGDYYGIPTHGVPAMRSKIDPILEARQKYAYGPQHDYLDHPDVIGWTREGDSSHPKSGLATLITDGPGGSKRMYAGLKNAGETWYDITGNRSDTVKIGSDGWGEFHVNKASVSIYVQK

SEQ ID NO: 29598 - protein, 483 aa, Bacillus sp.
HHNGTNGTMMQYFEWYLPNDGNHWNRLNSDASNLKSKGITAVWIPPAWKGASQNDVGYGAYDLYDLGEFNQKGTVRTKYGTRSQLQAAVTSLKNNGIQVYGDVVMNHKGGADATEMVRAVEVNPNNRNQEVTGEYTIEAWTRFDFPGRGNTHSSFKWRWYHFDGVDWDQSRRLNNRIYKFRGKAWDWEVDTEFGNYDYLMYADYDMDHPEVVNELRNWGVWYTNTLGLDGFRIDAVKHIKYSFTRDWINHVRSATGKNMFAVAEFWKNDLGAIENYLQKTNWNHSVFDVPLHYNLYNASKSAGNYDMRNIFNGTVVQRHPSHAVTFVDNHDSQPEEALESFVDEWFKPLAYALTLTREQGYPSVFYGDYYGIPTHGVPAMRSKIDPILEARQKYAYGPQHDYLDHPDVIGWTREGDSSHPKSGLATLITDGPGGSKRMYAGLKNAGETWYDITGNRSDTVKIGSDGWGEFHVNQQSVSIYVQK

SEQ ID NO: 29599 - protein, 483 aa, Bacillus sp.
HHNGTNGTMMQYFEWYLPNDGNHWNRLNSDASNLKSKGITAVWIPPAWKAVSQNDVGYGAYDLYDLGEFNQKGTVRTKYGTRSQLQAAVTSLKNNGIQVYGDVVMNHKGGADATEMVPAVEVNPNNRNQEVTGEYTIEAWTRFDFPGRGNTHSSFKWRWYHFDGVDWDQSRELSNRIYKFRSKAWDWEVDTEFGNYDYLMYADYDMDHPEVVNELRNWGVWYTNTLGLDGFRIDAVKHIKYSFTRDWINHVRSATGKNMFAVAEFWKNDLGAIENYLQKTNWNHSVFDVPLHYNLYNASKSGGNYDMRNIFNGTVVQRHPSHAVTFVDNHDSQPEEALESFVEEWFKPLAYALTLTREQGYPSVFYGDYYGIPTHGVPAMRSKIDPILEARQKYAYGPQHDYLDHPDVIGWTREGDSSHPKSGLATLITDGPGGSKRMYAGLKNAGETWYDITGNRSDTVKIGSDGWGEFHVNDGSVSIYVQK

SEQ ID NO: 29600 - protein, 483 aa, Bacillus sp.
HHNGTNGTMMQYFEWYLPNDGNHWNRLNSDASNLKSKGITAVWIPPAWKGASQNDVGYGAYDLYDLGEFNQKGTVRTKYGTRSQLQAAVTSLKNNGIQVYGDVVMNHKGGADATEMVRAVEVNPNNRNQEVTGEYTIEAWTRFDFPGRGNTHSSFKWRWYHFDGVDWDQSRRLNNRIYLFRAKAWDWEVDTEFGNYDYLMYADYDMDHPEVVNELRNWGVWYTNTLGLDGFRIDAVKHIKYSFTRDWINHVRSATGKNMFAVAEFWKNDLGAIENYLQKTNWNHSVFDVPLHYNLYNASKSGGNYDMRNIFNGTVVQRHPSHAVTFVDNHDSQPEEALESFVEEWFKPLAYALTLTREQGYPSVFYGDYYGIPTHGVPAMRSKIDPILEARQKYAYGPQHDYLDHPDVIGWTREGDSSHPKSGLATLITDGPGGSKRMYAGLKNAGETWYDITGNRSDTVKIGSDGWGEFHVNDGSVSIYVQK

SEQ ID NO: 29601 - protein, 485 aa, Bacillus sp.
HHNGTNGTMMQYFEWYLPNDGNHWNRLNSDASNLKSKGITAVWIPPAWKAASQNDVGYGAYDLYDLGEFNQKGTVRTKYGTRSQLQAAVTSLKNNGIQVYGDVVMNHKGGADATEMVRAVEVNPNNRNQEVTGEYTIEAWTRFDFPGRGNTHSSFKWRWYHFDGVDWDQSRRLTNRIYKFRGHGKAWDWEVDTEFGNYDYLMYVDYDMDHPEVVNELRNWGVWYTNTLGLDGFRIDAVKHIKYSFTRDWINHVRSATGKNMFAVAEFWKNDLGAIENYLQKTNWNHSVFDVPLHYNLYNASKSGGNYDMRNIFNGTVVQRHPSHAVTFVDNHDSQPEEALESFVEEWFKPLAYALTLTREQGYPSVFYGDYYGIPTHGVPAMRSKIDPILEARQKYAYGPQHDYLDHPDVIGWTREGDSSHPKSGLATLITDGPGGSKRMYAGLKNAGETWYDITGNRSDTVKIGSDGWGEFHVNDGSVSIYVQK

SEQ ID NO: 29602 - protein, 483 aa, Bacillus sp.
HHNGTNGTMMQYFEWYLPNDGNHWNRLNSDASNLKSKGITAVWIPPAWKATSQNDVGYGAYDLYDLGEFNQKGTVRTKYGTRSQLQAAVTSLKNNGIQVYGDVVMNHKGGADLTEMVRAVEVNPNNRNQEVTGEYTIEAWTRFDFPGRGNTHSSFKWRWYHFDGVDFDQSRNVNNRIYKFRGKAWDWEVDTEFGNYDYLMYADYDMDHPEVVNELRNWGVWYTNTLGLDGFRIDAVKHIKYSFTRDWINHVRSATGKNMFAVAEFWKNDLGAIENYLQKTNWNHSVFDVPLHYNLYNASKSGGNYDMRNIFNGTVVQRHPSHAVTFVDNHDSQPEEALESFVEEWFKPLAYALTLTREQGYPSVFYGDYYGIPTHGVPAMRSKIDPILEARQKYAYGPQHDYLDHPDVIGWTREGDSSHPKSGLATLITDGPGGSKRMYAGLKNAGETWYDITGNRSDTVKIGSDGWGEFHVNDGSVSIYVQK

SEQ ID NO: 29603 - protein, 485 aa, Bacillus sp.
HHNGTNGTMMQYFEWYLPNDGNHWNRLNSDASNLKSKGITAVWIPPAWKAVSQNDVGYGAYDLYDLGEFNQKGTVRTKYGTRSQLQAAVTSLKNNGIQVYGDVVMNHKGGADLTEMVRAVEVNPNNRNQEVTGEYTIEAWTRFDFPGRGNTHSSFKWRWYHFDGVDWDQSREFTNRIYKFRGHGKAWDWEVDTEFGNYDYLMYVDYDMDHPEVVNELRNWGVWYTNTLGLDGFRIDAVKHIKYSFTRDWINHVRSATGKNMFAVAEFWKNDLGAIENYLQKTNWNHSVFDVPLHYNLYNASKSGGNYDMRNIFNGTVVQRHPSHAVTFVDNHDSQPEEALESFVDPWFKPLAYALTLTREQGYPSVFYGDYYGIPTHGVPAMRSKIDPILEARQKYAYGPQHDYLDHPDVIGWTREGDSSHPKSGLATLITDGPGGSKRMYAGLKNAGETWYDITGNRSDTVKIGSDGWGEFHVNGGSVSIYVQK

SEQ ID NO: 29604 - protein, 485 aa, Bacillus sp.
HHNGTNGTMMQYFEWYLPNDGNHWNRLNSDASNLKSKGITAVWIPPAWKGASQNDVGYGAYDLYDLGEFNQKGTVRTKYGTRSQLQAAVTSLKNNGIQVYGDVVMNHKGGADATEMVRAVEVNPNNRNQEVTGEYTIEAWTRFDFPGRGNTHSSFKWRWYHFDGVDWDQSREFTNRIYKFRGHGKAWDWEVDTEFGNYDYLMYVDYDMDHPEVVNELRNWGVWYTNTLGLDGFRIDAVKHIKYSFTRDWINHVRSATGKNMFAVAEFWKNDLGAIENYLQKTNWNHSVFDVPLHYNLYNASKSGGNYDMRNIFNGTVVQRHPSHAVTFVDNHDSQPEEALESFVDTWFKPLAYALTLTREQGYPSVFYGDYYGIPTHGVPAMRSKIDPILEARQKYAYGPQHDYLDHPDVIGWTREGDSSHPKSGLATLITDGPGGSKRMYAGLKNAGETWYDITGNRSDTVKIGSDGWGEFHVNDASVSIYVQK

SEQ ID NO: 29605 - protein, 485 aa, Bacillus sp.
HHNGTNGTMMQYFEWYLPNDGNHWNRLNSDASNLKSKGITAVWIPPAWKGASQNDVGYGAYDLYDLGEFNQKGTVRTKYGTRSQLQAAVTSLKNNGIAVYGDVVMNHKGGADATEMVRAVEVNPNNRNQEVTGEYTIEAWTRFDFPGRGNTHSSFKWRWYHFDGVDWDQSRRLNNRIYKFRGHGKAWDWEVDTEFGNYDYLMYADYDMDHPEVVNELRNWGVWYTNTLGLDGFRIDAVKHIKYSFTRDWINHVRSATGKNMFAVSEFWKNDLGAIENYLQKTNWNHSVFDVPLHYNLYNASKSGGNYDMRNIFNGTVVQAHPSHAVTFVDNHDSQPEEALESFVEEWFKPLAYALTLTREQGYPSVFYGDYYGIPTHGVPAMRSKIDPILEARQKYAYGPQHDYLDHPDVIGWTREGDSSHPKSGLATLITDGPGGSKRMYAGLKNAGETWYDITGNRSDTVKIGSDGWGEFHVNDGSVSIYVQK

SEQ ID NO: 29606 - protein, 485 aa, Bacillus sp.
HHNGTNGTMMQYFEWYLPNDGNHWNRLNSDASNLKSKGITAVWIPPAWKGASQNDVGYGAYDLYDLGEFNQKGTVRTKYGTRSQLQAAVTSLKNNGIQVYGDVVMNHKGGADATEMVRAVEVNPNNRNQEVTGEYTIEAWTRFDFPGRGNTHSSFKWRWYHFDGVDWDQSRRLNNRIYKFRGHGKAWDWEVDTEFGNYDYLMYADYDMDHPEVVNELRNWGVWYTNTLGLDGFRIDAVKHIKYSFTRDWINHVRSATGKNMFAVAEFWKNDLGAIENYLQKTNWNHSVFDVPLHYNLYNASKSGGNYDMRNIFNGTVVQRHPSHAVTFVDNHDSQPEEALESFVEPWFKPLAYALTLTREQGYPSVFYGDYYGIPTHGVPAMRSKIDPILEARQKYAYGPQHDYLDHPDVIGWTREGDSSHPKSGLATLITDGPGGSKRMYAGLKNAGETWYDITGNRSDTVKIGSDGWGEFHVNDKSVSIYVQK

SEQ ID NO: 29607 - protein, 483 aa, Synthetic construct
HHNGTNGTMMQYFEWYLPNDGNHWNRLNSDASNLKSKGITAVWIPPAWKGASQNDVGYGAYDLYDLGEFNQKGTVRTKYGTRSQLQAAVTSLKNNGIQVYGDVVMNHKGGADATEMVRAVEVNPNNRNQEVTGEYTIEAWTRFDFPGRGNTHSSFKWRWYHFDGVDWDQSRRLNNRIYKFRGKAWDWEVDTENGNYDYLMYADYDMDYPEVVNEVRNWGVWYTNTLGLDGFRIDAVKHIKYSFVRDWINHVRSATGKNMFAVAEFWKNDLGAIENYLQKTNWNHSVFDVPLHYNLYNASKSGGNYDMRNIFNGTVVQRHPSHAVTFVDNHDSQPEEALESFVEEWFKPLAYALTLTREQGYPSVFYGDYYGIPTHGVPAMRSKIDPILEARQKYAYGPQHDYLDHPDVIGWTREGDSSHPKSGLATLITDGPGGSKRMYAGLKNAGETWYDITGNRSDTVKIGSDGWGEFHVNDGSVSIYVQK

SEQ ID NO: 29608 - protein, 483 aa, Bacillus sp.
HHNGTNGTMMQYFEWYLPNDGNHWDRLNSDASNLKSKGITAVWIPPAWKGASQNDVGYGAYDLYDLGEFNQKGTVRTKYGTRSQLQAAVTSLKNNGIQVYGDVVMNHKGGADATEMVRAVEVNPNNRNQEVTGEYTIEAWTRFDFPGRGNTHSSFKWRWYHFDGVDWDQSRNLNNRIYKFRGKAWDWEVDTEFGNYDYLMYTDYDMDHPEVVNELRNWGVWYTNTLGLDGFRIDAVKHIKYSFTRDWINHVRSATGKNMFAVAEFWKNDLGAIENYLQKTNWNHSVFDVPLHYNLYNASKSGGNYDMRNIFNGTVVQRHPSHAVTFVDNHDSQPEEALESFVEEWFKPLAYALTLTREQGYPSVFYGDYYGIPTHGVPAMRSKIDPILEARQKYAYGPQHDYLDHPDVIGWTREGDSSHPKSGLATLITDGPGGSKRMYAGLKNAGETWYDITGNRSDTVKIGSDGWGEFHVNDGSVSIYVQK

SEQ ID NO: 29609 - protein, 485 aa, Bacillus sp.
HHNGTNGTMMQYFEWYLPNDGNHWNRLNSDASNLKSKGITAVWIPPAWKAVSQNDVGYGAYDLYDLGEFNQKGTVRTKYGTRSQLQAAVTSLKNNGIQVYGDVVMNHKGGADATEMVRAVEVNPNNRNQEVTGEYTIEAWTRFDFPGRGNTHSSFKWRWYHFDGVDWDQSRDLENRIYKFRGHGKAWDWEVDTEFGNYDYLMYADYDMDHPEVVNELRNWGVWYTNTLGLDGFRIDAVKHIKYSFTRDWINHVRIATGKNMFAVAEFWKNDLGAIENYLQKTNWNHSVFDVPLHYNLYNASKSGGNYDMRNIFNGTVVQRHPSHAVTFVDNHDSQPEEALESFVDEWFKPLAYALTLTREQGYPSVFYGDYYGIPTHGVPAMRSKIDPILEARQKYAYGPQHDYLDHPDVIGWTREGDSSHPKSGLATLITDGPGGSKRMYAGLKNAGETWYDITGNRSDTVKIGSDGWGEFHVNDQSVSIYVQK

SEQ ID NO: 29610 - protein, 485 aa, Bacillus sp.
HHNGTNGTMMQYFEWYLPNDGNHWNRLNSDASNLKSKGITAVWIPPAWKGASQNDVGYGAYDLYDLGEFNQKGTVRTKYGTRSQLQAAVTSLKNNGIQVYGDVVMNHKGGADATEMVRAVEVNPNNRNQEVTGEYTIEAWTRFDFPGRGNTHSSFKWRWYHFDGVDWDQSRRLNNRIYKFRGHGKAWDWEVDTEFGNYDYLMYADYDMDHPEVVNELRNWGVWYTNTLGLDGFRIDAVKHIKYSFTRDWINHVRSATGKNMFAVAEFWQNDLGRIENYLQKTNWNHSVFDVPLHYNLYNASKSGGNYDMRNIFNGTVVQRHPSHAVTFVDNHDSQPEEALESFVEEWFKPLAYALTLTREQGYPSVFYGDYYGIPTHGVPAMRSKIDPILEARQKYAYGPQHDYLDHPDVIGWTREGDSSHPKSGLATLITDGPGGSKRMYAGLKNAGETWYDITGNRSDTVKIGSDGWGEFHVNDGSVSIYVQK

SEQ ID NO: 29611 - protein, 483 aa, Bacillus sp.
HHNGTNGTMMQYFEWYLPNDGNHWNRLNSDASNLKSKGITAVWIPPAWKAVSQNDVGYGAYDLYDLGEFNQKGTVRTKYGTRSQLQAAVTSLKNNGIQVYGDVVMNHKGGADATEMVRAVEVNPNNRNQEVTGEYTIEAWTRFDFPGRGNTHSSFKWRWYHFDGVDWDQSRNLTNRIYKFRGKAWDWEVDTEFGNYDYLMYTDYDMDHPEVVNELRNWGVWYTNTLGLDGFRIDAVKHIKYSFTRDWINHVRIATGKNMFAVAEFWKNDLGAIENYLQKTNWNHSVFDVPLHYNLYNASKSGGNYDMRNIFNGTVVQRHPSHAVTFVDNHDSQPEEALESFVDEWFKPLAYALTLTREQGYPSVFYGDYYGIPTHGVPAMRSKIDPILEARQKYAYGPQHDYLDHPDVIGWTREGDSSHPKSGLATLITDGPGGSKRMYAGLKNAGETWYDITGNRSDTVKIGSDGWGEFHVNDGSVSIYVQK

SEQ ID NO: 29612 - protein, 485 aa, Bacillus sp.
HHNGTNGTMMQYFEWYLPNDGNHWNRLNSDASNLKSKGITAVWIPPAWKAASQNDVGYGAYDLYDLGEFNQKGTVRTKYGTRSQLQAAVTSLKNNGIQVYGDVVMNHKGGADATEMVRAVEVNPNNRNQEVTGEYTIEAWTRFDFPGRGNTHSSFKWRWYHFDGVDWDQSRRLDNRIYKFRGHGKAWDWEVDTEFGNYDYLMYTDYDMDHPEVVNELRNWGVWYTNTLGLDGFRIDAVKHIKYSFTRDWINHVRSATGKNMFAVAEFWKNDLGAIENYLQKTNWNHSVFDVPLHYNLYNASKSGGNYDMRNIFNGTVVQRHPSHAVTFVDNHDSQPEEALESFVEEWFKPLAYALTLTREQGYPSVFYGDYYGIPTHGVPAMRSKIDPILEARQKYAYGPQHDYLDHPDVIGWTREGDSSHPKSGLATLITDGPGGSKRMYAGLKNAGETWYDITGNRSDTVKIGSDGWGEFHVNDGSVSIYVQK

SEQ ID NO: 29613 - protein, 485 aa, Bacillus sp.
HHNGTNGTMMQYFEWYLPNDGNHWNRLNSDASNLKSKGITAVWIPPAWKGASQNDVGYGAYDLYDLGEFNQKGTVRTKYGTRSQLQAAVTSLKNNGIQVYGDVVMNHKGGADATEMVRAVEVNPNNRNQEVTGEYTIEAWTRFDFPGRGNTHSSFKWRWYHFDGVDWDQSRKLNNRIYKFRGHGKAWDWEVDTEFGNYDYLMYVDYDMDHPEVVNELRNWGVWYTNTLGLDGFRIDAVKHIKYSFTRDWINHVRSATGKNMFAVAEFWKNDLGAIENYLQKTNWNHSVFDVPLHYNLYNASKSGGNYDMRNIFNGTVVQRHPSHAVTFVDNHDSQPEEALESFVDEWFKPLAYALTLTREQGYPSVFYGDYYGIPTHGVPAMRSKIDPILEARQKYAYGPQHDYLDHPDVIGWTREGDSSHPKSGLATLITDGPGGSKRMYAGLKNAGETWYDITGNRSDTVKIGSDGWGEFHVNKSSVSIYVQK

SEQ ID NO: 29614 - protein, 483 aa, Bacillus sp.
HHNGTNKTMMQYFEWYLPNDGNHWNRLNSDASNLKSKGITAVWIPPAWKGASQNDVGYGAYDLYDLGEFNQKGTVRTKYGTRSQLQAAVTSLKNNGIQVYGDVVMNHKGGADATEMVRAVEVNPNNRNQEVTGEYTIEAWTRFDFPGRGNTHSSFKWRWYHFDGVDWDQSRRLNNRIYKFRGKAWDWEVDTEFGNYDYLMYADYDMDHPEVVNELRNWGVWYTNTLGLDGFRIDAVKHIKYSFTRDWINHVRSATGKNMFAVAEFWKNDLGAIENYLQKTNWNHSVFDVPLHYNLYNASKSGGNYDMRNIFNGTVVQAHPSLAVTFVDNHDSQPEEALESFVEEWFKPLAYALTLTREQGYPSVFYGDYYGIPTHGVPAMRSKIDPILEARQKYAYGPQHDYLDHPDVIGWTREGDSSHPKSGLATLITDGPGGSKRMYAGLKNAGETWYDITGNRSDTVKIGSDGWGEFHVNDGSVSIYVQK

SEQ ID NO: 29615 - protein, 485 aa, Bacillus sp.
HHNGTNGTMMQYFEWYLPNDGNHWNRLNSDASNLKSKGITAVWIPPAWKAQSQNDVGYGAYDLYDLGEFNQKGTVRTKYGTRSQLQAAVTSLKNNGIQVYGDVVMNHKGGADATEMVRAVEVNPNNRNQEVTGEYTIEAWTRFDFPGRGNTHSSFKWRWYHFDGVDWDQSRQLNNRIYKFRGHGKAWDWEVDTEFGNYDYLMYADYDMDHPEVVNELRNWGVWYTNTLGLDGFRIDAVKHIKYSFTRDWINHVRSATGKNMFAVAEFWKNDLGAIENYLQKTNWNHSVFDVPLHYNLYNASKSQGNYDMRNIFNGTVVQRHPSHAVTFVDNHDSQPEEALESFVDTWFKPLAYALTLTREQGYPSVFYGDYYGIPTHGVPAMRSKIDPILEARQKYAYGPQHDYLDHPDVIGWTREGDSSHPKSGLATLITDGPGGSKRMYAGLKNAGETWYDITGNRSDTVKIGSDGWGEFHVNGSSVSIYVQK

SEQ ID NO: 29616 - protein, 483 aa, Bacillus sp.
HHNGTNGTMMQYFEWYLPNDGNHWNRLNSDASNLKSKGITAVWIPPAWKGASQNDVGYGAYDVYDLGEFNQKGTVRTKYGTRSQLQAAVTSLKNNGIQVYGDVVLNHKGGADATEMVRAVEVNPNNRNQEVTGEYTIEAWTRFDFPGRGNTHSSFKWRWYHFDGVDWDQSRRLNNRIYKFRGKAWDWEVDTENGNYDYLMYADIDYDHPEVVNELRNWGVWYTNTLGLDGFRIDAVKHIKYSFTRDWINHVRSATGKNMFAVAEFWKNDLGAIENYLQKTNWNHSVFDVPLHYNLYNASKSGGNYDMRNIFNGTVVQRHPSHAVTFVDNHDSQPEEALESFVEEWFKPLAYALTLTREQGYPSVFYGDYYGIPTHGVPAMRSKIDPILEARQKYAYGPQHDYLDHPDVIGWTREGDSSHPKSGLATLITDGPGGSKRMYAGLKNAGETWYDITGNRSDTVKIGSDGWGEFHVNDGSVSIYVQK

SEQ ID NO: 29617 - protein, 485 aa, Bacillus sp.
HHNGTNETMMQYFEWYLPNDGNHWNRLNSDASNLKSKGITAVWIPPAWKGASQNDVGYGAYDLYDLGEFNQKGTVRTKYGTRSQLQAAVTSLKNNGIQVYGDVVMNHKGGADATEMVRAVEVNPNNRNQEVTGEYTIEAWTRFDFPGRGNTHSSFKWRWYHFDGVDWDQSRRLNNRIYKFRGHGKAWDWEVDTEFGNYDYLMYADYDMDHPEVVNELRNWGVWYTNTLGLDGFRIDAVKHIKYSFTRDWINHVRSATGKNMFAVAEFWKNDLGAIENYLQKTNWNHSVFDVPLHYNLYNASKSGGNYDMRNIFNGTVVQAHPSQAVTFVDNHDSQPEEALESFVEEWFKPLAYALTLTREQGYPSVFYGDYYGIPTHGVPAMRSKIDPILEARQKYAYGPQHDYLDHPDVIGWTREGDSSHPKSGLATLITDGPGGSKRMYAGLKNAGETWYDITGNRSDTVKIGSDGWGEFHVNDGSVSIYVQK

SEQ ID NO: 29618 - protein, 485 aa, Synthetic construct
HHNGTNGTMMQYFEWYLPNDGNHWNRLNSDASNLKSKGITAVWIPPAWKGASQNDVGYGAYDLYDLGEFNQKGTVRTKYGTRSQLQAAVTSLKNNGIQVYGDVVMNHKGGADATEMVRAVEVNPNNRNQEVTGEYTIEAWTRFDFPGRGNTHSSFKWRWYHFDGVDWDQSRRLNNRIYKFRGHGKEWDWEVDTEFGNYDYLMYADYDMDSPEVVNELRNWGVWYTNTLGLDGFRIDAVKHIKYSFTRDWINHVRSATGKNMFAVAEFWKNDLGAIENYLQKTNWNHSVFDVPLHYNLYNASKSGGNYDMRNIFNGTVVQRHPSHAVTFVDNHDSQPEEALESFVEEWFKPLAYALTLTREQGYPSVFYGDYYGIPTHGVPAMRSKIDPILEARQKYAYGPQHDYLDHPDVIGWTREGDSSHPKSGLATLITDGPGGSKRMYAGLKNAGETWYDITGNRSDTVKIGSDGWGEFHVNDGSVSIYVQK

SEQ ID NO: 29619 - protein, 483 aa, Bacillus sp.
HHNGTNGTMMQYFEWYLPNDGNHWNRLNSDASNLKSKGIKAVWIPPAWKGASQNDVGYGAYDLYDLGEFNQRGTVRTKYGTRSQLQAAVTSLKNNGIQVYGDVVMNHKGGADATEMVRAVEVNPNNRNQEVTGEYTIEAWTRFDFPGRGNTHSSFKWRWYHFDGVDWDQSRRLNNRIYKFRGKAWDWEVDTEFGNYDYLMYADYDMDHPEVVNELRNWGVWYTNTLGLDGFRIDAVKHIKYSFTRDWINHVRSATGKNMFAVAEFWKNDLGAIENYLQKTNWNHSVFDVPLHYNLYNASKSGGNYDMRNIFNGTVVQRHPSHAVTFVDNHDSQPEEALESFVDPWFKPLAYALTLTREQGYPSVFYGDYYGIPTHGVPAMRSKIDPILEARQKYAYGPQHDYLDHPDVIGWTREGDSSHPKSGLATLITDGPGGSKRMYAGLKNAGETWYDITGNRSDTVKIGSDGWGEFHVNGGSVSIYVQK

SEQ ID NO: 29620 - protein, 483 aa, Bacillus sp.
HHNGTNGTMMQYFEWYLPNDGNHWNRLNSDASNLKSKGITAVWIPPAWKAVSQNDVGYGAYDLYDLGEFNQKGTVRTKYGTRSQLQAAVTSLKNNGIQVYGDVVMNHKGGADATEMVRAVEVNPNNRNQEVTGEYTIEAWTRFDFPGRGNTHSSFKWRWYHFDGVDWDQSRNLTNRIYKFRGKAWDWEVDTEFGNYDYLMYTDYDMDHPEVVNELRNWGVWYTNTLGLDGFRIDAVKHIKYSFTRDWINHVRSATGKNMFAVAEFWKNDLGAIENYLQKTNWNHSVFDVPLHYNLYNASKSGGNYDMRNIFNGTVVQVHPSHAVTFVDNHDSQPEEALESFVEEWFKPLAYALTLTREQGYPSVFYGDYYGIPTHGVPAMRSKIDPILEARQKYAYGPQHDYLDHPDVIGWTREGDSSHPKSGLATLITDGPGGSKRMYAGLKNAGETWYDITGNRSDTVKIGSDGWGEFHVNDGSVSIYVQK

SEQ ID NO: 29621 - protein, 485 aa, Synthetic construct
HHNGTNGTMMQYFEWYLPNDGNHWNRLNSDASNLKSKGITAVWIPPAWKGASQNDVGYGAYDLYDLGEFNQKGTVRTKYGTRSQLQAAVTSLKNNGIQVYGDVVMNHKGGADATEMVRAVEVNPNNRNQEVTGEYTIEAWTRFDFPGRGNTHSSFKWRWYHFDGVDWDQSRRLNNRIYLFRSHGKQWDWPVDTENGNYDYLMYADIDMDHPEVVNELRNWGVWYTNTLGLDGFRIDAVKHIKYSFTRDWINHVRSATGKNMFAVAEFWKNDLGAIENYLQKTNWNHSVFDVPLHYNLYNASKSGGNYDMRNIFNGTVVQRHPSHAVTFVDNHDSQPEEALESFVEEWFKPLAYALTLTREQGYPSVFYGDYYGIPTHGVPAMRSKIDPILEARQKYAYGPQHDYLDHPDVIGWTREGDSSHPKSGLATLITDGPGGSKRMYAGLKNAGETWYDITGNRSDTVKIGSDGWGEFHVNDGSVSIYVQK

SEQ ID NO: 29622 - protein, 483 aa, Bacillus sp.
HHNGTNGTMMQYFEWYLPNDGNHWNRLNSDASNLKSKGITAVWIPPAWKGASQNDVGYGAYDLYDLGEFNQKGTVRTKYGTRSQLQAAVTSLKNNGIQVYGDVVMNHKGGADATEMVRAVEVNPNNRNQEVTGEYTIEAWTRFDFPGRGNTHSSFKWRWYHFDGVDWDQSRRLNNRIYKFRGKAWDWEVDTEFGNYDYLMYADYDMDHPEVVNELRNWGVWYTNTLGLDGFRIDAVKHIKYSFTRDWINHVRSATGKNMFAVAEFWKNDLGAIENYLQKTNWNHSVFDVPLHYNLYNASQSGGNYDMRNIFNGTVVQRHPSHAVTFVDNHDSQPEEALESFVDTWFKPLAYALTLTREQGYPSVFYGDYYGIPTHGVPAMRSKIDPILEARQKYAYGPQHDYLDHPDVIGWTREGDSSHPKSGLATLITDGPGGSKRMYAGLKNAGETWYDITGNRSDTVKIGSDGWGEFHVNKKSVSIYVQK

SEQ ID NO: 29623 - protein, 485 aa, Bacillus sp.
HHNGTNGTMMQYFEWYLPNDGNHWNRLNSDASNLKSKGITAVWIPPAWKGASQNDVGYGAYDLYDLGEFNQKGTVRTKYGTRSQLQAAVTSLKNNGIQVYGDVVMNHKGGADATEMVRAVEVNPNNRNQEVTGEYTIEAWTRFDFPGRGNTHSSFKWRWYHFDGVDWDQSRRLNNRIYKFRNHGKEWDWEVDTEFGNYDYLMYADYDMDHPEVSNELRNWGVWYTNTLGLDGFRIDAVKHIKYSFTRDWINHVRSATGKNMFAVAEFWKNDLGAIENYLQKTNWNHSVFDVPLHYNLYNASKSGGNYDMRNIFNGTVVQRHPSHAVTFVDNHDSQPEEALESFVEEWFKPLAYALTLTREQGYPSVFYGDYYGIPTHGVPAMRSKIDPILEARQKYAYGPQHDYLDHPDVIGWTREGDSSHPKSGLATLITDGPGGSKRMYAGLKNAGETWYDITGNRSDTVKIGSDGWGEFHVNDGSVSIYVQK

SEQ ID NO: 29624 - protein, 485 aa, Bacillus sp.
HHNGTNGTMMQYFEWYLPNDGNHWNRLNSDASNLKSKGITAVWIPPAWKGASQNDVGYGAYDLYDLGEFNQKGTVRTKYGTRSQLQAAVTSLKNNGIQVYGDVVMNHKGGADATEMVRAVEVNPNNRNQEVTGEYTIEAWTRFDFPGRGNTHSSFKWRWYHFDGVDWDQSRRLNNRIYKFRGHGKAWDWEVDTEFGNYDYLMYADYDMDHPEVVNELRNWGVWYTNTLGLDGFRIDAVKHIKYSFTRDWINHVRSATGKNMFAVAEFWKNDLGAIENYLQKTNWNHSVFDVPLHYNLYNASKSQGNYDMRNIFNGTVVQRHPSHAVTFVDNHDSQPEEALESFVDPWFKPLAYALTLTREQGYPSVFYGDYYGIPTHGVPAMRSKIDPILEARQKYAYGPQHDYLDHPDVIGWTREGDSSHPKSGLATLITDGPGGSKRMYAGLKNAGETWYDITGNRSDTVKIGSDGWGEFHVNGQSVSIYVQK

SEQ ID NO: 29625 - protein, 485 aa, Bacillus sp.
HHNGTNGTMMQYFEWYLPNDGNHWNRLNSDASNLKSKGITAVWIPPAWKGASQNDVGYGAYDLYDLGEFNQKGTVRTKYGTRSQLQAAVTSLKNNGIQVYGDVVMNHKGGADATEMVRAVEVNPNNRNQEVTGEYTIEAWTRFDFPGRGNTHSSFKWRWYHFDGVDWDQSRRLNNRIYKFRGHGKAWDWEVDTEFGNYDYLMYADYDMDHPEVVNELRNWGVWYTNTLGLDGFRIDAVKHIKYSFTRDWINHVRSATGKNMFAVAEFWKNDLGAIENYLQKTNWNHSVFDVPLHYNLYNASKSGGNYDMRNIFNGTVVQRHPSHAVTFVDNHDSQPEEALESFVDPWFKPLAYALTLTREQGYPSVFYGDYYGIPTHGVPAMRSKIDPILEARQKYAYGPQHDYLDHPDVIGWTREGDSSHPKSGLATLITDGPGGSKRMYAGLKNAGETWYDITGNRSDTVKIGSDGWGEFHVNKSSVSIYVQK

SEQ ID NO: 29626 - protein, 485 aa, Synthetic construct
HHNGTNGTMMQYFEWYLPNDGNHWNRLNSDASNLKSKGITAVWIPPAWKGASQNDVGYGAYDIYDLGEFNQKGTVRTKYGTRSQLQAAVTSLKNNGIQVYGDVVMNHKGGADATEMVRAVEVNPNNRNQEVTGEYTIEAWTRFDFPGRGNTHSSFKWRWYHFDGVDWDQSRRLNNRIYKFRGHGKAWDWEVDTEFGNYDYLMYADYDMDSPEVVNELRNWGVWYTNTLGLDGFRIDAVKHIKYSFTRDWINHVRSATGKNMFAVAEFWKNDLGAIENYLQKTNWNHSVFDVPLHYNLYNASKSGGNYDMRNIFNGTVVQRHPSHAVTFVDNHDSQPEEALESFVEEWFKPLAYALTLTREQGYPSVFYGDYYGIPTHGVPAMRSKIDPILEARQKYAYGPQHDYLDHPDVIGWTREGDSSHPKSGLATLITDGPGGSKRMYAGLKNAGETWYDITGNRSDTVKIGSDGWGEFHVNDGSVSIYVQK

SEQ ID NO: 29627 - protein, 483 aa, Bacillus sp.
HHNGTNGTMMQYFEWYLPNDGNHWNRLNSDASNLKSKGITAVWIPPAWKGASQNDVGYGAYDLYDLGEFNQKGTVRTKYGTRSQLQAAVTSLKNNGIQVYGDVVMNHKGGADATEMVDAVEVNPNNRNQEVTGEYTIEAWTRFDFPGRGNTHSSFKWRWYHFDGVDWDQSRRLNNRIYLFRAKAWDWEVDTEFGNYDYLMYADYDMDHPEVVNELRNWGVWYTNTLGLDGFRIDAVKHIKYSFTRDWINHVRSATGKNMFAVAEFWKNDLGAIENYLQKTNWNHSVFDVPLHYNLYNASKSGGNYDMRNIFNGTVVQRHPSHAVTFVDNHDSQPEEALESFVEEWFKPLAYALTLTREQGYPSVFYGDYYGIPTHGVPAMRSKIDPILEARQKYAYGPQHDYLDHPDVIGWTREGDSSHPKSGLATLITDGPGGSKRMYAGLKNAGETWYDITGNRSDTVKIGSDGWGEFHVNDGSVSIYVQK

SEQ ID NO: 29628 - protein, 483 aa, Bacillus sp.
HHNGTNGTMMQYFEWYLPNDGNHWNRLNSDASNLKSKGITAVWIPPAWKGASQNDVGYGAYDLYDLGEFNQKGTVRTKYGTRSQLQAAVTSLKNNGIQVYGDVVMNHKGGADATEMVRAVEVNPNNRNQEVTGEYTIEAWTRFDFPGRGNTHSSFKWRWYHFDGVDWDQSRRLNNRIYKFRGKAWDWEVDTEFGNYDYLMYADYDMDHPEVVNELRNWGVWYTNTLGLDGFRIDAVKHIKYSFTRDWINHVRSATGKNMFAVAEFWKNDLGAIENYLQKTNWNHSVFDVPLHYNLYNASKSSGNYDMRNIFNGTVVQRHPSHAVTFVDNHDSQPEEALESFVDEWFKPLAYALTLTREQGYPSVFYGDYYGIPTHGVPAMRSKIDPILEARQKYAYGPQHDYLDHPDVIGWTREGDSSHPKSGLATLITDGPGGSKRMYAGLKNAGETWYDITGNRSDTVKIGSDGWGEFHVNKQSVSIYVQK

SEQ ID NO: 29629 - protein, 483 aa, Bacillus sp.
HHNGTNGTMMQYFEWYLPNDGNHWNRLNSDASNLKSKGITAVWIPPAWKGASQNDVGYGAYDLYDLGEFNQKGTVRTKYGTRSQLQAAVTSLKNNGIQVYGDVVMNHKGGADATEMVRAVEVNPNNRNQEVTGEYTIEAWTRFDFPGRGNTHSSFKWRWYHFDGVDWDQSRDLQNRIYKFRGKAWDWEVDTEFGNYDYLMYVDYDMDHPEVVNELRNWGVWYTNTLGLDGFRIDAVKHIKYSFTRDWINHVRSATGKNMFAVAEFWKNDLGAIENYLQKTNWNHSVFDVPLHYNLYNASKSGGNYDMRNIFNGTVVQRHPSHAVTFVDNHDSQPEEALESFVETWFKPLAYALTLTREQGYPSVFYGDYYGIPTHGVPAMRSKIDPILEARQKYAYGPQHDYLDHPDVIGWTREGDSSHPKSGLATLITDGPGGSKRMYAGLKNAGETWYDITGNRSDTVKIGSDGWGEFHVNDASVSIYVQK

SEQ ID NO: 29630 - protein, 485 aa, Bacillus sp.
HHNGTNGTMMQYFEWYLPNDGNHWNRLNSDASNLKSKGITAVWIPPAWKGASQNDVGYGAYDLYDLGEFNQKGTVRTKYGTRSQLQAAVTSLKNNGIQVYGDVVMNHKGGADATEMVRAVEVNPNNRNQEVTGEYTIEAWTRFDFPGRGNTHSSFKWRWYHFDGVDWDQSRRLNNRIYKFRGHGKAWDWEVDTEFGNYDYLMYADYDMDHPEVVNELRNWGVWYTNTLGLDGFRIDAVKHIKYSFTRDWINHVRSATGKNMFAVAEFWKNDLGAIENYLQKTNWNHSVFDVPLHYNLYNASKSGGNYDMRNIFNGTVVQRHPSHAVTFVDNHDSQPEEALESFVETWFKPLAYALTLTREQGYPSVFYGDYYGIPTHGVPAMRSKIDPILEARQKYAYGPQHDYLDHPDVIGWTREGDSSHPKSGLATLITDGPGGSKRMYAGLKNAGETWYDITGNRSDTVKIGSDGWGEFHVNKSSVSIYVQK

SEQ ID NO: 29631 - protein, 485 aa, Bacillus sp.
HHNGTNGTMMQYFEWYLPNDGNHWNRLNSDASNLKSKGITAVWIPPAWKGASQNDVGYGAYDLYDLGEFNQKGTVRTKYGTRSQLQAAVTSLKNNGIQVYGDVVMNHKGGADATEMVRAVEVNPNNRNQEVTGEYTIEAWTRFDFPGRGNTHSSFKWRWYHFDGVDWDQSRRLNNRIYKFRGHGKAWDWEVDTEFGNYDYLMYADYDMDHPEVVNELRNWGVWYTNTLGLDGFRIDAVKHIKYSFTRDWINHVRSATGKNMFAVAEFWKNDLGAIENYLQKTNWNHSVFDVPLHYNLYNASKSGGNYDMRNIFNGTVVQRHPSHAVTFVDNHDSQPEEALESFVEPWFKPLAYALTLTREQGYPSVFYGDYYGIPTHGVPAMRSKIDPILEARQKYAYGPQHDYLDHPDVIGWTREGDSSHPKSGLATLITDGPGGSKRMYAGLKNAGETWYDITGNRSDTVKIGSDGWGEFHVNKSSVSIYVQK

SEQ ID NO: 29632 - protein, 483 aa, Synthetic construct
HHNGTNGTMMQYFEWYLPNDGNHWNRLNSDASNLKSKGITAVWIPPAWKGASQNDVGYGAYDLYDLGEFNQKGTVRTKYGTRSQLQAAVTSLKNNGIQVYGDVVMNHKGGADATEMVRAVEVNPNNRNQEVTGEYTIEAWTRFDFPGRGNTHSSFKWRWYHFDGVDWDQSRRLNNRIYLFRGKRWDWPVDTENGNYDYLMYADIDMDHPEVVNELRNWGVWYTNTLGLDGFRIDAVKHIKYSFTRDWINHVRSATGKNMFAVAEFWKNDLGAIENYLQKTNWNHSVFDVPLHYNLYNASKSGGNYDMRNIFNGTVVQRHPSHAVTFVDNHDSQPEEALESFVEEWFKPLAYALTLTREQGYPSVFYGDYYGIPTHGVPAMRSKIDPILEARQKYAYGPQHDYLDHPDVIGWTREGDSSHPKSGLATLITDGPGGSKRMYAGLKNAGETWYDITGNRSDTVKIGSDGWGEFHVNDGSVSIYVQK

SEQ ID NO: 29633 - protein, 485 aa, Synthetic construct
HHNGTNGTMMQYFEWYLPNDGNHWNRLNSDASNLKSKGITAVWIPPAWKGASQNDVGYGAYDLYDLGEFNQKGTVRTKYGTRSQLQAAVTSLKNNGIQVYGDVVMNHKGGADATEMVRAVEVNPNNRNQEVTGEYTIEAWTRFDFPGRGNTHSSFKWRWYHFDGVDWDQSRRLNNRIYKFRGHGKAWDWEVDTENGNYDYLMYADIDYDHPESVNEMRNWGVWYTNTLGLDGFRIDAVKHIKYSFTRDWINHVRSATGKNMFAVAEFWKNDLGAIENYLQKTNWNHSVFDVPLHYNLYNASKSGGNYDMRNIFNGTVVQRHPSHAVTFVDNHDSQPEEALESFVEEWFKPLAYALTLTREQGYPSVFYGDYYGIPTHGVPAMRSKIDPILEARQKYAYGPQHDYLDHPDVIGWTREGDSSHPKSGLATLITDGPGGSKRMYAGLKNAGETWYDITGNRSDTVKIGSDGWGEFHVNDGSVSIYVQK

SEQ ID NO: 29634 - protein, 485 aa, Bacillus sp.
HHNGTNGTMMQYFEWYLPNDGNHWNRLNSDASNLKSKGITAVWIPPAWKAASQNDVGYGAYDLYDLGEFNQKGTVRTKYGTRSQLQAAVTSLKNNGIQVYGDVVMNHKGGADATEMVRAVEVNPNNRNQEVTGEYTIEAYTRFDFPGRGNTHSSFKWRWYHFDGVDWDQSRNLTNRIYKFRGHGKAWDWEVDTEFGNYDYLMYADYDMDHPEVVNELRNWGVWYTNTLGLDGFRIDAVKHIKYSFTRDWINHVRSATGKNMFAVAEFWKNDLGAIENYLQKTNWNHSVFDVPLHYNLYNASKSGGNYDMRNIFNGTVVQRHPSHAVTFVDNHDSQPEEALESFVEEWFKPLAYALTLTREQGYPSVFYGDYYGIPTHGVPAMRSKIDPILEARQKYAYGPQHDYLDHPDVIGWTREGDSSHPKSGLATLITDGPGGSKRMYAGLKNAGETWYDITGNRSDTVKIGSDGWGEFHVNDGSVSIYVQK

SEQ ID NO: 29635 - protein, 485 aa, Bacillus sp.
HHNGTNGTMMQYFEWYLPNDGNHWNRLNSDASNLKSKGITAVWIPPAWKAVSQNDVGYGAYDLYDLGEFNQKGTVRTKYGTRSQLQAAVTSLKNNGIQVYGDVVMNHKGGADATEMVRAVEVNPNNRNQEVTGEYTIEAWTRFDFPGRGNTHSSFKWRWYHFDGVDWDQSRDFQNRIYKFRGHGKAWDWEVDTEFGNYDYLMYTDYDMDHPEVVNELRNWGVWYTNTLGLDGFRIDAVKHIKYSFTRDWINHVRSATGKNMFAVAEFWKNDLGAIENYLQKTNWNHSVFDVPLHYNLYNASKSQGNYDMRNIFNGTVVQRHPSHAVTFVDNHDSQPEEALESFVDTWFKPLAYALTLTREQGYPSVFYGDYYGIPTHGVPAMRSKIDPILEARQKYAYGPQHDYLDHPDVIGWTREGDSSHPKSGLATLITDGPGGSKRMYAGLKNAGETWYDITGNRSDTVKIGSDGWGEFHVNGSSVSIYVQK

SEQ ID NO: 29636 - protein, 485 aa, Bacillus sp.
HHNGTNGTMMQYFEWYLPNDGNHWNRLNSDASNLKSKGITAVWIPPAWKGASQNDVGYGAYDLYDLGEFNQKGTVRTKYGTRSQLQAAVTSLKNNGIQVYGDVVMNHKGGADATEMVRAVEVNPNNRNQEVTGEYTIEAWTRFDFPGRGNTHSSFKWRWYHFDGVDWDQSRRLNNRIYKFRGHGKAWDWEVDTEFGNYDYLMYADYDMDHPEVVNELRNWGVWYTNTLGLDGFRIDAVKHIKYSFTRDWINHVRSATGKNMFAVAEFWQNDLGGIENYLQKTNWNHSVFDVPLHYNLYNASKSGGNYDMRNIFNGTVVQRHPSHAVTFVDNHDSQPEEALESFVEEWFKPLAYALTLTREQGYPSVFYGDYYGIPTHGVPAMRSKIDPILEARQKYAYGPQHDYLDHPDVIGWTREGDSSHPKSGLATLITDGPGGSKRMYAGLKNAGETWYDITGNRSDTVKIGSDGWGEFHVNDGSVSIYVQK

SEQ ID NO: 29637 - protein, 485 aa, Bacillus sp.
HHNGTNGTMMQYFEWYLPNDGNHWNRLNSDASNLKSKGITAVWIPPAWKGASQNDVGYGAYDLYDLGEFNQKGTVRTKYGTRSQLQAAVTSLKNNGIQVYGDVVMNHKGGADATEMVRAVEVNPNNRNQEVTGEYTIEAWTRFDFPGRGNTHSSFKWRWYHFDGVDWDQSRRLNNRIYKFRGHGKAWDWEVDTEFGNYDYLMYADYDMDHPEVVNELRNWGVWYTNTLGLDGFRIDAVKHIKYSFTRDWINHVRSATGKNMFAVAEFWKNDLGAIENYLQKTNWNHSVFDVPLHYNLYNASKSGGNYDMRNIFNGTVVQRHPSHAVTFVDNHDSQPEEALESFVETWFKPLAYALTLTREQGYPSVFYGDYYGIPTHGVPAMRSKIDPILEARQKYAYGPQHDYLDHPDVIGWTREGDSSHPKSGLATLITDGPGGSKRMYAGLKNAGETWYDITGNRSDTVKIGSDGWGEFHVNKQSVSIYVQK

SEQ ID NO: 29638 - protein, 485 aa, Bacillus sp.
HHNGTNGTMMQYFEWYLPNDGNHWNRLNSDASNLKSKGITAVWIPPAWKAASQNDVGYGAYDLYDLGEFNQKGTVRTKYGTRSQLQAAVTSLKNNGIQVYGDVVMNHKGGADATEMVRAVEVNPNNRNQEVTGEYTIEAWTRFDFPGRGNTHSSFKWRWYHFDGVDWDQSRTLSNRIYKFRGHGKAWDWEVDTEFGNYDYLMYADYDMDHPEVVNELRNWGVWYTNTLGLDGFRIDAVKHIKYSFTRDWINHVRSATGKNMFAVAEFWKNDLGAIENYLQKTNWNHSVFDVPLHYNLYNASKSGGNYDMRNIFNGTVVQRHPSHAVTFVDNHDSQPEEALESFVETWFKPLAYALTLTREQGYPSVFYGDYYGIPTHGVPAMRSKIDPILEARQKYAYGPQHDYLDHPDVIGWTREGDSSHPKSGLATLITDGPGGSKRMYAGLKNAGETWYDITGNRSDTVKIGSDGWGEFHVNDGSVSIYVQK

SEQ ID NO: 29639 - protein, 485 aa, Bacillus sp.
HHNGTNGTMMQYFEWYLPNDGNHWNRLNSDASNLKSKGITAVWIPPAWKAASQNDVGYGAYDLYDLGEFNQKGTVRTKYGTRSQLQAAVTSLKNNGIQVYGDVVMNHKGGADATEMVRAVEVNPNNRNQEVTGEYTIEAWTRFDFPGRGNTHSSFKWRWYHFDGVDWDQSRRTSNRIYKFRGHGKAWDWEVDTEFGNYDYLMYVDYDMDHPEVVNELRNWGVWYTNTLGLDGFRIDAVKHIKYSFTRDWINHVRSATGKNMFAVAEFWKNDLGAIENYLQKTNWNHSVFDVPLHYNLYNASKSGGNYDMRNIFNGTVVQRHPSHAVTFVDNHDSQPEEALESFVEEWFKPLAYALTLTREQGYPSVFYGDYYGIPTHGVPAMRSKIDPILEARQKYAYGPQHDYLDHPDVIGWTREGDSSHPKSGLATLITDGPGGSKRMYAGLKNAGETWYDITGNRSDTVKIGSDGWGEFHVNDGSVSIYVQK

SEQ ID NO: 29640 - protein, 483 aa, Bacillus sp.
HHNGTNGTMMQYFEWYLPNDGNHWNRLNSDASNLKSKGITAVWIPPAWKGASQNDVGYGAYDLYDLGEFNQKGTVRTKYGTRSQLQAAVTSLKNNGIQVYGDVVMNHKGGADATEMVRAVEVNPNNRNQEVTGEYTIEAWTRFDFPGRGNTHSSFKWRWYHFDGVDWDQSRRLNNRIYKFRGKAWDWEVDTEFGNYDYLMYADYDMDHPEVVNELRNWGVWYTNTLGLDGFRIDAVKHIKYSFTRDWINHVRSATGKNMFAVAEFWKNDLGAIENYLQKTNWNHSVFDVPLHYNLYNASKSGGNYDMRNIFNGTVVQRHPSHAVTFVDNHDSQPEEALESFVDTWFKPLAYALTLTREQGYPSVFYGDYYGIPTHGVPAMRSKIDPILEARQKYAYGPQHDYLDHPDVIGWTREGDSSHPKSGLATLITDGPGGSKRMYAGLKNAGETWYDITGNRSDTVKIGSDGWGEFHVNKQSVSIYVQK

SEQ ID NO: 29641 - protein, 485 aa, Bacillus sp.
HHNGTNGTMMQYFEWYLPNDGNHWNRLNSDASNLKSKGITAVWIPPAWKAVSQNDVGYGAYDLYDLGEFNQKGTVRTKYGTRSQLQAAVTSLKNNGIQVYGDVVMNHKGGADATEMVRAVEVNPNNRNQEVTGEYTIEAWTRFDFPGRGNTHSSFKWRWYHFDGVDWDQSRNLTNRIYKFRGHGKAWDWEVDTEFGNYDYLMYTDYDMDHPEVVNELRNWGVWYTNTLGLDGFRIDAVKHIKYSFTRDWINHVRSATGKNMFAVAEFWKNDLGAIENYLQKTNWNHSVFDVPLHYNLYNASKSGGNYDMRNIFNGTVVQAHPNHAVTFVDNHDSQPEEALESFVEEWFKPLAYALTLTREQGYPSVFYGDYYGIPTHGVPAMRSKIDPILEARQKYAYGPQHDYLDHPDVIGWTREGDSSHPKSGLATLITDGPGGSKRMYAGLKNAGETWYDITGNRSDTVKIGSDGWGEFHVNDGSVSIYVQK

SEQ ID NO: 29642 - protein, 485 aa, Bacillus sp.
HHNGTNGTMMQYFEWYLPNDGNHWNRLNSDASNLKSKGITAVWIPPAWKATSQNDVGYGAYDLYDLGEFNQKGTVRTKYGTRSQLQAAVTSLKNNGIQVYGDVVMNHKGGADATEMVRAVEVNPNNRNQEVTGEYTIEAWTRFDFPGRGNTHSSFKWRWYHFDGVDWDQSRELNNRIYKFRGHGKAWDWEVDTEFGNYDYLMYTDYDMDHPEVVNELRNWGVWYTNTLGLDGFRIDAVKHIKYSFTRDWINHVRSATGKNMFAVAEFWKNDLGAIENYLQKTNWNHSVFDVPLHYNLYNASKSGGNYDMRNIFNGTVVQRHPSHAVTFVDNHDSQPEEALESFVDEWFKPLAYALTLTREQGYPSVFYGDYYGIPTHGVPAMRSKIDPILEARQKYAYGPQHDYLDHPDVIGWTREGDSSHPKSGLATLITDGPGGSKRMYAGLKNAGETWYDITGNRSDTVKIGSDGWGEFHVNKSSVSIYVQK

SEQ ID NO: 29643 - protein, 485 aa, Bacillus sp.
HHNGTNGTMMQYFEWYLPNDGNHWNRLNSDASNLKSKGITAVWIPPAWKGASQNDVGYGAYDLYDLGEFNQKGTVRTKYGTRSQLQAAVTSLKNNGIQVYGDVVMNHKGGADATEMVRAVEVNPNNRNQEVTGEYTIEAWTRFDFPGRGNTHSSFKWRWYHFDGVDWDQSRRLNNRIYKFRGHGKAWDWEVDTEFGNYDYLMYADYDMDHPEVVNELRNWGVWYTNTLGLDGFRIDAVKHIKYSFTRDWINHVRSATGKNMFAVAEFWQNDLGYIENYLQKTNWNHSVFDVPLHYNLYNASKSGGNYDMRNIFNGTVVQRHPSHAVTFVDNHDSQPEEALESFVEEWFKPLAYALTLTREQGYPSVFYGDYYGIPTHGVPAMRSKIDPILEARQKYAYGPQHDYLDHPDVIGWTREGDSSHPKSGLATLITDGPGGSKRMYAGLKNAGETWYDITGNRSDTVKIGSDGWGEFHVNDGSVSIYVQK

SEQ ID NO: 29644 - protein, 485 aa, Bacillus sp.
HHNGTNGTMMQYFEWYLPNDGNHWNRLDSDASNLKSKGITAVWIPPAWKGASQNDVGYGAYDLYDLGEFNQKGTVRTKYGTRSQLQAAVTSLKNNGIQVYGDVVMNHKSGADATEMVRPVEVNPNNRNQEVTGEYTIEAWTRFDFPGRGNTHSSFKWRWYHFDGVDWDQSRDVSNRIYKFRGHGKAWDWEVDTEFGNYDYLMYADYDMDHPEVVNELRNWGVWYTNTLGLDGFRIDAVKHIKYSFTRDWINHVRSATGKNMFAVAEFWKNDLGAIENYLQKTNWNHSVFDVPLHYNLYNASKSGGNYDMRNIFNGTVVQRHPSHAVTFVDNHDSQPEEALESFVEEWFKPLAYALTLTREQGYPSVFYGDYYGIPTHGVPAMRSKIDPILEARQKYAYGPQHDYLDHPDVIGWTREGDSSHPKSGLATLITDGPGGSKRMYAGLKNAGETWYDITGNRSDTVKIGSDGWGEFHVNDGSVSIYVQK

SEQ ID NO: 29645 - protein, 483 aa, Bacillus sp.
HHNGTNGTMMQYFEWYLPNDGNHWNRLNSDASNLKSKGITAVWIPPAWKAVSQNDVGYGAYDLYDLGEFNQKGTVRTKYGTRSQLQAAVTSLKNNGIQVYGDVVMNHKGGADATEMVRAVEVNPNNRNQEVTGEYTIEAWTRFDFPGRGNTHSSFKWRWYHFDGVDWDQSRDFNNRIYKFRGKAWDWEVDTEFGNYDYLMYADYDMDHPEVVNELRNWGVWYTNTLGLDGFRIDAVKHIKYSFTRDWINHVRSATGKNMFAVAEFWKNDLGAIENYLQKTNWNHSVFDVPLHYNLYNASKSQGNYDMRNIFNGTVVQRHPSHAVTFVDNHDSQPEEALESFVDTWFKPLAYALTLTREQGYPSVFYGDYYGIPTHGVPAMRSKIDPILEARQKYAYGPQHDYLDHPDVIGWTREGDSSHPKSGLATLITDGPGGSKRMYAGLKNAGETWYDITGNRSDTVKIGSDGWGEFHVNGSSVSIYVQK

SEQ ID NO: 29646 - protein, 485 aa, Bacillus sp.
HHNGTNGTMMQYFEWYLPNDGNHWNRLNSDASNLKSKGITAVWIPPAWKGASQNDVGYGAYDLYDLGEFNQKGTVRTKYGTRSQLQAAVTSLKNNGIQVYGDVVMNHKGGADATEMVRAVEVNPNNRNQEVTGEYTIEAWTRFDFPGRGNTHSSFKWRWYHFDGVDWDQSRRLNNRIYLFRGHGKSWDWEVDTEFGNYDYLMYADYDMDHPEVVNELRNWGVWYTNTLGLDGFRIDAVKHIKYSFTRDWINHVRSATGKNMFAVAEFWKNDLGAIENYLQKTNWNHSVFDVPLHYNLYNASKSGGNYDMRNIFNGTVVQRHPSHAVTFVDNHDSQPEEALESFVEEWFKPLAYALTLTREQGYPSVFYGDYYGIPTHGVPAMRSKIDPILEARQKYAYGPQHDYLDHPDVIGWTREGDSSHPKSGLATLITDGPGGSKRMYAGLKNAGETWYDITGNRSDTVKIGSDGWGEFHVNDGSVSIYVQK

SEQ ID NO: 29647 - protein, 477 aa, Bacillus sp.
NGTMMQYFEWDLPNDGTLWNRLHNNAQNLKNAGITALWLPPAYKGTSQSDVGYGVYDLYDLGEFNQKGTIRTKYGTKTQYIQAIQAAKAAGMQVYADVVFNHKAGADQTEFVDAVEVDPSNRNQEVSGTYQIEAWTKFDFPGRGNTYSSFKWRWYHFDGTDWDESRKLNRIYKFRGKAWDWEVDTENGNYDYLMFADLDMDHPEVVTELKNWGTWYVNTTNIDGFRLDAVKHIKFSFMRDWLTYVRNQTGKNLFAVGEFWSYDVNKLHNYITKTNGSMSLFDAPLHNNFYTASKSSGNFDMRNLLNGTLVQRHPSHAVTLVDNHDTQPGQSLQSWVEPWFKPLAYAFILTRQEGYPCVFYGDYYGIPSDGVPGLKSKIDPLLIARRDYAYGTQRDYIDHQDIIGWTREGIDTKPNSGLAALITDGPGGSKWMYVGKKHAGKVFYDLTGNRSDTVTINADGWGEFKVNGGSVSIWVAK

SEQ ID NO: 29648 - protein, 482 aa, Synthetic construct
HHNGTNGTMMQYFEWYLPNDGNHWNRLNSDASNLKSKGITAVWIPPAWKGASQNDVGYGAYDVYDLGFNQKGTVRTKYGTRSQLQAAVTSLKNNGIQVYGDVVMNHKGGADATEMVRAVEVNPNNRNQEVTGEYTIEAWTRFDFPGRGNTHSSFKWRWYHFDGVDWDQSRRLNNRIYKFRGKAWDWEVDTEFGNYDYLMYADYDMDSPEVVNELRNWGVWYTNTLGLDGFRIDAVKHIKYSFTRDWINHVRSATGKNMFAVAEFWKNDLGAIENYLQKTNWNHSVFDVPLHYNLYNASKSGGNYDMRNIFNGTVVQRHPSHAVTFVDNHDSQPEEALESFVEEWFKPLAYALTLTREQGYPSVFYGDYYGIPTHGVPAMRSKIDPILEARQKYAYGPQHDYLDHPDVIGWTREGDSSHPKSGLATLITDGPGGSKRMYAGLKNAGETWYDITGNRSDTVKIGSDGWGEFHVNDGSVSIYVQK

SEQ ID NO: 29649 - protein, 482 aa, Bacillus sp.
HHNGTNGTMQYFEWYLPNDGNHWNRLNSDASNLKSKGITAVWIPPAWKGASQNDVGYGAYDLYDLGEFNQKGTVRTKYGTRSQLQAAVTSLKNNGIQVYGDVVMNHKGGADATEMVKAVEVNPNNRNQEVTGEYTIEAWTRFDFPGRGNTHSSFKWRWYHFDGVDWDQSRRLNNRIYKFRGKAWDWEVDTEFGNYDYLLYADIDMDHPEVVNELRNWGVWYTNTLGLDGFRIDAVKHIKYSFTRDWINHVRSATGKNMFAVAEFWKNDLGAIENYLQKTNWNHSVFDVPLHYNLYNASKSGGNYDMRNIFNGTVVQKHPTHAVTFVDNHDSQPEEALESFVEEWFKPLAYALTLTREQGYPSVFYGDYYGIPTHGVPAMRSKIDPILEARQKYAYGPQHDYIDHPDVIGWTREGDSSAAKSGLAALITDGPGGSKRMYAGLKNAGETWYDITGNKSDTVKIGSDGWGEFHVNDGSVSIYVQK

SEQ ID NO: 29650 - protein, 482 aa, Bacillus sp.
HHNGTNGTMMQYFEWYLPNDGNHWNRLNSDASNLKSKGITAVWIPPAWKAVSQNDVGYGAYDLYDLGEFNQKGTVRTKYGTRSQLQAAVTSLKNNGIQVYGDVVMNHKGGADATEMVRAVEVNPNNRNQEVTGEYTIEAWTRFDFPGRGNTHSSFKWRWYHFDGVDWDQSRQTNRIYKFRGKAWDWEVDTEFGNYDYLMYADYDMDHPEVVNELRNWGVWYTNTLGLDGFRIDAVKHIKYSFTRDWINHVRSATGKNMFAVAEFWKNDLGAIENYLQKTNWNHSVFDVPLHYNLYNASKSGSNYDMRNIFNGTVVQRHPSHAVTFVDNHDSQPEEALESFVEPWFKPLAYALTLTREQGYPSVFYGDYYGIPTHGVPAMRSKIDPILEARQKYAYGPQHDYLDHPDVIGWTREGDSSHPKSGLATLITDGPGGSKRMYAGLKNAGETWYDITGNRSDTVKIGSDGWGEFHVNDTSVSIYVQK

SEQ ID NO: 29651 - protein, 482 aa, Synthetic construct
HHNGTNGTMMQYFEWYLPNDGNHWNRLNSDASNLKSKGITAVWIPPAWKGASQNDVGYGAYDIYDLGFNQKGTVRTKYGTRSQLQAAVTSLKNNGIQVYGDVVMNHKGGADATEMVRAVEVNPNNRNQEVTGEYTIEAWTRFDFPGRGNTHSSFKWRWYHFDGVDWDQSRRLNNRIYKFRGKAWDWEVDTEFGNYDYLMYADYDMDSPEVVNELRNWGVWYTNTLGLDGFRIDAVKHIKYSFTRDWINHVRSATGKNMFAVAEFWKNDLGAIENYLQKTNWNHSVFDVPLHYNLYNASKSGGNYDMRNIFNGTVVQRHPSHAVTFVDNHDSQPEEALESFVEEWFKPLAYALTLTREQGYPSVFYGDYYGIPTHGVPAMRSKIDPILEARQKYAYGPQHDYLDHPDVIGWTREGDSSHPKSGLATLITDGPGGSKRMYAGLKNAGETWYDITGNRSDTVKIGSDGWGEFHVNDGSVSIYVQK

SEQ ID NO: 29652 - protein, 482 aa, Bacillus sp.
HNGTNGTMMQYFEWYLPNDGNHWNRLNSDASNLKSKGITAVWIPPAWKGASQNDVGYGAYDLYDLGEFNQKGTVRTKYGTRSQLQAAVTSLKNNGIQVYGDVVMNHKGGADATEMVRAVEVNPNNRNQEVTGEYTIEAWTRFDFPGRGNTHSSFKWRWYHFDGVDWDQSERLNNRIYKFRGKAWDWEVETEFGNYDYLMYADYDMDHPEVVNELRNWGVWYTNTLGLDGFRIDAVKHIKYSFTRDWINHVRSATGKNMFAVAEFWKNDLGAIENYLQKTNWNHSVFDVPLHYNLYNASKSGGNYDMRNIFNGTVVQRHPSHAVTFVDNHDSQPEEALESFVEEWFKPLAYALTLTREQGYPSVFYGDYYGIPTHGVPAMRSKIDPILEARQKYAYGPQHDYLDHPDVIGWTREGDSSHPKSGLATLITDGPGGSKRMYAGLKNAGETWYDITGNRSDTVKIGSDGWGEFHVNDGSVSIYVQK

SEQ ID NO: 29653 - protein, 484 aa, Bacillus sp.
HNGTNGTMMQYFEWYLPNDGNHWNRLNSDASNLKSKGITAVWIPPAWKGASQNDVGYGAYDLYDLGEFNQKGTVRTKYGTRSQLQAAVTSLKNNGIQVYGDVVMNHKGGADATEMVRAVEVNPNNRNQEVTGEYTIEAWTRFDFPGRGNTHSSFKWRWYHFDGVDWDQSERLNNRIYKFRGHGKAWDWEVETEFGNYDYLMYADYDMDHPEVVNELRNWGVWYTNTLGLDGFRIDAVKHIKYSFTRDWINHVRSATGKNMFAVAEFWKNDLGAIENYLQKTNWNHSVFDVPLHYNLYNASKSGGNYDMRNIFNGTVVQRHPSHAVTFVDNHDSQPEEALESFVEEWFKPLAYALTLTREQGYPSVFYGDYYGIPTHGVPAMRSKIDPILEARQKYAYGPQHDYLDHPDVIGWTREGDSSHPKSGLATLITDGPGGSKRMYAGLKNAGETWYDITGNRSDTVKIGSDGWGEFHVNDGSVSIYVQK

SEQ ID NO: 29654 - protein, 484 aa, Bacillus sp.
HHNGTNGTMMQYFEWYLPNDGNHWNRLNSDASNLKSKGITAVWIPPAWKAVSQNDVGYGAYDLYDLGEFNQKGTVRTKYGTRSQLQAAVTSLKNNGIQVYGDVVMNHKGGADATEMVRAVEVNPNNRNQEVTGEYTIEAWTRFDFPGRGNTHSSFKWRWYHFDGVDWDQSRQTNRIYKFRGHGKAWDWEVDTEFGNYDYLMYADYDMDHPEVVNELRNWGVWYTNTLGLDGFRIDAVKHIKYSFTRDWINHVRSATGKNMFAVAEFWKNDLGAIENYLQKTNWNHSVFDVPLHYNLYNASKSGSNYDMRNIFNGTVVQRHPSHAVTFVDNHDSQPEEALESFVEPWFKPLAYALTLTREQGYPSVFYGDYYGIPTHGVPAMRSKIDPILEARQKYAYGPQHDYLDHPDVIGWTREGDSSHPKSGLATLITDGPGGSKRMYAGLKNAGETWYDITGNRSDTVKIGSDGWGEFHVNDTSVSIYVQK

SEQ ID NO: 29655 - protein, 481 aa, Bacillus licheniformis
VNGTLMQYFEWYTPNDGQHWKRLQNDAEHLSDIGITAVWIPPAYKAISQADVGYGAYDLYDLGEFHQKGTVRTKYGTKGELQSAIKSLHSRDINVYGDVVINHKAGADATEDVTAVEVDPADRNRVISGEHLIKAWTHFHFPGRGSTYSDFKWYWYHFDGTDWDESRKLNRIYLFQGKTWDWPVSNEFGNYDYLMYADFDYDHPDVVAEIKRWGTWYANELQLDGFRLDAVKHIKFSFLRDWVNHVREKTGKEMFTVAEYWSNDLGALENYLNKTNFNHSVFDVPLHYQFHAASTQGGGYDMRKLLNGTVVSKHPWKSVTFVDNHDTQPGQSLESTVQTWFKPLAYAFILTRESGYPQVFYGDMYGTKGDSQREIPALKHKIEPILKARKQYAYGAQHDYFDHHDIVGWTREGDSSVANSGLAALITDGPGGAKRMYVGRQNAGETWHDITGNRSEPVVINSEGWGEFHVNGGSVSIYVQR

SEQ ID NO: 29656 - protein, 481 aa, Bacillus licheniformis
VNGTLMQYFEWYTPNDGQHWKRLQNDAEHLSDIGITAVWIPPAYKAISQADVGYGAYDLYDLGEFHQKGTVRTKYGTKGELQSAIKSLHSRDINVYGDVVINHKAGADATEDVTAVEVDPADRNRVISGEHLIKAWTHFHFPGRGSTYSDFKWYWYHFDGTDWDESRKLNRIYLFQGKTWDWPVSNEFGNYDYLMYADFDYDHPDVVAEIKRWGTWYANELQLDGFRLDAVKHIKFSFLRDWVNHVREKTGKEMFTVAEYWSNDLGALENYLNKTNFNHSVFDVPLHYQFHAASTQGGGYDMRKLLNGTVVSKHPLKSVTFVDNHDTQPGQSLESTVQTWFKPLAYAFILTRESGYPQVFYGDMYGTKGDSQREIPALKHKIEPILKARKQYAYGAQHDYFDHHDIVGWTREGDSSVANSGLAALITDGPGGAKRMYVGRQNAGETWWDITGNRSEPVVINSEGWGEFHVNGGSVSIYVQR

SEQ ID NO: 29657 - protein, 481 aa, Bacillus amyloliquefaciens
VNGTLMQYFEWYTPNDGQHWKRLQNDAEHLSDIGITAVWIPPAYKATSQADVGYGAYDLYDLGEFHQKGTVRTKYGTKGELQSAIKSLHSRDINVYGDVVINHKAGADATEDVTAVEVDPADRNRVISGEHLIKAWTHFHFPGRGSTYSDFKWYWYHFDGTDWDESRKLNRIYLFQGKTWDWPVSNEFGNYDYLMYADFDYDHPDVVAEIKRWGTWYANELQLDGFRLDAVKHIKFSFLRDWVNHVREKTGKEMFTVAEYWSNDLGALENYLNKTNFNHSVFDVPLHYQFHAASTQGGGYDMRKLLNGTVVSKHPLKSVTFVDNHDTQPGQSLESTVQTWFKPLAYAFILTRESGYPQVFYGDMYGTKGDSQREIPALKHKIEPILKARKQYAYGAQHDYFDHHDIVGWTREGDSSVANSGLAALITDGPGGAKRMYVGRQNAGETWHDITGNRSEPVVINSEGWGEFHVNGGSVSIYVQR

SEQ ID NO: 29658 - protein, 481 aa, Bacillus licheniformis
VNGTLMQYFEWYTPNDGQHWKRLQNDAEHLSDIGITAVWIPPAYKAHSQADVGYGAYDLYDLGEFHQKGTVRTKYGTKGELQSAIKSLHSRDINVYGDVVINHKAGADATEDVTAVEVDPADRNRVISGEHLIKAWTHFHFPGRGSTYSDFKWYWYHFDGTDWDESRKLNRIYLFQGKTWDWPVSNEFGNYDYLMYADFDYDHPDVVAEIKRWGTWYANELQLDGFRLDAVKHIKFSFLRDWVNHVREKTGKEMFTVAEYWSNDLGALENYLNKTNFNHSVFDVPLHYQFHAASTQGGGYDMRKLLNGTVVSKHPLKSVTFVDNHDTQPGQSLESTVQTWFKPLAYAFILTRESGYPQVFYGDMYGTKGDSQREIPALKHKIEPILKARKQYAYGAQHDYFDHHDIVGWTREGDSSVANSGLAALITDGPGGAKRMYVGRQNAGETWHDITGNRSEPVVINSEGWGEFHVNGGSVSIYVQR

SEQ ID NO: 29659 - protein, 481 aa, Bacillus amyloliquefaciens
VNGTLMQYFEWYTPNDGQHWKRLQNDAEHLSDIGITAVWIPPAYKAISQADVGYGAYDLYDLGEFWQKGTVRTKYGTKGELQSAIKSLHSRDINVYGDVVINHKAGADATEDVTAVEVDPADRNRVISGEHLIKAWTHFHFPGRGSTYSDFKWYWYHFDGTDWDESRKLNRIYLFQGKTWDWPVSNEFGNYDYLMYADFDYDHPDVVAEIKRWGTWYANELQLDGFRLDAVKHIKFSFLRDWVNHVREKTGKEMFTVAEYWSNDLGALENYLNKTNFNHSVFDVPLHYQFHAASTQGGGYDMRKLLNGTVVSKHPLKSVTFVDNHDTQPGQSLESTVQTWFKPLAYAFILTRESGYPQVFYGDMYGTKGDSQREIPALKHKIEPILKARKQYAYGAQHDYFDHHDIVGWTREGDSSVANSGLAALITDGPGGAKRMYVGRQNAGETWHDITGNRSEPVVINSEGWGEFHVNGGSVSIYVQR

SEQ ID NO: 29660 - protein, 481 aa, Bacillus amyloliquefaciens
VNGTLMQYFEWYTPNDGQHWKRLQNDAEHLSDIGITAVWIPPAYKAISQADVGYGAYDLYDLGEFHQKGTVRTKYGTKGELQSAIKSLHSRDINVYGDVVINHKAGADATEDVTAVEVDPADRNRVISGEHLIKAWTHFHFPGRGSTYSDFKWYWYHFDGTDWDESRKLNRIYLFQGKTWDWPVSNEFGNYDYLMYADFDYDHPDVVAEIKRWGTWYANELQLDGFRLDAVKHIKFSFLRDWVNHVREKTGKEMFTVAEYWSNDLGALENYLNKTNFNHSVFDVPLHYQFHAASTQGGGYDMRKLLNGTVVSKHPLKSVTFVDNHDTQPGQSLESTVQTWFKPLAYAFILTRESGYPQVFYGDMYGTKGDSQGEIPALKHKIEPILKARKQYAYGAQHDYFDHHDIVGWTREGDSSVANSGLAALITDGPGGAKRMYVGRQNAGETWHDITGNRSEPVVINSEGWGEFHVNGGSVSIYVQR

SEQ ID NO: 29661 - protein, 481 aa, Bacillus licheniformis
VNGTLMQYFEWYTPNDGQHWKRLQNDAEHLSDIGITAVWIPPAYKAISQADVGYGAYDLYDLGEFHQKGTVRTKYGTKGELQSAIKSLHSRDINVYGDVVINHKAGADATEDVTAVEVDPADRNRVISGEHLIKAWTHFWFPGRGSTYSDFKWYWYHFDGTDWDESRKLNRIYLFQGKTWDWPVSNEFGNYDYLMYADFDYDHPDVVAEIKRWGTWYANELQLDGFRLDAVKHIKFSFLRDWVNHVREKTGKEMFTVAEYWSNDLGALENYLNKTNFNHSVFDVPLHYQFHAASTQGGGYDMRKLLNGTVVSKHPLKSVTFVDNHDTQPGQSLESTVQTWFKPLAYAFILTRESGYPQVFYGDMYGTKGDSQREIPALKHKIEPILKARKQYAYGAQHDYFDHHDIVGWTREGDSSVANSGLAALITDGPGGAKRMYVGRQNAGETWHDITGNRSEPVVINSEGWGEFHVNGGSVSIYVQR

SEQ ID NO: 29662 - protein, 481 aa, Bacillus licheniformis
VNGTLMQYFEWYTPNDGQHWKRLQNDAEHLSDIGITAVWIPPAYKAGSQADVGYGAYDLYDLGEFHQKGTVRTKYGTKGELQSAIKSLHSRDINVYGDVVINHKAGADATEDVTAVEVDPADRNRVISGEHLIKAWTHFHFPGRGSTYSDFKWYWYHFDGTDWDESRKLNRIYLFQGKTWDWPVSNEFGNYDYLMYADFDYDHPDVVAEIKRWGTWYANELQLDGFRLDAVKHIKFSFLRDWVNHVREKTGKEMFTVAEYWSNDLGALENYLNKTNFNHSVFDVPLHYQFHAASTQGGGYDMRKLLNGTVVSKHPLKSVTFVDNHDTQPGQSLESTVQTWFKPLAYAFILTRESGYPQVFYGDMYGTKGDSQREIPALKHKIEPILKARKQYAYGAQHDYFDHHDIVGWTREGDSSVANSGLAALITDGPGGAKRMYVGRQNAGETWHDITGNRSEPVVINSEGWGEFHVNGGSVSIYVQR

SEQ ID NO: 29663 - protein, 481 aa, Bacillus licheniformis
VNGTLMQYFEWYTPNDGQHWKRLQNDAEHLSDIGITAVWIPPAYKAISQADVGYGAYDLYDLGEFHQKGTVRTKYGTKGELQSAIKSLHSRDINVYGDVVINHKAGADATEDVTAVEVDPADRNRVISGEHLIKAWTHFHFPGRGSTYSDFKWYWYHFDGTDWDESRKLNRIYLFQGKTWDWPVSNEFGNYDYLMYADFDYDHPDVVAEIKRWGTWYANELQLDGFRLDAVKHIKFSFLRDWVNHVREKTGKEMFTVAEYWSNDLGALENYLNKTNFNHSVFDVPLHYQFHAASTQGGGYDMRKLLNGTVVSKHPLKSVTFVDNHDTQPGQSLESTVQTWFKPLAYAFILTRESGYPQVFYGDMYGTKGDSQVEIPALKHKIEPILKARKQYAYGAQHDYFDHHDIVGWTREGDSSVANSGLAALITDGPGGAKRMYVGRQNAGETWHDITGNRSEPVVINSEGWGEFHVNGGSVSIYVQR

SEQ ID NO: 29664 - protein, 481 aa, Bacillus amyloliquefaciens
VNGTLMQYFEWYTPNDGQHWKRLQNDAEHLSDIGITAVWIPPAYKALTQADVGYGAYDLYDLGEFHQKGTVRTKYGTKGELQSAIKSLHSRDINVYGDVVINHKAGADATEDVTAVEVDPADRNRVISGEHLIKAWTHFHFPGRGSTYSDFKWYWYHFDGTDWDESRKLNRIYLFQGKTWDWPVSNEFGNYDYLMYADFDYDHPDVVAEIKRWGTWYANELQLDGFRLDAVKHIKFSFLRDWVNHVREKTGKEMFTVAEYWSNDLGALENYLNKTNFNHSVFDVPLHYQFHAASTQGGGYDMRKLLNGTVVSKHPLKSVTFVDNHDTQPGQSLESTVQTWFKPLAYAFILTRESGYPQVFYGDMYGTKGDSQREIPALKHKIEPILKARKQYAYGAQHDYFDHHDIVGWTREGDSSVANSGLAALITDGPGGAKRMYVGRQNAGETWHDITGNRSEPVVINSEGWGEFHVNGGSVSIYVQR

SEQ ID NO: 29665 - protein, 481 aa, Bacillus amyloliquefaciens
VNGTLMQYFEWYTPNDGQHWKRLQNDAEHLSDIGITAVWIPPAYKAISQADVGYGAYDLYDLGEFWQKGTVRTKYGTKGELQSAIKSLHSRDINVYGDVVINHKAGADATEDVTAVEVDPADRNRVISGEHLIKAWTHFHFPGRGSTYSDFKWWWYHFDGTDWDESRKLNRIYLFQGKTWDWPVSNEFGNYDYLMYADFDYDHPDVVAEIKRWGTWYANELQLDGFRLDAVKHIKFSFLRDWVNHVREKTGKEMFTVAEYWSNDLGALENYLNKTNFNHSVFDVPLHYQFHAASTQGGGYDMRKLLNGTVVSKHPLKSVTFVDNHDTQPGQSLESTVQTWFKPLAYAFILTRESGYPQVFYGDMYGTKGDSQREIPALKHKIEPILKARKQYAYGAQHDYFDHHDIVGWTREGDSSVANSGLAALITDGPGGAKRMYVGRQNAGETWHDITGNRSEPVVINSEGWGEFHVNGGSVSIYVQR

SEQ ID NO: 29666 - protein, 481 aa, Bacillus licheniformis
LNGTLMQYFEWYTPNDGQHWKRLQNDSAYLAEHGITAVWIPPAYKGTSQADVGYGAYDLYDLGEFHQKGTVRTKYGTKGELQSAIKSLHSRDINVYGDVVINHKGGADATEDVTAVEVDPADRNRVISGEYLIKAWTHFHFPGRGSTYSDFKWHWYHFDGTDWDESRKLNRIYKFQGKAWDWEVSSENGNYDYLMYADIDYDHPDVVSEIKRWGTWYANELQLDGFRLDAVKHIKFSFLRDWVNHVREKTGKEMFTVAEYWQNDLGALENYLNKTNFNHSVFDVPLHYQFHAASTQGGGYDMRKLLNGTVVSKHPLKSVAFVDNHDTQPGQSLESTVQTWFKPLAYAFILTRESGYPQVFYGDMYGTKGDSQREIPSLKHKIEPILKARKQYAYGAQHDYFDHHDIVGWTREGDSSVANSGLAALITDGPGGAKRMYVGRQNAGETWHDITGNRSEPVVINSEGWGEFHVNGGSVSIYVQR

SEQ ID NO: 29667 - protein, 481 aa, Bacillus licheniformis
VNGTLMQYFEWYTPNDGQHWKRLQNDAEHLSDIGITAVWIPPAYKAISQADVGYGAYDLYDLGEFHQKGTVRTKYGTKGELQSAIKSLHSRDINVYGDVVINHKAGADATEDVTAVEVDPADRNRVISGEHLIKAWTHFHFPGRGSTYSDFKWYWYHFDGTDWDESRKLNRIYLFQGKTWDWPVSNEFGNYDYLMYADFDYDHPDVVAEIKRWGTWYANELQLDGFRLDAVKHIKFSFLRDWVNHVREKTGKEMFTVAEYWSNDLGALENYLNKTNFNHSVFDVPLHYQFHAASTQGGGYDMRKLLNGTVVSKHPLKSVTFVDNHDTQPGQSLESTVQTWFKPLAYAFILTRESGYPQVFYGDMYGTKGDSQREIPALKHKIEPILKARKQYAYGAQHDYFDHHDIVGWTREGDSSVANSGLAALITDGPGGAKRMYVGRQNAGETWHDITGNRSEPVVINSEGWGEFHVNGGSVSIYVQR

SEQ ID NO: 29668 - protein, 481 aa, Bacillus licheniformis
LNGTLMQYFEWYTPNDGQHWKRLQNDSAYLAEHGITAVWIPPAYKGTSQADVGYGAYDLYDLGEFHQKGTVRTKYGTKGELQSAIKSLHSRDINVYGDVVINHKGGADATEDVTAVEVDPADRNRVISGEYLIKAWTHFHFPGRGSTYSDFKWHWYHFDGTDWDESRKLNRIYKFQGKAWDWEVSSENGNYDYLMYADIDYDHPDVVAEIKRWGTWYANELQLDGFRLDAVKHIKFSFLRDWVNHVREKTGKEMFTVAEYWQNDLGALENYLNKTNFNHSVFDVPLHYQFHAASTQGGGYDMRKLLNGTVVSKHPLKSVTFVDNHDTQPGQSLESTVQTWFKPLAYAFILTRESGYPQVFYGDMYGTKGDSQREIPALKHKIEPILKARKQYAYGAQHDYFDHHDIVGWTREGDSSVANSGLAALITDGPGGAKWMYVGRQNAGETWHDITGNRSEPVVINSEGWGEFHVNGGSVSIYVQR

SEQ ID NO: 29669 - protein, 481 aa, Bacillus licheniformis
LNGTLMQYFEWYTPNDGQHWKRLQNDSAYLAEHGITAVWIPPAYKGTSQADVGYGAYDLYDLGEFHQKGTVRTKYGTKGELQSAIKSLHSRDINVYGDVVINHKGGADATEDVTAVEVDPADRNRVISGEYLIKAWTHFHFPGRGSTYSDFKWHWYHFDGTDWDESRKLNRIYKFQGKAWDWEVSSENGNYDYLMYADIDYDHPDVAAEIKRWGTWYANELQLDGFRLDAVKHIKFSFLRDWVNHVREKTGKEMFTVAEYWQNDLGALENYLNKTNFNHSVFDVPLHYQFHAASTQGGGYDMRKLLNGTVVSKHPLKSVTFVDNHDTQPGQSLESTVQTWFKPLAYAFILTRESGYPQVFYGDMYGTKGDSQREIPALKHKIEPILKARKQYAYGAQHDYFDHHDIVGWTREGDSSVANSGLAALITDGPGGAKRMYVGRQNAGETWHDITGNRSEPVVINSEGWGEFHVNGGSVSIYVQR

SEQ ID NO: 29670 - protein, 481 aa, Bacillus licheniformis
LNGTLMQYFEWYTPNDGQHWKRLQNDSAYLAEHGITAVWIPPAYKGTSQADVGYGAYDLYDLGEFHQKGTVRTKYGTKGELQSAIKSLHSRDINVYGDVVINHKGGADATEDVTAVEVDPADRNRVISGEHLIKAWTHFHFPGRGSTYSDFKWHWYHFDGTDWDESRKLNRIYKFQGKAWDWEVSSENGNYDYLMYADIDYDHPDVVAEIKRWGTWYANELQLDGFRLDAVKHIKFSFLRDWVNHVREKTGKEMFTVAEYWQNDLGALENYLNKTNFNHSVFDVPLHYQFHAASTQGGGYDMRKLLNGTVVSKHPLKSVTFVDNHDTQPGQSLESTVQTWFKPLAYAFILTRESGYPQVFYGDMYGTKGDSQREIPALKHKIEPILKARKQYAYGAQHDYFDHHDIVGWTREGDSSVANSGLAALITDGPGGAKRMYVGRQNAGETWHDITGNRSEPVVINSEGWGEFHVNGGSVSIYVQR

SEQ ID NO: 29671 - protein, 480 aa, Bacillus sp.
APINETMMQYFEWDLPNDGTLWNRLHNNAQNLKNAGITALWLPPAYKGTSQSDVGYGVYDLYDLGEFNQKGTIRTKYGTKTQYIQAIQAAKAAGMQVYADVVFNHKAGADGTEFVDAVEVDPSNRNQEVSGTYQIEAWTKFDFPGRGNTYSSFKWRWYHFDGTDWDESRKLNRIYKFRGKAWDWEVDTENGNYDYLMFADLDMDHPEVVTELKNWGTWYVNTTNIDGFRLDAVKHIKYSFFPDWLTYVRNQTGKNLFAVGEFWKNDLGALENYITKTNGSMSLFDAPLHNNFYTASKSSGYFDMRNLLNGTLVQRHPSHAVTLVDNHDTQPGQSLQSWVEPWFKPLAYAFILTRQEGYPCVFYGDYYGIPKYNIPGLKSKIDPLLIARRDYAYGTQRDYIDHQDIIGWTREGIDTKPNSGLAALITDGPGGSKWMYVGKKHAGKVFYDLTGNRSDTVTINADGWGEFKVNGGSVSIWVAK

SEQ ID NO: 29672 - protein, 480 aa, Geobacillus stearothermophilus
NGTLMQYFEWYTPNDGQHWKRLQNDSAYLAEHGITAVWIPPAYKGTSQADVGYGAYDLYDLGEFHQKGTVRTKYGTKGELQSAIKSLHSRDINVYGDVVINHKGGADATEDVTAVEVDPADRNRVISGEYLIKAWTHFHFPGRGSTYSDFKWHWYHFDGTDWDESRKLNRIYKFQGKAWDWEVDTENGNYDYLMYADIDYDHPDVVAEIKRWGTWYANELQLDGFRLDAVKHIKFSFLRDWVNHVREKTGKEMFTVGEYWSYDINKLHNYITKTNGTMSLFDAPLHNKFYTASKSGGAFDMRTLMTNTLMKDQPTLAVTFVDNHDTEPGQALQSWVDPWFKPLAYAFILTRQEGYPCVFYGDYYGIPQYNIPSLKSKIDPLLIARRDYAYGTQHDYLDHSDIIGWTREGVTEKPGSGLAALITDGPGGSKWMYVGKQHAGKVFYDLTGNRSDTVTINSDGWGEFKVNGGSVSVWVPRKTT

SEQ ID NO: 29673 - protein, 485 aa, Bacillus sp.
HHNGTNGTMMQYFEWYLPNDGNHWNRLNSDASNLKSKGIKAVWIPPAWKGASQNDVGYGAYDLYDLGEFNQRGTVRTKYGTRSQLQAAVTSLKNNGIQVYGDVVMNHKGGADATEMVRAVEVNPNNRNQEVTGEYTIEAWTRFDFPGRGNTHSSFKWRWYHFDGVDFDQSRRLNNRIYKFRGHGKAWDWEVDTEFGNYDYLMYADYDMDHPEVVNELRNWGVWYTNTLGLDGFRIDAVKHIKYSFTRDWINHVRSATGKNMFAVAEFWKNDLGAIENYLQKTNWNHSVFDVPLHYNLYNASKSGGNYDMRNIFNGTVVQRHPSHAVTFVDNHDSQPEEALESFVEEWFKPLAYALTLTREQGYPSVFYGDYYGIPTHGVPAMRSKIDPILEARQKYAYGPQHDYLDHPDVIGWTREGDSSHPKSGLATLITDGPGGSKRMYAGLKNAGETWYDITGNRSDTVKIGSDGWGEFHVNDGSVSIYVQK

SEQ ID NO: 29674 - protein, 485 aa, Bacillus sp.
HHNGTNGTMMQYFEWYLPNDGNHWNRLNSDASNLKSKGITAVWIPPAWKGASQNDVGYGAYDLYDLGEFNQKGTVRTKYGTRSQLQAAVTSLKNNGIQVYGDVVMNHKGGADATEMVRAVEVNPNNRNQEVTGEYTIEAWTRFDFPGRGNTHSSFKWRWYHFDGVDWDQSRRLNNRIYKFRGHGKAWDWEVDTEFGNYDYLMYADYDMDHPEVVNELRNWGVWYTNTLGLDGFRIDAVKHIKYSFTRDWINHVRSATGKNMFAVAEFWKNDLGAIENYLQKTNWNHSVFDVPLHYNLYNASKSAGNYDMRNIFNGTVVQRHPSHAVTFVDNHDSQPEEALESFVDPWFKPLAYALTLTREQGYPSVFYGDYYGIPTHGVPAMRSKIDPILEARQKYAYGPQHDYLDHPDVIGWTREGDSSHPKSGLATLITDGPGGSKRMYAGLKNAGETWYDITGNRSDTVKIGSDGWGEFHVNQSSVSIYVQK

SEQ ID NO: 29675 - protein, 483 aa, Bacillus sp.
HHNGTNGTIMQYFEWYLPNDGNHWNRLNSDASNLKSKGITAVWIPPAWKGASQNDVGYGAYDLYDLGEFNQKGTVRTKYGTRSQLQAAVTSLKNNGIQVYGDVVMNHKGGADATEMVKAVEVNPNNRNQEVTGEYTIEAWTRFDFPGRGNTHSSFKWRWYHFDGVDWDQSRRLNNRIYKFRGKAWDWEVDTEFGNYDYLLYADIDMDHPEVVNELRNWGVWYTNTLGLDGFRIDAVKHIKYSFTRDWINHVRSATGKNMFAVAEFWKNDLGAIENYLQKTNWNHSVFDVPLHYNLYNASKSGGNYDMRNIFNGTVVQKHPTHAVTFVDNHDSQPEEALESFVEEWFKPLAYALTLTREQGYPSVFYGDYYGIPTHGVPAMRSKIDPILEARQKYAYGPQHDYIDHPDVIGWTREGDSSAAKSGLAALITDGPGGSKRMYAGLKNAGETWYDITGNKSDTVKIGSDGWGEFHVNDGSVSIYVQK

SEQ ID NO: 29676 - protein, 485 aa, Bacillus sp.
HHNGTNGTMMQYFEWYLPNDGNHWNRLNSDASNLKSKGITAVWIPPAWKATSQNDVGYGAYDLYDLGEFNQKGTVRTKYGTRSQLQAAVTSLKNNGIQVYGDVVMNHKGGADATEMVRAVEVNPNNRNQEVTGEYTIEAWTRFDFPGRGNTHSSFKWRWYHFDGVDWDQSRELNNRIYKFRGHGKAWDWEVDTEFGNYDYLMYTDYDMDHPEVVNELRNWGVWYTNTLGLDGFRIDAVKHIKYSFTRDWINHVRSATGKNMFAVAEFWKNDLGAIENYLQKTNWNHSVFDVPLHYNLYNASKSGGNYDMRNIFNGTVVQRHPSHAVTFVDNHDSQPEEALESFVETWFKPLAYALTLTREQGYPSVFYGDYYGIPTHGVPAMRSKIDPILEARQKYAYGPQHDYLDHPDVIGWTREGDSSHPKSGLATLITDGPGGSKRMYAGLKNAGETWYDITGNRSDTVKIGSDGWGEFHVNKASVSIYVQK

SEQ ID NO: 29677 - protein, 483 aa, Bacillus sp.
HHNGTNGTMMQYFEWYLPNDGNHWNRLNSDASNLKSKGITAVWIPPAWKGASQNDVGYGAYDLYDLGEFNQKGTVRTKYGTRSQLQAAVTSLKNNGIQVYGDVVMNHKGGADATEMVRAVEVNPNNRNQEVTGEYTIEAWTRFDFPGRGNTHSSFKWRWYHFDGVDWDQSRRLNNRIYKFRGKAWDWEVDTEFGNYDYLMYADYDMDHPEVVNELRNWGVWYTNTLGLDGFRIDAVKHIKYSFTRDWINHVRSATGKNMFAVAEFWKNDLGAIENYLQKTNWNHSVFDVPLHYNLYNASKSGSNYDMRNIFNGTVVQRHPSHAVTFVDNHDSQPEEALESFVETWFKPLAYALTLTREQGYPSVFYGDYYGIPTHGVPAMRSKIDPILEARQKYAYGPQHDYLDHPDVIGWTREGDSSHPKSGLATLITDGPGGSKRMYAGLKNAGETWYDITGNRSDTVKIGSDGWGEFHVNKKSVSIYVQK

SEQ ID NO: 29678 - protein, 483 aa, Bacillus sp.
HHNGTNGTMMQYFEWYLPNDGNHWNRLNSDASNLKSKGITAVWIPPAWKGASQNDVGYGAYDLYDLGEFNQKGTVRTKYGTRSQLQAAVTSLKNNGIQVYGDVVMNHKGGADATEMVRAVEVNPNNRNQEVTGEYTIEAWTRFDFPGRGNTHSSFKWRWYHFDGVDWDQSRKLNNRIYKFRGKAWDWEVDTEFGNYDYLMYVDYDMDHPEVVNELRNWGVWYTNTLGLDGFRIDAVKHIKYSFTRDWINHVRSATGKNMFAVAEFWKNDLGAIENYLQKTNWNHSVFDVPLHYNLYNASKSGGNYDMRNIFNGTVVQRHPSHAVTFVDNHDSQPEEALESFVETWFKPLAYALTLTREQGYPSVFYGDYYGIPTHGVPAMRSKIDPILEARQKYAYGPQHDYLDHPDVIGWTREGDSSHPKSGLATLITDGPGGSKRMYAGLKNAGETWYDITGNRSDTVKIGSDGWGEFHVNKASVSIYVQK

SEQ ID NO: 29679 - protein, 485 aa, Bacillus sp.
HHNGTNGTMMQYFEWYLPNDGNHWNRLNSDASNLKSKGITAVWIPPAWKGASQNDVGYGAYDLYDLGEFNQKGTVRTKYGTRSQLQAAVTSLKNNGIQVYGDVVMNHKGGADATEMVRAVEVNPNNRNQEVTGEYTIEAYTRFDFPGRGNTHSSFKWRWYHFDGVDFDQSRRLNNRIYKFRGHGKAWDWEVDTEFGNYDYLMYADYDMDHPEVVNELRNWGVWYTNTLGLDGFRIDAVKHIKYSFTRDWINHVRIATGKNMFAVAEFWKNDLGAIENYLQKTNWNHSVFDVPLHYNLYNASKSGGNYDMRNIFNGTVVQRHPSHAVTFVDNHDSQPEEALESFVDEWFKPLAYALTLTREQGYPSVFYGDYYGIPTHGVPAMRSKIDPILEARQKYAYGPQHDYLDHPDVIGWTREGDSSHPKSGLATLITDGPGGSKRMYAGLKNAGETWYDITGNRSDTVKIGSDGWGEFHVNDQSVSIYVQK

SEQ ID NO: 29680 - protein, 483 aa, Bacillus sp.
HHNGTNGTMMQYFEWYLPNDGNHWNRLNSDASNLKSKGITAVWIPPAWKAASQNDVGYGAYDLYDLGEFNQKGTVRTKYGTRSQLQAAVTSLKNNGIQVYGDVVMNHKGGADATEMVRAVEVNPNNRNQEVTGEYTIEAWTRFDFPGRGNTHSSFKWRWYHFDGVDWDQSRRLDNRIYKFRGKAWDWEVDTEFGNYDYLMYTDYDMDHPEVVNELRNWGVWYTNTLGLDGFRIDAVKHIKYSFTRDWINHVRSATGKNMFAVAEFWKNDLGAIENYLQKTNWNHSVFDVPLHYNLYNASKSGGNYDMRNIFNGTVVQRHPSHAVTFVDNHDSQPEEALESFVDEWFKPLAYALTLTREQGYPSVFYGDYYGIPTHGVPAMRSKIDPILEARQKYAYGPQHDYLDHPDVIGWTREGDSSHPKSGLATLITDGPGGSKRMYAGLKNAGETWYDITGNRSDTVKIGSDGWGEFHVNKSSVSIYVQK

SEQ ID NO: 29681 - protein, 485 aa, Synthetic construct
HHDGTNGTIMQYFEWNVPNDGQHWNRLHNNAQNLKNAGITAIWIPPAWKGTSQNDVGYGAYDLYDLGEFNQKGTVRTKYGTKAELERAIRSLKANGIQVYGDVVMNHKGGADATEMVRAVEVNPNNRNQEVSGEYTIEAWTKFDFPGRGNTHSNFKWRWYHFDGVDWDQSRKLNNRIYKFRGDGKGWDWEVDTENGNYDYLMYADIDMDHPEVINELNRWGVWYANTLNLDGFRLDAVKHIKFSFMRDWLGHVRGQTGKNLFAVAEYWKNDLGALENYLSKTNWTMSAFDVPLHYNLYQASNSSGNYDMRNLLNGTLVQRHPSHAVTFVDNHDTQPGEALESFVQGWFKPLAYATILTREQGYPQVFYGDYYGIPSDGVPSYRQQIDPLLKARQQYAYGRQHDYFDHWDVIGWTREGNASHPNSGLATIMSDGPGGSKWMYVGRQKAGEVWHDMTGNRSGTVTINQDGWGHFFVNGGSVSVWVKR

SEQ ID NO: 29682 - protein, 483 aa, Bacillus sp.
HHNGTNGTMMQYFEWYLPNDGNHWNRLNSDASNLKSKGIKAVWIPPAWKAVSQNDVGYGAYDLYDLGEFNQKGTVRTKYGTRSQLQAAVTSLKNNGIQVYGDVVMNHKGGADATEMVRAVEVNPNNRNQEVTGEYTIEAWTRFDFPGRGNTHSSFKWRWYHFDGVDFDQSRDLENRIYKFRGKAWDWEVDTEFGNYDYLMYADYDMDHPEVVNELRNWGVWYTNTLGLDGFRIDAVKHIKYSFTRDWINHVRSATGKNMFAVAEFWKNDLGAIENYLQKTNWNHSVFDVPLHYNLYNASKSGGNYDMRNIFNGTVVQRHPSHAVTFVDNHDSQPEEALESFVEEWFKPLAYALTLTREQGYPSVFYGDYYGIPTHGVPAMRSKIDPILEARQKYAYGPQHDYLDHPDVIGWTREGDSSHPKSGLATLITDGPGGSKRMYAGLKNAGETWYDITGNRSDTVKIGSDGWGEFHVNDGSVSIYVQK

SEQ ID NO: 29683 - protein, 485 aa, Bacillus sp.
HHNGTNGTMMQYFEWYLPNDGNHWNRLNSDASNLKSKGITAVWIPPAWKGASQNDVGYGAYDLYDLGEFNQKGTVRTKYGTRSQLQAAVTSLKNNGIQVYGDVVMNHKGGADATEMVRAVEVNPNNRNQEVTGEYTIEAWTRFDFPGRGNTHSSFKWRWYHFDGVDWDQSRKLNNRIYKFRGHGKAWDWEVDTEFGNYDYLMYVDYDMDHPEVVNELRNWGVWYTNTLGLDGFRIDAVKHIKYSFTRDWINHVRSATGKNMFAVAEFWKNDLGAIENYLQKTNWNHSVFDVPLHYNLYNASKSGGNYDMRNIFNGTVVQRHPSHAVTFVDNHDSQPEEALESFVETWFKPLAYALTLTREQGYPSVFYGDYYGIPTHGVPAMRSKIDPILEARQKYAYGPQHDYLDHPDVIGWTREGDSSHPKSGLATLITDGPGGSKRMYAGLKNAGETWYDITGNRSDTVKIGSDGWGEFHVNKASVSIYVQK

SEQ ID NO: 29684 - protein, 483 aa, Synthetic construct
HHNGTNGTMMQYFEWYLPNDGNHWNRLNSDASNLKSKGITAVWIPPAWKGASQNDVGYGAYDLYDLGEFNQKGTVRTKYGTRSQLQAAVTSLKNNGIQVYGDVVMNHKGGADATEMVRAVEVNPNNRNQEVTGEYTIEAWTRFDFPGRGNTHSSFKWRWYHFDGVDWDQSRRLNNRIYKFRGKAWDWEVDTEFGNYDYLMYADYDMDYPESTNELRNWGVWYTNTLGLDGFRIDAVKHIKYSFTRDWINHVRSATGKNMFAVAEFWKNDLGAIENYLQKTNWNHSVFDVPLHYNLYNASKSGGNYDMRNIFNGTVVQRHPSHAVTFVDNHDSQPEEALESFVEEWFKPLAYALTLTREQGYPSVFYGDYYGIPTHGVPAMRSKIDPILEARQKYAYGPQHDYLDHPDVIGWTREGDSSHPKSGLATLITDGPGGSKRMYAGLKNAGETWYDITGNRSDTVKIGSDGWGEFHVNDGSVSIYVQK

SEQ ID NO: 29685 - protein, 485 aa, Bacillus sp.
HHNGTNGTMMQYFEWYLPNDGNHWNRLNSDASNLKSKGITAVWIPPAWKGTSQNDVGYGAYDLYDLGEFNQRGTVRTKYGTRSQLQAAVTSLKNNGIQVYGDVVMNHKGGADATEMVRAVEVNPNNRNQEVTGEYTIEAWTRFDFPGRGNTHSSFKWRWYHFDGVDWDQSRNLNNRIYKFRGHGKAWDWEVDTEFGNYDYLMYVDYDMDHPEVVNELRNWGVWYTNTLGLDGFRIDAVKHIKYSFTRDWINHVRSATGKNMFAVAEFWKNDLGAIENYLQKTNWNHSVFDVPLHYNLYNASKSQGNYDMRNIFNGTVVQRHPSHAVTFVDNHDSQPEEALESFVDTWFKPLAYALTLTREQGYPSVFYGDYYGIPTHGVPAMRSKIDPILEARQKYAYGPQHDYLDHPDVIGWTREGDSSHPKSGLATLITDGPGGSKRMYAGLKNAGETWYDITGNRSDTVKIGSDGWGEFHVNGSSVSIYVQK

SEQ ID NO: 29686 - protein, 485 aa, Bacillus sp.
HHNGTNGTMMQYFEWYLPNDGNHWNRLNSDASNLKSKGITAVWIPPAWKGASQNDVGYGAYDLYDLGEFNQKGTVRTKYGTRSQLQAAVTSLKNNGIQVYGDVVMNHKGGADATEMVRAVEVNPNNRNQEVTGEYTIEAWTRFDFPGRGNTHSSFKWRWYHFDGVDWDQSRRLNNRIYKFRGHGKAWDWEVDTEFGNYDYLMYADYDMDHPEVVNELRNWGVWYTNTLGLDGFRIDAVKHIKYSFTRDWINHVRSATGKNMFAVAEFWKNDLGAIENYLQKTNWNHSVFDVPLHYNLYNASKSAGNYDMRNIFNGTVVQRHPSHAVTFVDNHDSQPEEALESFVDTWFKPLAYALTLTREQGYPSVFYGDYYGIPTHGVPAMRSKIDPILEARQKYAYGPQHDYLDHPDVIGWTREGDSSHPKSGLATLITDGPGGSKRMYAGLKNAGETWYDITGNRSDTVKIGSDGWGEFHVNKASVSIYVQK

SEQ ID NO: 29687 - protein, 483 aa, Bacillus sp.
HHNGTNGTMMQYFEWYLPNDGNHWNRLNSDASNLKSKGITAVWIPPAWKGASQNDVGYGAYDLYDLGEFNQKGTVRTKYGTRSQLQAAVTSLKNNGIQVYGDVVMNHKGGADATEMVRAVEVNPNNRNQEVTGEYTIEAWTRFDFPGRGNTHSSFKWRWYHFDGVDWDQSRRLNNRIYLFRPKAWVWEVPTENGNYDYLMYADIDMDHPEVVNELRNWGVWYTNTLGLDGFRIDAVKHIKYSFTRDWINHVRSATGKNMFAVAEFWKNDLGAIENYLQKTNWNHSVFDVPLHYNLYNASKSGGNYDMRNIFNGTVVQRHPSHAVTFVDNHDSQPEEALESFVEEWFKPLAYALTLTREQGYPSVFYGDYYGIPTHGVPAMRSKIDPILEARQKYAYGPQHDYLDHPDVIGWTREGDSSHPKSGLATLITDGPGGSKRMYAGLKNAGETWYDITGNRSDTVKIGSDGWGEFHVNDGSVSIYVQK

SEQ ID NO: 29688 - protein, 485 aa, Bacillus sp.
HHNGTNGTMMQYFEWYLPNDGNHWNRLNSDASNLKSKGITAVWIPPAWKGASQNDVGYGAYDLYDLGEFNQKGTVRTKYGTRSQLQAAVTSLKNNGIQVYGDVVMNHKGGADATEMVRAVEVNPNNRNQEVTGEYTIEAWTRFDFPGRGNTHSSFKWRWYHFDGVDWDQSRRLNNRIYKFRGHGKAWDWEVDTEFGNYDYLMYADYDMDHPEVVNELRNWGVWYTNTLGLDGFRIDAVKHIKYSFTRDWINHVRSATGKNMFAVAEFWKNDLGAIENYLQKTNWNHSVFDVPLHYNLYNASKSGSNYDMRNIFNGTVVQRHPSHAVTFVDNHDSQPEEALESFVEPWFKPLAYALTLTREQGYPSVFYGDYYGIPTHGVPAMRSKIDPILEARQKYAYGPQHDYLDHPDVIGWTREGDSSHPKSGLATLITDGPGGSKRMYAGLKNAGETWYDITGNRSDTVKIGSDGWGEFHVNKQSVSIYVQK

SEQ ID NO: 29689 - protein, 485 aa, Bacillus sp.
HHNGTNGTMMQYFEWYLPNDGNHWNRLNSDASNLKSKGITAVWIPPAWKGTSQNDVGYGAYDLYDLGEFNQKGTVRTKYGTRSQLQAAVTSLKNNGIQVYGDVVMNHKGGADATEMVRAVEVNPNNRNQEVTGEYTIEAWTRFDFPGRGNTHSSFKWRWYHFDGVDWDQSRNLNNRIYKFRGHGKAWDWEVDTEFGNYDYLMYVDYDMDHPEVVNELRNWGVWYTNTLGLDGFRIDAVKHIKYSFTRDWINHVRSATGKNMFAVAEFWKNDLGAIENYLQKTNWNHSVFDVPLHYNLYNASKSQGNYDMRNIFNGTVVQANPNHAVTFVDNHDSQPEEALESFVDTWFKPLAYALTLTREQGYPSVFYGDYYGIPTHGVPAMRSKIDPILEARQKYAYGPQHDYLDHPDVIGWTREGDSSHPKSGLATLITDGPGGSKRMYAGLKNAGETWYDITGNRSDTVKIGSDGWGEFHVNGSSVSIYVQK

SEQ ID NO: 29690 - protein, 483 aa, Bacillus sp.
HHNGTNGTMMQYFEWYLPNDGNHWNRLNSDASNLKSKGITAVWIPPAWKGASQNDVGYGAYDLYDLGEFNQKGTVRTKYGTRSQLQAAVTSLKNNGIQVYGDVVFNHKGGADATEMVRAVEVNPNNRNQEVTGEYTIEAWTRFDFPGRGNTHSSFKWRWYHFDGVDWDQSRRLNNRIYKFRGKAWDWEVDTENGNYDYLMYADIDYDYPEVVNELRVWGVWYTNTLGLDGFRIDAVKHIKYSFTRVWINHVRSATGKNMFAVAEFWKNDLGAIENYLQKTNWNHSVFDVPLHYNLYNASKSGGNYDMRNIFNGTVVQRHPSHAVTFVDNHDSQPEEALESFVEEWFKPLAYALTLTREQGYPSVFYGDYYGIPTHGVPAMRSKIDPILEARQKYAYGPQHDYLDHPDVIGWTREGDSSHPKSGLATLITDGPGGSKRMYAGLKNAGETWYDITGNRSDTVKIGSDGWGEFHVNDGSVSIYVQK

SEQ ID NO: 29691 - protein, 485 aa, Bacillus sp.
HHNGTNGTMMQYFEWYLPNDGNHWNRLNSDASNLKSKGIKAVWIPPAWKGASQNDVGYGAYDLYDLGEFNQRGTVRTKYGTRSQLQAAVTSLKNNGIQVYGDVVMNHKGGADATEMVRAVEVNPNNRNQEVTGEYTIEAWTRFDFPGRGNTHSSFKWRWYHFDGVDYDQSRRLNNRIYKFRGHGKAWDWEVDTEFGNYDYLMYADYDMDHPEVVNELRNWGVWYTNTLGLDGFRIDAVKHIKYSFTRDWINHVRSATGKNMFAVAEFWKNDLGAIENYLQKTNWNHSVFDVPLHYNLYNASKSGGNYDMRNIFNGTVVQRHPSHAVTFVDNHDSQPEEALESFVEEWFKPLAYALTLTREQGYPSVFYGDYYGIPTHGVPAMRSKIDPILEARQKYAYGPQHDYLDHPDVIGWTREGDSSHPKSGLATLITDGPGGSKRMYAGLKNAGETWYDITGNRSDTVKIGSDGWGEFHVNDGSVSIYVQK

SEQ ID NO: 29692 - protein, 485 aa, Bacillus sp.
HHNGTNGTMMQYFEWYLPNDGNHWNRLNSDASNLKSKGITAVWIPPAWKAVSQNDVGYGAYDLYDLGEFNQKGTVRTKYGTRSQLQAAVTSLKNNGIQVYGDVVMNHKGGADATEMVRAVEVNPNNRNQEVTGEYTIEAWTRFDFPGRGNTHSSFKWRWYHFDGVDWDQSRELSNRIYKFRGHGKAWDWEVDTEFGNYDYLMYADYDMDHPEVVNELRNWGVWYTNTLGLDGFRIDAVKHIKYSFTRDWINHVRSATGKNMFAVAEFWKNDLGAIENYLQKTNWNHSVFDVPLHYNLYNASKSGGNYDMRNIFNGTVVQRHPSHAVTFVDNHDSQPEEALESFVETWFKPLAYALTLTREQGYPSVFYGDYYGIPTHGVPAMRSKIDPILEARQKYAYGPQHDYLDHPDVIGWTREGDSSHPKSGLATLITDGPGGSKRMYAGLKNAGETWYDITGNRSDTVKIGSDGWGEFHVNDASVSIYVQK

SEQ ID NO: 29693 - protein, 485 aa, Bacillus sp.
HHNGTNGTMMQYFEWYLPNDGNHWNRLNSDASNLKSKGIKAVWIPPAWKGASQNDVGYGAYDLYDLGEFNQRGTVRTKYGTRSQLQAAVTSLKNNGIQVYGDVVMNHKGGADATEMVRAVEVNPNNRNQEVTGEYTIEAWTRFDFPGRGNTHSSFKWRWYHFDGVDFDQSRNFQNRIYKFRGHGKAWDWEVDTEFGNYDYLMYADYDMDHPEVVNELRNWGVWYTNTLGLDGFRIDAVKHIKYSFTRDWINHVRSATGKNMFAVAEFWKNDLGAIENYLQKTNWNHSVFDVPLHYNLYNASKSQGNYDMRNIFNGTVVQRHPSHAVTFVDNHDSQPEEALESFVDTWFKPLAYALTLTREQGYPSVFYGDYYGIPTHGVPAMRSKIDPILEARQKYAYGPQHDYLDHPDVIGWTREGDSSHPKSGLATLITDGPGGSKRMYAGLKNAGETWYDITGNRSDTVKIGSDGWGEFHVNGSSVSIYVQK

SEQ ID NO: 29694 - protein, 485 aa, Bacillus sp.
HHNGTNGTMMQYFEWYLPNDGNHWNRLNSDASNLKSKGITAVWIPPAWKGASQNDVGYGAYDLYDLGEFNQKGTVRTKYGTRSQLQAAVTSLKNNGIQVYGDVVMNHKGGADATEMVRAVEVNPNNRNQEVTGEYTIEAWTRFDFPGRGNTHSSFKWRWYHFDGVDWDQSRRLNNRIYKFRGHGKAWDWEVDTEFGNYDYLMYADYDMDHPEVVNELRNWGVWYTNTLGLDGFRIDAVKHIKYSFTRDWINHVRSATGKNMFAVAEFWKNDLGAIENYLQKTNWNHSVFDVPLHYNLYNASKSGSNYDMRNIFNGTVVQRHPSHAVTFVDNHDSQPEEALESFVDPWFKPLAYALTLTREQGYPSVFYGDYYGIPTHGVPAMRSKIDPILEARQKYAYGPQHDYLDHPDVIGWTREGDSSHPKSGLATLITDGPGGSKRMYAGLKNAGETWYDITGNRSDTVKIGSDGWGEFHVNDQSVSIYVQK

SEQ ID NO: 29695 - protein, 483 aa, Bacillus sp.
HHNGTNGTLMQYFEWYLPNDGNHWNRLNSDASNLKSKGITAVWIPPAWKGASQNDVGYGAYDLYDLGEFNQKGTVRTKYGTRSQLQAAVTSLKNNGIQVYGDVVMNHKGGADATEMVKAVEVNPNNRNQEVTGEYTIEAWTRFDFPGRGNTHSSFKWRWYHFDGVDWDQSRRLNNRIYKFRGKAWDWEVDTEFGNYDYLLYADIDMDHPEVVNELRNWGVWYTNTLGLDGFRIDAVKHIKYSFTRDWINHVRSATGKNMFAVAEFWKNDLGAIENYLQKTNWNHSVFDVPLHYNLYNASKSGGNYDMRNIFNGTVVQKHPTHAVTFVDNHDSQPEEALESFVEEWFKPLAYALTLTREQGYPSVFYGDYYGIPTHGVPAMRSKIDPILEARQKYAYGPQHDYIDHPDVIGWTREGDSSAAKSGLAALITDGPGGSKRMYAGLKNAGETWYDITGNKSDTVKIGSDGWGEFHVNDGSVSIYVQK

SEQ ID NO: 29696 - protein, 485 aa, Bacillus sp.
HHNGTNGTMMQYFEWYLPNDGNHWNRLNSDASNLKSKGITAVWIPPAWKAASQNDVGYGAYDLYDLGEFNQKGTVRTKYGTRSQLQAAVTSLKNNGIQVYGDVVMNHKGGADATEMVRAVEVNPNNRNQEVTGEYTIEAWTRFDFPGRGNTHSSFKWRWYHFDGVDWDQSRNLNNRIYKFRGHGKAWDWEVDTEFGNYDYLMYTDYDMDHPEVVNELRNWGVWYTNTLGLDGFRIDAVKHIKYSFTRDWINHVRSATGKNMFAVAEFWKNDLGAIENYLQKTNWNHSVFDVPLHYNLYNASKSGGNYDMRNIFNGTVVQRHPSHAVTFVDNHDSQPEEALESFVDEWFKPLAYALTLTREQGYPSVFYGDYYGIPTHGVPAMRSKIDPILEARQKYAYGPQHDYLDHPDVIGWTREGDSSHPKSGLATLITDGPGGSKRMYAGLKNAGETWYDITGNRSDTVKIGSDGWGEFHVNKSSVSIYVQK

SEQ ID NO: 29697 - protein, 485 aa, Bacillus sp.
HHNGTNGTMMQYFEWYLPNDGNHWNRLNSDASNLKSKGITAVWIPPAWKGASQNDVGYGAYDLYDLGEFNQKGTVRTKYGTRSQLQAAVTSLKNNGIQVYGDVVMNHKGGADATEMVRAVEVNPNNRNQEVTGEYTIEAWTRFDFPGRGNTHSSFKWRWYHFDGVDWDQSRRLNNRIYKFRGHGKAWDWEVDTEFGNYDYLMYADYDMDHPEVVNELRNWGVWYTNTLGLDGFRIDAVKHIKYSFTRDWINHVRSATGKNMFAVAEFWKNDLGAIENYLQKTNWNHSVFDVPLHYNLYNASKSQGNYDMRNIFNGTVVQRHPSHAVTFVDNHDSQPEEALESFVDTWFKPLAYALTLTREQGYPSVFYGDYYGIPTHGVPAMRSKIDPILEARQKYAYGPQHDYLDHPDVIGWTREGDSSHPKSGLATLITDGPGGSKRMYAGLKNAGETWYDITGNRSDTVKIGSDGWGEFHVNDQSVSIYVQK

SEQ ID NO: 29698 - protein, 485 aa, Bacillus sp.
HHNGTNGTMMQYFEWYLPNDGNHWNRLNSDASNLKSKGITAVWIPPAWKGASQNDVGYGAYDLYDLGEFNQKGTVRTKYGTRSQLQAAVTSLKNNGIQVYGDVVMNHKGGADATEMVRAVEVNPNNRNQEVTGEYTIEAWTRFDFPGRGNTHSSFKWRWYHFDGVDWDQSRRLNNRIYKFRGHGKAWDWEVDTEFGNYDYLMYADYDMDHPEVVNELRNWGVWYTNTLGLDGFRIDAVKHIKYSFTRDWINHVRSATGKNMFAVAEFWKNDLGAIENYLQKTNWNHSVFDVPLHYNLYNASKSAGNYDMRNIFNGTVVQRHPSHAVTFVDNHDSQPEEALESFVETWFKPLAYALTLTREQGYPSVFYGDYYGIPTHGVPAMRSKIDPILEARQKYAYGPQHDYLDHPDVIGWTREGDSSHPKSGLATLITDGPGGSKRMYAGLKNAGETWYDITGNRSDTVKIGSDGWGEFHVNKTSVSIYVQK

SEQ ID NO: 29699 - protein, 483 aa, Bacillus sp.
HHNGTNGTMMQYFEWYLPNDGNHWNRLNSDASNLKSKGITAVWIPPAWKAVSQNDVGYGAYDLYDLGEFNQKGTVRTKYGTRSQLQAAVTSLKNNGIQVYGDVVMNHKGGADATEMVDAVEVNPNNRNQEVTGEYTIEAWTRFDFPGRGNTHSSFKWRWYHFDGVDFDQSRNLTNRIYKFRGKAWDWEVDTEFGNYDYLMYTDYDMDHPEVVNELRNWGVWYTNTLGLDGFRIDAVKHIKYSFTRDWINHVRSATGKNMFAVAEFWKNDLGAIENYLQKTNWNHSVFDVPLHYNLYNASKSGGNYDMRNIFNGTVVQRHPSHAVTFVDNHDSQPEEALESFVEEWFKPLAYALTLTREQGYPSVFYGDYYGIPTHGVPAMRSKIDPILEARQKYAYGPQHDYLDHPDVIGWTREGDSSHPKSGLATLITDGPGGSKRMYAGLKNAGETWYDITGNRSDTVKIGSDGWGEFHVNDGSVSIYVQK

SEQ ID NO: 29700 - protein, 485 aa, Bacillus sp.
HHNGTNGTMMQYFEWYLPNDGNHWNRLNSDASNLKSKGITAVWIPPAWKGASQNDVGYGAYDLYDLGEFNQKGTVRTKYGTRSQLQAAVTSLKNNGIQVYGDVVMNHKGGADATEMVRAVEVNPNNRNQEVTGEYTIEAWTRFDFPGRGNTHSSFKWRWYHFDGVDWDQSRRLNNRIYKFRGHGKAWDWEVDTEFGNYDYLMYADYDMDHPEVVNELRNWGVWYTNTLGLDGFRIDAVKHIKYSFTRDWINHVRSATGKNMFAVAEFWKNDLGAIENYLQKTNWNHSVFDVPLHYNLYNASKSQGNYDMRNIFNGTVVQRHPSHAVTFVDNHDSQPEEALESFVETWFKPLAYALTLTREQGYPSVFYGDYYGIPTHGVPAMRSKIDPILEARQKYAYGPQHDYLDHPDVIGWTREGDSSHPKSGLATLITDGPGGSKRMYAGLKNAGETWYDITGNRSDTVKIGSDGWGEFHVNKQSVSIYVQK

SEQ ID NO: 29701 - protein, 485 aa, Bacillus sp.
HHNGTNGTMMQYFEWYLPNDGNHWNRLNSDASNLKSKGIKAVWIPPAWKGTSQNDVGYGAYDLYDLGEFNQKGTVRTKYGTRSQLQAAVTSLKNNGIQVYGDVVMNHKGGADATEMVRAVEVNPNNRNQEVTGEYTIEAWTRFDFPGRGNTHSSFKWRWYHFDGVDWDQSRNLNNRIYKFRGHGKAWDWEVDTEFGNYDYLMYVDYDMDHPEVVNELRNWGVWYTNTLGLDGFRIDAVKHIKYSFTRDWINHVRSATGKNMFAVAEFWKNDLGAIENYLQKTNWNHSVFDVPLHYNLYNASKSQGNYDMRNIFNGTVVQRHPSHAVTFVDNHDSQPEEALESFVDTWFKPLAYALTLTREQGYPSVFYGDYYGIPTHGVPAMRSKIDPILEARQKYAYGPQHDYLDHPDVIGWTREGDSSHPKSGLATLITDGPGGSKRMYAGLKNAGETWYDITGNRSDTVKIGSDGWGEFHVNGSSVSIYVQK

SEQ ID NO: 29702 - protein, 485 aa, Bacillus sp.
HHNGTNGTMMQYFEWYLPNDGNHWNRLNSDASNLKSKGIKAVWIPPAWKAASQNDVGYGAYDLYDLGEFNQKGTVRTKYGTRSQLQAAVTSLKNNGIQVYGDVVMNHKGGADATEMVRAVEVNPNNRNQEVTGEYTIEAWTRFDFPGRGNTHSSFKWRWYHFDGVDWDQSRNLNNRIYKFRGHGKAWDWEVDTEFGNYDYLMYTDYDMDHPEVVNELRNWGVWYTNTLGLDGFRIDAVKHIKYSFTRDWINHVRSATGKNMFAVAEFWKNDLGAIENYLQKTNWNHSVFDVPLHYNLYNASKSGGNYDMRNIFNGTVVQRHPSHAVTFVDNHDSQPEEALESFVEEWFKPLAYALTLTREQGYPSVFYGDYYGIPTHGVPAMRSKIDPILEARQKYAYGPQHDYLDHPDVIGWTREGDSSHPKSGLATLITDGPGGSKRMYAGLKNAGETWYDITGNRSDTVKIGSDGWGEFHVNDGSVSIYVQK

SEQ ID NO: 29703 - protein, 485 aa, Bacillus sp.
HHNGTNGTMMQYFEWYLPNDGNHWNRLNSDASNLKSKGITAVWIPPAWKAASQNDVGYGAYDLYDLGEFNQKGTVRTKYGTRSQLQAAVTSLKNNGIQVYGDVVMNHKGGADATEMVRAVEVNPNNRNQEVTGEYTIEAWTRFDFPGRGNTHSSFKWRWYHFDGVDWDQSRDLDNRIYKFRGHGKAWDWEVDTEFGNYDYLMYADYDMDHPEVVNELRNWGVWYTNTLGLDGFRIDAVKHIKYSFTRDWINHVRSATGKNMFAVAEFWKNDLGAIENYLQKTNWNHSVFDVPLHYNLYNASKSGGNYDMRNIFNGTVVQRHPSHAVTFVDNHDSQPEEALESFVETWFKPLAYALTLTREQGYPSVFYGDYYGIPTHGVPAMRSKIDPILEARQKYAYGPQHDYLDHPDVIGWTREGDSSHPKSGLATLITDGPGGSKRMYAGLKNAGETWYDITGNRSDTVKIGSDGWGEFHVNKASVSIYVQK

SEQ ID NO: 29704 - protein, 483 aa, Bacillus sp.
HHNGTNGTMMQYFEWYLPNDGNHWNRLNSDASNLKSKGIKAVWIPPAWKGASQNDTGYGAYDLYDLGEFNQKGTVRTKYGTRSQLQAAVTSLKNNGIQVYGDVVMNHKGGADATEMVRAVEVNPNNRNQEVTGEYTIEAWTRFDFPGRGNTHSSFKWRWYHFDGVDWDQSERLNNRIYKFRGKAWDWEVDTEFGNYDYLMYADYDMDHPEVVNELRNWGVWYTNTLGLDGFRIDAVKHIKYSFTRDWINHVRSATGKNMFAVAEFWKNDLGAIENYLQKTNWNHSVFDVPLHYNLYNASKSGGNYDMRNIFNGTVVQRHPSHAVTFVDNHDSQPEEALESFVEEWFKPLAYALTLTREQGYPSVFYGDYYGIPTHGVPAMRSKIDPILEARQKYAYGPQHDYLDHPDVIGWTREGDSSHPKSGLATLITDGPGGSKRMYAGLKNAGETWYDITGNRSDTVKIGSDGWGEFHVNDGSVSIYVQK

SEQ ID NO: 29705 - protein, 485 aa, Bacillus sp.
HHNGTNGTMMQYFEWYLPNDGNHWNRLNSDASNLKSKGIKAVWIPPAWKGASQNDVGYGAYDLYDLGEFNQRGTVRTKYGTRSQLQAAVTSLKNNGIQVYGDVVMNHKGGADATEMVRAVEVNPNNRNQEVTGEYTIEAWTRFDFPGRGNTHSSFKWRWYHFDGVDFDQSRRLNNRIYKFRGHGKAWDWEVDTEFGNYDYLMYADYDMDHPEVVNELRNWGVWYTNTLGLDGFRIDAVKHIKYSFTRDWINHVRSATGKNMFAVAEFWKNDLGAIENYLQKTNWNHSVFDVPLHYNLYNASKSGGNYDMRNIFNGTVVQAHPNHAVTFVDNHDSQPEEALESFVEEWFKPLAYALTLTREQGYPSVFYGDYYGIPTHGVPAMRSKIDPILEARQKYAYGPQHDYLDHPDVIGWTREGDSSHPKSGLATLITDGPGGSKRMYAGLKNAGETWYDITGNRSDTVKIGSDGWGEFHVNDGSVSIYVQK

SEQ ID NO: 29706 - protein, 485 aa, Bacillus sp.
HHNGTNGTMMQYFEWYLPNDGNHWNRLNSDASNLKSKGITAVWIPPAWKGASQNDVGYGAYDLYDLGEFNQKGTVRTKYGTRSQLQAAVTSLKNNGIQVYGDVVMNHKGGADATEMVRAVEVNPNNRNQEVTGEYTIEAWTRFDFPGRGNTHSSFKWRWYHFDGVDWDQSRRLNNRIYKFRGHGKAWDWEVDTEFGNYDYLMYADYDMDHPEVVNELRNWGVWYTNTLGLDGFRIDAVKHIKYSFTRDWINHVRSATGKNMFAVAEFWKNDLGAIENYLQKTNWNHSVFDVPLHYNLYNASKSSGNYDMRNIFNGTVVQRHPSHAVTFVDNHDSQPEEALESFVDTWFKPLAYALTLTREQGYPSVFYGDYYGIPTHGVPAMRSKIDPILEARQKYAYGPQHDYLDHPDVIGWTREGDSSHPKSGLATLITDGPGGSKRMYAGLKNAGETWYDITGNRSDTVKIGSDGWGEFHVNQQSVSIYVQK

SEQ ID NO: 29707 - protein, 483 aa, Synthetic construct
HHNGTNGTMMQYFEWYLPNDGNHWNRLNSDASNLKSKGITAVWIPPAWKGASQNDVGYGAYDLYDLGEFNQKGTVRTKYGTRSQLQAAVTSLKNNGIQVYGDVVMNHKGGADATEMVRAVEVNPNNRNQEVTGEYTIEAWTRFDFPGRGNTHSSFKWRWYHFDGVDWDQSRRLNNRIYLFRSKQWDWPVDTENGNYDYLMYADIDMDHPEVVNELRNWGVWYTNTLGLDGFRIDAVKHIKYSFTRDWINHVRSATGKNMFAVAEFWKNDLGAIENYLQKTNWNHSVFDVPLHYNLYNASKSGGNYDMRNIFNGTVVQRHPSHAVTFVDNHDSQPEEALESFVEEWFKPLAYALTLTREQGYPSVFYGDYYGIPTHGVPAMRSKIDPILEARQKYAYGPQHDYLDHPDVIGWTREGDSSHPKSGLATLITDGPGGSKRMYAGLKNAGETWYDITGNRSDTVKIGSDGWGEFHVNDGSVSIYVQK

SEQ ID NO: 29708 - protein, 485 aa, Bacillus sp.
HHNGTNGTMMQYFEWYLPNDGNHWNRLNSDASNLKSKGITAVWIPPAWKGASQNDVGYGAYDLYDLGEFNQKGTVRTKYGTRSQLQAAVTSLKNNGIQVYGDVVMNHKGGADATEMVRAVEVNPNNRNQEVTGEYTIEAWTRFDFPGRGNTHSSFKWRWYHFDGVDWDQSRRLNNRIYKFRGHGKAWDWEVDTEFGNYDYLMYADYDMDHPEVVNELRNWGVWYTNTLGLDGFRIDAVKHIKYSFTRDWINHVRSATGKNMFAVAEFWKNDLGAIENYLQKTNWNHSVFDVPLHYNLYNASKSAGNYDMRNIFNGTVVQRHPSHAVTFVDNHDSQPEEALESFVEKWFKPLAYALTLTREQGYPSVFYGDYYGIPTHGVPAMRSKIDPILEARQKYAYGPQHDYLDHPDVIGWTREGDSSHPKSGLATLITDGPGGSKRMYAGLKNAGETWYDITGNRSDTVKIGSDGWGEFHVNDKSVSIYVQK

SEQ ID NO: 29709 - protein, 485 aa, Bacillus sp.
HHNGTNGTMMQYFEWYLPNDGNHWNRLNSDASNLKSKGITAVWIPPAWKGASQNDVGYGAYDLYDLGEFNQKGTVRTKYGTRSQLQAAVTSLKNNGIQVYGDVVMNHKGGADYTEMVRAVEVNPNNRNQEVTGEYTIEAWTRFDFPGRGNTHSSFKWRWYHFDGVDWDQSERLNNRIYKFRGHGKAWDWEVDTEFGNYDYLMYADYDMDHPEVVNELRNWGVWYTNTLGLDGFRIDAVKHIKYSFTRDWINHVRSATGKNMFAVAEFWKNDLGAIENYLQKTNWNHSVFDVPLHYNLYNASKSGGNYDMRNIFNGTVVQRHPSHAVTFVDNHDSQPEEALESFVEEWFKPLAYALTLTREQGYPSVFYGDYYGIPTHGVPAMRSKIDPILLARQKYAYGPQHDYLDHPDVIGWTREGDSSHPKSGLATLITDGPGGSKRMYAGLKNAGETWYDITGNRSDTVKIGSDGWGEFHVNDGSVSIYVQK

SEQ ID NO: 29710 - protein, 485 aa, Bacillus sp.
HHNGTNGTMMQYFEWYLPNDGNHWNRLNSDASNLKSKGITAVWIPPAWKATSQNDVGYGAYDLYDLGEFNQKGTVRTKYGTRSQLQAAVTSLKNNGIQVYGDVVMNHKGGADATEMVRAVEVNPNNRNQEVTGEYTIEAWTRFDFPGRGNTHSSFKWRWYHFDGVDWDQSRELNNRIYKFRGHGKAWDWEVDTEFGNYDYLMYTDYDMDHPEVVNELRNWGVWYTNTLGLDGFRIDAVKHIKYSFTRDWINHVRSATGKNMFAVAEFWKNDLGAIENYLQKTNWNHSVFDVPLHYNLYNASQSGGNYDMRNIFNGTVVQRHPSHAVTFVDNHDSQPEEALESFVEPWFKPLAYALTLTREQGYPSVFYGDYYGIPTHGVPAMRSKIDPILEARQKYAYGPQHDYLDHPDVIGWTREGDSSHPKSGLATLITDGPGGSKRMYAGLKNAGETWYDITGNRSDTVKIGSDGWGEFHVNKSSVSIYVQK

SEQ ID NO: 29711 - protein, 485 aa, Bacillus sp.
HHNGTNGTMMQYFEWYLPNDGNHWNRLNSDASNLKSKGITAVWIPPAWKAASQNDVGYGAYDLYDLGEFNQKGTVRTKYGTRSQLQAAVTSLKNNGIQVYGDVVMNHKGGADATEMVRAVEVNPNNRNQEVTGEYTIEAWTRFDFPGRGNTHSSFKWRWYHFDGVDWDQSRNLTNRIYKFRGHGKAWDWEVDTEFGNYDYLMYADYDMDHPEVVNELRNWGVWYTNTLGLDGFRIDAVKHIKYSFTRDWINHVRSATGKNMFAVAEFWKNDLGAIENYLQKTNWNHSVFDVPLHYNLYNASKSGGNYDMRNIFNGTVVQRHPSHAVTFVDNHDSQPEEALESFVETWFKPLAYALTLTREQGYPSVFYGDYYGIPTHGVPAMRSKIDPILEARQKYAYGPQHDYLDHPDVIGWTREGDSSHPKSGLATLITDGPGGSKRMYAGLKNAGETWYDITGNRSDTVKIGSDGWGEFHVNKASVSIYVQK

SEQ ID NO: 29712 - protein, 485 aa, Bacillus sp.
HHNGTNGTMMQYFEWYLPNDGNHWNRLNSDASNLKSKGITAVWIPPAWKAASQNDVGYGAYDLYDLGEFNQKGTVRTKYGTRSQLQAAVTSLKNNGIQVYGDVVMNHKGGADATEMVRAVEVNPNNRNQEVTGEYTIEAWTRFDFPGRGNTHSSFKWRWYHFDGVDWDQSRSLSNRIYKFRGHGKAWDWEVDTEFGNYDYLMYADYDMDHPEVVNELRNWGVWYTNTLGLDGFRIDAVKHIKYSFTRDWINHVRSATGKNMFAVAEFWKNDLGAIENYLQKTNWNHSVFDVPLHYNLYNASKSGGNYDMRNIFNGTVVQRHPSHAVTFVDNHDSQPEEALESFVETWFKPLAYALTLTREQGYPSVFYGDYYGIPTHGVPAMRSKIDPILEARQKYAYGPQHDYLDHPDVIGWTREGDSSHPKSGLATLITDGPGGSKRMYAGLKNAGETWYDITGNRSDTVKIGSDGWGEFHVNKASVSIYVQK

SEQ ID NO: 29713 - protein, 485 aa, Bacillus sp.
HHNGTNGTMMQYFEWYLPNDGNHWNRLNSDASNLKSKGITAVWIPPAWKAASQNDVGYGAYDLYDLGEFNQKGTVRTKYGTRSQLQAAVTSLKNNGIQVYGDVVMNHKGGADATEMVRAVEVNPNNRNQEVTGEYTIEAWTRFDFPGRGNTHSSFKWRWYHFDGVDWDQSRQITNRIYKFRGHGKAWDWEVDTEFGNYDYLMYTDYDMDHPEVVNELRNWGVWYTNTLGLDGFRIDAVKHIKYSFTRDWINHVRSATGKNMFAVAEFWKNDLGAIENYLQKTNWNHSVFDVPLHYNLYNASKSQGNYDMRNIFNGTVVQRHPSHAVTFVDNHDSQPEEALESFVDTWFKPLAYALTLTREQGYPSVFYGDYYGIPTHGVPAMRSKIDPILEARQKYAYGPQHDYLDHPDVIGWTREGDSSHPKSGLATLITDGPGGSKRMYAGLKNAGETWYDITGNRSDTVKIGSDGWGEFHVNGSSVSIYVQK

SEQ ID NO: 29714 - protein, 485 aa, Bacillus sp.
HHNGTNGTMMQYFEWYLPNDGNHWNRLNSDASNLKSKGITAVWIPPAWKGASQNDVGYGAYDLYDLGEFNQKGTVRTKYGTRSQLQAAVTSLKNNGIQVYGDVVMNHKGGADATEMVRAVEVNPNNRNQEVTGEYTIEAWTRFDFPGRGNTHSSFKWRWYHFDGVDWDQSRRLNNRIYKFRGHGKAWDWEVDTEFGNYDYLMYADYDMDHPEVVNELRNWGVWYTNTLGLDGFRIDAVKHIKYSFTRDWINHVRSATGKNMFAVAEFWKNDLGAIENYLQKTNWNHSVFDVPLHYNLYNASKSSGNYDMRNIFNGTVVQRHPSHAVTFVDNHDSQPEEALESFVEPWFKPLAYALTLTREQGYPSVFYGDYYGIPTHGVPAMRSKIDPILEARQKYAYGPQHDYLDHPDVIGWTREGDSSHPKSGLATLITDGPGGSKRMYAGLKNAGETWYDITGNRSDTVKIGSDGWGEFHVNQSSVSIYVQK

SEQ ID NO: 29715 - protein, 485 aa, Bacillus sp.
HHNGTNGTMMQYFEWYLPNDGNHWNRLNSDASNLKSKGITAVWIPPAWKGASQNDVGYGAYDLYDLGEFNQKGTVRTKYGTRSQLQAAVTSLKNNGIQVYGDVVMNHKGGADATEMVRAVEVNPNNRNQEVTGEYTIEAWTRFDFPGRGNTHSSFKWRWYHFDGVDWDQSERLNNRIYKFRGHGKAWDWEVETEFGNYDYLMYADYDMDHPEVVNELRNWGVWYTNTLGLDGFRIDAVKHIKYSFTRDWINHVRIATGKNMFAVAEFWKNDLGAIENYLQKTNWNHSVFDVPLHYNLYNASKSGGNYDMRNIFNGTVVQRHPSHAVTFVDNHDSQPEEALESFVDEWFKPLAYALTLTREQGYPSVFYGDYYGIPTHGVPAMRSKIDPILEARQKYAYGPQHDYLDHPDVIGWTREGDSSHPKSGLATLITDGPGGSKRMYAGLKNAGETWYDITGNRSDTVKIGSDGWGEFHVNDQSVSIYVQK

SEQ ID NO: 29716 - protein, 485 aa, Bacillus sp.
HHNGTNGTMMQYFEWYLPNDGNHWNRLNSDASNLKSKGITAVWIPPAWKAVSQNDVGYGAYDLYDLGEFNQKGTVRTKYGTRSQLQAAVTSLKNNGIQVYGDVVMNHKGGADATEMVRAVEVNPNNRNQEVTGEYTIEAWTRFDFPGRGNTHSSFKWRWYHFDGVDWDQSRNLTNRIYKFRGHGKAWDWEVDTEFGNYDYLMYTDYDMDHPEVVNELRNWGVWYTNTLGLDGFRIDAVKHIKYSFTRDWINHVRSATGKNMFAVAEFWKNDLGAIENYLQKTNWNHSVFDVPLHYNLYNASKSGGNYDMRNIFNGTVVQANPNHAVTFVDNHDSQPEEALESFVEEWFKPLAYALTLTREQGYPSVFYGDYYGIPTHGVPAMRSKIDPILEARQKYAYGPQHDYLDHPDVIGWTREGDSSHPKSGLATLITDGPGGSKRMYAGLKNAGETWYDITGNRSDTVKIGSDGWGEFHVNDGSVSIYVQK

SEQ ID NO: 29717 - protein, 485 aa, Bacillus sp.
HHNGTNGTMMQYFEWYLPNDGNHWNRLNSDASNLKSKGITAVWIPPAWKAVSQNDVGYGAYDLYDLGEFNQKGTVRTKYGTRSQLQAAVTSLKNNGIQVYGDVVMNHKGGADATEMVRAVEVNPNNRNQEVTGEYTIEAWTRFDFPGRGNTHSSFKWRWYHFDGVDWDQSRDLENRIYKFRGHGKAWDWEVDTEFGNYDYLMYADYDMDHPEVVNELRNWGVWYTNTLGLDGFRIDAVKHIKYSFTRDWINHVRSATGKNMFAVAEFWKNDLGAIENYLQKTNWNHSVFDVPLHYNLYNASKSGGNYDMRNIFNGTVVQRHPSHAVTFVDNHDSQPEEALESFVETWFKPLAYALTLTREQGYPSVFYGDYYGIPTHGVPAMRSKIDPILEARQKYAYGPQHDYLDHPDVIGWTREGDSSHPKSGLATLITDGPGGSKRMYAGLKNAGETWYDITGNRSDTVKIGSDGWGEFHVNDASVSIYVQK

SEQ ID NO: 29718 - protein, 485 aa, Bacillus sp.
HHNGTNKTMMQYFEWYLPNDGNHWNRLNSDASNLKSKGITAVWIPPAWKGASQNDVGYGAYDLYDLGEFNQKGTVRTKYGTRSQLQAAVTSLKNNGIQVYGDVVMNHKGGADATEMVRAVEVNPNNRNQEVTGEYTIEAWTRFDFPGRGNTHSSFKWRWYHFDGVDFDQSRRLNNRIYKFRGHGKAWDWEVDTEFGNYDYLMYADYDMDHPEVVNELRNWGVWYTNTLGLDGFRIDAVKHIKYSFTRDWINHVRSATGKNMFAVAEFWKNDLGAIENYLQKTNWNHSVFDVPLHYNLYNASKSGGNYDMRNIFNGTVVQMQPSHAVTFVDNHDSQPEEALESFVEEWFKPLAYALTLTREQGYPSVFYGDYYGIPTHGVPAMRSKIDPILEARQKYAYGPQHDYLDHPDVIGWTREGDSSHPKSGLATLITDGPGGSKRMYAGLKNAGETWYDITGNRSDTVKIGSDGWGEFHVNDGSVSIYVQK

SEQ ID NO: 29719 - protein, 485 aa, Bacillus sp.
HHNGTNGTMMQYFEWYLPNDGNHWNRLNSDASNLKSKGITAVWIPPAWKGASQNDVGYGAYDLYDLGEFNQKGTVRTKYGTRSQLQAAVTSLKNNGIQVYGDVVMNHKGGADATEMVRAVEVNPNNRNQEVTGEYTIEAWTRFDFPGRGNTHSSFKWRWYHFDGVDWDQSRELNNRIYKFRGHGKAWDWEVDTEFGNYDYLMYTDYDMDHPEVVNELRNWGVWYTNTLGLDGFRIDAVKHIKYSFTRDWINHVRSATGKNMFAVAEFWKNDLGAIENYLQKTNWNHSVFDVPLHYNLYNASKSSGNYDMRNIFNGTVVQRHPSHAVTFVDNHDSQPEEALESFVDEWFKPLAYALTLTREQGYPSVFYGDYYGIPTHGVPAMRSKIDPILEARQKYAYGPQHDYLDHPDVIGWTREGDSSHPKSGLATLITDGPGGSKRMYAGLKNAGETWYDITGNRSDTVKIGSDGWGEFHVNKQSVSIYVQK

SEQ ID NO: 29720 - protein, 485 aa, Bacillus sp.
HHNGTNGTMMQYFEWYLPNDGNHWNRLNSDASNLKSKGITAVWIPPAWKGASQNDVGYGAYDLYDLGEFNQKGTVRTKYGTRSQLQAAVTSLKNNGIQVYGDVVMNHKGGADATEMVRAVEVNPNNRNQEVTGEYTIEAWTRFDFPGRGNTHSSFKWRWYHFDGVDWDQSRRLNNRIYKFRGHGKAWDWEVDTEFGNYDYLMYADYDMDHPEVVNELRNWGVWYTNTLGLDGFRIDAVKHIKYSFTRDWINHVRSATGKNMFAVAEFWKNDLGAIENYLQKTNWNHSVFDVPLHYNLYNASKSGSNYDMRNIFNGTVVQRHPSHAVTFVDNHDSQPEEALESFVEPWFKPLAYALTLTREQGYPSVFYGDYYGIPTHGVPAMRSKIDPILEARQKYAYGPQHDYLDHPDVIGWTREGDSSHPKSGLATLITDGPGGSKRMYAGLKNAGETWYDITGNRSDTVKIGSDGWGEFHVNQTSVSIYVQK

SEQ ID NO: 29721 - protein, 483 aa, Bacillus sp.
HHNGTNGTMMQYFEWYLPNDGNHWNRLNSDASNLKSKGITAVWIPPAWKAASQNDVGYGAYDLYDLGEFNQKGTVRTKYGTRSQLQAAVTSLKNNGIQVYGDVVMNHKGGADATEMVRAVEVNPNNRNQEVTGEYTIEAYTRFDFPGRGNTHSSFKWRWYHFDGVDWDQSRNLNNRIYKFRGKAWDWEVDTEFGNYDYLMYTDYDMDHPEVVNELRNWGVWYTNTLGLDGFRIDAVKHIKYSFTRDWINHVRSATGKNMFAVAEFWKNDLGAIENYLQKTNWNHSVFDVPLHYNLYNASKSGGNYDMRNIFNGTVVQRHPSHAVTFVDNHDSQPEEALESFVEEWFKPLAYALTLTREQGYPSVFYGDYYGIPTHGVPAMRSKIDPILEARQKYAYGPQHDYLDHPDVIGWTREGDSSHPKSGLATLITDGPGGSKRMYAGLKNAGETWYDITGNRSDTVKIGSDGWGEFHVNDGSVSIYVQK

SEQ ID NO: 29722 - protein, 485 aa, Bacillus sp.
HHNGTNGTMMQYFEWYLPNDGNHWNRLNSDASNLKSKGITAVWIPPAWKAVSQNDVGYGAYDLYDLGEFNQKGTVRTKYGTRSQLQAAVTSLKNNGIQVYGDVVMNHKGGADATEMVRAVEVNPNNRNQEVTGEYTIEAWTRFDFPGRGNTHSSFKWRWYHFDGVDWDQSRNLTNRIYKFRGHGKAWDWEVDTEFGNYDYLMYTDYDMDHPEVVNELRNWGVWYTNTLGLDGFRIDAVKHIKYSFTRDWINHVRSATGKNMFAVAEFWKNDLGAIENYLQKTNWNHSVFDVPLHYNLYNASKSGGNYDMRNIFNGTVVQRHPSHAVTFVDNHDSQPEEALESFVDEWFKPLAYALTLTREQGYPSVFYGDYYGIPTHGVPAMRSKIDPILEARQKYAYGPQHDYLDHPDVIGWTREGDSSHPKSGLATLITDGPGGSKRMYAGLKNAGETWYDITGNRSDTVKIGSDGWGEFHVNKSSVSIYVQK

SEQ ID NO: 29723 - protein, 485 aa, Bacillus sp.
HHNGTNGTMMQYFEWYLPNDGNHWNRLNSDASNLKSKGITAVWIPPAWKAASQNDVGYGAYDLYDLGEFNQKGTVRTKYGTRSQLQAAVTSLKNNGIQVYGDVVMNHKGGADATEMVPAVEVNPNNRNQEVTGEYTIEAWTRFDFPGRGNTHSSFKWRWYHFDGVDWDQSRDLDNRIYKFRGHSKAWDWEVDTEFGNYDYLMYADYDMDHPEVVNELRNWGVWYTNTLGLDGFRIDAVKHIKYSFTRDWINHVRSATGKNMFAVAEFWKNDLGAIENYLQKTNWNHSVFDVPLHYNLYNASKSGGNYDMRNIFNGTVVQRHPSHAVTFVDNHDSQPEEALESFVETWFKPLAYALTLTREQGYPSVFYGDYYGIPTHGVPAMRSKIDPILEARQKYAYGPQHDYLDHPDVIGWTREGDSSHPKSGLATLITDGPGGSKRMYAGLKNAGETWYDITGNRSDTVKIGSDGWGEFHVNKASVSIYVQK

SEQ ID NO: 29724 - protein, 485 aa, Bacillus sp.
HHNGTNGTMMQYFEWYLPNDGNHWNRLNSDASNLKSKGITAVWIPPAWKAASQNDVGYGAYDLYDLGEFNQKGTVRTKYGTRSQLQAAVTSLKNNGIQVYGDVVMNHKGGADLTEMVRAVEVNPNNRNQEVTGEYTIEAWTRFDFPGRGNTHSSFKWRWYHFDGVDFDQSRQITNRIYKFRGHGKAWDWEVDTEFGNYDYLMYTDYDMDHPEVVNELRNWGVWYTNTLGLDGFRIDAVKHIKYSFTRDWINHVRSATGKNMFAVAEFWKNDLGAIENYLQKTNWNHSVFDVPLHYNLYNASKSGGNYDMRNIFNGTVVQRHPSHAVTFVDNHDSQPEEALESFVEEWFKPLAYALTLTREQGYPSVFYGDYYGIPTHGVPAMRSKIDPILEARQKYAYGPQHDYLDHPDVIGWTREGDSSHPKSGLATLITDGPGGSKRMYAGLKNAGETWYDITGNRSDTVKIGSDGWGEFHVNDGSVSIYVQK

SEQ ID NO: 29725 - protein, 485 aa, Bacillus sp.
HHNGTNGTMMQYFEWYLPNDGNHWNRLNSDASNLKSKGITAVWIPPAWKGTSQNDVGYGAYDLYDLGEFNQKGTVRTKYGTRSQLQAAVTSLKNNGIQVYGDVVMNHKGGADATEMVRAVEVNPNNRNQEVTGEYTIEAWTRFDFPGRGNTHSSFKWRWYHFDGVDWDQSRNLNNRIYKFRGHGKAWDWEVDTEFGNYDYLMYVDYDMDHPEVVNELRNWGVWYTNTLGLDGFRIDAVKHIKYSFTRDWINHVRSATGKNMFAVAEFWKNDLGAIENYLQKTNWNHSVFDVPLHYNLYNASKSQGNYDMRNIFNGTVVQRHPSHAVTFVDNHDSQPEEALESFVDTWFKPLAYALTLTREQGYPSVFYGDYYGIPTHGVPAMRSKIDPILLARQKYAYGPQHDYLDHPDVIGWTREGDSSHPKSGLATLITDGPGGSKRMYAGLKNAGETWYDITGNRSDTVKIGSDGWGEFHVNGSSVSIYVQK

SEQ ID NO: 29726 - protein, 483 aa, Bacillus sp.
HHNGTNGTMMQYFEWYLPNDGNHWNRLNSDASNLKSKGITAVWIPPAWKGASQNDTGYGAYDLYDLGEFNQKGTVRTKYGTRSQLQAAVTSLKNNGIQVYGDVVMNHKGGADYTEMVRAVEVNPNNRNQEVTGEYTIEAWTRFDFPGRGNTHSSFKWRWYHFDGVDWDQSERLNNRIYKFRGKAWDWEVDTEFGNYDYLMYADYDMDHPEVVNELRNWGVWYTNTLGLDGFRIDAVKHIKYSFTRDWINHVRSATGKNMFAVAEFWKNDLGAIENYLQKTNWNHSVFDVPLHYNLYNASKSGGNYDMRNIFNGTVVQRHPSHAVTFVDNHDSQPEEALESFVEEWFKPLAYALTLTREQGYPSVFYGDYYGIPTHGVPAMRSKIDPILEARQKYAYGPQHDYLDHPDVIGWTREGDSSHPKSGLATLITDGPGGSKRMYAGLKNAGETWYDITGNRSDTVKIGSDGWGEFHVNDGSVSIYVQK

SEQ ID NO: 29727 - protein, 483 aa, Bacillus sp.
HHNGTNGTMMQYFEWYLPNDGNHWNRLNSDASNLKSKGITAVWIPPAWKGASQNDVGYGAYDLYDLGEFNQKGTVRTKYGTRSQLQAAVTSLKNNGIQVYGDVVMNHKGGADATEMVRAVEVNPNNRNQEVTGEYTIEAWTRFDFPGRGNTHSSFKWRWYHFDGVDWDQSRRLNNRIYLFRPKAWSWEVPTENGNYDYLMYADIDMDHPEVVNELRNWGVWYTNTLGLDGFRIDAVKHIKYSFTRDWINHVRSATGKNMFAVAEFWKNDLGAIENYLQKTNWNHSVFDVPLHYNLYNASKSGGNYDMRNIFNGTVVQRHPSHAVTFVDNHDSQPEEALESFVEEWFKPLAYALTLTREQGYPSVFYGDYYGIPTHGVPAMRSKIDPILEARQKYAYGPQHDYLDHPDVIGWTREGDSSHPKSGLATLITDGPGGSKRMYAGLKNAGETWYDITGNRSDTVKIGSDGWGEFHVNDGSVSIYVQK

SEQ ID NO: 29728 - protein, 485 aa, Bacillus sp.
HHNGTNGTMMQYFEWYLPNDGNHWNRLNSDASNLKSKGITAVWIPPAWKAVSQNDVGYGAYDLYDLGEFNQKGTVRTKYGTRSQLQAAVTSLKNNGIQVYGDVVMNHKGGADATEMVDAVEVNPNNRNQEVTGEYTIEAWTRFDFPGRGNTHSSFKWRWYHFDGVDFDQSRNLTNRIYKFRGHGKAWDWEVDTEFGNYDYLMYTDYDMDHPEVVNELRNWGVWYTNTLGLDGFRIDAVKHIKYSFTRDWINHVRSATGKNMFAVAEFWKNDLGAIENYLQKTNWNHSVFDVPLHYNLYNASKSGGNYDMRNIFNGTVVQRHPSHAVTFVDNHDSQPEEALESFVEEWFKPLAYALTLTREQGYPSVFYGDYYGIPTHGVPAMRSKIDPILEARQKYAYGPQHDYLDHPDVIGWTREGDSSHPKSGLATLITDGPGGSKRMYAGLKNAGETWYDITGNRSDTVKIGSDGWGEFHVNDGSVSIYVQK

SEQ ID NO: 29729 - protein, 483 aa, Bacillus sp.
HHNGTNGTMMQYFEWYLPNDGNHWNRLNSDASNLKSKGITAVWIPPAWKGASQNDVGYGAYDLYDLGEFNQKGTVRTKYGTRSQLQAAVTSLKNNGIQVYGDVVMNHKGGADATEMVRAVEVNPNNRNQEVTGEYTIEAWTRFDFPGRGNTHSSFKWRWYHFDGVDWDQSRRLNNRIYKFRGKAWDWEVDTEFGNYDYLMYADYDMDHPEVVNELRNWGVWYTNTLGLDGFRIDAVKHIKYSFTRDWINHVRSATGKNMFAVAEFWKNDLGAIENYLQKTNWNHSVFDVPLHYNLYNASKSSGNYDMRNIFNGTVVQRHPSHAVTFVDNHDSQPEEALESFVDTWFKPLAYALTLTREQGYPSVFYGDYYGIPTHGVPAMRSKIDPILEARQKYAYGPQHDYLDHPDVIGWTREGDSSHPKSGLATLITDGPGGSKRMYAGLKNAGETWYDITGNRSDTVKIGSDGWGEFHVNQASVSIYVQK

SEQ ID NO: 29730 - protein, 485 aa, Bacillus sp.
HHNGTNGTMMQYFEWYLPNDGNHWNRLNSDASNLKSKGITAVWIPPAWKGASQNDVGYGAYDLYDLGEFNQKGTVRTKYGTRSQLQAAVTSLKNNGIQVYGDVVMNHKGGADATEMVRAVEVNPNNRNQEVTGEYTIEAWTRFDFPGRGNTHSSFKWRWYHFDGVDWDQSRRTNNRIYKFRGHGKAWDWEVDTEFGNYDYLMYTDYDMDHPEVVNELRNWGVWYTNTLGLDGFRIDAVKHIKYSFTRDWINHVRSATGKNMFAVAEFWKNDLGAIENYLQKTNWNHSVFDVPLHYNLYNASQSGGNYDMRNIFNGTVVQRHPSHAVTFVDNHDSQPEEALESFVEPWFKPLAYALTLTREQGYPSVFYGDYYGIPTHGVPAMRSKIDPILEARQKYAYGPQHDYLDHPDVIGWTREGDSSHPKSGLATLITDGPGGSKRMYAGLKNAGETWYDITGNRSDTVKIGSDGWGEFHVNKSSVSIYVQK

SEQ ID NO: 29731 - protein, 483 aa, Bacillus sp.
HHNGTNGTMMQYFEWYLPNDGNHWNRLNSDASNLKSKGIKAVWIPPAWKAVSQNDVGYGAYDLYDLGEFNQKGTVRTKYGTRSQLQAAVTSLKNNGIQVYGDVVMNHKGGADATEMVRAVEVNPNNRNQEVTGEYTIEAWTRFDFPGRGNTHSSFKWRWYHFDGVDWDQSRNLTNRIYKFRGKAWDWEVDTEFGNYDYLMYTDYDMDHPEVVNELRNWGVWYTNTLGLDGFRIDAVKHIKYSFTRDWINHVRSATGKNMFAVAEFWKNDLGAIENYLQKTNWNHSVFDVPLHYNLYNASKSGGNYDMRNIFNGTVVQRHPSHAVTFVDNHDSQPEEALESFVEEWFKPLAYALTLTREQGYPSVFYGDYYGIPTHGVPAMRSKIDPILEARQKYAYGPQHDYLDHPDVIGWTREGDSSHPKSGLATLITDGPGGSKRMYAGLKNAGETWYDITGNRSDTVKIGSDGWGEFHVNDGSVSIYVQK

SEQ ID NO: 29732 - protein, 483 aa, Bacillus sp.
HHNGTNGTMMQYFEWYLPNDGNHWNRLNSDASNLKSKGITAVWIPPAWKGASQNDVGYGAYDLYDLGEFNQKGTVRTKYGTRSQLQAAVTSLKNNGIQVYGDVVMNHKGGADATEMVRAVEVNPNNRNQEVTGEYTIEAWTRFDFPGRGNTHSSFKWRWYHFDGVDWDQSRRLNNRIYKFRAKAWDWEVDTEFGNYDYLMYADYDMDYPEVSNELRNWGVWYTNTLGLDGFRIDAVKHIKYSFTRDWINHVRSATGKNMFAVAEFWKNDLGAIENYLQKTNWNHSVFDVPLHYNLYNASKSGGNYDMRNIFNGTVVQRHPSHAVTFVDNHDSQPEEALESFVEEWFKPLAYALTLTREQGYPSVFYGDYYGIPTHGVPAMRSKIDPILEARQKYAYGPQHDYLDHPDVIGWTREGDSSHPKSGLATLITDGPGGSKRMYAGLKNAGETWYDITGNRSDTVKIGSDGWGEFHVNDGSVSIYVQK

SEQ ID NO: 29733 - protein, 483 aa, Bacillus sp.
HHNGTNGTMMQYFEWYLPNDGNHWNRLNSDASNLKSKGITAVWIPPAWKGASQNDVGYGAYDLYDLGEFNQKGTVRTKYGTRSQLQAAVTSLKNNGIQVYGDVVMNHKGGADATEMVRAVEVNPNNRNQEVTGEYTIEAWTRFDFPGRGNTHSSFKWRWYHFDGVDWDQSRKLNNRIYKFRGKAWDWEVDTEFGNYDYLMYVDYDMDHPEVVNELRNWGVWYTNTLGLDGFRIDAVKHIKYSFTRDWINHVRSATGKNMFAVAEFWKNDLGAIENYLQKTNWNHSVFDVPLHYNLYNASQSGGNYDMRNIFNGTVVQRHPSHAVTFVDNHDSQPEEALESFVEPWFKPLAYALTLTREQGYPSVFYGDYYGIPTHGVPAMRSKIDPILEARQKYAYGPQHDYLDHPDVIGWTREGDSSHPKSGLATLITDGPGGSKRMYAGLKNAGETWYDITGNRSDTVKIGSDGWGEFHVNKSSVSIYVQK

SEQ ID NO: 29734 - protein, 483 aa, Bacillus sp.
HHNGTNGTMMQYFEWYLPNDGNHWNRLNSDASNLKSKGITAVWIPPAWKGASQNDVGYGAYDLYDLGEFNQKGTVRTKYGTRSQLQAAVTSLKNNGIQVYGDVVMNHKGGADATEMVRAVEVNPNNRNQEVTGEYTIEAWTRFDFPGRGNTHSSFKWRWYHFDGVDWDQSRRLNNRIYKFRGKAWDWEVDTENGFYDYLMYADIDYDHPEVVSTLRNWGVWYTNTLGLDGFRIDAVKHIKYSFTRDWINHVRSATGKNMFAVAEFWKNDLGAIENYLQKTNWNHSVFDVPLHYNLYNASKSGGNYDMRNIFNGTVVQRHPSHAVTFVDNHDSQPEEALESFVEEWFKPLAYALTLTREQGYPSVFYGDYYGIPTHGVPAMRSKIDPILEARQKYAYGPQHDYLDHPDVIGWTREGDSSHPKSGLATLITDGPGGSKRMYAGLKNAGETWYDITGNRSDTVKIGSDGWGEFHVNDGSVSIYVQK

SEQ ID NO: 29735 - protein, 483 aa, Synthetic construct
HHNGTNGTMMQYFEWYLPNDGNHWNRLNSDASNLKSKGITAVWIPPAWKGASQNDVGYGAYDLYDLGEFNQKGTVRTKYGTRSQLQAAVTSLKNNGIQVYGDVVMNHKGGADATEMVRAVEVNPNNRNQEVTGEYTIEAWTRFDFPGRGNTHSSFKWRWYHFDGVDWDQSRRLNNRIYKFRGKAWDWEVDTEFGNYDYLMYADYDMDYPETVNEVRNWGVWYTNTLGLDGFRIDAVKHIKYSFTRDWINHVRSATGKNMFAVAEFWKNDLGAIENYLQKTNWNHSVFDVPLHYNLYNASKSGGNYDMRNIFNGTVVQRHPSHAVTFVDNHDSQPEEALESFVEEWFKPLAYALTLTREQGYPSVFYGDYYGIPTHGVPAMRSKIDPILEARQKYAYGPQHDYLDHPDVIGWTREGDSSHPKSGLATLITDGPGGSKRMYAGLKNAGETWYDITGNRSDTVKIGSDGWGEFHVNDGSVSIYVQK

SEQ ID NO: 29736 - protein, 483 aa, Bacillus sp.
HHNGTNGTMMQYFEWYLPNDGNHWNRLNSDASNLKSKGIKAVWIPPAWKAASQNDVGYGAYDLYDLGEFNQKGTVRTKYGTRSQLQAAVTSLKNNGIQVYGDVVMNHKGGADATEMVRAVEVNPNNRNQEVTGEYTIEAWTRFDFPGRGNTHSSFKWRWYHFDGVDFDQSRDLTNRIYKFRGKAWDWEVDTEFGNYDYLMYADYDMDHPEVVNELRNWGVWYTNTLGLDGFRIDAVKHIKYSFTRDWINHVRSATGKNMFAVAEFWKNDLGAIENYLQKTNWNHSVFDVPLHYNLYNASKSGGNYDMRNIFNGTVVQRHPSHAVTFVDNHDSQPEEALESFVDPWFKPLAYALTLTREQGYPSVFYGDYYGIPTHGVPAMRSKIDPILEARQKYAYGPQHDYLDHPDVIGWTREGDSSHPKSGLATLITDGPGGSKRMYAGLKNAGETWYDITGNRSDTVKIGSDGWGEFHVNGGSVSIYVQK

SEQ ID NO: 29737 - protein, 483 aa, Bacillus sp.
HHNGTNGTMMQYFEWYLPNDGNHWNRLNSDASNLKSKGITAVWIPPAWKGASQNDVGYGAYDLYDLGEFNQKGTVRTKYGTRSQLQAAVTSLKNNGIQVYGDVVMNHKGGADATEMVRAVEVNPNNRNQEVTGEYTIEAWTRFDFPGRGNTHSSFKWRWYHFDGVDWDQSRRLNNRIYKFRGKAWDWEVDTEFGNYDYLMYADYDMDHPEVVNELRNWGVWYTNTLGLDGFRIDAVKHIKYSFTRDWINHVRSATGKNMFAVAEFWKNDLGAIENYLQKTNWNHSVFDVPLHYNLYNASKSAGNYDMRNIFNGTVVQRHPSHAVTFVDNHDSQPEEALESFVETWFKPLAYALTLTREQGYPSVFYGDYYGIPTHGVPAMRSKIDPILEARQKYAYGPQHDYLDHPDVIGWTREGDSSHPKSGLATLITDGPGGSKRMYAGLKNAGETWYDITGNRSDTVKIGSDGWGEFHVNKTSVSIYVQK

SEQ ID NO: 29738 - protein, 483 aa, Bacillus sp.
HHNGTNGTMMQYFEWYLPNDGNHWNRLNSDASNLKSKGITAVWIPPAWKGASQNDVGYGAYDLYDLGEFNQKGTVRTKYGTRSQLQAAVTSLKNNGIQVYGDVVMNHKGGADATEMVRAVEVNPNNRNQEVTGEYTIEAWTRFDFPGRGNTHSSFKWRWYHFDGVDWDQSRRLNNRIYKFRGKAWDWEVDTEFGNYDYLMYADYDMDHPEVVNELRNWGVWYTNTLGLDGFRIDAVKHIKYSFTRDWINHVRSATGKNMFAVAEFWKNDLGAIENYLQKTNWNHSVFDVPLHYNLYNASKSQGNYDMRNIFNGTVVQRHPSHAVTFVDNHDSQPEEALESFVDTWFKPLAYALTLTREQGYPSVFYGDYYGIPTHGVPAMRSKIDPILEARQKYAYGPQHDYLDHPDVIGWTREGDSSHPKSGLATLITDGPGGSKRMYAGLKNAGETWYDITGNRSDTVKIGSDGWGEFHVNDQSVSIYVQK

SEQ ID NO: 29739 - protein, 483 aa, Synthetic construct
HHNGTNGTMMQYFEWYLPNDGNHWNRLNSDASNLKSKGITAVWIPPAWKGASQNDVGYGAYDLYDLGEFNQKGTVRTKYGTRSQLQAAVTSLKNNGIQVYGDVVMNHKGGADATEMVRAVEVNPNNRNQEVTGEYTIEAWTRFDFPGRGNTHSSFKWRWYHFDGVDWDQSRRLNNRIYKFRGKEWDWEVDTEFGNYDYLMYTDYDMDHSEVVNELRNWGVWYTNTLGLDGFRIDAVKHIKYSFTRDWINHVRSATGKNMFAVAEFWKNDLGAIENYLQKTNWNHSVFDVPLHYNLYNASKSGGNYDMRNIFNGTVVQRHPSHAVTFVDNHDSQPEEALESFVEEWFKPLAYALTLTREQGYPSVFYGDYYGIPTHGVPAMRSKIDPILEARQKYAYGPQHDYLDHPDVIGWTREGDSSHPKSGLATLITDGPGGSKRMYAGLKNAGETWYDITGNRSDTVKIGSDGWGEFHVNDGSVSIYVQK

SEQ ID NO: 29740 - protein, 483 aa, Bacillus sp.
HHNGTNGTMMQYFEWYLPNDGNHWNRLNSDASNLKSKGITAVWIPPAWKATSQNDVGYGAYDLYDLGEFNQKGTVRTKYGTRSQLQAAVTSLKNNGIQVYGDVVMNHKGGADATEMVRAVEVNPNNRNQEVTGEYTIEAWTRFDFPGRGNTHSSFKWRWYHFDGVDWDQSRELSNRIYKFRGKAWDWEVDTEFGNYDYLMYADYDMDHPEVVNELRNWGVWYTNTLGLDGFRIDAVKHIKYSFTRDWINHVRSATGKNMFAVAEFWKNDLGAIENYLQKTNWNHSVFDVPLHYNLYNASKSQGNYDMRNIFNGTVVQANPNHAVTFVDNHDSQPEEALESFVDTWFKPLAYALTLTREQGYPSVFYGDYYGIPTHGVPAMRSKIDPILEARQKYAYGPQHDYLDHPDVIGWTREGDSSHPKSGLATLITDGPGGSKRMYAGLKNAGETWYDITGNRSDTVKIGSDGWGEFHVNGSSVSIYVQK

SEQ ID NO: 29741 - protein, 483 aa, Bacillus sp.
HHNGTNGTMMQYFEWYLPNDGNHWNRLNSDASNLKSKGITAVWIPPAWKGASQNDVGYGAYDLYDLGEFNQKGTVRTKYGTRSQLQAAVTSLKNNGIQVYGDVVMNHKGGADATEMVRAVEVNPNNRQQEVTGEYTIEAWTRFDFPGRGNTHSSFKWRWYHFDGVDWDQSRRLNNRIYLFRGKSWDWEVDTEFGNYDYLMYADYDMDHPEVVNELRNWGVWYTNTLGLDGFRIDAVKHIKYSFTRDWINHVRSATGKNMFAVAEFWKNDLGAIENYLQKTNWNHSVFDVPLHYNLYNASKSGGNYDMRNIFNGTVVQRHPSHAVTFVDNHDSQPEEALESFVEEWFKPLAYALTLTREQGYPSVFYGDYYGIPTHGVPAMRSKIDPILEARQKYAYGPQHDYLDHPDVIGWTREGDSSHPKSGLATLITDGPGGSKRMYAGLKNAGETWYDITGNRSDTVKIGSDGWGEFHVNDGSVSIYVQK

SEQ ID NO: 29742 - protein, 483 aa, Bacillus sp.
HHNGTNGTMMQYFEWYLPNDGNHWNRLNSDASNLKSKGITAVWIPPAWKGASQNDVGYGAYDLYDLGEFNQKGTVRTKYGTRSQLQAAVTSLKNNGIQVYGDVVMNHKGGADATEMVRAVEVNPNNRNQEVTGEYTIEAWTRFDFPGRGNTHSSFKWRWYHFDGVDWDQSRRLNNRIYKFRGKAWDWEVDTEFGNYDYLMYADYDMDHPEVVNELRNWGVWYTNTLGLDGFRIDAVKHIKYSFTRDWINHVRSATGKNMFAVAEFWKNDLGAIENYLQKTNWNHSVFDVPLHYNLYNASQSAGNYDMRNIFNGTVVQRHPSHAVTFVDNHDSQPEEALESFVETWFKPLAYALTLTREQGYPSVFYGDYYGIPTHGVPAMRSKIDPILEARQKYAYGPQHDYLDHPDVIGWTREGDSSHPKSGLATLITDGPGGSKRMYAGLKNAGETWYDITGNRSDTVKIGSDGWGEFHVNDKSVSIYVQK

SEQ ID NO: 29743 - protein, 485 aa, Synthetic construct
HHNGTNGTMMQYFEWYLPNDGNHWNRLNSDASNLKSKGITAVWIPPAWKGASQNDVGYGAYDLYDLGEFNQKGTVRTKYGTRSQLQAAVTSLKNNGIQVYGDVVMNHKGGADATEMVRAVEVNPNNRNQEVTGEYTIEAWTRFDFPGRGNTHSSFKWRWYHFDGVDWDQSRRLNNRIYKFRGHGKAWDWEVDTENGNYDYLMYADYDYDHPETTNEVRNWGVWYTNTLGLDGFRIDAVKHIKYSFTRDWINHVRSATGKNMFAVAEFWKNDLGAIENYLQKTNWNHSVFDVPLHYNLYNASKSGGNYDMRNIFNGTVVQRHPSHAVTFVDNHDSQPEEALESFVEEWFKPLAYALTLTREQGYPSVFYGDYYGIPTHGVPAMRSKIDPILEARQKYAYGPQHDYLDHPDVIGWTREGDSSHPKSGLATLITDGPGGSKRMYAGLKNAGETWYDITGNRSDTVKIGSDGWGEFHVNDGSVSIYVQK

SEQ ID NO: 29744 - protein, 483 aa, Bacillus sp.
HHNGTNGTMMQYFEWYLPNDGNHWNRLNSDASNLKSKGITAVWIPPAWKGASQNDVGYGAYDLYDLGEFNQKGTVRTKYGTRSQLQAAVTSLKNNGIQVYGDVVMNHKGGADATEMVRAVEVNPNNRNQEVTGEYTIEAWTRFDFPGRGNTHSSFKWRWYHFDGVDWDQSRRLDNRIYKFRGKAWDWEVDTEFGNYDYLMYTDYDMDHPEVVNELRNWGVWYTNTLGLDGFRIDAVKHIKYSFTRDWINHVRSATGKNMFAVAEFWKNDLGAIENYLQKTNWNHSVFDVPLHYNLYNASKSSGNYDMRNIFNGTVVQRHPSHAVTFVDNHDSQPEEALESFVDEWFKPLAYALTLTREQGYPSVFYGDYYGIPTHGVPAMRSKIDPILEARQKYAYGPQHDYLDHPDVIGWTREGDSSHPKSGLATLITDGPGGSKRMYAGLKNAGETWYDITGNRSDTVKIGSDGWGEFHVNKQSVSIYVQK

SEQ ID NO: 29745 - protein, 483 aa, Bacillus sp.
HHNGTNGTMMQYFEWYLPNDGNHWNRLNSDASNLKSKGITAVWIPPAWKATSQNDVGYGAYDLYDLGEFNQKGTVRTKYGTRSQLQAAVTSLKNNGIQVYGDVVMNHKGGADLTEMVRAVEVNPNNRNQEVTGEYTIEAWTRFDFPGRGNTHSSFKWRWYHFDGVDWDQSRELSNRIYKFRGKAWDWEVDTEFGNYDYLMYADYDMDHPEVVNELRNWGVWYTNTLGLDGFRIDAVKHIKYSFTRDWINHVRSATGKNMFAVAEFWKNDLGAIENYLQKTNWNHSVFDVPLHYNLYNASKSVGNYDMRNIFNGTVVQRHPSHAVTFVDNHDSQPEEALESFVDTWFKPLAYALTLTREQGYPSVFYGDYYGIPTHGVPAMRSKIDPILEARQKYAYGPQHDYLDHPDVIGWTREGDSSHPKSGLATLITDGPGGSKRMYAGLKNAGETWYDITGNRSDTVKIGSDGWGEFHVNGSSVSIYVQK

SEQ ID NO: 29746 - protein, 483 aa, Bacillus sp.
HHNGTNGTMMQYFEWYLPNDGNHWNRLNSDASNLKSKGITAVWIPPAWKAVSQNDVGYGAYDLYDLGEFNQKGTVRTKYGTRSQLQAAVTSLKNNGIQVYGDVVMNHKGGADATEMVRAVEVNPNNRNQEVTGEYTIEAWTRFDFPGRGNTHSSFKWRWYHFDGVDWDQSRELSNRIYKFRGKAWDWEVDTEFGNYDYLMYADYDMDHPEVVNELRNWGVWYTNTLGLDGFRIDAVKHIKYSFTRDWINHVRSATGKNMFAVAEFWKNDLGAIENYLQKTNWNHSVFDVPLHYNLYNASKSGGNYDMRNIFNGTVVQRHPSHAVTFVDNHDSQPEEALESFVETWFKPLAYALTLTREQGYPSVFYGDYYGIPTHGVPAMRSKIDPILEARQKYAYGPQHDYLDHPDVIGWTREGDSSHPKSGLATLITDGPGGSKRMYAGLKNAGETWYDITGNRSDTVKIGSDGWGEFHVNDASVSIYVQK

SEQ ID NO: 29747 - protein, 485 aa, Synthetic construct
HHNGTNGTMMQYFEWYLPNDGNHWNRLNSDASNLKSKGITAVWIPPAWKGASQNDVGYGAYDLYDLGEFNQKGTVRTKYGTRSQLQAAVTSLKNNGIQVYGDVVMNHKGGADATEMVRAVEVNPNNRNQEVTGEYTIEAWTRFDFPGRGNTHSSFKWRWYHFDGVDWDQSRRLNNRIYKFRGHGKAWDWEVDTEFGNYDYLMYADYDYDHPESTNELRNWGVWYTNTLGLDGFRIDAVKHIKYSFTRDWINHVRSATGKNMFAVAEFWKNDLGAIENYLQKTNWNHSVFDVPLHYNLYNASKSGGNYDMRNIFNGTVVQRHPSHAVTFVDNHDSQPEEALESFVEEWFKPLAYALTLTREQGYPSVFYGDYYGIPTHGVPAMRSKIDPILEARQKYAYGPQHDYLDHPDVIGWTREGDSSHPKSGLATLITDGPGGSKRMYAGLKNAGETWYDITGNRSDTVKIGSDGWGEFHVNDGSVSIYVQK

SEQ ID NO: 29748 - protein, 483 aa, Bacillus sp.
HHNGTNGTMMQYFEWYLPNDGNHWNRLNSDASNLKSKGITAVWIPPAWKGASQNDVGYGAYDLYDLGEFNQKGTVRTKYGTRSQLQAAVTSLKNNGIQVYGDVVMNHKGGADATEMVRAVEVNPNNRNQEVTGEYTIEAWTRFDFPGRGNTHSSFKWRWYHFDGVDWDQSRRLNNRIYKFRGKAWDWEVDTEFGNYDYLMYADYDMDHPEVVNELRNWGVWYTNTLGLDGFRIDAVKHIKYSFTRDWINHVRSATGKNMFAVAEFWKNDLGAIENYLQKTNWNHSVFDVPLHYNLYNASKSQGNYDMRNIFNGTVVQRHPSHAVTFVDNHDSQPEEALESFVDTWFKPLAYALTLTREQGYPSVFYGDYYGIPTHGVPAMRSKIDPILEARQKYAYGPQHDYLDHPDVIGWTREGDSSHPKSGLATLITDGPGGSKRMYAGLKNAGETWYDITGNRSDTVKIGSDGWGEFHVNQTSVSIYVQK

SEQ ID NO: 29749 - protein, 483 aa, Bacillus sp.
HHNGTNGTMMQYFEWYLPNDGNHWNRLNSDASNLKSKGIKAVWIPPAWKAVSQNDVGYGAYDLYDLGEFNQKGTVRTKYGTRSQLQAAVTSLKNNGIQVYGDVVMNHKGGADATEMVRAVEVNPNNRNQEVTGEYTIEAWTRFDFPGRGNTHSSFKWRWYHFDGVDFDQSRRLSNRIYKFRGKAWDWEVDTEFGNYDYLMYADYDMDHPEVVNELRNWGVWYTNTLGLDGFRIDAVKHIKYSFTRDWINHVRSATGKNMFAVAEFWKNDLGAIENYLQKTNWNHSVFDVPLHYNLYNASKSGGNYDMRNIFNGTVVQRHPSHAVTFVDNHDSQPEEALESFVEEWFKPLAYALTLTREQGYPSVFYGDYYGIPTHGVPAMRSKIDPILEARQKYAYGPQHDYLDHPDVIGWTREGDSSHPKSGLATLITDGPGGSKRMYAGLKNAGETWYDITGNRSDTVKIGSDGWGEFHVNDGSVSIYVQK

SEQ ID NO: 29750 - protein, 483 aa, Bacillus sp.
HHNGTNGTMMQYFEWYLPNDGNHWNRLNSDASNLKSKGITAVWIPPAWKGASQNDVGYGAYDLYDLGEFNQKGTVRTKYGTRSQLQAAVTSLKNNGIQVYGDVVMNHKGGADATEMVRAVEVNPNNRNQEVTGEYTIEAWTRFDFPGRGNTHSSFKWRWYHFDGVDWDQSRELSNRIYKFRGKAWDWEVDTEFGNYDYLMYADYDMDHPEVVNELRNWGVWYTNTLGLDGFRIDAVKHIKYSFTRDWINHVRSATGKNMFAVAEFWKNDLGAIENYLQKTNWNHSVFDVPLHYNLYNASKSQGNYDMRNIFNGTVVQANPNHAVTFVDNHDSQPEEALESFVDTWFKPLAYALTLTREQGYPSVFYGDYYGIPTHGVPAMRSKIDPILEARQKYAYGPQHDYLDHPDVIGWTREGDSSHPKSGLATLITDGPGGSKRMYAGLKNAGETWYDITGNRSDTVKIGSDGWGEFHVNGSSVSIYVQK

SEQ ID NO: 29751 - protein, 483 aa, Bacillus sp.
HHNGTNGTMMQYFEWYLPNDGNHWNRLNSDASNLKSKGITAVWIPPAWKAVSQNDVGYGAYDLYDLGEFNQKGTVRTKYGTRSQLQAAVTSLKNNGIQVYGDVVMNHKGGADATEMVRAVEVNPNNRNQEVTGEYTIEAWTRFDFPGRGNTHSSFKWRWYHFDGVDWDQSRQLNNRIYKFRGKAWDWEVDTEFGNYDYLMYVDYDMDHPEVVNELRNWGVWYTNTLGLDGFRIDAVKHIKYSFTRDWINHVRSATGKNMFAVAEFWKNDLGAIENYLQKTNWNHSVFDVPLHYNLYNASKSQGNYDMRNIFNGTVVQRHPSHAVTFVDNHDSQPEEALESFVDTWFKPLAYALTLTREQGYPSVFYGDYYGIPTHGVPAMRSKIDPILEARQKYAYGPQHDYLDHPDVIGWTREGDSSHPKSGLATLITDGPGGSKRMYAGLKNAGETWYDITGNRSDTVKIGSDGWGEFHVNGSSVSIYVQK

SEQ ID NO: 29752 - protein, 485 aa, Bacillus sp.
HHNGTNGTMMQYFEWYLPNDGNHWNRLNSDASNLKSKGITAVWIPPAWKGASQNDVGYGAYDLYDLGEFNQKGTVRTKYGTRSQLQAAVTSLKNNGIQVYGDVVMNHKGGADATEMVRAVEVNPNNRNQEVTGEYTIEAWTRFDFPGRGNTHSSFKWRWYHFDGVDWDQSRKLNNRIYKFRGHGKAWDWEVDTEFGNYDYLMYVDYDMDHPEVVNELRNWGVWYTNTLGLDGFRIDAVKHIKYSFTRDWINHVRSATGKNMFAVAEFWKNDLGAIENYLQKTNWNHSVFDVPLHYNLYNASQSGGNYDMRNIFNGTVVQRHPSHAVTFVDNHDSQPEEALESFVEPWFKPLAYALTLTREQGYPSVFYGDYYGIPTHGVPAMRSKIDPILEARQKYAYGPQHDYLDHPDVIGWTREGDSSHPKSGLATLITDGPGGSKRMYAGLKNAGETWYDITGNRSDTVKIGSDGWGEFHVNKSSVSIYVQK

SEQ ID NO: 29753 - protein, 483 aa, Bacillus sp.
HHNGTNGTMMQYFEWYLPNDGNHWNRLNSDASNLKSKGITAVWIPPAWKGASQNDVGYGAYDLYDLGEFNQKGTVRTKYGTRSQLQAAVTSLKNNGIQVYGDVVMNHKGGADATEMVRAVEVNPNNRNQEVTGEYTIEAWTRFDFPGRGNTHSSFKWRWYHFDGVDWDQSRRLNNRIYKFRGKAWDWEVDTEFGNYDYLMYADYDMDHPEVVNELRNWGVWYTNTLGLDGFRIDAVKHIKYSFTRDWINHVRSATGKNMFAVAEFWKNDLGAIENYLQKTNWNHSVFDVPLHYNLYNASKSAGNYDMRNIFNGTVVQRHPSHAVTFVDNHDSQPEEALESFVDPWFKPLAYALTLTREQGYPSVFYGDYYGIPTHGVPAMRSKIDPILEARQKYAYGPQHDYLDHPDVIGWTREGDSSHPKSGLATLITDGPGGSKRMYAGLKNAGETWYDITGNRSDTVKIGSDGWGEFHVNKQSVSIYVQK

SEQ ID NO: 29754 - protein, 483 aa, Bacillus sp.
HHNGTNGTMMQYFEWYLPNDGNHWNRLNSDASNLKSKGITAVWIPPAWKAASQNDVGYGAYDLYDLGEFNQKGTVRTKYGTRSQLQAAVTSLKNNGIQVYGDVVMNHKGGADATEMVRAVEVNPNNRNQEVTGEYTIEAWTRFDFPGRGNTHSSFKWRWYHFDGVDWDQSRDLQNRIYKFRGKAWDWEVDTEFGNYDYLMYADYDMDHPEVVNELRNWGVWYTNTLGLDGFRIDAVKHIKYSFTRDWINHVRSATGKNMFAVAEFWKNDLGAIENYLQKTNWNHSVFDVPLHYNLYNASKSSGNYDMRNIFNGTVVQRHPSHAVTFVDNHDSQPEEALESFVDEWFKPLAYALTLTREQGYPSVFYGDYYGIPTHGVPAMRSKIDPILEARQKYAYGPQHDYLDHPDVIGWTREGDSSHPKSGLATLITDGPGGSKRMYAGLKNAGETWYDITGNRSDTVKTESDGWGEFHVNKQSVSIYVQK

SEQ ID NO: 29755 - protein, 483 aa, Bacillus sp.
HHNGTNGTMMQYFEWYLPNDGNHWNRLNSDASNLKSKGITAVWIPPAWKAVSQNDVGYGAYDLYDLGEFNQKGTVRTKYGTRSQLQAAVTSLKNNGIQVYGDVVMNHKGGADATEMVRAVEVNPNNRNQEVTGEYTIEAWTRFDFPGRGNTHSSFKWRWYHFDGVDWDQSRDLENRIYKFRGKAWDWEVDTEFGNYDYLMYADYDMDHPEVVNELRNWGVWYTNTLGLDGFRIDAVKHIKYSFTRDWINHVRSATGKNMFAVAEFWKNDLGAIENYLQKTNWNHSVFDVPLHYNLYNASQSGGNYDMRNIFNGTVVQRHPSHAVTFVDNHDSQPEEALESFVEPWFKPLAYALTLTREQGYPSVFYGDYYGIPTHGVPAMRSKIDPILEARQKYAYGPQHDYLDHPDVIGWTREGDSSHPKSGLATLITDGPGGSKRMYAGLKNAGETWYDITGNRSDTVKIGSDGWGEFHVNKSSVSIYVQK

SEQ ID NO: 29756 - protein, 483 aa, Bacillus sp.
HHNGTNGTMMQYFEWYLPNDGNHWNRLNSDASNLKSKGITAVWIPPAWKGASQNDVGYGAYDLYDLGEFNQKGTVRTKYGTRSQLQAAVTSLKNNGIQVYGDVVMNHKGGADATEMVRAVEVNPNNRNQEVTGEYTIEAWTRFDFPGRGNTHSSFKWRWYHFDGVDWDQSRRLNNRIYKFRGKAWDWEVDTEFGNYDYLMYADYDMDHPEVVNELRNWGVWYTNTLGLDGFRIDAVKHIKYSFTRDWINHVRSATGKNMFAVAEFWKNDLGAIENYLQKTNWNHSVFDVPLHYNLYNASKSAGNYDMRNIFNGTVVQRHPSHAVTFVDNHDSQPEEALESFVDTWFKPLAYALTLTREQGYPSVFYGDYYGIPTHGVPAMRSKIDPILEARQKYAYGPQHDYLDHPDVIGWTREGDSSHPKSGLATLITDGPGGSKRMYAGLKNAGETWYDITGNRSDTVKIGSDGWGEFHVNQQSVSIYVQK

SEQ ID NO: 29757 - protein, 483 aa, Bacillus sp.
HHNGTNGTMMQYFEWYLPNDGNHWNRLNSDASNLKSKGITAVWIPPAWKAVSQNDVGYGAYDLYDLGEFNQKGTVRTKYGTRSQLQAAVTSLKNNGIQVYGDVVMNHKGGADATEMVRAVEVNPNNRNQEVTGEYTIEAWTRFDFPGRGNTHSSFKWRWYHFDGVDWDQSRDLENRIYKFRGKAWDWEVDTEFGNYDYLMYADYDMDHPEVVNELRNWGVWYTNTLGLDGFRIDAVKHIKYSFTRDWINHVRSATGKNMFAVAEFWKNDLGAIENYLQKTNWNHSVFDVPLHYNLYNASKSGGNYDMRNIFNGTVVQRHPSHAVTFVDNHDSQPEEALESFVETWFKPLAYALTLTREQGYPSVFYGDYYGIPTHGVPAMRSKIDPILEARQKYAYGPQHDYLDHPDVIGWTREGDSSHPKSGLATLITDGPGGSKRMYAGLKNAGETWYDITGNRSDTVKIGSDGWGEFHVNDASVSIYVQK

SEQ ID NO: 29758 - protein, 483 aa, Bacillus sp.
HHNGTNGTMMQYFEWYLPNDGNHWNRLNSDASNLKSKGITAVWIPPAWKAASQNDVGYGAYDLYDLGEFNQKGTVRTKYGTRSQLQAAVTSLKNNGIQVYGDVVMNHKGGADATEMVRAVEVNPNNRNQEVTGEYTIEAWTRFDFPGRGNTHSSFKWRWYHFDGVDWDQSRDLDNRIYKFRGKAWDWEVDTEFGNYDYLMYADYDMDHPEVVNELRNWGVWYTNTLGLDGFRIDAVKHIKYSFTRDWINHVRSATGKNMFAVAEFWKNDLGAIENYLQKTNWNHSVFDVPLHYNLYNASKSGGNYDMRNIFNGTVVQRHPSHAVTFVDNHDSQPEEALESFVETWFKPLAYALTLTREQGYPSVFYGDYYGIPTHGVPAMRSKIDPILEARQKYAYGPQHDYLDHPDVIGWTREGDSSHPKSGLATLITDGPGGSKRMYAGLKNAGETWYDITGNRSDTVKIGSDGWGEFHVNKASVSIYVQK

SEQ ID NO: 29759 - protein, 483 aa, Bacillus sp.
HHNGTNGTMMQYFEWYLPNDGNHWNRLNSDASNLKSKGITAVWIPPAWKGASQNDVGYGAYDLYDLGEFNQKGTVRTKYGTRSQLQAAVTSLKNNGIQVYGDVVMNHKGGADATEMVRAVEVNPNNRNQEVTGEYTIEAWTRFDFPGRGNTHSSFKWRWYHFDGVDWDQSRRLNNRIYKFRGKAWDWEVDTEFGNYDYLMYADYDMDHPEVVNELRNWGVWYTNTLGLDGFRIDAVKHIKYSFTRDWINHVRSATGKNMFAVAEFWKNDLGAIENYLQKTNWNHSVFDVPLHYNLYNASKSAGNYDMRNIFNGTVVQRHPSHAVTFVDNHDSQPEEALESFVEPWFKPLAYALTLTREQGYPSVFYGDYYGIPTHGVPAMRSKIDPILEARQKYAYGPQHDYLDHPDVIGWTREGDSSHPKSGLATLITDGPGGSKRMYAGLKNAGETWYDITGNRSDTVKIGSDGWGEFHVNKASVSIYVQK

SEQ ID NO: 29760 - protein, 483 aa, Bacillus sp.
HHNGTNGTMMQYFEWYLPNDGNHWNRLNSDASNLKSKGITAVWIPPAWKAASQNDVGYGAYDLYDLGEFNQKGTVRTKYGTRSQLQAAVTSLKNNGIQVYGDVVMNHKGGADATEMVRAVEVNPNNRNQEVTGEYTIEAYTRFDFSGRGNTHSSFKWRWYHFDGVDWDQSRDLDNRIYKFRGKAWDWEVDTEFGNYDYLMYADYDMDHPEVVNELRNWGVWYTNTLGLDGFRIDAVKHIKYSFTRDWINHVRSATGKNMFAVAEFWKNDLGAIENYLQKTNWNHSVFDVPLHYNLYNASKSGGNYDMRNIFNGTVVQRHPSHAVTFVDNHDSQPEEALESFVEEWFKPLAYALTLTREQGYPSVFYGDYYGIPTHGVPAMRSKIDPILEARQKYAYGPQHDYLDHPDVIGWTREGDSSHPKSGLATLITDGPGGSKRMYAGLKNAGETWYDITGNRSDTVKIGSDGWGKFHVNDGSVSIYVQK

SEQ ID NO: 29761 - protein, 483 aa, Bacillus sp.
HHNGTNGTMMQYFEWYLPNDGNHWNRLNSDASNLKSKGITAVWIPPAWKGASQNDVGYGAYDLYDLGEFNQKGTVRTKYGTRSQLQAAVTSLKNNGIQVYGDVVMNHKGGADATEMVRAVEVNPNNRNQEVTGEYTIEAWTRFDFPGRGNTHSSFKWRWYHFDGVDWDQSRRLNNRIYKFRGKAWDWEVDTEFGNYDYLMYADYDMDHPEVVNELRNWGVWYTNTLGLDGFRIDAVKHIKYSFTRDWINHVRSATGKNMFAVAEFWKNDLGAIENYLQKTNWNHSVFDVPLHYNLYNASKSAGNYDMRNIFNGTVVQRHPSHAVTFVDNHDSQPEEALESFVEKWFKPLAYALTLTREQGYPSVFYGDYYGIPTHGVPAMRSKIDPILEARQKYAYGPQHDYLDHPDVIGWTREGDSSHPKSGLATLITDGPGGSKRMYAGLKNAGETWYDITGNRSDTVKIGSDGWGEFHVNDKSVSIYVQK

SEQ ID NO: 29762 - protein, 483 aa, Bacillus sp.
HHNGTNGTMMQYFEWYLPNDGNHWNRLNSDASNLKSKGITAVWIPPAWKGASQNDVGYGAYDLYDLGEFNQKGTVRTKYGTRSQLQAAVTSLKNNGIQVYGDVVMNHKGGADATEMVRAVEVNPNNRNQEVTGEYTIEAWTRFDFPGRGNTHSSFKWRWYHFDGVDWDQSRRTNNRIYKFRGKAWDWEVDTEFGNYDYLMYTDYDMDHPEVVNELRNWGVWYTNTLGLDGFRIDAVKHIKYSFTRDWINHVRSATGKNMFAVAEFWKNDLGAIENYLQKTNWNHSVFDVPLHYNLYNASKSGGNYDMRNIFNGTVVQRHPSHAVTFVDNHDSQPEEALESFVETWFKPLAYALTLTREQGYPSVFYGDYYGIPTHGVPAMRSKIDPILEARQKYAYGPQHDYLDHPDVIGWTREGDSSHPKSGLATLITDGPGGSKRMYAGLKNAGETWYDITGNRSDTVKIGSDGWGEFHVNKASVSIYVQK

SEQ ID NO: 29763 - protein, 485 aa, Bacillus sp.
HHNGTNGTMMQYFEWYLPNDGNHWNRLNSDASNLKSKGITAVWIPPAWKAVSQNDVGYGAYDLYDLGEFNQKGTVRTKYGTRSQLQAAVTSLKNNGIQVYGDVVMNHKGGADATEMVRAVEVNPNNRNQEVTGEYTIEAWTRFDFPGRGNTHSSFKWRWYHFDGVDFDQSRNLTNRIYKFRGHGKAWDWEVDTEFGNYDYLMYTDYDMDHPEVVNELRNWGVWYTNTLGLDGFRIDAVKHIKYSFTRDWINHVRSATGKNMFAVAEFWKNDLGAIENYLQKTNWNHSVFDVPLHYNLYNASKSGGNYDMRNIFNGTVVQRHPSHAVTFVDNHDSQPEEALESFVEEWFKPLAYALTLTREQGYPSVFYGDYYGIPTHGVPAMRSKIDPILEARQKYAYGPQHDYLDHPDVIGWTREGDSSHPKSGLATLITDGPGGSKRMYAGLKNAGETWYDITGNRSDTVKIGSDGWGEFHVNDGSVSIYVQK

SEQ ID NO: 29764 - protein, 485 aa, Bacillus sp.
HHNGTNGTMMQYFEWYLPNDGNHWNRLNSDASNLKSKGITAVWIPPAWKGASQNDVGYGAYDLYDLGEFNQKGTVRTKYGTRSQLQAAVTSLKNNGIQVYGDVVMNHKGGADLTEMVDAVEVNPNNRNQEVTGEYTIEAWTRFDFPGRGNTHSSFKWRWYHFDGVDFDQSRRLNNRIYKFRGHGKAWDWEVDTEFGNYDYLMYADYDMDHPEVVNELRNWGVWYTNTLGLDGFRIDAVKHIKYSFTRDWINHVRIATGKNMFAVAEFWKNDLGAIENYLQKTNWNHSVFDVPLHYNLYNASKSGGNYDMRNIFNGTVVQRHPSHAVTFVDNHDSQPEEALESFVDEWFKPLAYALTLTREQGYPSVFYGDYYGIPTHGVPAMRSKIDPILEARQKYAYGPQHDYLDHPDVIGWTREGDSSHPKSGLATLITDGPGGSKRMYAGLKNAGETWYDITGNRSDTVKIGSDGWGEFHVNDQSVSIYVQK

SEQ ID NO: 29765 - protein, 485 aa, Bacillus sp.
HHNGTNGTMMQYFEWYLPNDGNHWNRLNSDASNLKSKGITAVWIPPAWKGASQNDVGYGAYDLYDLGEFNQRGTVRTKYGTRSQLQAAVTSLKNNGIQVYGDVVMNHKGGADATEMVRAVEVNPNNRNQEVTGEYTIEAWTRFDFPGRGNTHSSFKWRWYHFDGVDFDQSRRLNNRIYKFRGHGKAWDWEVDTEFGNYDYLMYADYDMDHPEVVNELRNWGVWYTNTLGLDGFRIDAVKHIKYSFTRDWINHVRSATGKNMFAVAEFWKNDLGAIENYLQKTNWNHSVFDVPLHYNLYNASKSGGNYDMRNIFNGTVVQRHPSHAVTFVDNHDSQPEEALESFVETWFKPLAYALTLTREQGYPSVFYGDYYGIPTHGVPAMRSKIDPILEARQKYAYGPQHDYLDHPDVIGWTREGDSSHPKSGLATLITDGPGGSKRMYAGLKNAGETWYDITGNRSDTVKIGSDGWGEFHVNKGSVSIYVQK

SEQ ID NO: 29766 - protein, 485 aa, Bacillus sp.
HHNGTNGTMMQYFEWYLPNDGNHWNRLNSDASNLKSKGITAVWIPPAWKATSQNDVGYGAYDLYDLGEFNQKGTVRTKYGTRSQLQAAVTSLKNNGIQVYGDVVMNHKGGADATEMVRAVEVNPNNRNQEVTGEYTIEAWTRFDFPGRGNTHSSFKWRWYHFDGVDWDQSRELNNRIYKFRGHGKAWDWEVDTEFGNYDYLMYTDYDMDHPEVVNELRNWGVWYTNTLGLDGFRIDAVKHIKYSFTRDWINHVRSATGKNMFAVAEFWKNDLGAIENYLQKTNWNHSVFDVPLHYNLYNASKSGGNYDMRNIFNGTVVQRHPSHAVTFVDNHDSQPEEALESFVETWFKPLAYALTLTREQGYPSVFYGDYYGIPTHGVPAMRSKIDPILEARQKYAYGPQHDYLDHPDVIGWTREGDSSHPKSGLATLITDGPGGSKRMYAGLKNAGETWYDITGNRSDTVKIGSDGWGEFHVNDASVSIYVQK

SEQ ID NO: 29767 - protein, 485 aa, Bacillus sp.
HHNGTNGTMMQYFEWYLPNDGNHWNRLNSDASNLKSKGIKAVWIPPAWKGASQNDVGYGAYDLYDLGEFNQRGTVRTKYGTRSQLQAAVTSLKNNGIQVYGDVVMNHKGGADATEMVDAVEVNPNNRNQEVTGEYTIEAWTRFDFPGRGNTHSSFKWRWYHFDGVDFDQSRRLNNRIYKFRGHGKAWDWEVDTEFGNYDYLMYADYDMDHPEVVNELRNWGVWYTNTLGLDGFRIDAVKHIKYSFTRDWINHVRSATGKNMFAVAEFWKNDLGAIENYLQKTNWNHSVFDVPLHYNLYNASKSGGNYDMRNIFNGTVVQRHPSHAVTFVDNHDSQPEEALESFVEEWFKPLAYALTLTREQGYPSVFYGDYYGIPTHGVPAMRSKIDPILEARQKYAYGPQHDYLDHPDVIGWTREGDSSHPKSGLATLITDGPGGSKRMYAGLKNAGETWYDITGNRSDTVKIGSDGWGEFHVNDGSVSIYVQK

SEQ ID NO: 29768 - protein, 483 aa, Synthetic construct
HHNGTNGTMMQYFEWYLPNDGNHWNRLNSDASNLKSKGITAVWIPPAWKGASQNDVGYGAYDLYDLGEFNQKGTVRTKYGTRSQLQAAVTSLKNNGIQVYGDVVMNHKGGADATEMVRAVEVNPNNRNQEVTGEYTIEAWTRFDFPGRGNTHSSFKWRWYHFDGVDWDQSRRLNNRIYKFRGKAWDWEVDTEFGNYDYLMYADYDMDYPEVTNEVRNWGVWYTNTLGLDGFRIDAVKHIKYSFTRDWINHVRSATGKNMFAVAEFWKNDLGAIENYLQKTNWNHSVFDVPLHYNLYNASKSGGNYDMRNIFNGTVVQRHPSHAVTFVDNHDSQPEEALESFVEEWFKPLAYALTLTREQGYPSVFYGDYYGIPTHGVPAMRSKIDPILEARQKYAYGPQHDYLDHPDVIGWTREGDSSHPKSGLATLITDGPGGSKRMYAGLKNAGETWYDITGNRSDTVKIGSDGWGEFHVNDGSVSIYVQK

SEQ ID NO: 29769 - protein, 483 aa, Bacillus sp.
HHNGTNGTMMQYFEWYLPNDGNHWNRLNSDASNLKSKGITAVWIPPAWKATSQNDVGYGAYDLYDLGEFNQKGTVRTKYGTRSQLQAAVTSLKNNGIQVYGDVVMNHKGGADATEMVRAVEVNPNNRNQEVTGEYTIEAWTRFDFPGRGNTHSSFKWRWYHFDGVDWDQSRELSNRIYKFRGKAWDWEVDTEFGNYDYLMYADYDMDHPEVVNELRNWGVWYTNTLGLDGFRIDAVKHIKYSFTRDWINHVRSATGKNMFAVAEFWKNDLGAIENYLQKTNWNHSVFDVPLHYNLYNASKSQGNYDMRNIFNGTVVQRHPSHAVTFVDNHDSQPEEALESFVDTWFKPLAYALTLTREQGYPSVFYGDYYGIPTHGVPAMRSKIDPILLARQKYAYGPQHDYLDHPDVIGWTREGDSSHPKSGLATLITDGPGGSKRMYAGLKNAGETWYDITGNRSDTVKIGSDGWGEFHVNGSSVSIYVQK

SEQ ID NO: 29770 - protein, 483 aa, Bacillus sp.
HHNGTNGTMMQYFEWYLPNDGNHWNRLNSDASNLKSKGITAVWIPPAWKGASQNDVGYGAYDLYDLGEFNQKGTVRTKYGTRSQLQAAVTSLKNNGIQVYGDVVMNHKGGADATEMVRAVEVNPNNRNQEVTGEYTIEAWTRFDFPGRGNTHSSFKWRWYHFDGVDWDQSRRLNNRIYKFRAKAWDWEVDTEFGNYDYLMYADYDMDHPETINELRNWGVWYTNTLGLDGFRIDAVKHIKYSFTRDWINHVRSATGKNMFAVAEFWKNDLGAIENYLQKTNWNHSVFDVPLHYNLYNASKSGGNYDMRNIFNGTVVQRHPSHAVTFVDNHDSQPEEALESFVEEWFKPLAYALTLTREQGYPSVFYGDYYGIPTHGVPAMRSKIDPILEARQKYAYGPQHDYLDHPDVIGWTREGDSSHPKSGLATLITDGPGGSKRMYAGLKNAGETWYDITGNRSDTVKIGSDGWGEFHVNDGSVSIYVQK

SEQ ID NO: 29771 - protein, 483 aa, Bacillus sp.
HHNGTNGTMMQYFEWYLPNDGNHWNRLNSDASNLKSKGITAVWIPPAWKGASQNDVGYGAYDLYDLGEFNQKGTVRTKYGTRSQLQAAVTSLKNNGIQVYGDVVINHKGGADATEMVRAVEVNPNNRNQEVTGEYTIEAWTRFDFPGRGNTHSSFKWRWYHFDGVDWDQSRRLNNRIYKFRGKAWDWEVDTENGNYDYLMYADIDYDYPEVVNELRIWGVWYTNTLGLDGFRIDAVKHIKYSFTRVWINHVRSATGKNMFAVAEFWKNDLGAIENYLQKTNWNHSVFDVPLHYNLYNASKSGGNYDMRNIFNGTVVQRHPSHAVTFVDNHDSQPEEALESFVEEWFKPLAYALTLTREQGYPSVFYGDYYGIPTHGVPAMRSKIDPILEARQKYAYGPQHDYLDHPDVIGWTREGDSSHPKSGLATLITDGPGGSKRMYAGLKNAGETWYDITGNRSDTVKIGSDGWGEFHVNDGSVSIYVQK

SEQ ID NO: 29772 - protein, 485 aa, Bacillus sp.
HHNGTNGTMMQYFEWYLPNDGNHWNRLNSDASNLKSKGITAVWIPPAWKAVSQNDVGYGAYDLYDLGEFNQKGTVRTKYGTRSQLQAAVTSLKNNGIQVYGDVVMNHKGGADLTEMVRAVEVNPNNRNQEVTGEYTIEAWTRFDFPGRGNTHSSFKWRWYHFDGVDWDQSRNLTNRIYKFRGHGKAWDWEVDTEFGNYDYLMYTDYDMDHPEVVNELRNWGVWYTNTLGLDGFRIDAVKHIKYSFTRDWINHVRSATGKNMFAVAEFWKNDLGAIENYLQKTNWNHSVFDVPLHYNLYNASKSGGNYDMRNIFNGTVVQRHPSHAVTFVDNHDSQPEEALESFVEEWFKPLAYALTLTREQGYPSVFYGDYYGIPTHGVPAMRSKIDPILEARQKYAYGPQHDYLDHPDVIGWTREGDSSHPKSGLATLITDGPGGSKRMYAGLKNAGETWYDITGNRSDTVKIGSDGWGEFHVNDGSVSIYVQK

SEQ ID NO: 29773 - protein, 483 aa, Bacillus sp.
HHNGTNGTMMQYFEWYLPNDGNHWNRLNSDASNLKSKGITAVWIPPAWKGASQNDVGYGAYDLYDLGEFNQKGTVRTKYGTRSQLQAAVTSLKNNGIQVYGDVVMNHKGGADATEMVRAVEVNPNNRNQEVTGEYTIEAWTRFDFPGRGNTHSSFKWRWYHFDGVDWDQSRRLNNRIYKFRGKAWDWEVDTEFGNYDYLMYADYDMDHPEVVNELRNWGVWYTNTLGLDGFRIDAVKHIKYSFTRDWINHVRSATGKNMFAVAEFWKNDLGAIENYLQKTNWNHSVFDVPLHYNLYNASKSQGNYDMRNIFNGTVVQRHPSHAVTFVDNHDSQPEEALESFVDPWFKPLAYALTLTREQGYPSVFYGDYYGIPTHGVPAMRSKIDPILEARQKYAYGPQHDYLDHPDVIGWTREGDSSHPKSGLATLITDGPGGSKRMYAGLKNAGETWYDITGNRSDTVKIGSDGWGEFHVNKQSVSIYVQK

SEQ ID NO: 29774 - protein, 485 aa, Bacillus sp.
HHNGTNGTMMQYFEWYLPNDGNHWNRLNSDASNLKSKGITAVWIPPAWKAASQNDVGYGAYDLYDLGEFNQKGTVRTKYGTRSQLQAAVTSLKNNGIQVYGDVVMNHKGGADATEMVRAVEVNPNNRNQEVTGEYTIEAYTRFDFPGRGNTHSSFKWRWYHFDGVDFDQSRDFTNRIYKFRGHGKAWDWEVDTEFGNYDYLMYADYDMDHPEVVNELRNWGVWYTNTLGLDGFRIDAVKHIKYSFTRDWINHVRSATGKNMFAVAEFWKNDLGAIENYLQKTNWNHSVFDVPLHYNLYNASKSQGNYDMRNIFNGTVVQRHPSHAVTFVDNHDSQPEEALESFVDPWFKPLAYALTLTREQGYPSVFYGDYYGIPTHGVPAMRSKIDPILEARQKYAYGPQHDYLDHPDVIGWTREGDSSHPKSGLATLITDGPGGSKRMYAGLKNAGETWYDITGNRSDTVKIGSDGWGEFHVNGGSVSIYVQK

SEQ ID NO: 29775 - protein, 485 aa, Synthetic construct
HHNGTNGTMMQYFEWYLPNDGNHWNRLNSDASNLKSKGITAVWIPPAWKGASQNDVGYGAYDLYDLGEFNQKGTVRTKYGTRSQLQAAVTSLKNNGIQVYGDVVINHKGGADATEMVRAVEVNPNNRNQEVTGEYTIEAWTRFDFPGRGNTHSSFKWRWYHFDGVDWDQSRRLNNRIYKFRGHGKAWDWEVDTENGNYDYLMYADYDYDHPEVVNEIRNWGVWYTNTLGLDGFRIDAVKHIKYSFVRDWINHVRSATGKNMFAVAEFWKNDLGAIENYLQKTNWNHSVFDVPLHYNLYNASKSGGNYDMRNIFNGTVVQRHPSHAVTFVDNHDSQPEEALESFVEEWFKPLAYALTLTREQGYPSVFYGDYYGIPTHGVPAMRSKIDPILEARQKYAYGPQHDYLDHPDVIGWTREGDSSHPKSGLATLITDGPGGSKRMYAGLKNAGETWYDITGNRSDTVKIGSDGWGEFHVNDGSVSIYVQK

SEQ ID NO: 29776 - protein, 483 aa, Bacillus sp.
HHNGTNGTMMQYFEWYLPNDGNHWNRLNSDASNLKSKGITAVWIPPAWKGASQNDVGYGAYDLYDLGEFNQKGTVRTKYGTRSQLQAAVTSLKNNGIQVYGDVVMNHKGGADATEMVRAVEVNPNNRNQEVTGEYTIEAWTRFDFPGRGNTHSSFKWRWYHFDGVDWDQSERLNNRIYKFRGKAWDWEVETEFGNYDYLMYADYDMDHPEVVNELRNWGVWYTNTLGLDGFRIDAVKHIKYSFTRDWINHVRIATGKNMFAVAEFWKNDLGAIENYLQKTNWNHSVFDVPLHYNLYNASKSGGNYDMRNIFNGTVVQRHPSHAVTFVDNHDSQPEEALESFVDEWFKPLAYALTLTREQGYPSVFYGDYYGIPTHGVPAMRSKIDPILEARQKYAYGPQHDYLDHPDVIGWTREGDSSHPKSGLATLITDGPGGSKRMYAGLKNAGETWYDITGNRSDTVKIGSDGWGEFHVNDQSVSIYVQK

SEQ ID NO: 29777 - protein, 483 aa, Bacillus sp.
HHNGTNGTMMQYFEWYLPNDGNHWNRLNSDASNLKSKGITAVWIPPAWKGASQNDVGYGAYDLYDLGEFNQKGTVRTKYGTRSQLQAAVTSLKNNGIQVYGDVVMNHKGGADATEMVRAVEVNPNNRNQEVTGEYTIEAWTRFDFPGRGNTHSSFKWRWYHFDGVDWDQSRRLNNRIYKFRGKAWDWEVDTENGNYDYLMYADIDYDYPEVVTTLRVWGVWYTNTLGLDGFRIDAVKHIKYSFTRDWINHVRSATGKNMFAVAEFWKNDLGAIENYLQKTNWNHSVFDVPLHYNLYNASKSGGNYDMRNIFNGTVVQRHPSHAVTFVDNHDSQPEEALESFVEEWFKPLAYALTLTREQGYPSVFYGDYYGIPTHGVPAMRSKIDPILEARQKYAYGPQHDYLDHPDVIGWTREGDSSHPKSGLATLITDGPGGSKRMYAGLKNAGETWYDITGNRSDTVKIGSDGWGEFHVNDGSVSIYVQK

SEQ ID NO: 29778 - protein, 483 aa, Bacillus sp.
HHNGTNGTMMQYFEWYLPNDGNHWNRLNSDASNLKSKGITAVWIPPAWKGASQNDVGYGAYDLYDLGEFNQKGTVRTKYGTRSQLQAAVTSLKNNGIQVYGDVVMNHKGGADYTEMVRAVEVNPNNRNQEVTGEYTIEAWTRFDFPGRGNTHSSFKWRWYHFDGVDWDQSERLNNRIYKFRGKAWDWEVDTEFGNYDYLMYADYDMDHPEVVNELRNWGVWYTNTLGLDGFRIDAVKHIKYSFTRDWINHVRSATGKNMFAVAEFWKNDLGAIENYLQKTNWNHSVFDVPLHYNLYNASKSGGNYDMRNIFNGTVVQRHPSHAVTFVDNHDSQPEEALESFVEEWFKPLAYALTLTREQGYPSVFYGDYYGIPTHGVPAMRSKIDPILLARQKYAYGPQHDYLDHPDVIGWTREGDSSHPKSGLATLITDGPGGSKRMYAGLKNAGETWYDITGNRSDTVKIGSDGWGEFHVNDGSVSIYVQK

SEQ ID NO: 29779 - protein, 483 aa, Bacillus sp.
HHNGTNGTMMQYFEWYLPNDGNHWNRLNSDASNLKSKGITAVWIPPAWKGASQNDVGYGAYDLYDLGEFNQKGTVRTKYGTRSQLQAAVTSLKNNGIQVYGDVVMNHKGGADATEMVRAVEVNPNNRNQEVTGEYTIEAYTRFDFPGRGNTHSSFKWRWYHFDGVDFDQSRKLNNRIYKFRGKAWDWEVDTEFGNYDYLMYVDYDMDHPEVVNELRNWGVWYTNTLGLDGFRIDAVKHIKYSFTRDWINHVRSATGKNMFAVAEFWKNDLGAIENYLQKTNWNHSVFDVPLHYNLYNASKSGGNYDMRNIFNGTVVQRHPSHAVTFVDNHDSQPEEALESFVEEWFKPLAYALTLTREQGYPSVFYGDYYGIPTHGVPAMRSKIDPILEARQKYAYGPQHDYLDHPDVIGWTREGDSSHPKSGLATLITDGPGGSKRMYAGLKNAGETWYDITGNRSDTVKIGSDGWGEFHVNDGSVSIYVQK

SEQ ID NO: 29780 - protein, 483 aa, Bacillus sp.
HHNGTNGTMMQYFEWYLPNDGNHWNRLNSDASNLKSKGITAVWIPPAWKGTSQNDVGYGAYDLYDLGEFNQRGTVRTKYGTRSQLQAAVTSLKNNGIQVYGDVVMNHKGGADATEMVRAVEVNPNNRNQEVTGEYTIEAWTRFDFPGRGNTHSSFKWRWYHFDGVDWDQSRNLNNRIYKFRGKAWDWEVDTEFGNYDYLMYVDYDMDHPEVVNELRNWGVWYTNTLGLDGFRIDAVKHIKYSFTRDWINHVRSATGKNMFAVAEFWKNDLGAIENYLQKTNWNHSVFDVPLHYNLYNASKSQGNYDMRNIFNGTVVQRHPSHAVTFVDNHDSQPEEALESFVDTWFKPLAYALTLTREQGYPSVFYGDYYGIPTHGVPAMRSKIDPILEARQKYAYGPQHDYLDHPDVIGWTREGDSSHPKSGLATLITDGPGGSKRMYAGLKNAGETWYDITGNRSDTVKIGSDGWGEFHVNGSSVSIYVQK

SEQ ID NO: 29781 - protein, 485 aa, Bacillus sp.
HHNGTNGTMMQYFEWYLPNDGNHWNRLNSDASNLKSKGITAVWIPPAWKGASQNDVGYGAYDLYDLGEFNQRGTVRTKYGTRSQLQAAVTSLKNNGIQVYGDVVMNHKGGADATEMVRAVEVNPNNRNQEVTGEYTIEAWTRFDFPGRGNTHSSFKWRWYHFDGVDFDQSRRLNNRIYKFRGHGKAWDWEVDTEFGNYDYLMYADYDMDHPEVVNELRNWGVWYTNTLGLDGFRIDAVKHIKYSFTRDWINHVRSATGKNMFAVAEFWKNDLGAIENYLQKTNWNHSVFDVPLHYNLYNASKSGGNYDMRNIFNGTVVQRHPSHAVTFVDNHDSQPEEALESFVETWFKPLAYALTLTREQGYPSVFYGDYYGIPTHGVPAMRSKIDPILEARQKYAYGPQHDYLDHPDVIGWTREGDSSHPKSGLATLITDGPGGSKRMYAGLKNAGETWYDITGNRSDTVKIGSDGWGEFHVNDGSVSIYVQK

SEQ ID NO: 29782 - protein, 483 aa, Bacillus sp.
HHNGTNGTMMQYFEWYLPNDGNHWNRLNSDASNLKSKGIKAVWIPPAWKGASQNDVGYGAYDLYDLGEFNQRGTVRTKYGTRSQLQAAVTSLKNNGIQVYGDVVMNHKGGADATEMVRAVEVNPNNRNQEVTGEYTIEAWTRFDFPGRGNTHSSFKWRWYHFDGVDFDQSRRLNNRIYKFRGKAWDWEVDTEFGNYDYLMYADYDMDHPEVVNELRNWGVWYTNTLGLDGFRIDAVKHIKYSFTRDWINHVRSATGKNMFAVAEFWKNDLGAIENYLQKTNWNHSVFDVPLHYNLYNASKSGGNYDMRNIFNGTVVQAHPNHAVTFVDNHDSQPEEALESFVEEWFKPLAYALTLTREQGYPSVFYGDYYGIPTHGVPAMRSKIDPILEARQKYAYGPQHDYLDHPDVIGWTREGDSSHPKSGLATLITDGPGGSKRMYAGLKNAGETWYDITGNRSDTVKIGSDGWGEFHVNDGSVSIYVQK

SEQ ID NO: 29783 - protein, 483 aa, Bacillus sp.
HHNGTNGTMMQYFEWYLPNDGNHWNRLNSDASNLKSKGITAVWIPPAWKGASQNDVGYGAYDLYDLGEFNQKGTVRTKYGTRSQLQAAVTSLKNNGIQVYGDVVMNHKGGADATEMVRAVEVNPNNRNQEVTGEYTIEAWTRFDFPGRGNTHSSFKWRWYHFDGVDWDQSRRLNNRIYKFRAKAWDWEVDTEFGNYDYLMYADYDMDHPETSNELRNWGVWYTNTLGLDGFRIDAVKHIKYSFTRDWINHVRSATGKNMFAVAEFWKNDLGAIENYLQKTNWNHSVFDVPLHYNLYNASKSGGNYDMRNIFNGTVVQRHPSHAVTFVDNHDSQPEEALESFVEEWFKPLAYALTLTREQGYPSVFYGDYYGIPTHGVPAMRSKIDPILEARQKYAYGPQHDYLDHPDVIGWTREGDSSHPKSGLATLITDGPGGSKRMYAGLKNAGETWYDITGNRSDTVKIGSDGWGEFHVNDGSVSIYVQK

SEQ ID NO: 29784 - protein, 485 aa, Bacillus sp.
HHNGTNGTMMQYFEWYLPNDGNHWNRLNSDASNLKSKGITAVWIPPAWKGASQNDVGYGAYDLYDLGEFNQKGTVRTKYGTRSQLQAAVTSLKNNGIQVYGDVVMNHKGGADATEMVRAVEVNPNNRNQEVTGEYTIEAWTRFDFPGRGNTHSSFKWRWYHFDGVDWDQSRKLNNRIYKFRGHGKAWDWEVDTEFGNYDYLMYVDYDMDHPEVVNELRNWGVWYTNTLGLDGFRIDAVKHIKYSFTRDWINHVRSATGKNMFAVAEFWKNDLGAIENYLQKTNWNHSVFDVPLHYNLYNASKSSGNYDMRNIFNGTVVQRHPSHAVTFVDNHDSQPEEALESFVDEWFKPLAYALTLTREQGYPSVFYGDYYGIPTHGVPAMRSKIDPILEARQKYAYGPQHDYLDHPDVIGWTREGDSSHPKSGLATLITDGPGGSKRMYAGLKNAGETWYDITGNRSDTVKIGSDGWGEFHVNKQSVSIYVQK

SEQ ID NO: 29785 - protein, 485 aa, Bacillus sp.
HHNGTNGTMMQYFEWYLPNDGNHWNRLNSDASNLKSKGITAVWIPPAWKGASQNDVGYGAYDLYDLGEFNQKGTVRTKYGTRSQLQAAVTSLKNNGIQVYGDVVMNHKGGADATEMVRAVEVNPNNRNQEVTGEYTIEAWTRFDFPGRGNTHSSFKWRWYHFDGVDWDQSRRLNNRIYKFRGHGKAWDWEVDTEFGNYDYLMYADYDMDHPEVVNELRNWGVWYTNTLGLDGFRIDAVKHIKYSFTRDWINHVRSATGKNMFAVAEFWKNDLGAIENYLQKTNWNHSVFDVPLHYNLYNASKSAGNYDMRNIFNGTVVQRHPSHAVTFVDNHDSQPEEALESFVDPWFKPLAYALTLTREQGYPSVFYGDYYGIPTHGVPAMRSKIDPILEARQKYAYGPQHDYLDHPDVIGWTREGDSSHPKSGLATLITDGPGGSKRMYAGLKNAGETWYDITGNRSDTVKIGSDGWGEFHVNKQSVSIYVQK

SEQ ID NO: 29786 - protein, 483 aa, Bacillus sp.
HHNGTNKTMMQYFEWYLPNDGNHWNRLNSDASNLKSKGITAVWIPPAWKGASQNDVGYGAYDLYDLGEFNQKGTVRTKYGTRSQLQAAVTSLKNNGIQVYGDVVMNHKGGADATEMVRAVEVNPNNRNQEVTGEYTIEAWTRFDFPGRGNTHSSFKWRWYHFDGVDFDQSRRLNNRIYKFRGKAWDWEVDTEFGNYDYLMYADYDMDHPEVVNELRNWGVWYTNTLGLDGFRIDAVKHIKYSFTRDWINHVRSATGKNMFAVAEFWKNDLGAIENYLQKTNWNHSVFDVPLHYNLYNASKSGGNYDMRNIFNGTVVQMQPSHAVTFVDNHDSQPEEALESFVEEWFKPLAYALTLTREQGYPSVFYGDYYGIPTHGVPAMRSKIDPILEARQKYAYGPQHDYLDHPDVIGWTREGDSSHPKSGLATLITDGPGGSKRMYAGLKNAGETWYDITGNRSDTVKIGSDGWGEFHVNDGSVSIYVQK

SEQ ID NO: 29787 - protein, 485 aa, Bacillus sp.
HHNGTNGTMMQYFEWYLPNDGNHWNRLNSDASNLKSKGITAVWIPPAWKGASQNDVGYGAYDLYDLGEFNQKGTVRTKYGTRSQLQAAVTSLKNNGIQVYGDVVMNHKGGADATEMVRAVEVNPNNRNQEVTGEYTIEAWTRFDFPGRGNTHSSFKWRWYHFDGVDWDQSRRLDNRIYKFRGHGKAWDWEVDTEFGNYDYLMYTDYDMDHPEVVNELRNWGVWYTNTLGLDGFRIDAVKHIKYSFTRDWINHVRSATGKNMFAVAEFWKNDLGAIENYLQKTNWNHSVFDVPLHYNLYNASQSGGNYDMRNIFNGTVVQRHPSHAVTFVDNHDSQPEEALESFVEPWFKPLAYALTLTREQGYPSVFYGDYYGIPTHGVPAMRSKIDPILEARQKYAYGPQHDYLDHPDVIGWTREGDSSHPKSGLATLITDGPGGSKRMYAGLKNAGETWYDITGNRSDTVKIGSDGWGEFHVNKSSVSIYVQK

SEQ ID NO: 29788 - protein, 483 aa, Bacillus sp.
HHNGTNGTMMQYFEWYLPNDGNHWNRLNSDASNLKSKGITAVWIPPAWKGASQNDVGYGAYDLYDLGEFNQKGTVRTKYGTRSQLQAAVTSLKNNGIQVYGDVVMNHKGGADATEMVRAVEVNPNNRNQEVTGEYTIEAWTRFDFPGRGNTHSSFKWRWYHFDGVDWDQSRRLNNRIYKFRSKAWDWEVDTEFGNYDYLMYADYDMDHPETSNELRNWGVWYTNTLGLDGFRIDAVKHIKYSFTRDWINHVRSATGKNMFAVAEFWKNDLGAIENYLQKTNWNHSVFDVPLHYNLYNASKSGGNYDMRNIFNGTVVQRHPSHAVTFVDNHDSQPEEALESFVEEWFKPLAYALTLTREQGYPSVFYGDYYGIPTHGVPAMRSKIDPILEARQKYAYGPQHDYLDHPDVIGWTREGDSSHPKSGLATLITDGPGGSKRMYAGLKNAGETWYDITGNRSDTVKIGSDGWGEFHVNDGSVSIYVQK

SEQ ID NO: 29789 - protein, 483 aa, Bacillus sp.
HHNGTNGTMMQYFEWYLPNDGNHWNRLNSDASNLKSKGITAVWIPPAWKGASQNDVGYGAYDLYDLGEFNQKGTVRTKYGTRSQLQAAVTSLKNNGIQVYGDVVMNHKGGADATEMVRAVEVNPNNRNQEVTGEYTIEAWTRFDFPGRGNTHSSFKWRWYHFDGVDWDQSRRLNNRIYKFRGKAWDWEVDTEFGNYDYLMYADYDMDHPEVVNELRNWGVWYTNTLGLDGFRIDAVKHIKYSFTRDWINHVRSATGKNMFAVAEFWKNDLGAIENYLQKTNWNHSVFDVPLHYNLYNASKSAGNYDMRNIFNGTVVQRHPSHAVTFVDNHDSQPEEALESFVDPWFKPLAYALTLTREQGYPSVFYGDYYGIPTHGVPAMRSKIDPILEARQKYAYGPQHDYLDHPDVIGWTREGDSSHPKSGLATLITDGPGGSKRMYAGLKNAGETWYDITGNRSDTVKIGSDGWGEFHVNQSSVSIYVQK

SEQ ID NO: 29790 - protein, 485 aa, Bacillus sp.
HHNGTNGTMMQYFEWYLPNDGNHWNRLNSDASNLKSKGITAVWIPPAWKGASQNDVGYGAYDLYDLGEFNQKGTVRTKYGTRSQLQAAVTSLKNNGIQVYGDVVMNHKGGADATEMVRAVEVNPNNRNQEVTGEYTIEAWTRFDFPGRGNTHSSFKWRWYHFDGVDWDQSRRLDNRIYKFRGHGKAWDWEVDTEFGNYDYLMYTDYDMDHPEVVNELRNWGVWYTNTLGLDGFRIDAVKHIKYSFTRDWINHVRSATGKNMFAVAEFWKNDLGAIENYLQKTNWNHSVFDVPLHYNLYNASKSGGNYDMRNIFNGTVVQRHPSHAVTFVDNHDSQPEEALESFVDPWFKPLAYALTLTREQGYPSVFYGDYYGIPTHGVPAMRSKIDPILEARQKYAYGPQHDYLDHPDVIGWTRKGDSSHPKSGLATLITDGPGGSKRMYAGLKNAGETWYDITGNRSDTVKIGSDGWGEFHVNDGSVSIYVQK

SEQ ID NO: 29791 - protein, 483 aa, Bacillus sp.
HHNGTNGTMMQYFEWYLPNDGNHWNRLNSDASNLKSKGITAVWIPPAWKGASQNDVGYGAYDLYDLGEFNQKGTVRTKYGTRSQLQAAVTSLKNNGIQVYGDVVMNHKGGADATEMVRAVEVNPNNRYQEVTGEYTIEAWTRFDFPGRGNTHSSFKWRWYHFDGVDWDQSRRLNNRIYKFRAKEWDWEVDTEFGNYDYLMYADYDMDHPEVVNELRNWGVWYTNTLGLDGFRIDAVKHIKYSFTRDWINHVRSATGKNMFAVAEFWKNDLGAIENYLQKTNWNHSVFDVPLHYNLYNASKSGGNYDMRNIFNGTVVQRHPSHAVTFVDNHDSQPEEALESFVEEWFKPLAYALTLTREQGYPSVFYGDYYGIPTHGVPAMRSKIDPILEARQKYAYGPQHDYLDHPDVIGWTREGDSSHPKSGLATLITDGPGGSKRMYAGLKNAGETWYDITGNRSDTVKIGSDGWGEFHVNDGSVSIYVQK

SEQ ID NO: 29792 - protein, 485 aa, Bacillus sp.
HHNGTNGTMMQYFEWYLPNDGNHWNRLNSDASNLKSKGITAVWIPPAWKAVSQNDVGYGAYDLYDLGEFNQKGTVRTKYGTRSQLQAAVTSLKNNGIQVYGDVVMNHKGGADATEMVRAVEVNPNNRNQEVTGEYTIEAWTRFDFPGRGNTHSSFKWRWYHFDGVDFDQSREFTNRIYKFRGHGKAWDWEVDTEFGNYDYLMYVDYDMDHPEVVNELRNWGVWYTNTLGLDGFRIDAVKHIKYSFTRDWINHVRIATGKNMFAVAEFWKNDLGAIENYLQKTNWNHSVFDVPLHYNLYNASKSGGNYDMRNIFNGTVVQRHPSHAVTFVDNHDSQPEEALESFVDEWFKPLAYALTLTREQGYPSVFYGDYYGIPTHGVPAMRSKIDPILEARQKYAYGPQHDYLDHPDVIGWTREGDSSHPKSGLATLITDGPGGSKRMYAGLKNAGETWYDITGNRSDTVKIGSDGWGEFHVNDQSVSIYVQK

SEQ ID NO: 29793 - protein, 483 aa, Bacillus sp.
HHNGTNGTMMQYFEWYLPNDGNHWNRLNSDASNLKSKGITAVWIPPAWKGASQNDVGYGAYDLYDLGEFNQKGTVRTKYGTRSQLQAAVTSLKNNGIQVYGDVVMNHKGGADATEMVRAVEVNPNNRNQEVTGEYTIEAWTRFDFPGRGNTHSSFKWRWYHFDGVDWDQSRRLNNRIYKFRGKAWDWEVDTEFGNYDYLMYADYDMDHPEVVNELRNWGVWYTNTLGLDGFRIDAVKHIKYSFTRDWINHVRSATGKNMFAVAEFWKNDLGAIENYLQKTNWNHSVFDVPLHYNLYNASKSQGNYDMRNIFNGTVVQRHPSHAVTFVDNHDSQPEEALESFVETWFKPLAYALTLTREQGYPSVFYGDYYGIPTHGVPAMRSKIDPILEARQKYAYGPQHDYLDHPDVIGWTREGDSSHPKSGLATLITDGPGGSKRMYAGLKNAGETWYDITGNRSDTVKIGSDGWGEFHVNKQSVSIYVQK

SEQ ID NO: 29794 - protein, 485 aa, Bacillus sp.
HHNGTNGTMMQYFEWYLPNDGNHWNRLNSDASNLKSKGITAVWIPPAWKGASQNDVGYGAYDLYDLGEFNQKGTVRTKYGTRSQLQAAVTSLKNNGIQVYGDVVMNHKGGADATEMVRAVEVNPNNRNQEVTGEYTIEAWTRFDFPGRGNTHSSFKWRWYHFDGVDWDQSRRLNNRIYKFRGHGKAWDWEVDTEFGNYDYLMYADYDMDHPEVVNELRNWGVWYTNTLGLDGFRIDAVKHIKYSFTRDWINHVRSATGKNMFAVAEFWKNDLGAIENYLQKTNWNHSVFDVPLHYNLYNASKSAGNYDMRNIFNGTVVQRHPSHAVTFVDNHDSQPEEALESFVEPWFKPLAYALTLTREQGYPSVFYGDYYGIPTHGVPAMRSKIDPILEARQKYAYGPQHDYLDHPDVIGWTREGDSSHPKSGLATLITDGPGGSKRMYAGLKNAGETWYDITGNRSDTVKIGSDGWGEFHVNKASVSIYVQK

SEQ ID NO: 29795 - protein, 485 aa, Bacillus sp.
HHNGTNGTMMQYFEWYLPNDGNHWNRLNSDASNLKSKGITAVWIPPAWKGASQNDVGYGAYDLYDLGEFNQKGTVRTKYGTRSQLQAAVTSLKNNGIQVYGDVVMNHKGGADLTEMVRAVEVNPNNRNQEVTGEYTIEAWTRFDFPGRGNTHSSFKWRWYHFDGVDFDQSRRLNNRIYKFRGHGKAWDWEVDTEFGNYDYLMYADYDMDHPEVVNELRNWGVWYTNTLGLDGFRIDAVKHIKYSFTRDWINHVRSATGKNMFAVAEFWKNDLGAIENYLQKTNWNHSVFDVPLHYNLYNASKSGGNYDMRNIFNGTVVQRHPSHAVTFVDNHDSQPEEALESFVDEWFKPLAYALTLTREQGYPSVFYGDYYGIPTHGVPAMRSKIDPILEARQKYAYGPQHDYLDHPDVIGWTREGDSSHPKSGLATLITDGPGGSKRMYAGLKNAGETWYDITGNRSDTVKIGSDGWGEFHVNKSSVSIYVQK

SEQ ID NO: 29796 - protein, 483 aa, Bacillus sp.
HHNGTNGTMMQYFEWYLPNDGNHWNRLNSDASNLKSKGITAVWIPPAWKGASQNDVGYGAYDLYDLGEFNQKGTVRTKYGTRSQLQAAVTSLKNNGIQVYGDVVMNHKGGADATEMVRAVEVNPNNRNQEVTGEYTIEAYTRFDFSGRGNTHSSFKWRWYHFDGVDWDQSRRLDNRIYKFRGKAWDWEVDTEFGNYDYLMYTDYDMDHPEVVNELRNWGVWYTNTLGLDGFRIDAVKHIKYSFTRDWINHVRSATGKNMFAVAEFWKNDLGAIENYLQKTNWNHSVFDVPLHYNLYNASKSGGNYDMRNIFNGTVVQRHPSHAVTFVDNHDSQPEEALESFVEEWFKPLAYALTLTREQGYPSVFYGDYYGIPTHGVPAMRSKIDPILEARQKYAYGPQHDYLDHPDVIGWTREGDSSHPKSGLATLITDGPGGSKRMYAGLKNAGETWYDITGNRSDTVKIGSDGWGEFHVNDGSVSIYVQK

SEQ ID NO: 29797 - protein, 483 aa, Bacillus sp.
HHNGTNGTMMQYFEWYLPNDGNHWNRLNSDASNLKSKGITAVWIPPAWKAASQNDVGYGAYDLYDLGEFNQKGTVRTKYGTRSQLQAAVTSLKNNGIQVYGDVVMNHKGGADATEMVRAVEVNPNNRNQEVTGEYTIEAWTRFDFPGRGNTHSSFKWRWYHFDGVDWDQSRSLSNRIYKFRGKAWDWEVDTEFGNYDYLMYADYDMDHPEVVNELRNWGVWYTNTLGLDGFRIDAVKHIKYSFTRDWINHVRSATGKNMFAVAEFWKNDLGAIENYLQKTNWNHSVFDVPLHYNLYNASKSGGNYDMRNIFNGTVVQRHPSHAVTFVDNHDSQPEEALESFVETWFKPLAYALTLTREQGYPSVFYGDYYGIPTHGVPAMRSKIDPILEARQKYAYGPQHDYLDHPDVIGWTREGDSSHPKSGLATLITDGPGGSKRMYAGLKNAGETWYDITGNRSDTVKIGSDGWGEFHVNKASVSIYVQK

SEQ ID NO: 29798 - protein, 485 aa, Bacillus sp.
HHNGTNGTMMQYFEWYLPNDGNHWNRLNSDASNLKSKGIKAVWIPPAWKGASQNDVGYGAYDLYDLGEFNQRGTVRTKYGTRSQLQAAVTSLKNNGINVYGDVVMNHKGGADATEMVRAVEVNPNNRNQEVTGEYTIEAWTRFDFPGRGNTHSSFKWRWYHFDGVDFDQSRRLNNRIYKFRGHGKAWDWEVDTEFGNYDYLMYADYDMDHPEVVNELRNWGVWYTNTLGLDGFRIDAVKHIKYSFTRDWINHVRSATGKNMFAVAEFWKNDLGAIENYLQKTNWNHSVFDVPLHYNLYNASKSGGNYDMRNIFNGTVVQAHPMHAVTFVDNHDSQPEEALESFVEEWFKPLAYALTLTREQGYPSVFYGDYYGIPTHGVPAMRSKIDPILEARQKYAYGPQHDYLDHPDVIGWTREGDSSHPKSGLATLITDGPGGSKRMYAGLKNAGETWYDITGNRSDTVKIGSDGWGEFHVNDGSVSIYVQK

SEQ ID NO: 29799 - protein, 483 aa, Bacillus sp.
HHNGTNGTMMQYFEWYLPNDGNHWNRLNSDASNLKSKGITAVWIPPAWKAASQNDVGYGAYDLYDLGEFNQKGTVRTKYGTRSQLQAAVTSLKNNGIQVYGDVVMNHKGGADATEMVPAVEVNPNNRNQEVTGEYTIEAWTRFDFPGRGNTHSSFKWRWYHFDGVDWDQSRELNNRIYKFRSKAWDWEVDTEFGNYDYLMYTDYDMDHPEVVNELRNWGVWYTNTLGLDGFRIDAVKHIKYSFTRDWINHVRSATGKNMFAVAEFWKNDLGAIENYLQKTNWNHSVFDVPLHYNLYNASKSGGNYDMRNIFNGTVVQRHPSHAVTFVDNHDSQPEEALESFVEEWFKPLAYALTLTREQGYPSVFYGDYYGIPTHGVPAMRSKIDPILEARQKYAYGPQHDYLDHPDVIGWTREGDSSHPKSGLATLITDGPGGSKRMYAGLKNAGETWYDITGNRSDTVKIGSDGWGEFHVNDGSVSIYVQK

SEQ ID NO: 29800 - protein, 485 aa, Bacillus sp.
HHNGTNGTMMQYFEWYLPNDGNHWNRLNSDASNLKSKGIKAVWIPPAWKAVSQNDVGYGAYDLYDLGEFNQKGTVRTKYGTRSQLQAAVTSLKNNGIQVYGDVVMNHKGGADATEMVRAVEVNPNNRNQEVTGEYTIEAWTRFDFPGRGNTHSSFKWRWYHFDGVDFDQSRRLSNRIYKFRGHGKAWDWEVDTEFGNYDYLMYADYDMDHPEVVNELRNWGVWYTNTLGLDGFRIDAVKHIKYSFTRDWINHVRSATGKNMFAVAEFWKNDLGAIENYLQKTNWNHSVFDVPLHYNLYNASKSGGNYDMRNIFNGTVVQRHPSHAVTFVDNHDSQPEEALESFVEEWFKPLAYALTLTREQGYPSVFYGDYYGIPTHGVPAMRSKIDPILEARQKYAYGPQHDYLDHPDVIGWTREGDSSHPKSGLATLITDGPGGSKRMYAGLKNAGETWYDITGNRSDTVKIGSDGWGEFHVNDGSVSIYVQK

SEQ ID NO: 29801 - protein, 483 aa, Bacillus sp.
HHNGTNGTMMQYFEWYLPNDGNHWNRLNSDASNLKSKGITAVWIPPAWKAASQNDVGYGAYDLYDLGEFNQKGTVRTKYGTRSQLQAAVTSLKNNGIQVYGDVVMNHKGGADATEMVPAVEVNPNNRNQEVTGEYTIEAWTRFDFPGRGNTHSSFKWRWYHFDGVDWDQSRDLQNRIYKFRSKAWDWEVDTEFGNYDYLMYADYDMDHPEVVNELRNWGVWYTNTLGLDGFRIDAVKHIKYSFTRDWINHVRSATGKNMFAVAEFWKNDLGAIENYLQKTNWNHSVFDVPLHYNLYNASKSGGNYDMRNIFNGTVVQRHPSHAVTFVDNHDSQPEEALESFVETWFKPLAYALTLTREQGYPSVFYGDYYGIPTHGVPAMRSKIDPILEARQKYAYGPQHDYLDHPDVIGWTREGDSSHPKSGLATLITDGPGGSKRMYAGLKNAGETWYDITGNRSDTVKIGSDGWGEFHVNKASVSIYVQK

SEQ ID NO: 29802 - protein, 483 aa, Bacillus sp.
HHNGTNGTMMQYFEWYLPNDGNHWNRLNSDASNLKSKGITAVWIPPAWKGASQNDVGYGAYDLYDLGEFNQKGTVRTKYGTRSQLQAAVTSLKNNGIQVYGDVVMNHKGGADATEMVRAVEVNPNNRNQEVTGEYTIEAWTRFDFPGRGNTHSSFKWRWYHFDGVDWDQSRRTNNRIYKFRGKAWDWEVDTEFGNYDYLMYTDYDMDHPEVVNELRNWGVWYTNTLGLDGFRIDAVKHIKYSFTRDWINHVRSATGKNMFAVAEFWKNDLGAIENYLQKTNWNHSVFDVPLHYNLYNASKSSGNYDMRNIFNGTVVQRHPSHAVTFVDNHDSQPEEALESFVDEWFKPLAYALTLTREQGYPSVFYGDYYGIPTHGVPAMRSKIDPILEARQKYAYGPQHDYLDHPDVIGWTREGDSSHPKSGLATLITDGPGGSKRMYAGLKNAGETWYDITGNRSDTVKIGSDGWGEFHVNKQSVSIYVQK

SEQ ID NO: 29803 - protein, 483 aa, Bacillus sp.
HHNGTNGTMMQYFEWYLPNDGNHWNRLNSDASNLKSKGITAVWIPPAWKATSQNDVGYGAYDLYDLGEFNQKGTVRTKYGTRSQLQAAVTSLKNNGIQVYGDVVMNHKGGADATEMVRAVEVNPNNRNQEVTGEYTIEAWTRFDFPGRGNTHSSFKWRWYHFDGVDWDMSRELSNRIYKFRGKAWDWEVDTEFGNYDYLMYADYDMDHPEVVNELRNWGVWYTNTLGLDGFRIDAVKHIKYSFTRDWINHVRSATGKNMFAVAEFWKNDLGAIENYLQKTNWNHSVFDVPLHYNLYNASKSQGNYDMRNIFNGTVVQRHPSHAVTFVDNHDSQPEEALESFVDTWFKPLAYALTLTREQGYPSVFYGDYYGIPTHGVPAMRSKIDPILEARQKYAYGPQHDYLDHPDVIGWTREGDSSHPKSGLATLITDGPGGSKRMYAGLKNAGETWYDITGNRSDTVKIGSDGWGEFHVNGSSVSIYVQK

SEQ ID NO: 29804 - protein, 483 aa, Bacillus sp.
HHNGTNGTMMQYFEWYLPNDGNHWNRLNSDASNLKSKGITAVWIPPAWKAVSQNDVGYGAYDLYDLGEFNQKGTVRTKYGTRSQLQAAVTSLKNNGIQVYGDVVMNHKGGADATEMVRAVEVNPNNRNQEVTGEYTIEAWTRFDFPGRGNTHSSFKWRWYHFDGVDWDQSRNLTNRIYKFRGKAWDWEVDTEFGNYDYLMYTDYDMDHPEVVNELRNWGVWYTNTLGLDGFRIDAVKHIKYSFTRDWINHVRSATGKNMFAVAEFWKNDLGAIENYLQKTNWNHSVFDVPLHYNLYNASKSGGNYDMRNIFNGTVVQANPNHAVTFVDNHDSQPEEALESFVEEWFKPLAYALTLTREQGYPSVFYGDYYGIPTHGVPAMRSKIDPILEARQKYAYGPQHDYLDHPDVIGWTREGDSSHPKSGLATLITDGPGGSKRMYAGLKNAGETWYDITGNRSDTVKIGSDGWGEFHVNDGSVSIYVQK

SEQ ID NO: 29805 - protein, 485 aa, Bacillus sp.
HHNGTNGTMMQYFEWYLPNDGNHWNRLNSDASNLKSKGITAVWIPPAWKGASQNDVGYGAYDLYDLGEFNQKGTVRTKYGTRSQLQAAVTSLKNNGIQVYGDVVMNHKGGADATEMVRAVEVNPNNRNQEVTGEYTIEAWTRFDFPGRGNTHSSFKWRWYHFDGVDWDQSRRTNNRIYKFRGHGKAWDWEVDTEFGNYDYLMYTDYDMDHPEVVNELRNWGVWYTNTLGLDGFRIDAVKHIKYSFTRDWINHVRSATGKNMFAVAEFWKNDLGAIENYLQKTNWNHSVFDVPLHYNLYNASKSSGNYDMRNIFNGTVVQRHPSHAVTFVDNHDSQPEEALESFVDEWFKPLAYALTLTREQGYPSVFYGDYYGIPTHGVPAMRSKIDPILEARQKYAYGPQHDYLDHPDVIGWTREGDSSHPKSGLATLITDGPGGSKRMYAGLKNAGETWYDITGNRSDTVKIGSDGWGEFHVNKQSVSIYVQK

SEQ ID NO: 29806 - protein, 485 aa, Bacillus sp.
HHNGTNGTMMQYFEWYLPNDGNHWNRLNSDASNLKSKGITAVWIPPAWKGASQNDVGYGAYDLYDLGEFNQKGTVRTKYGTRSQLQAAVTSLKNNGIQVYGDVVMNHKGGADATEMVRAVEVNPNNRNQEVTGEYTIEAWTRFDFPGRGNTHSSFKWRWYHFDGVDWDQSRRLNNRIYKFRGHGKAWDWEVDTEFGNYDYLMYADYDMDHPEVVNELRNWGVWYTNTLGLDGFRIDAVKHIKYSFTRDWINHVRSATGKNMFAVAEFWKNDLGAIENYLQKTNWNHSVFDVPLHYNLYNASQSAGNYDMRNIFNGTVVQRHPSHAVTFVDNHDSQPEEALESFVDTWFKPLAYALTLTREQGYPSVFYGDYYGIPTHGVPAMRSKIDPILEARQKYAYGPQHDYLDHPDVIGWTREGDSSHPKSGLATLITDGPGGSKRMYAGLKNAGETWYDITGNRSDTVKIGSDGWGEFHVNQQSVSIYVQK

SEQ ID NO: 29807 - protein, 483 aa, Bacillus sp.
HHNGTNGTMMQYFEWYLPNDGNHWNRLNSDASNLKSKGITAVWIPPAWKAASQNDVGYGAYDLYDLGEFNQKGTVRTKYGTRSQLQAAVTSLKNNGIQVYGDVVMNHKGGADATEMVRAVEVNPNNRNQEVTGEYTIEAWTRFDFPGRGNTHSSFKWRWYHFDGVDWDQSRRTENRIYKFRGKAWDWEVDTEFGNYDYLMYTDYDMDHPEVVNELRNWGVWYTNTLGLDGFRIDAVKHIKYSFTRDWINHVRSATGKNMFAVAEFWKNDLGAIENYLQKTNWNHSVFDVPLHYNLYNASKSGGNYDMRNIFNGTVVQRHPSHAVTFVDNHDSQPEEALESFVDEWFKPLAYALTLTREQGYPSVFYGDYYGIPTHGVPAMRSKIDPILEARQKYAYGPQHDYLDHPDVIGWTREGDSSHPKQGLATLITDGPGGSKRMYAGLKNAGETWYDITGNRSDTVKIGSDGWGEFHVNDGSVSIYVQK

SEQ ID NO: 29808 - protein, 483 aa, Bacillus sp.
HHNGTNGTMMQYFEWYLPNDGNHWNRLNSDASNLKSKGIKAVWIPPAWKGASQNDVGYGAYDLYDLGEFNQRGTVRTKYGTRSQLQAAVTSLKNNGIQVYGDVVMNHKGGADATEMVRAVEVNPNNRNQEVTGEYTIEAWTRFDFPGRGNTHSSFKWRWYHFDGVDHDQSRRLNNRIYKFRGKAWDWEVDTEFGNYDYLMYADYDMDHPEVVNELRNWGVWYTNTLGLDGFRIDAVKHIKYSFTRDWINHVRSATGKNMFAVAEFWKNDLGAIENYLQKTNWNHSVFDVPLHYNLYNASKSGGNYDMRNIFNGTVVQRHPSHAVTFVDNHDSQPEEALESFVEEWFKPLAYALTLTREQGYPSVFYGDYYGIPTHGVPAMRSKIDPILEARQKYAYGPQHDYLDHPDVIGWTREGDSSHPKSGLATLITDGPGGSKRMYAGLKNAGETWYDITGNRSDTVKIGSDGWGEFHVNDGSVSIYVQK

SEQ ID NO: 29809 - protein, 483 aa, Bacillus sp.
HHNGTNGTMMQYFEWYLPNDGNHWNRLNSDASNLKSKGITAVWIPPAWKAVSQNDVGYGAYDLYDLGEFNQKGTVRTKYGTRSQLQAAVTSLKNNGIQVYGDVVMNHKGGADATEMVRAVEVNPNNRNQEVTGEYTIEAWTRFDFPGRGNTHSSFKWRWYHFDGVDFDQSRNLTNRIYKFRGKAWDWEVDTEFGNYDYLMYTDYDMDHPEVVNELRNWGVWYTNTLGLDGFRIDAVKHIKYSFTRDWINHVRSATGKNMFAVAEFWKNDLGAIENYLQKTNWNHSVFDVPLHYNLYNASKSGGNYDMRNIFNGTVVQRHPSHAVTFVDNHDSQPEEALESFVEEWFKPLAYALTLTREQGYPSVFYGDYYGIPTHGVPAMRSKIDPILEARQKYAYGPQHDYLDHPDVIGWTREGDSSHPKSGLATLITDGPGGSKRMYAGLKNAGETWYDITGNRSDTVKIGSDGWGEFHVNDGSVSIYVQK

SEQ ID NO: 29810 - protein, 483 aa, Bacillus sp.
HHNGTNGTMMQYFEWYLPNDGNHWNRLNSDASNLKSKGITAVWIPPAWKGASQNDVGYGAYDLYDLGEFNQRGTVRTKYGTRSQLQAAVTSLKNNGIQVYGDVVMNHKGGADLTEMVRAVEVNPNNRNQEVTGEYTIEAWTRFDFPGRGNTHSSFKWRWYHFDGVDWDQSRRLNNRIYKFRGKAWDWEVDTEFGNYDYLMYADYDMDHPEVVNELRNWGVWYTNTLGLDGFRIDAVKHIKYSFTRDWINHVRIATGKNMFAVAEFWKNDLGAIENYLQKTNWNHSVFDVPLHYNLYNASKSGGNYDMRNIFNGTVVQRHPSHAVTFVDNHDSQPEEALESFVDEWFKPLAYALTLTREQGYPSVFYGDYYGIPTHGVPAMRSKIDPILEARQKYAYGPQHDYLDHPDVIGWTREGDSSHPKSGLATLITDGPGGSKRMYAGLKNAGETWYDITGNRSDTVKIGSDGWGEFHVNDQSVSIYVQK

SEQ ID NO: 29811 - protein, 485 aa, Bacillus sp.
HHNGTNGTMMQYFEWYLPNDGNHWNRLNSDASNLKSKGITAVWIPPAWKGASQNDTGYGAYDLYDLGEFNQKGTVRTKYGTRSQLQAAVTSLKNNGIQVYGDVVMNHKGGADYTEMVRAVEVNPNNRNQEVTGEYTIEAWTRFDFPGRGNTHSSFKWRWYHFDGVDWDQSERLNNRIYKFRGHGKAWDWEVDTEFGNYDYLMYADYDMDHPEVVNELRNWGVWYTNTLGLDGFRIDAVKHIKYSFTRDWINHVRSATGKNMFAVAEFWKNDLGAIENYLQKTNWNHSVFDVPLHYNLYNASKSGGNYDMRNIFNGTVVQRHPSHAVTFVDNHDSQPEEALESFVEEWFKPLAYALTLTREQGYPSVFYGDYYGIPTHGVPAMRSKIDPILEARQKYAYGPQHDYLDHPDVIGWTREGDSSHPKSGLATLITDGPGGSKRMYAGLKNAGETWYDITGNRSDTVKIGSDGWGEFHVNDGSVSIYVQK

SEQ ID NO: 29812 - protein, 485 aa, Bacillus sp.
HHNGTNGTMMQYFEWYLPNDGNHWNRLNSDASNLKSKGIKAVWIPPAWKGASQNDVGYGAYDLYDLGEFNQRGTVRTKYGTRSQLQAAVTSLKNNGIQVYGDVVMNHKGGADATEMVRAVEVNPNNRNQEVTGEYTIEAWTRFDFPGRGNTHSSFKWRWYHFDGVDHDQSRRLNNRIYKFRGHGKAWDWEVDTEFGNYDYLMYADYDMDHPEVVNELRNWGVWYTNTLGLDGFRIDAVKHIKYSFTRDWINHVRSATGKNMFAVAEFWKNDLGAIENYLQKTNWNHSVFDVPLHYNLYNASKSGGNYDMRNIFNGTVVQRHPSHAVTFVDNHDSQPEEALESFVEEWFKPLAYALTLTREQGYPSVFYGDYYGIPTHGVPAMRSKIDPILEARQKYAYGPQHDYLDHPDVIGWTREGDSSHPKSGLATLITDGPGGSKRMYAGLKNAGETWYDITGNRSDTVKIGSDGWGEFHVNDGSVSIYVQK

SEQ ID NO: 29813 - protein, 485 aa, Bacillus sp.
HHNGTNGTMMQYFEWYLPNDGNHWNRLNSDASNLKSKGITAVWIPPAWKGASQNDVGYGAYDLYDLGEFNQKGTVRTKYGTRSQLQAAVTSLKNNGIQVYGDVVMNHKGGADATEMVRAVEVNPNNRNQEVTGEYTIEAYTRFDFSGRGNTHSSFKWRWYHFDGVDWDQSRRLDNRIYKFRGHGKAWDWEVDTEFGNYDYLMYTDYDMDHPEVVNELRNWGVWYTNTLGLDGFRIDAVKHIKYSFTRDWINHVRSATGKNMFAVAEFWKNDLGAIENYLQKTNWNHSVFDVPLHYNLYNASKSGGNYDMRNIFNGTVVQRHPSHAVTFVDNHDSQPEEALESFVEEWFKPLAYALTLTREQGYPSVFYGDYYGIPTHGVPAMRSKIDPILEARQKYAYGPQHDYLDHPDVIGWTREGDSSHPKSGLATLITDGPGGSKRMYAGLKNAGETWYDITGNRSDTVKIGSDGWGEFHVNDGSVSIYVQK

SEQ ID NO: 29814 - protein, 483 aa, Bacillus sp.
HHNGTNGTMMQYFEWYLPNDGNHWNRLNSDASNLKSKGITAVWIPPAWKGASQNDVGYGAYDLYDLGEFNQKGTVRTKYGTRSQLQAAVTSLKNNGIQVYGDVVMNHKGGADATEMVRAVEVNPHNRNQEVTGEYTIEAWTRFDFPGRGNTHSSFKWRWYHFDGVDWDQSRRLNNRIYKFRGKAWDWEVDTEFGNYDYLMYADYDMDHPEVVNELRNWGVWYTNTLGLDGFRIDAVKHIKYSFTRDWINHVRSATGKNMFAVAEFWKNDLGAIENYLQKTNWNHSVFDVPLHYNLYNASKSGGNYDMRNIFNGTVVQRHPSHAVTFVDNHDSQPEEALESFVDPWFKPLAYALTLTREQGYPSVFYGDYYGIPTHGVPAMRSKIDPILEARQKYAYGPQHDYLDHPDVIGWTREGDSSHPKSGLATLITDGPGGSKRMYAGLKNAGETWYDITGNRSDTVKIGSDGWGEFHVNKASVSIYVQK

SEQ ID NO: 29815 - protein, 485 aa, Bacillus sp.
HHNGTNGTMMQYFEWYLPNDGNHWNRLNSDASNLKSKGITAVWIPPAWKAASQNDVGYGAYDLYDLGEFNQKGTVRTKYGTRSQLQAAVTSLKNNGIQVYGDVVMNHKGGADATEMVRAVEVNPNNRNQEVTGEYTIEAYTRFDFSGRGNTHSSFKWRWYHFDGVDWDQSRDLDNRIYKFRGHGKAWDWEVDTEFGNYDYLMYADYDMDHPEVVNELRNWGVWYTNTLGLDGFRIDAVKHIKYSFTRDWINHVRSATGKNMFAVAEFWKNDLGAIENYLQKTNWNHSVFDVPLHYNLYNASKSGGNYDMRNIFNGTVVQRHPSHAVTFVDNHDSQPEEALESFVEEWFKPLAYALTLTREQGYPSVFYGDYYGIPTHGVPAMRSKIDPILEARQKYAYGPQHDYLDHPDVIGWTREGDSSHPKSGLATLITDGPGGSKRMYAGLKNAGETWYDITGNRSDTVKIGSDGWGKFHVNDGSVSIYVQK

SEQ ID NO: 29816 - protein, 483 aa, Synthetic construct
HHNGTNGTMMQYFEWYLPNDGNHWNRLNSDASNLKSKGITAVWIPPAWKGASQNDVGYGAYDLYDLGEFNQKGTVRTKYGTRSQLQAAVTSLKNNGIQVYGDVVFNHKGGADATEMVRAVEVNPNNRNQEVTGEYTIEAWTRFDFPGRGNTHSSFKWRWYHFDGVDWDQSRRLNNRIYKFRGKAWDWEVDTENGNYDYLMYADYDMDYPEVVNEVRNWGVWYTNTLGLDGFRIDAVKHIKYSFVRDWINHVRSATGKNMFAVAEFWKNDLGAIENYLQKTNWNHSVFDVPLHYNLYNASKSGGNYDMRNIFNGTVVQRHPSHAVTFVDNHDSQPEEALESFVEEWFKPLAYALTLTREQGYPSVFYGDYYGIPTHGVPAMRSKIDPILEARQKYAYGPQHDYLDHPDVIGWTREGDSSHPKSGLATLITDGPGGSKRMYAGLKNAGETWYDITGNRSDTVKIGSDGWGEFHVNDGSVSIYVQK

SEQ ID NO: 29817 - protein, 485 aa, Bacillus sp.
HHNGTNGTMMQYFEWYLPNDGNHWNRLNSDASNLKSKGITAVWIPPAWKAVSQNDVGYGAYDLYDLGEFNQKGTVRTKYGTRSQLQAAVTSLKNNGIQVYGDVVMNHKGGADLTEMVDAVEVNPNNRNQEVTGEYTIEAWTRFDFPGRGNTHSSFKWRWYHFDGVDWDQSRNLTNRIYKFRGHGKAWDWEVDTEFGNYDYLMYTDYDMDHPEVVNELRNWGVWYTNTLGLDGFRIDAVKHIKYSFTRDWINHVRSATGKNMFAVAEFWKNDLGAIENYLQKTNWNHSVFDVPLHYNLYNASKSGGNYDMRNIFNGTVVQRHPSHAVTFVDNHDSQPEEALESFVEEWFKPLAYALTLTREQGYPSVFYGDYYGIPTHGVPAMRSKIDPILEARQKYAYGPQHDYLDHPDVIGWTREGDSSHPKSGLATLITDGPGGSKRMYAGLKNAGETWYDITGNRSDTVKIGSDGWGEFHVNDGSVSIYVQK

SEQ ID NO: 29818 - protein, 485 aa, Bacillus sp.
HHNGTNGTMMQYFEWYLPNDGNHWNRLNSDASNLKSKGIKAVWIPPAWKAASQNDVGYGAYDLYDLGEFNQKGTVRTKYGTRSQLQAAVTSLKNNGIQVYGDVVMNHKGGADATEMVRAVEVNPNNRNQEVTGEYTIEAWTRFDFPGRGNTHSSFKWRWYHFDGVDFDQSRDLTNRIYKFRGHGKAWDWEVDTEFGNYDYLMYADYDMDHPEVVNELRNWGVWYTNTLGLDGFRIDAVKHIKYSFTRDWINHVRSATGKNMFAVAEFWKNDLGAIENYLQKTNWNHSVFDVPLHYNLYNASKSGGNYDMRNIFNGTVVQRHPSHAVTFVDNHDSQPEEALESFVDPWFKPLAYALTLTREQGYPSVFYGDYYGIPTHGVPAMRSKIDPILEARQKYAYGPQHDYLDHPDVIGWTREGDSSHPKSGLATLITDGPGGSKRMYAGLKNAGETWYDITGNRSDTVKIGSDGWGEFHVNGGSVSIYVQK

SEQ ID NO: 29819 - protein, 483 aa, Bacillus sp.
HHNGTNGTMMQYFEWYLPNDGNHWNRLNSDASNLKSKGITAVWIPPAWKGASQNDVGYGAYDLYDLGEFNQKGTVRTKYGTRSQLQAAVTSLKNNGIQVYGDVVMNHKGGADATEMVRAVEVNPNNRNQEVTGEYTIEAYTRFDFPGRGNTHSSFKWRWYHFDGVDFDQSRRLNNRIYKFRGKAWDWEVDTEFGNYDYLMYADYDMDHPEVVNELRNWGVWYTNTLGLDGFRIDAVKHIKYSFTRDWINHVRIATGKNMFAVAEFWKNDLGAIENYLQKTNWNHSVFDVPLHYNLYNASKSGGNYDMRNIFNGTVVQRHPSHAVTFVDNHDSQPEEALESFVDEWFKPLAYALTLTREQGYPSVFYGDYYGIPTHGVPAMRSKIDPILEARQKYAYGPQHDYLDHPDVIGWTREGDSSHPKSGLATLITDGPGGSKRMYAGLKNAGETWYDITGNRSDTVKIGSDGWGEFHVNDQSVSIYVQK

SEQ ID NO: 29820 - protein, 483 aa, Bacillus sp.
HHNGTNGTMMQYFEWYLPNDGNHWNRLNSDASNLKSKGITAVWIPPAWKGASQNDVGYGAYDLYDLGEFNQKGTVRTKYGTRSQLQAAVTSLKNNGIQVYGDVVMNHKGGADATEMVRAVEVNPNNRNQEVTGEYTIEAWTRFDFPGRGNTHSSFKWRWYHFDGVDWDQSRRLNNRIYKFRGKAWDWEVDTEFGNYDYLMYADYDMDHPEVVNELRNWGVWYTNTLGLDGFRIDAVKHIKYSFTRDWINHVRSATGKNMFAVAEFWKNDLGAIENYLQKTNWNHSVFDVPLHYNLYNASQSAANYDMRNIFNGTVVQRHPSHAVTFVDNHDSQPEEALESFVEPWFKPLAYALTLTREQGYPSVFYGDYYGIPTHGVPAMRSKIDPILEARQKYAYGPQHDYLDHPDVIGWTREGDSSHPKSGLATLITDGPGGSKRMYAGLKNAGETWYDITGNRSDTVKIGSDGWGEFHVNDGSVSIYVQK

SEQ ID NO: 29821 - protein, 483 aa, Bacillus sp.
HHNGTNGTMMQYFEWYLPNDGNHWNRLNSDASNLKSKGITAVWIPPAWKGASQNDVGYGAYDLYDLGEFNQKGTVRTKYGTRSQLQAAVTSLKNNGIQVYGDVVMNHKGGADATEMVRAVEVNPNNRNQEVTGEYTIEAWTRFDFPGRGNTHSSFKWRWYHFDGVDWDQSRRLDNRIYKFRGKAWDWEVDTEFGNYDYLMYTDYDMDHPEVVNELRNWGVWYTNTLGLDGFRIDAVKHIKYSFTRDWINHVRSATGKNMFAVAEFWKNDLGAIENYLQKTNWNHSVFDVPLHYNLYNASKSGGNYDMRNIFNGTVVQRHPSHAVTFVDNHDSQPEEALESFVETWFKPLAYALTLTREQGYPSVFYGDYYGIPTHGVPAMRSKIDPILEARQKYAYGPQHDYLDHPDVIGWTREGDSSHPKSGLATLITDGPGGSKRMYAGLKNAGETWYDITGNRSDTVKIGSDGWGEFHVNKASVSIYVQK

SEQ ID NO: 29822 - protein, 485 aa, Synthetic construct
HHNGTNGTMMQYFEWYLPNDGNHWNRLNSDASNLKSKGITAVWIPPAWKGASQNDVGYGAYDLYDLGEFNQKGTVRTKYGTRSQLQAAVTSLKNNGIQVYGDVVMNHKGGADATEMVRAVEVNPNNRNQEVTGEYTIEAWTRFDFPGRGNTHSSFKWRWYHFDGVDWDQSRRLNNRIYKFRGHGKAWDWEVDTEFGNYDYLMYADYDYDHPETTNELRNWGVWYTNTLGLDGFRIDAVKHIKYSFTRDWINHVRSATGKNMFAVAEFWKNDLGAIENYLQKTNWNHSVFDVPLHYNLYNASKSGGNYDMRNIFNGTVVQRHPSHAVTFVDNHDSQPEEALESFVEEWFKPLAYALTLTREQGYPSVFYGDYYGIPTHGVPAMRSKIDPILEARQKYAYGPQHDYLDHPDVIGWTREGDSSHPKSGLATLITDGPGGSKRMYAGLKNAGETWYDITGNRSDTVKIGSDGWGEFHVNDGSVSIYVQK

SEQ ID NO: 29823 - protein, 483 aa, Bacillus sp.
HHNGTNGTMMQYFEWYLPNDGNHWNRLNSDASNLKSKGIKAVWIPPAWKGASQNDVGYGAYDLYDLGEFNQRGTVRTKYGTRSQLQAAVTSLKNNGINVYGDVVMNHKGGADATEMVRAVEVNPNNRNQEVTGEYTIEAWTRFDFPGRGNTHSSFKWRWYHFDGVDFDQSRRLNNRIYKFRGKAWDWEVDTEFGNYDYLMYADYDMDHPEVVNELRNWGVWYTNTLGLDGFRIDAVKHIKYSFTRDWINHVRSATGKNMFAVAEFWKNDLGAIENYLQKTNWNHSVFDVPLHYNLYNASKSGGNYDMRNIFNGTVVQAHPMHAVTFVDNHDSQPEEALESFVEEWFKPLAYALTLTREQGYPSVFYGDYYGIPTHGVPAMRSKIDPILEARQKYAYGPQHDYLDHPDVIGWTREGDSSHPKSGLATLITDGPGGSKRMYAGLKNAGETWYDITGNRSDTVKIGSDGWGEFHVNDGSVSIYVQK

SEQ ID NO: 29824 - protein, 483 aa, Bacillus sp.
HHNGTNGTMMQYFEWYLPNDGNHWNRLNSDASNLKSKGITAVWIPPAWKAVSQNDVGYGAYDLYDLGEFNQKGTVRTKYGTRSQLQAAVTSLKNNGIQVYGDVVMNHKGGADATEMVRAVEVNPNNRNQEVTGEYTIEAWTRFDFPGRGNTHSSFKWRWYHFDGVDWDQSRNLTNRIYKFRGKAWDWEVDTEFGNYDYLMYTDYDMDHPEVVNELRNWGVWYTNTLGLDGFRIDAVKHIKYSFTRDWINHVRSATGKNMFAVAEFWKNDLGAIENYLQKTNWNHSVFDVPLHYNLYNASKSGGNYDMRNIFNGTVVQRHPSHAVTFVDNHDSQPEEALESFVDEWFKPLAYALTLTREQGYPSVFYGDYYGIPTHGVPAMRSKIDPILEARQKYAYGPQHDYLDHPDVIGWTREGDSSHPKSGLATLITDGPGGSKRMYAGLKNAGETWYDITGNRSDTVKIGSDGWGEFHVNKSSVSIYVQK

SEQ ID NO: 29825 - protein, 485 aa, Synthetic construct
HHNGTNGTMMQYFEWYLPNDGNHWNRLNSDASNLKSKGITAVWIPPAWKGASQNDVGYGAYDLYDLGEFNQKGTVRTKYGTRSQLQAAVTSLKNNGIQVYGDVVMNHKGGADATEMVRAVEVNPNNRNQEVTGEYTIEAWTRFDFPGRGNTHSSFKWRWYHFDGVDWDQSRRLNNRIYKFRGHGKEWDWEVDTEFGNYDYLMYTDYDMDHSEVVNELRNWGVWYTNTLGLDGFRIDAVKHIKYSFTRDWINHVRSATGKNMFAVAEFWKNDLGAIENYLQKTNWNHSVFDVPLHYNLYNASKSGGNYDMRNIFNGTVVQRHPSHAVTFVDNHDSQPEEALESFVEEWFKPLAYALTLTREQGYPSVFYGDYYGIPTHGVPAMRSKIDPILEARQKYAYGPQHDYLDHPDVIGWTREGDSSHPKSGLATLITDGPGGSKRMYAGLKNAGETWYDITGNRSDTVKIGSDGWGEFHVNDGSVSIYVQK

SEQ ID NO: 29826 - protein, 485 aa, Bacillus sp.
HHNGTNLTMMQYFEWYLPNDGNHWNRLNSDASNLKSKGITAVWIPPAWKGASQNDVGYGAYDLYDLGEFNQKGTVRTKYGTRSQLQAAVTSLKNNGIQVYGDVVMNHKGGADATEMVRAVEVNPNNRNQEVTGEYTIEAWTRFDFPGRGNTHSSFKWRWYHFDGVDWDQSRRLNNRIYKFRGHGKAWDWEVDTEFGNYDYLMYADYDMDHQEVVNELRNWGVWYTNTLGLDGFRIDAVKHIKYSFTRDWINHVRSATGKNMFAVAEFWKNDLGAIENYLQKTNWNHSVFDVPLHYNLYNASKGGGNYDMRNIFNGTVVQAHPSHAVTFVDNHDSQPEEALESFVEEWFKPLAYALTLTREQGYPSVFYGDYYGIPTHGVPAMRSKIDPILEARQKYAYGPQHDYLDHPDVIGWTREGDSSHPKSGLATLITDGPGGSKRMYAGLKNAGETWYDITGNRSDTVKIGSDGWGEFHVNDGSVSIYVQK

SEQ ID NO: 29827 - protein, 483 aa, Synthetic construct
HHNGTNGTMMQYFEWYLPNDGNHWNRLNSDASNLKSKGITAVWIPPAWKGASQNDVGYGAYDLYDLGEFNQKGTVRTKYGTRSQLQAAVTSLKNNGIQVYGDVVMNHKGGADATEMVRAVEVNPNNRNQEVTGEYTIEAWTRFDFPGRGNTHSSFKWRWYHFDGVDWDQSRRLNNRIYKFRGKAWDWEVDTENGNYDYLMYADYDMDYPETTNEVRNWGVWYTNTLGLDGFRIDAVKHIKYSFTRDWINHVRSATGKNMFAVAEFWKNDLGAIENYLQKTNWNHSVFDVPLHYNLYNASKSGGNYDMRNIFNGTVVQRHPSHAVTFVDNHDSQPEEALESFVEEWFKPLAYALTLTREQGYPSVFYGDYYGIPTHGVPAMRSKIDPILEARQKYAYGPQHDYLDHPDVIGWTREGDSSHPKSGLATLITDGPGGSKRMYAGLKNAGETWYDITGNRSDTVKIGSDGWGEFHVNDGSVSIYVQK

SEQ ID NO: 29828 - protein, 483 aa, Bacillus sp.
HHNGTNGTMMQYFEWYLPNDGNHWNRLNSDASNLKSKGITAVWIPPAWKAASQNDVGYGAYDLYDLGEFNQKGTVRTKYGTRSQLQAAVTSLKNNGIQVYGDVVMNHKGGADATEMVRAVEVNPNNRNQEVTGEYTIEAWTRFDFPGRGNTHSSFKWRWYHFDGVDWDQSRNLNNRIYKFRGKAWDWEVDTEFGNYDYLMYTDYDMDHPEVVNELRNWGVWYTNTLGLDGFRIDAVKHIKYSFTRDWINHVRSATGKNMFAVAEFWKNDLGAIENYLQKTNWNHSVFDVPLHYNLYNASKSGGNYDMRNIFNGTVVQRHPSHAVTFVDNHDSQPEEALESFVDEWFKPLAYALTLTREQGYPSVFYGDYYGIPTHGVPAMRSKIDPILEARQKYAYGPQHDYLDHPDVIGWTREGDSSHPKSGLATLITDGPGGSKRMYAGLKNAGETWYDITGNRSDTVKIGSDGWGEFHVNKSSVSIYVQK

SEQ ID NO: 29829 - protein, 485 aa, Bacillus sp.
HHNGTNGTMMQYFEWYLPNDGNHWNRLNSDASNLKSKGIKAVWIPPAWKAVSQNDVGYGAYDLYDLGEFNQKGTVRTKYGTRSQLQAAVTSLKNNGIQVYGDVVMNHKGGADATEMVRAVEVNPNNRNQEVTGEYTIEAWTRFDFPGRGNTHSSFKWRWYHFDGVDWDQSRNLTNRIYKFRGHGKAWDWEVDTEFGNYDYLMYTDYDMDHPEVVNELRNWGVWYTNTLGLDGFRIDAVKHIKYSFTRDWINHVRSATGKNMFAVAEFWKNDLGAIENYLQKTNWNHSVFDVPLHYNLYNASKSGGNYDMRNIFNGTVVQRHPSHAVTFVDNHDSQPEEALESFVEEWFKPLAYALTLTREQGYPSVFYGDYYGIPTHGVPAMRSKIDPILEARQKYAYGPQHDYLDHPDVIGWTREGDSSHPKSGLATLITDGPGGSKRMYAGLKNAGETWYDITGNRSDTVKIGSDGWGEFHVNDGSVSIYVQK

SEQ ID NO: 29830 - protein, 483 aa, Bacillus sp.
HHNGTNGTMMQYFEWYLPNDGNHWNRLNSDASNLKSKGITAVWIPPAWKGASQNDVGYGAYDLYDLGEFNQKGTVRTKYGTRSQLQAAVTSLKNNGIQVYGDVVMNHKGGADATEMVRAVEVNPNNRNQEVTGEYTIEAWTRFDFPGRGNTHSSFKWRWYHFDGVDWDQSRRLNNRIYKFRGKAWDWEVDTEFGNYDYLMYADYDMDHPEVVNELRNWGVWYTNTLGLDGFRIDAVKHIKYSFTRDWINHVRSATGKNMFAVAEFWKNDLGAIENYLQKTNWNHSVFDVPLHYNLYNASKSAGNYDMRNIFNGTVVQRHPSHAVTFVDNHDSQPEEALESFVEPWFKPLAYALTLTREQGYPSVFYGDYYGIPTHGVPAMRSKIDPILEARQKYAYGPQHDYLDHPDVIGWTREGDSSHPKSGLATLITDGPGGSKRMYAGLKNAGETWYDITGNRSDTVKIGSDGWGEFHVNKQSVSIYVQK

SEQ ID NO: 29831 - protein, 483 aa, Bacillus sp.
HHNGTNGTMMQYFEWYLPNDGNHWNRLNSDASNLKSKGITAVWIPPAWKGASQNDVGYGAYDLYDLGEFNQKGTVRTKYGTRSQLQAAVTSLKNNGIQVYGDVVMNHKGGADATEMVRAVEVNPNNRNQEVTGEYTIEAWTRFDFPGRGNTHSSFKWRWYHFDGVDWDQSRRLNNRIYKFRGKAWDWEVDTEFGNYDYLMYADYDMDHPEVVNELRNWGVWYTNTLGLDGFRIDAVKHIKYSFTRDWINHVRSATGKNMFAVAEFWKNDLGAIENYLQKTNWNHSVFDVPLHYNLYNASKSAGNYDMRNIFNGTVVQRHPSHAVTFVDNHDSQPEEALESFVDTWFKPLAYALTLTREQGYPSVFYGDYYGIPTHGVPAMRSKIDPILEARQKYAYGPQHDYLDHPDVIGWTREGDSSHPKSGLATLITDGPGGSKRMYAGLKNAGETWYDITGNRSDTVKIGSDGWGEFHVNKASVSIYVQK

SEQ ID NO: 29832 - protein, 483 aa, Bacillus sp.
HHNGTNGTMMQYFEWYLPNDGNHWNRLNSDASNLKSKGIKAVWIPPAWKGASQNDVGYGAYDLYDLGEFNQRGTVRTKYGTRSQLQAAVTSLKNNGIQVYGDVVMNHKGGADATEMVRAVEVNPNNRNQEVTGEYTIEAWTRFDFPGRGNTHSSFKWRWYHFDGVDFDQSRRLNNRIYKFRGKAWDWEVDTEFGNYDYLMYADYDMDHPEVVNELRNWGVWYTNTLGLDGFRIDAVKHIKYSFTRDWINHVRSATGKNMFAVAEFWKNDLGAIENYLQKTNWNHSVFDVPLHYNLYNASKSGGNYDMRNIFNGTVVQRHPSHAVTFVDNHDSQPEEALESFVEEWFKPLAYALTLTREQGYPSVFYGDYYGIPTHGVPAMRSKIDPILEARQKYAYGPQHDYLDHPDVIGWTREGDSSHPKSGLATLITDGPGGSKRMYAGLKNAGETWYDITGNRSDTVKIGSDGWGEFHVNDGSVSIYVQK

SEQ ID NO: 29833 - protein, 485 aa, Bacillus sp.
HHNGTNGTMMQYFEWYLPNDGNHWNRLNSDASNLKSKGITAVWIPPAWKGASQNDVGYGAYDLYDLGEFNQKGTVRTKYGTRSQLQAAVTSLKNNGIQVYGDVVMNHKGGADATEMVRAVEVNPNNRNQEVTGEYTIEAWTRFDFPGRGNTHSSFKWRWYHFDGVDWDQSRRLDNRIYKFRGHGKAWDWEVDTEFGNYDYLMYTDYDMDHPEVVNELRNWGVWYTNTLGLDGFRIDAVKHIKYSFTRDWINHVRSATGKNMFAVAEFWKNDLGAIENYLQKTNWNHSVFDVPLHYNLYNASKSGGNYDMRNIFNGTVVQRHPSHAVTFVDNHDSQPEEALESFVETWFKPLAYALTLTREQGYPSVFYGDYYGIPTHGVPAMRSKIDPILEARQKYAYGPQHDYLDHPDVIGWTREGDSSHPKSGLATLITDGPGGSKRMYAGLKNAGETWYDITGNRSDTVKIGSDGWGEFHVNKASVSIYVQK

SEQ ID NO: 29834 - protein, 483 aa, Bacillus sp.
HHNGTNGTMMQYFEWYLPNDGNHWNRLNSDASNLKSKGITAVWIPPAWKGASQNDVGYGAYDLYDLGEFNQKGTVRTKYGTRSQLQAAVTSLKNNGIQVYGDVVMNHKGGADATEMVRAVEVNPNNRNQEVTGEYTIEAWTRFDFPGRGNTHSSFKWRWYHFDGVDWDQSRRLNNRIYKFRGKAWDWEVDTEFGNYDYLMYADYDMDHPEVVNELRNWGVWYTNTLGLDGFRIDAVKHIKYSFTRDWINHVRSATGKNMFAVAEFWKNDLGAIENYLQKTNWNHSVFDVPLHYNLYNASKSAGNYDMRNIFNGTVVQRHPSHAVTFVDNHDSQPEEALESFVDTWFKPLAYALTLTREQGYPSVFYGDYYGIPTHGVPAMRSKIDPILEARQKYAYGPQHDYLDHPDVIGWTREGDSSHPKSGLATLITDGPGGSKRMYAGLKNAGETWYDITGNRSDTVKIGSDGWGEFHVNKSSVSIYVQK

SEQ ID NO: 29835 - protein, 485 aa, Bacillus sp.
HHNGTNGTMMQYFEWYLPNDGNHWNRLNSDASNLKSKGIKAVWIPPAWKAVSQNDVGYGAYDLYDLGEFNQKGTVRTKYGTRSQLQAAVTSLKNNGIQVYGDVVMNHKGGADATEMVRAVEVNPNNRNQEVTGEYTIEAWTRFDFPGRGNTHSSFKWRWYHFDGVDFDQSRDLENRIYKFRGHGKAWDWEVDTEFGNYDYLMYADYDMDHPEVVNELRNWGVWYTNTLGLDGFRIDAVKHIKYSFTRDWINHVRSATGKNMFAVAEFWKNDLGAIENYLQKTNWNHSVFDVPLHYNLYNASKSGGNYDMRNIFNGTVVQRHPSHAVTFVDNHDSQPEEALESFVEEWFKPLAYALTLTREQGYPSVFYGDYYGIPTHGVPAMRSKIDPILEARQKYAYGPQHDYLDHPDVIGWTREGDSSHPKSGLATLITDGPGGSKRMYAGLKNAGETWYDITGNRSDTVKIGSDGWGEFHVNDGSVSIYVQK

SEQ ID NO: 29836 - protein, 483 aa, Bacillus sp.
HHNGTNGTMMQYFEWYLPNDGNHWNRLNSDASNLKSKGITAVWIPPAWKGASQNDVGYGAYDLYDLGEFNQKGTVRTKYGTRSQLQAAVTSLKNNGIQVYGDVVMNHKGGADATEMVRAVEVNPNNRNQEVTGEYTIEAWTRFDFPGRGNTHSSFKWRWYHFDGVDWDQSRRLDNRIYKFRGKAWDWEVDTEFGNYDYLMYTDYDMDHPEVVNELRNWGVWYTNTLGLDGFRIDAVKHIKYSFTRDWINHVRSATGKNMFAVAEFWKNDLGAIENYLQKTNWNHSVFDVPLHYNLYNASQSGGNYDMRNIFNGTVVQRHPSHAVTFVDNHDSQPEEALESFVEPWFKPLAYALTLTREQGYPSVFYGDYYGIPTHGVPAMRSKIDPILEARQKYAYGPQHDYLDHPDVIGWTREGDSSHPKSGLATLITDGPGGSKRMYAGLKNAGETWYDITGNRSDTVKIGSDGWGEFHVNKSSVSIYVQK

SEQ ID NO: 29837 - protein, 483 aa, Bacillus sp.
HHNGTNGTMMQYFEWYLPNDGNHWNRLNSDASNLKSKGITAVWIPPAWKGASQNDVGYGAYDLYDLGEFNQKGTVRTKYGTRSQLQAAVTSLKNNGIQVYGDVVMNHKGGADATEMVRAVEVNPNNRNQEVTGEYTIEAWTRFDFPGRGNTHSSFKWRWYHFDGVDWDQSRRLNNRIYKFRGKAWDWEVDTEFGNYDYLMYADYDMDHPEVVNELRNWGVWYTNTLGLDGFRIDAVKHIKYSFTRDWINHVRSATGKNMFAVAEFWKYDLGAIENYLQKTNWNHSVFDVPLHNNLYTASKSGGNYDMRNIFNGTVVQRHPSHAVTFVDNHDSQPEEALESFVEEWFKPLAYALTLTREQGYPSVFYGDYYGIPTHGVPAMRSKIDPILEARQKYAYGPQHDYLDHPDVIGWTREGDSSHPKSGLATLITDGPGGSKRMYAGLKNAGETWYDITGNRSDTVKIGSDGWGEFHVNDGSVSIYVQK

SEQ ID NO: 29838 - protein, 485 aa, Synthetic construct
HHNGTNGTMMQYFEWYLPNDGNHWNRLNSDASNLKSKGITAVWIPPAWKGASQNDVGYGAYDLYDLGEFNQKGTVRTKYGTRSQLQAAVTSLKNNGIQVYGDVVMNHKGGADATEMVRAVEVNPNNRNQEVTGEYTIEAWTRFDFPGRGNTHSSFKWRWYHFDGVDWDQSRRLNNRIYKFRGHGKEWDWEVDTEFGNYDYLMYTDYDMDSPEVVNELRNWGVWYTNTLGLDGFRIDAVKHIKYSFTRDWINHVRSATGKNMFAVAEFWKNDLGAIENYLQKTNWNHSVFDVPLHYNLYNASKSGGNYDMRNIFNGTVVQRHPSHAVTFVDNHDSQPEEALESFVEEWFKPLAYALTLTREQGYPSVFYGDYYGIPTHGVPAMRSKIDPILEARQKYAYGPQHDYLDHPDVIGWTREGDSSHPKSGLATLITDGPGGSKRMYAGLKNAGETWYDITGNRSDTVKIGSDGWGEFHVNDGSVSIYVQK

SEQ ID NO: 29839 - protein, 483 aa, Bacillus sp.
HHNGTNLTMMQYFEWYLPNDGNHWNRLNSDASNLKSKGITAVWIPPAWKGASQNDVGYGAYDLYDLGEFNQKGTVRTKYGTRSQLQAAVTSLKNNGIQVYGDVVMNHKGGADATEMVRAVEVNPNNRNQEVTGEYTIEAWTRFDFPGRGNTHSSFKWRWYHFDGVDWDQSRRLNNRIYKFRGKAWDWEVDTEFGNYDYLMYADYDMDHQEVVNELRNWGVWYTNTLGLDGFRIDAVKHIKYSFTRDWINHVRSATGKNMFAVAEFWKNDLGAIENYLQKTNWNHSVFDVPLHYNLYNASKGGGNYDMRNIFNGTVVQAHPSHAVTFVDNHDSQPEEALESFVEEWFKPLAYALTLTREQGYPSVFYGDYYGIPTHGVPAMRSKIDPILEARQKYAYGPQHDYLDHPDVIGWTREGDSSHPKSGLATLITDGPGGSKRMYAGLKNAGETWYDITGNRSDTVKIGSDGWGEFHVNDGSVSIYVQK

SEQ ID NO: 29840 - protein, 483 aa, Bacillus sp.
HHNGTNGTMMQYFEWYLPNDGNHWNRLNSDASNLKSKGITAVWIPPAWKGASQNDVGYGAYDLYDLGEFNQKGTVRTKYGTRSQLQAAVTSLKNNGIQVYGDVVMNHKGGADATEMVRAVEVNPNNRNQEVTGEYTIEAWTRFDFPGRGNTHSSFKWRWYHFDGVDWDQSRRLNNRIYLFRSKAWQWEVPTENGNYDYLMYADIDMDHPEVVNELRNWGVWYTNTLGLDGFRIDAVKHIKYSFTRDWINHVRSATGKNMFAVAEFWKNDLGAIENYLQKTNWNHSVFDVPLHYNLYNASKSGGNYDMRNIFNGTVVQRHPSHAVTFVDNHDSQPEEALESFVEEWFKPLAYALTLTREQGYPSVFYGDYYGIPTHGVPAMRSKIDPILEARQKYAYGPQHDYLDHPDVIGWTREGDSSHPKSGLATLITDGPGGSKRMYAGLKNAGETWYDITGNRSDTVKIGSDGWGEFHVNDGSVSIYVQK

SEQ ID NO: 29841 - protein, 483 aa, Bacillus sp.
HHNGTNGTMMQYFEWYLPNDGNHWNRLNSDASNLKSKGITAVWIPPAWKGASQNDVGYGAYDLYDLGEFNQKGTVRTKYGTRSQLQAAVTSLKNNGIQVYGDVVMNHKGGADATEMVRAVEVNPNNRNQEVTGEYTIEAWTRFDFPGRGNTHSSFKWRWYHFDGVDWDQSRELDNRIYKFRGKAWDWEVDTEFGNYDYLMYTDYDMDHPEVVNELRNWGVWYTNTLGLDGFRIDAVKHIKYSFTRDWINHVRSATGKNMFAVAEFWKNDLGAIENYLQKTNWNHSVFDVPLHYNLYNASKSQGNYDMRNIFNGTVVQRHPSHAVTFVDNHDSQPEEALESFVDTWFKPLAYALTLTREQGYPSVFYGDYYGIPTHGVPAMRSKIDPILEARQKYAYGPQHDYLDHPDVIGWTREGDSSHPKSGLATLITDGPGGSKRMYAGLKNAGETWYDITGNRSDTVKIGSDGWGEFHVNGSSVSIYVQK

SEQ ID NO: 29842 - protein, 483 aa, Bacillus sp.
HHNGTNGTMMQYFEWYLPNDGNHWNRLNSDASNLKSKGITAVWIPPAWKGASQNDVGYGAYDLYDLGEFNQKGTVRTKYGTRSQLQAAVTSLKNNGIQVYGDVVMNHKGGADATEMVRAVEVNPNNRNQEVTGEYTIEAWTRFDFPGRGNTHSSFKWRWYHFDGVDWDQSRRLNNRIYKFRSKAWDWEVDTEFGNYDYLMYADYDMDSPEVSNELRNWGVWYTNTLGLDGFRIDAVKHIKYSFTRDWINHVRSATGKNMFAVAEFWKNDLGAIENYLQKTNWNHSVFDVPLHYNLYNASKSGGNYDMRNIFNGTVVQRHPSHAVTFVDNHDSQPEEALESFVEEWFKPLAYALTLTREQGYPSVFYGDYYGIPTHGVPAMRSKIDPILEARQKYAYGPQHDYLDHPDVIGWTREGDSSHPKSGLATLITDGPGGSKRMYAGLKNAGETWYDITGNRSDTVKIGSDGWGEFHVNDGSVSIYVQK

SEQ ID NO: 29843 - protein, 483 aa, Bacillus sp.
HHNGTNGTMMQYFEWYLPNDGNHWNRLNSDASNLKSKGITAVWIPPAWKAVSQNDVGYGAYDLYDLGEFNQRGTVRTKYGTRSQLQAAVTSLKNNGIQVYGDVVMNHKGGADATEMVRAVEVNPNNRNQEVTGEYTIEAWTRFDFPGRGNTHSSFKWRWYHFDGVDFDQSREFTNRIYKFRGKAWDWEVDTEFGNYDYLMYVDYDMDHPEVVNELRNWGVWYTNTLGLDGFRIDAVKHIKYSFTRDWINHVRSATGKNMFAVAEFWKNDLGAIENYLQKTNWNHSVFDVPLHYNLYNASKSGGNYDMRNIFNGTVVQRHPSHAVTFVDNHDSQPEEALESFVEEWFKPLAYALTLTREQGYPSVFYGDYYGIPTHGVPAMRSKIDPILEARQKYAYGPQHDYLDHPDVIGWTREGDSSHPKSGLATLITDGPGGSKRMYAGLKNAGETWYDITGNRSDTVKIGSDGWGEFHVNDGSVSIYVQK

SEQ ID NO: 29844 - protein, 483 aa, Bacillus sp.
HHNGTNGTMMQYFEWYLPNDGNHWNRLNSDASNLKSKGITAVWIPPAWKGASQNDVGYGAYDLYDLGEFNQKGTVRTKYGTRSQLQAAVTSLKNNGIQVYGDVVMNHKGGADLTEMVRAVEVNPNNRNQEVTGEYTIEAWTRFDFPGRGNTHSSFKWRWYHFDGVDFDQSRRLNNRIYKFRGKAWDWEVDTEFGNYDYLMYADYDMDHPEVVNELRNWGVWYTNTLGLDGFRIDAVKHIKYSFTRDWINHVRSATGKNMFAVAEFWKNDLGAIENYLQKTNWNHSVFDVPLHYNLYNASKSGGNYDMRNIFNGTVVQRHPSHAVTFVDNHDSQPEEALESFVDEWFKPLAYALTLTREQGYPSVFYGDYYGIPTHGVPAMRSKIDPILEARQKYAYGPQHDYLDHPDVIGWTREGDSSHPKSGLATLITDGPGGSKRMYAGLKNAGETWYDITGNRSDTVKIGSDGWGEFHVNKSSVSIYVQK

SEQ ID NO: 29845 - protein, 483 aa, Bacillus sp.
HHNGTNGTMMQYFEWYLPNDGNHWNRLNSDASNLKSKGITAVWIPPAWKGTSQNDVGYGAYDLYDLGEFNQKGTVRTKYGTRSQLQAAVTSLKNNGIQVYGDVVMNHKGGADATEMVRAVEVNPNNRNQEVTGEYTIEAWTRFDFPGRGNTHSSFKWRWYHFDGVDWDQSRNLNNRIYKFRGKAWDWEVDTEFGNYDYLMYVDYDMDHPEVVNELRNWGVWYTNTLGLDGFRIDAVKHIKYSFTRDWINHVRSATGKNMFAVAEFWKNDLGAIENYLQKTNWNHSVFDVPLHYNLYNASKSQGNYDMRNIFNGTVVQANPNHAVTFVDNHDSQPEEALESFVDTWFKPLAYALTLTREQGYPSVFYGDYYGIPTHGVPAMRSKIDPILEARQKYAYGPQHDYLDHPDVIGWTREGDSSHPKSGLATLITDGPGGSKRMYAGLKNAGETWYDITGNRSDTVKIGSDGWGEFHVNGSSVSIYVQK

SEQ ID NO: 29846 - protein, 483 aa, Bacillus sp.
HHNGTNGTMMQYFEWYLPNDGNHWNRLNSDASNLKSKGITAVWIPPAWKGASQNDVGYGAYDLYDLGEFNQKGTVRTKYGTRSQLQAAVTSLKNNGIQVYGDVVMNHKGGADATEMVRAVEVNPNNRNQEVTGEYTIEAWTRFDFPGRGNTHSSFKWRWYHFDGVDWDQSERLNNRIYKFRGKAWDWEVETEFGNYDYLMYADYDMDHPEVVNELRNWGVWYTNTLGLDGFRIDAVKHIKYSFTRDWINHVRSATGKNMFAVAEFWKNDLGAIENYLQKTNWNHSVFDVPLHYNLYNASKSGGNYDMRNIFNGTVVQRHPSHAVTFVDNHDSQPEEALESFVEEWFKPLAYALTLTREQGLPSVFYGDYYGIPTHGVPAMRSKIDPILEARQKYAYGPQHDYLDHPDVIGWTREGDSSHPKSGLATLITDGPGGSKRMYAGLKNAGETWYDITGNRSDTVKIGSDGWGEFHVNDGSVSIYVQK

SEQ ID NO: 29847 - protein, 483 aa, Bacillus sp.
HHNGTNGTMMQYFEWYLPNDGNHWNRLNSDASNLKSKGITAVWIPPAWKGASQNDVGYGAYDLYDLGEFNQKGTVRTKYGTRSQLQAAVTSLKNNGIQVYGDVVMNHKGGADATEMVRAVEVNPNNRNQEVTGEYTIEAWTRFDFPGRGNTHSSFKWRWYHFDGVDFDQSRRLNNRIYKFRGKAWDWEVDTEFGNYDYLMYADYDMDHPEVVNELRNWGVWYTNTLGLDGFRIDAVKHIKYSFTRDWINHVRSATGKNMFAVAEFWKNDLGAIENYLQKTNWNHSVFDVPLHYNLYNASKSGGNYDMRNIFNGTVVQRHPSHAVTFVDNHDSQPEEALESFVETWFKPLAYALTLTREQGYPSVFYGDYYGIPTHGVPAMRSKIDPILEARQKYAYGPQHDYLDHPDVIGWTREGDSSHPKSGLATLITDGPGGSKRMYAGLKNAGETWYDITGNRSDTVKIGSDGWGEFHVNKASVSIYVQK

SEQ ID NO: 29848 - protein, 483 aa, Bacillus sp.
HHNGTNGTMMQYFEWYLPNDGNHWNRLNSDASNLKSKGITAVWIPPAWKAVSQNDVGYGAYDLYDLGEFNQKGTVRTKYGTRSQLQAAVTSLKNNGIQVYGDVVMNHKGGADATEMVPAVEVNPNNRNQEVTGEYTIEAWTRFDFPGRGNTHSSFKWRWYHFDGVDWDQSRNLTNRIYKFRSKAWDWEVDTEFGNYDYLMYTDYDMDHPEVVNELRNWGVWYTNTLGLDGFRIDAVKHIKYSFTRDWINHVRSATGKNMFAVAEFWKNDLGAIENYLQKTNWNHSVFDVPLHYNLYNASKSGGNYDMRNIFNGTVVQRHPSHAVTFVDNHDSQPEEALESFVEEWFKPLAYALTLTREQGYPSVFYGDYYGIPTHGVPAMRSKIDPILEARQKYAYGPQHDYLDHPDVIGWTREGDSSHPKSGLATLITDGPGGSKRMYAGLKNAGETWYDITGNRSDTVKIGSDGWGEFHVNDGSVSIYVQK

SEQ ID NO: 29849 - protein, 485 aa, Synthetic construct
HHNGTNGTMMQYFEWYLPNDGNHWNRLNSDASNLKSKGITAVWIPPAWKGASQNDVGYGAYDLYDLGEFNQKGTVRTKYGTRSQLQAAVTSLKNNGIQVYGDVVMNHKGGADATEMVRAVEVNPNNRNQEVTGEYTIEAWTRFDFPGRGNTHSSFKWRWYHFDGVDWDQSRRLNNRIYKFRGHGKAWDWEVDTEFGNYDYLMYADYDYDHPETVNEVRNWGVWYTNTLGLDGFRIDAVKHIKYSFTRDWINHVRSATGKNMFAVAEFWKNDLGAIENYLQKTNWNHSVFDVPLHYNLYNASKSGGNYDMRNIFNGTVVQRHPSHAVTFVDNHDSQPEEALESFVEEWFKPLAYALTLTREQGYPSVFYGDYYGIPTHGVPAMRSKIDPILEARQKYAYGPQHDYLDHPDVIGWTREGDSSHPKSGLATLITDGPGGSKRMYAGLKNAGETWYDITGNRSDTVKIGSDGWGEFHVNDGSVSIYVQK

SEQ ID NO: 29850 - protein, 483 aa, Bacillus sp.
HHNGTNGTMMQYFEWYLPNDGNHWNRLNSDASNLKSKGITAVWIPPAWKGASQNDVGYGAYDLYDLGEFNQKGTVRTKYGTRSQLQAAVTSLKNNGIQVYGDVVMNHKGGADATEMVRAVEVNPNNRNQEVTGEYTIEAWTRFDFPGRGNTHSSFKWRWYHFDGVDWDQSREFDNRIYKFRGKAWDWEVDTEFGNYDYLMYADYDYDHPESTNEMRNWGVWYTNTLGLDGFRIDAVKHIKYSFTRDWINHVRSATGKNMFAVAEFWKNDLGAIENYLQKTNWNHSVFDVPLHYNLYNASKSGGNYDMRNIFNGTVVQRHPSHAVTFVDNHDSQPEEALESFVEEWFKPLAYALTLTREQGYPSVFYGDYYGIPTHGVPAMRSKIDPILEARQKYAYGPQHDYLDHPDVIGWTREGDSSHPKSGLATLITDGPGGSKRMYAGLKNAGETWYDITGNRSDTVKIGSDGWGEFHVNDGSVSIYVQK

SEQ ID NO: 29851 - protein, 483 aa, Bacillus sp.
HHNGTNGTMMQYFEWYLPNDGNHWNRLNSDASNLKSKGITAVWIPPAWKGASQNDVGYGAYDLYDLGEFNQKGTVRTKYGTRSQLQAAVTSLKNNGIQVYGDVVMNHKGGADATEMVRAVEVNPNNRNQEVTGEYTIEAWTRFDFPGRGNTHSSFKWRWYHFDGVDWDQSRRLNNRIYKFRGKAWDWEVDTENGFYDYLMYADIDYDYPEVVNTLRVWGVWYTNTLGLDGFRIDAVKHIKYSFTRDWINHVRSATGKNMFAVAEFWKNDLGAIENYLQKTNWNHSVFDVPLHYNLYNASKSGGNYDMRNIFNGTVVQRHPSHAVTFVDNHDSQPEEALESFVEEWFKPLAYALTLTREQGYPSVFYGDYYGIPTHGVPAMRSKIDPILEARQKYAYGPQHDYLDHPDVIGWTREGDSSHPKSGLATLITDGPGGSKRMYAGLKNAGETWYDITGNRSDTVKIGSDGWGEFHVNDGSVSIYVQK

SEQ ID NO: 29852 - protein, 485 aa, Bacillus sp.
HHNGTNGTMMQYFEWYLPNDGNHWNRLNSDASNLKSKGITAVWIPPAWKGASQNDVGYGAYDLYDLGEFNQKGTVRTKYGTRSQLQAAVTSLKNNGIQVYGDVVMNHKGGADATEMVRAVEVNPNNRNQEVTGEYTIEAYTRFDFPGRGNTHSSFKWRWYHFDGVDFDQSRKLNNRIYKFRGHGKAWDWEVDTEFGNYDYLMYVDYDMDHPEVVNELRNWGVWYTNTLGLDGFRIDAVKHIKYSFTRDWINHVRSATGKNMFAVAEFWKNDLGAIENYLQKTNWNHSVFDVPLHYNLYNASKSGGNYDMRNIFNGTVVQRHPSHAVTFVDNHDSQPEEALESFVEEWFKPLAYALTLTREQGYPSVFYGDYYGIPTHGVPAMRSKIDPILEARQKYAYGPQHDYLDHPDVIGWTREGDSSHPKSGLATLITDGPGGSKRMYAGLKNAGETWYDITGNRSDTVKIGSDGWGEFHVNDGSVSIYVQK

SEQ ID NO: 29853 - protein, 483 aa, Bacillus sp.
HHNGTNGTMMQYFEWYLPNDGNHWNRLNSDASNLKSKGIKAVWIPPAWKGASQNDVGYGAYDLYDLGEFNQRGTVRTKYGTRSQLQAAVTSLKNNGIQVYGDVVMNHKGGADATEMVRAVEVNPNNRNQEVTGEYTIEAWTRFDFPGRGNTHSSFKWRWYHFDGVDYDQSRRLNNRIYKFRGKAWDWEVDTEFGNYDYLMYADYDMDHPEVVNELRNWGVWYTNTLGLDGFRIDAVKHIKYSFTRDWINHVRSATGKNMFAVAEFWKNDLGAIENYLQKTNWNHSVFDVPLHYNLYNASKSGGNYDMRNIFNGTVVQRHPSHAVTFVDNHDSQPEEALESFVEEWFKPLAYALTLTREQGYPSVFYGDYYGIPTHGVPAMRSKIDPILEARQKYAYGPQHDYLDHPDVIGWTREGDSSHPKSGLATLITDGPGGSKRMYAGLKNAGETWYDITGNRSDTVKIGSDGWGEFHVNDGSVSIYVQK

SEQ ID NO: 29854 - protein, 483 aa, Bacillus sp.
HHNGTNGTMMQYFEWYLPNDGNHWNRLNSDASNLKSKGITAVWIPPAWKGASQNDVGYGAYDLYDLGEFNQKGTVRTKYGTRSQLQAAVTSLKNNGIQVYGDVVMNHKGGADATEMVRAVEVNPNNRNQEVTGEYTIEAWTRFDFPGRGNTHSSFKWRWYHFDGVDWDQSRRLNNRIYKFRNKEWDWEVDTEFGNYDYLMYADYDMDHPEVSNELRNWGVWYTNTLGLDGFRIDAVKHIKYSFTRDWINHVRSATGKNMFAVAEFWKNDLGAIENYLQKTNWNHSVFDVPLHYNLYNASKSGGNYDMRNIFNGTVVQRHPSHAVTFVDNHDSQPEEALESFVEEWFKPLAYALTLTREQGYPSVFYGDYYGIPTHGVPAMRSKIDPILEARQKYAYGPQHDYLDHPDVIGWTREGDSSHPKSGLATLITDGPGGSKRMYAGLKNAGETWYDITGNRSDTVKIGSDGWGEFHVNDGSVSIYVQK

SEQ ID NO: 29855 - protein, 483 aa, Bacillus sp.
HHNGTNGTMMQYFEWYLPNDGNHWNRLNSDASNLKSKGITAVWIPPAWKATSQNDVGYGAYDLYDLGEFNQKGTVRTKYGTRSQLQAAVTSLKNNGIQVYGDVVMNHKGGADATEMVRAVEVNPNNRNQEVTGEYTIEAWTRFDFPGRGNTHSSFKWRWYHFDGVDWDQSRELNNRIYKFRGKAWDWEVDTEFGNYDYLMYTDYDMDHPEVVNELRNWGVWYTNTLGLDGFRIDAVKHIKYSFTRDWINHVRSATGKNMFAVAEFWKNDLGAIENYLQKTNWNHSVFDVPLHYNLYNASQSGGNYDMRNIFNGTVVQRHPSHAVTFVDNHDSQPEEALESFVEPWFKPLAYALTLTREQGYPSVFYGDYYGIPTHGVPAMRSKIDPILEARQKYAYGPQHDYLDHPDVIGWTREGDSSHPKSGLATLITDGPGGSKRMYAGLKNAGETWYDITGNRSDTVKIGSDGWGEFHVNKSSVSIYVQK

SEQ ID NO: 29856 - protein, 483 aa, Bacillus sp.
HHNGTNGTMMQYFEWYLPNDGNHWNRLNSDASNLKSKGITAVWIPPAWKAVSQNDVGYGAYDLYDLGEFNQKGTVRTKYGTRSQLQAAVTSLKNNGIQVYGDVVMNHKGGADLTEMVDAVEVNPNNRNQEVTGEYTIEAWTRFDFPGRGNTHSSFKWRWYHFDGVDWDQSRNLTNRIYKFRGKAWDWEVDTEFGNYDYLMYTDYDMDHPEVVNELRNWGVWYTNTLGLDGFRIDAVKHIKYSFTRDWINHVRSATGKNMFAVAEFWKNDLGAIENYLQKTNWNHSVFDVPLHYNLYNASKSGGNYDMRNIFNGTVVQRHPSHAVTFVDNHDSQPEEALESFVEEWFKPLAYALTLTREQGYPSVFYGDYYGIPTHGVPAMRSKIDPILEARQKYAYGPQHDYLDHPDVIGWTREGDSSHPKSGLATLITDGPGGSKRMYAGLKNAGETWYDITGNRSDTVKIGSDGWGEFHVNDGSVSIYVQK

SEQ ID NO: 29857 - protein, 483 aa, Bacillus sp.
HHNGTNGTMMQYFEWYLPNDGNHWNRLNSDASNLKSKGITAVWIPPAWKAVSQNDVGYGAYDLYDLGEFNQKGTVRTKYGTRSQLQAAVTSLKNNGIQVYGDVVMNHKGGADATEMVRAVEVNPNNRNQEVTGEYTIEAWTRFDFPGRGNTHSSFKWRWYHFDGVDWDQSRDLENRIYKFRGKAWDWEVDTEFGNYDYLMYADYDMDHPEVVNELRNWGVWYTNTLGLDGFRIDAVKHIKYSFTRDWINHVRSATGKNMFAVAEFWKNDLGAIENYLQKTNWNHSVFDVPLHYNLYNASKSSGNYDMRNIFNGTVVQRHPSHAVTFVDNHDSQPEEALESFVDEWFKPLAYALTLTREQGYPSVFYGDYYGIPTHGVPAMRSKIDPILEARQKYAYGPQHDYLDHPDVIGWTREGDSSHPKSGLATLITDGPGGSKRMYAGLKNAGETWYDITGNRSDTVKIGSDGWGEFHVNKQSVSIYVQK

SEQ ID NO: 29858 - protein, 485 aa, Bacillus sp.
HHNGTNGTMMQYFEWYLPNDGNHWNRLNSDASNLKSKGITAVWIPPAWKGASQNDVGYGAYDLYDLGEFNQKGTVRTKYGTRSQLQAAVTSLKNNGIQVYGDVVMNHKGGADATEMVRAVEVNPNNRNQEVTGEYTIEAWTRFDFPGRGNTHSSFKWRWYHFDGVDFDQSRDLTNRIYKFRGHGKAWDWEVDTEFGNYDYLMYVDYDMDHPEVVNELRNWGVWYTNTLGLDGFRIDAVKHIKYSFTRDWINHVRIATGKNMFAVAEFWKNDLGAIENYLQKTNWNHSVFDVPLHYNLYNASKSGGNYDMRNIFNGTVVQRHPSHAVTFVDNHDSQPEEALESFVDEWFKPLAYALTLTREQGYPSVFYGDYYGIPTHGVPAMRSKIDPILEARQKYAYGPQHDYLDHPDVIGWTREGDSSHPKSGLATLITDGPGGSKRMYAGLKNAGETWYDITGNRSDTVKIGSDGWGEFHVNDQSVSIYVQK

SEQ ID NO: 29859 - protein, 483 aa, Bacillus sp.
HHNGTNGTMMQYFEWYLPNDGNHWNRLNSDASNLKSKGITVVWIPPAWKGASQNDVGYGAYDVYDLGEFNQKGTVRTKYGTRSQLQAAVTSLKNNGIQVYGDVVMNHKGGADATEMVRAVEVNPNNRNQEVTGEYTIEAWTRFDFPGRGNTHSSFKWRWYHFDGVDWDQSRRLNNRIYKFRGKAWDWEVDTENGNYDYLMYADIDYDHPEVVNELRNWGVWYTNTLGLDGFRIDAVKHIKYSFTRLWINHVRSATGKNMFAVAEFWKNDLGAIENYLQKTNWNHSVFDVPLHYNLYNASKSGGNYDMRNIFNGTVVQRHPSHAVTFVDNHDSQPEEALESFVEEWFKPLAYALTLTREQGYPSVFYGDYYGIPTHGVPAMRSKIDPILEARQKYAYGPQHDYLDHPDVIGWTREGDSSHPKSGLATLITDGPGGSKRMYAGLKNAGETWYDITGNRSDTVKIGSDGWGEFHVNDGSVSIYVQK

SEQ ID NO: 29860 - protein, 483 aa, Bacillus sp.
HHNGTNGTMMQYFEWYLPNDGNHWNRLNSDASNLKSKGIKAVWIPPAWKGASQNDVGYGAYDLYDLGEFNQRGTVRTKYGTRSQLQAAVTSLKNNGIQVYGDVVMNHKGGADATEMVRAVEVNPNNRNQEVTGEYTIEAWTRFDFPGRGNTHSSFKWRWYHFDGVDFDQSRRLNNRIYKFRGKAWDWEVDTEFGNYDYLMYADYDMDHPEVVNELRNWGVWYTNTLGLDGFRIDAVKHIKYSFTRDWINHVRSATGKNMFAVAEFWKNDLGAIENYLQKTNWNHSVFDVPLHYNLYNASKSGGNYDMRNIFNGTVVQVHPSHAVTFVDNHDSQPEEALESFVEEWFKPLAYALTLTREQGYPSVFYGDYYGIPTHGVPAMRSKIDPILEARQKYAYGPQHDYLDHPDVIGWTREGDSSHPKSGLATLITDGPGGSKRMYAGLKNAGETWYDITGNRSDTVKIGSDGWGEFHVNYGSVSIYVQK

SEQ ID NO: 29861 - protein, 485 aa, Bacillus sp.
HHNGTNGTMMQYFEWYLPNDGNHWNRLNSDASNLKSKGITAVWIPPAWKGTSQNDVGYGAYDLYDLGEFNQKGTVRTKYGTRSQLQAAVTSLKNNGIQVYGDVVMNHKGGADATEMVRAVEVNPNNRNQEVTGEYTIEAWTRFDFPGRGNTHSSFKWRWYHFDGVDFDQSRNLNNRIYKFRGHGKAWDWEVDTEFGNYDYLMYVDYDMDHPEVVNELRNWGVWYTNTLGLDGFRIDAVKHIKYSFTRDWINHVRSATGKNMFAVAEFWKNDLGAIENYLQKTNWNHSVFDVPLHYNLYNASKSQGNYDMRNIFNGTVVQRHPSHAVTFVDNHDSQPEEALESFVDTWFKPLAYALTLTREQGYPSVFYGDYYGIPTHGVPAMRSKIDPILEARQKYAYGPQHDYLDHPDVIGWTREGDSSHPKSGLATLITDGPGGSKRMYAGLKNAGETWYDITGNRSDTVKIGSDGWGEFHVNGSSVSIYVQK

SEQ ID NO: 29862 - protein, 485 aa, Synthetic construct
HHNGTNGTMMQYFEWYLPNDGNHWNRLNSDASNLKSKGITAVWIPPAWKGASQNDVGYGAYDLYDLGEFNQKGTVRTKYGTRSQLQAAVTSLKNNGIQVYGDVVFNHKGGADATEMVRAVEVNPNNRNQEVTGEYTIEAWTRFDFPGRGNTHSSFKWRWYHFDGVDWDQSRRLNNRIYKFRGHGKAWDWEVDTENGNYDYLMYADYDYDHPEVVNEVRNWGVWYTNTLGLDGFRIDAVKHIKYSFVRDWINHVRSATGKNMFAVAEFWKNDLGAIENYLQKTNWNHSVFDVPLHYNLYNASKSGGNYDMRNIFNGTVVQRHPSHAVTFVDNHDSQPEEALESFVEEWFKPLAYALTLTREQGYPSVFYGDYYGIPTHGVPAMRSKIDPILEARQKYAYGPQHDYLDHPDVIGWTREGDSSHPKSGLATLITDGPGGSKRMYAGLKNAGETWYDITGNRSDTVKIGSDGWGEFHVNDGSVSIYVQK

SEQ ID NO: 29863 - protein, 483 aa, Bacillus sp.
HHNGTNGTMMQYFEWYLPNDGNHWNRLNSDASNLKSKGITAVWIPPAWKAASQNDVGYGAYDLYDLGEFNQKGTVRTKYGTRSQLQAAVTSLKNNGIQVYGDVVMNHKGGADLTEMVRAVEVNPNNRNQEVTGEYTIEAWTRFDFPGRGNTHSSFKWRWYHFDGVDFDQSRQITNRIYKFRGKAWDWEVDTEFGNYDYLMYTDYDMDHPEVVNELRNWGVWYTNTLGLDGFRIDAVKHIKYSFTRDWINHVRSATGKNMFAVAEFWKNDLGAIENYLQKTNWNHSVFDVPLHYNLYNASKSGGNYDMRNIFNGTVVQRHPSHAVTFVDNHDSQPEEALESFVEEWFKPLAYALTLTREQGYPSVFYGDYYGIPTHGVPAMRSKIDPILEARQKYAYGPQHDYLDHPDVIGWTREGDSSHPKSGLATLITDGPGGSKRMYAGLKNAGETWYDITGNRSDTVKIGSDGWGEFHVNDGSVSIYVQK

SEQ ID NO: 29864 - protein, 483 aa, Bacillus sp.
HHNGTNGTMMQYFEWYLPNDGNHWNRLNSDASNLKSKGITAVWIPPAWKGASQNDVGYGAYDLYDLGEFNQKGTVRTKYGTRSQLQAAVTSLKNNGIQVYGDVVMNHKGGADATEMVRAVEVNPNNRNQEVTGEYTIEAWTRFDFPGRGNTHSSFKWRWYHFDGVDWDQSRKLNNRIYKFRGKAWDWEVDTEFGNYDYLMYVDYDMDHPEVVNELRNWGVWYTNTLGLDGFRIDAVKHIKYSFTRDWINHVRSATGKNMFAVAEFWKNDLGAIENYLQKTNWNHSVFDVPLHYNLYNASKSSGNYDMRNIFNGTVVQRHPSHAVTFVDNHDSQPEEALESFVDEWFKPLAYALTLTREQGYPSVFYGDYYGIPTHGVPAMRSKIDPILEARQKYAYGPQHDYLDHPDVIGWTREGDSSHPKSGLATLITDGPGGSKRMYAGLKNAGETWYDITGNRSDTVKIGSDGWGEFHVNKQSVSIYVQK

SEQ ID NO: 29865 - protein, 483 aa, Bacillus sp.
HHNGTNGTMMQYFEWYLPNDGNHWNRLNSDASNLKSKGITAVWIPPAWKGASQNDVGYGAYDLYDLGEFNQKGTVRTKYGTRSQLQAAVTSLKNNGIQVYGDVVMNHKGGADATEMVRAVEVNPNNRNQEVTGEYTIEAWTRFDFPGRGNTHSSFKWRWYHFDGVDWDQSRRLNNRIYKFRGKAWDWEVDTEFGNYDYLMYADYDMDHPEVVNELRNWGVWYTNTLGLDGFRIDAVKHIKYSFTRDWINHVRSATGKNMFAVAEFWKNDLGAIENYLQKTNWNHSVFDVPLHYNLYNASQSAGNYDMRNIFNGTVVQRHPSHAVTFVDNHDSQPEEALESFVDTWFKPLAYALTLTREQGYPSVFYGDYYGIPTHGVPAMRSKIDPILEARQKYAYGPQHDYLDHPDVIGWTREGDSSHPKSGLATLITDGPGGSKRMYAGLKNAGETWYDITGNRSDTVKIGSDGWGEFHVNQQSVSIYVQK

SEQ ID NO: 29866 - protein, 485 aa, Bacillus sp.
HHNGTNGTMMQYFEWYLPNDGNHWNRLNSDASNLKSKGITAVWIPPAWKGASQNDVGYGAYDLYDLGEFNQKGTVRTKYGTRSQLQAAVTSLKNNGIQVYGDVVMNHKGGADATEMVRAVEVNPNNRNQEVTGEYTIEAWTRFDFPGRGNTHSSFKWRWYHFDGVDWDQSRRLNNRIYKFRGHGKAWDWEVDTEFGNYDYLMYADYDMDHPEVVNELRNWGVWYTNTLGLDGFRIDAVKHIKYSFTRDWINHVRSATGKNMFAVAEFWKNDLGAIENYLQKTNWNHSVFDVPLHYNLYNASKSAGNYDMRNIFNGTVVQRHPSHAVTFVDNHDSQPEEALESFVDTWFKPLAYALTLTREQGYPSVFYGDYYGIPTHGVPAMRSKIDPILEARQKYAYGPQHDYLDHPDVIGWTREGDSSHPKSGLATLITDGPGGSKRMYAGLKNAGETWYDITGNRSDTVKIGSDGWGEFHVNKSSVSIYVQK

SEQ ID NO: 29867 - protein, 483 aa, Synthetic construct
HHNGTNGTMMQYFEWYLPNDGNHWNRLNSDASNLKSKGITAVWIPPAWKGASQNDVGYGAYDLYDLGEFNQKGTVRTKYGTRSQLQAAVTSLKNNGIQVYGDVVINHKGGADATEMVRAVEVNPNNRNQEVTGEYTIEAWTRFDFPGRGNTHSSFKWRWYHFDGVDWDQSRRLNNRIYKFRGKAWDWEVDTENGNYDYLMYADYDMDYPEVVNEIRNWGVWYTNTLGLDGFRIDAVKHIKYSFVRDWINHVRSATGKNMFAVAEFWKNDLGAIENYLQKTNWNHSVFDVPLHYNLYNASKSGGNYDMRNIFNGTVVQRHPSHAVTFVDNHDSQPEEALESFVEEWFKPLAYALTLTREQGYPSVFYGDYYGIPTHGVPAMRSKIDPILEARQKYAYGPQHDYLDHPDVIGWTREGDSSHPKSGLATLITDGPGGSKRMYAGLKNAGETWYDITGNRSDTVKIGSDGWGEFHVNDGSVSIYVQK

SEQ ID NO: 29868 - protein, 483 aa, Bacillus sp.
HHNGTNGTMMQYFEWYLPNDGNHWNRLNSDASNLKSKGITAVWIPPAWKGASQNDVGYGAYDLYDLGEFNQKGTVRTKYGTRSQLQAAVTSLKNNGIQVYGDVVMNHKGGADATEMVRAVEVNPNNRNQEVTGEYTIEAWTRFDFPGRGNTHSSFKWRWYHFDGVDWDQSRRTNNRIYKFRGKAWDWEVDTEFGNYDYLMYTDYDMDHPEVVNELRNWGVWYTNTLGLDGFRIDAVKHIKYSFTRDWINHVRSATGKNMFAVAEFWKNDLGAIENYLQKTNWNHSVFDVPLHYNLYNASKSGGNYDMRNIFNGTVVQRHPSHAVTFVDNHDSQPEEALESFVETWFKPLAYALTLTREQGYPSVFYGDYYGIPTHGVPAMRSKIDPILEARQKYAYGPQHDYLDHPDVIGWTREGDSSHPKSGLATLITDGPGGSKRMYAGLKNAGETWYDITGNRSDTVKIGSDGWGEFHVNDASVSIYVQK

SEQ ID NO: 29869 - protein, 483 aa, Bacillus sp.
HHNGTNGTMMQYFEWYLPNDGNHWNRLNSDASNLKSKGITAVWIPPAWKAASQNDVGYGAYDLYDLGEFNQKGTVRTKYGTRSQLQAAVTSLKNNGIQVYGDVVMNHKGGADATEMVRAVEVNPNNRNQEVTGEYTIEAWTRFDFPGRGNTHSSFKWRWYHFDGVDWDQSRRLDNRIYKFRGKAWDWEVDTEFGNYDYLMYTDYDMDHPEVVNELRNWGVWYTNTLGLDGFRIDAVKHIKYSFTRDWINHVRIATGKNMFAVAEFWKNDLGAIENYLQKTNWNHSVFDVPLHYNLYNASKSGGNYDMRNIFNGTVVQRHPSHAVTFVDNHDSQPEEALESFVDEWFKPLAYALTLTREQGYPSVFYGDYYGIPTHGVPAMRSKIDPILEARQKYAYGPQHDYLDHPDVIGWTREGDSSHPKSGLATLITDGPGGSKRMYAGLKNAGETWYDITGNRSDTVKIGSDGWGEFHVNDQSVSIYVQK

SEQ ID NO: 29870 - protein, 483 aa, Bacillus sp.
HHNGTNGTMMQYFEWYLPNDGNHWNRLNSDASNLKSKGITAVWIPPAWKGASQNDVGYGAYDVYDLGEFNQKGTVRTKYGTRSQLQAAVTSLKNNGIQVYGDVVFNHKGGADATEMVRAVEVNPNNRNQEVTGEYTIEAWTRFDFPGRGNTHSSFKWRWYHFDGVDWDQSRRLNNRIYKFRGKAWDWEVDTENGNYDYLMYADIDYDFPEVVNELRIWGVWYTNTLGLDGFRIDAVKHIKYSFTRDWINHVRSATGKNMFAVAEFWKNDLGAIENYLQKTNWNHSVFDVPLHYNLYNASKSGGNYDMRNIFNGTVVQRHPSHAVTFVDNHDSQPEEALESFVEEWFKPLAYALTLTREQGYPSVFYGDYYGIPTHGVPAMRSKIDPILEARQKYAYGPQHDYLDHPDVIGWTREGDSSHPKSGLATLITDGPGGSKRMYAGLKNAGETWYDITGNRSDTVKIGSDGWGEFHVNDGSVSIYVQK

SEQ ID NO: 29871 - protein, 483 aa, Bacillus sp.
HHNGTNGTMMQYFEWYLPNDGNHWNRLNSDASNLKSKGITAVWIPPAWKGASQNDVGYGAYDLYDLGEFNQKGTVRTKYGTRSQLQAAVTSLKNNGIQVYGDVVMNHKGGADTTEMVRAVEVNPNNRNQEVTGEYTIEAWTRFDFPGRGNTHSSFKWRWYHFDGVDWDQSRRLNNRIYKFRGKAWDWEVDTEFGNYDYLMYADYDMDHPEVVNELRNWGVWYTNTLGLDGFRIDAVKHIKYSFTRDWINHVRSATGKNMFAVAEFWKNDLGAIENYLQKTNWNHSVFDVPLHYNLYNASKSSGNYDMRNIFNGTVVQRHPSHAVTFVDNHDSQPEEALESFVDPWFKPLAYALTLTREQGYPSVFYGDYYGIPTHGVPAMRSKIDPILEARQKYAYGPQHDYLDHPDVIGWTREGDSSHPKSGLATLITDGPGGSKRMYAGLKNAGETWYDITGNRSDTVKIGSDGWGEFHVNGQSVSIYVQK

SEQ ID NO: 29872 - protein, 483 aa, Bacillus sp.
HHNGTNGTMMQYFEWYLPNDGNHWNRLNSDASNLKSKGITAVWIPPAWKGASQNDVGYGAYDLYDLGEFNQKGTVRTKYGTRSQLQAAVTSLKNNGIQVYGDVVMNHKGGADATEMVRAVEVNPNNRNQEVTGEYTIEAWTRFDFPGRGNTHSSFKWRWYHFDGVDWDQSRRTNNRIYKFRGKAWDWEVDTEFGNYDYLMYTDYDMDHPEVVNELRNWGVWYTNTLGLDGFRIDAVKHIKYSFTRDWINHVRSATGKNMFAVAEFWKNDLGAIENYLQKTNWNHSVFDVPLHYNLYNASQSGGNYDMRNIFNGTVVQRHPSHAVTFVDNHDSQPEEALESFVEPWFKPLAYALTLTREQGYPSVFYGDYYGIPTHGVPAMRSKIDPILEARQKYAYGPQHDYLDHPDVIGWTREGDSSHPKSGLATLITDGPGGSKRMYAGLKNAGETWYDITGNRSDTVKIGSDGWGEFHVNKSSVSIYVQK

SEQ ID NO: 29873 - protein, 483 aa, Synthetic construct
HHNGTNGTMMQYFEWYLPNDGNHWNRLNSDASNLKSKGITAVWIPPAWKGASQNDVGYGAYDLYDLGEFNQKGTVRTKYGTRSQLQAAVTSLKNNGIQVYGDVVMNHKGGADATEMVRAVEVNPNNRNQEVTGEYTIEAWTRFDFPGRGNTHSSFKWRWYHFDGVDWDQSRRLNNRIYKFHGKAWDWEVDTENGNYDYLMYADIDMDHPEVVNELRNWGVWYTNTLGLDGFRIDAVKHIKYSFTRDWINHVRSATGKNMFAVAEFWKNDLGAIENYLQKTNWNHSVFDVPLHYNLYNASKSGGNYDMRNIFNGTVVQRHPSHAVTFVDNHDSQPEEALESFVEEWFKPLAYALTLTREQGYPSVFYGDYYGIPTHGVPAMRSKIDPILEARQKYAYGPQHDYIDHPDVIGWTREGDSSAAKSGLAALITDGPGGSKRMYAGLKNAGETWYDITGNRSDTVKIGSDGWGEFHVNDGSVSIYVQK

SEQ ID NO: 29874 - protein, 483 aa, Bacillus sp.
HHNGTNGTMMQYFEWYLPNDGNHWNRLNSDASNLKSKGITAVWIPPAWKGASQNDVGYGAYDLYDLGEFNQKGTVRTKYGTRSQLQAAVTSLKNNGIQVYGDVVMNHKGGADATEMVRAVEVNPNNRNQEVTGEYTIEAWTRFDFPGRGNTHSSFKWRWYHFDGVDWDQSRRLNNRIYKFRGKAWDWEVDTEFGNYDYLMYTDYDMDHPEVVNELRNWGVWYTNTLGLDGFRIDAVKHIKYSFTRDWINHVRSATGKNMFAVAEFWKNDLGAIENYLQKTNWNHSVFDVPLHYNLYNASKSQGNYDMRNIFNGTVVQRHPSHAVTFVDNHDSQPEEALESFVDTWFKPLAYALTLTREQGYPSVFYGDYYGIPTHGVPAMRSKIDPILEARQKYAYGPQHDYLDHPDVIGWTREGDSSHPKSGLATLITDGPGGSKRMYAGLKNAGETWYDITGNRSDTVKIGSDGWGEFHVNGSSVSIYVQK

SEQ ID NO: 29875 - protein, 483 aa, Bacillus sp.
HHNGTNGTMMQYFEWYLPNDGNHWNRLNSDASNLKSKGITAVWIPPAWKGTSQNDVGYGAYDLYDLGEFNQKGTVRTKYGTRSQLQAAVTSLKNNGIQVYGDVVMNHKGGADATEMVRAVEVNPNNRNQEVTGEYTIEAYTRFDFPGRGNTHSSFKWRWYHFDGVDWDQSRNLNNRIYKFRGKAWDWEVDTEFGNYDYLMYVDYDMDHPEVVNELRNWGVWYTNTLGLDGFRIDAVKHIKYSFTRDWINHVRSATGKNMFAVAEFWKNDLGAIENYLQKTNWNHSVFDVPLHYNLYNASKSQGNYDMRNIFNGTVVQRHPSHAVTFVDNHDSQPEEALESFVDTWFKPLAYALTLTREQGYPSVFYGDYYGIPTHGVPAMRSKIDPILEARQKYAYGPQHDYLDHPDVIGWTREGDSSHPKSGLATLITDGPGGSKRMYAGLKNAGETWYDITGNRSDTVKIGSDGWGEFHVNGSSVSIYVQK

SEQ ID NO: 29876 - protein, 483 aa, Bacillus sp.
HHNGTNGTMMQYFEWYLPNDGNHWNRLNSDASNLKSKGITAVWIPPAWKAASQNDVGYGAYDLYDLGEFNQKGTVRTKYGTRSQLQAAVTSLKNNGIQVYGDVVMNHKGGADATEMVRAVEVNPNNRNQEVTGEYTIEAYTRFDFPGRGNTHSSFKWRWYHFDGVDFDQSRDFTNRIYKFRGKAWDWEVDTEFGNYDYLMYADYDMDHPEVVNELRNWGVWYTNTLGLDGFRIDAVKHIKYSFTRDWINHVRSATGKNMFAVAEFWKNDLGAIENYLQKTNWNHSVFDVPLHYNLYNASKSQGNYDMRNIFNGTVVQRHPSHAVTFVDNHDSQPEEALESFVDPWFKPLAYALTLTREQGYPSVFYGDYYGIPTHGVPAMRSKIDPILEARQKYAYGPQHDYLDHPDVIGWTREGDSSHPKSGLATLITDGPGGSKRMYAGLKNAGETWYDITGNRSDTVKIGSDGWGEFHVNGGSVSIYVQK

SEQ ID NO: 29877 - protein, 483 aa, Bacillus sp.
HHNGTNGTMMQYFEWYLPNDGNHWNRLNSDASNLKSKGITAVWIPPAWKGASQNDVGYGAYDLYDLGEFNQKGTVRTKYGTRSQLQAAVTSLKNNGIQVYGDVVMNHKGGADATEMVRAVEVNPNNRNQEVTGEYTIEAWTRFDFPGRGNTHSSFKWRWYHFDGVDWDQSRRLNNRIYKFRGKAWDWEVDTEFGNYDYLMYADYDMDHPEVVNELRNWGVWYTNTLGLDGFRIDAVKHIKYSFTRDWINHVRSATGKNMFAVAEFWKNDLGAIENYLQKTNWNHSVFDVPLHYNLYNASKSAGNYDMRNIFNGTVVQRHPSHAVTFVDNHDSQPEEALESFVEPWFKPLAYALTLTREQGYPSVFYGDYYGIPTHGVPAMRSKIDPILEARQKYAYGPQHDYLDHPDVIGWTREGDSSHPKSGLATLITDGPGGSKRMYAGLKNAGETWYDITGNRSDTVKIGSDGWGEFHVNQTSVSIYVQK

SEQ ID NO: 29878 - protein, 483 aa, Bacillus sp.
HHNGTNGTMMQYFEWYLPNDGNHWNRLNSDASNLKSKGITAVWIPPAWKGTSQNDVGYGAYDLYDLGEFNQKGTVRTKYGTRSQLQAAVTSLKNNGIQVYGDVVMNHKGGADATEMVRAVEVNPNNRNQEVTGEYTIEAWTRFDFPGRGNTHSSFKWRWYHFDGVDFDQSRNLNNRIYKFRGKAWDWEVDTEFGNYDYLMYVDYDMDHPEVVNELRNWGVWYTNTLGLDGFRIDAVKHIKYSFTRDWINHVRSATGKNMFAVAEFWKNDLGAIENYLQKTNWNHSVFDVPLHYNLYNASKSQGNYDMRNIFNGTVVQRHPSHAVTFVDNHDSQPEEALESFVDTWFKPLAYALTLTREQGYPSVFYGDYYGIPTHGVPAMRSKIDPILEARQKYAYGPQHDYLDHPDVIGWTREGDSSHPKSGLATLITDGPGGSKRMYAGLKNAGETWYDITGNRSDTVKIGSDGWGEFHVNDGSVSIYVQK

SEQ ID NO: 29879 - protein, 483 aa, Bacillus sp.
HHNGTNGTMMQYFEWYLPNDGNHWNRLNSDASNLKSKGITAVWIPPAWKAASQNDVGYGAYDLYDLGEFNQKGTVRTKYGTRSQLQAAVTSLKNNGIQVYGDVVMNHKGGADATEMVRAVEVNPNNRNQEVTGEYTIEAWTRFDFPGRGNTHSSFKWRWYHFDGVDWDQSRQITNRIYKFRGKAWDWEVDTEFGNYDYLMYTDYDMDHPEVVNELRNWGVWYTNTLGLDGFRIDAVKHIKYSFTRDWINHVRSATGKNMFAVAEFWKNDLGAIENYLQKTNWNHSVFDVPLHYNLYNASKSQGNYDMRNIFNGTVVQRHPSHAVTFVDNHDSQPEEALESFVDTWFKPLAYALTLTREQGYPSVFYGDYYGIPTHGVPAMRSKIDPILEARQKYAYGPQHDYLDHPDVIGWTREGDSSHPKSGLATLITDGPGGSKRMYAGLKNAGETWYDITGNRSDTVKIGSDGWGEFHVNGSSVSIYVQK

SEQ ID NO: 29880 - protein, 485 aa, Bacillus sp.
HHNGTNGTMMQYFEWYLPNDGNHWNRLNSDASNLKSKGITAVWIPPAWKGASQNDVGYGAYDLYDLGEFNQKGTVRTKYGTRSQLQAAVTSLKNNGIQVYGDVVMNHKGGADATEMVRAVEVNPNNRNQEVTGEYTIEAWTRFDFPGRGNTHSSFKWRWYHFDGVDFDQSRRLNNRIYKFRGHGKAWDWEVDTEFGNYDYLMYADYDMDHPEVVNELRNWGVWYTNTLGLDGFRIDAVKHIKYSFTRDWINHVRSATGKNMFAVAEFWKNDLGAIENYLQKTNWNHSVFDVPLHYNLYNASKSGGNYDMRNIFNGTVVQRHPSHAVTFVDNHDSQPEEALESFVETWFKPLAYALTLTREQGYPSVFYGDYYGIPTHGVPAMRSKIDPILEARQKYAYGPQHDYLDHPDVIGWTREGDSSHPKSGLATLITDGPGGSKRMYAGLKNAGETWYDITGNRSDTVKIGSDGWGEFHVNKASVSIYVQK

SEQ ID NO: 29881 - protein, 485 aa, Synthetic construct
HHNGTNGTMMQYFEWYLPNDGNHWNRLNSDASNLKSKGITAVWIPPAWKGASQNDVGYGAYDLYDLGEFNQKGTVRTKYGTRSQLQAAVTSLKNNGIQVYGDVVMNHKGGADATEMVRAVEVNPNNRNQEVTGEYTIEAWTRFDFPGRGNTHSSFKWRWYHFDGVDWDQSRRLNNRIYKFRGHGKAWDWEVDTEFGNYDYLMYADYDYDHPEVTNEVRNWGVWYTNTLGLDGFRIDAVKHIKYSFTRDWINHVRSATGKNMFAVAEFWKNDLGAIENYLQKTNWNHSVFDVPLHYNLYNASKSGGNYDMRNIFNGTVVQRHPSHAVTFVDNHDSQPEEALESFVEEWFKPLAYALTLTREQGYPSVFYGDYYGIPTHGVPAMRSKIDPILEARQKYAYGPQHDYLDHPDVIGWTREGDSSHPKSGLATLITDGPGGSKRMYAGLKNAGETWYDITGNRSDTVKIGSDGWGEFHVNDGSVSIYVQK

SEQ ID NO: 29882 - protein, 483 aa, Bacillus sp.
HHNGTNGTMMQYFEWYLPNDGNHWNRLNSDASNLKSKGITAVWIPPAWKGASQNDVGYGAYDLYDLGEFNQKGTVRTKYGTRSQLQAAVTSLKNNGIQVYGDVVMNHKGGADATEMVRAVEVNPNNRNQEVTGEYTIEAYTRFDFPGRGNTHSSFKWRWYHFDGVDFDQSRDLTNRIYKFRGKAWDWEVDTEFGNYDYLMYVDYDMDHPEVVNELRNWGVWYTNTLGLDGFRIDAVKHIKYSFTRDWINHVRNATGKNMFAVAEFWKNDLGAIENYLQKTNWNHSVFDVPLHYNLYNASKSGGNYDMRNIFNGTVVQRHPSHAVTFVDNHDSQPEEALESFVDEWFKPLAYALTLTREQGYPSVFYGDYYGIPTHGVPAMRSKIDPILEARQKYAYGPQHDYLDHPDVIGWTREGDSSHPKSGLATLITDGPGGSKRMYAGLKNAGETWYDITGNRSDTVKIGSDGWGEFHVNDQSVSIYVQK

SEQ ID NO: 29883 - protein, 483 aa, Bacillus sp.
HHNGTNGTMMQYFEWYLPNDGNHWNRLNSDASNLKSKGITAVWIPPAWKAVSQNDVGYGAYDLYDLGEFNQKGTVRTKYGTRSQLQAAVTSLKNNGIQVYGDVVMNHKGGADATEMVRAVEVNPNNRNQEVTGEYTIEAWTRFDFPGRGNTHSSFKWRWYHFDGVDFDQSREFTNRIYKFRGKAWDWEVDTEFGNYDYLMYVDYDMDHPEVVNELRNWGVWYTNTLGLDGFRIDAVKHIKYSFTRDWINHVRIATGKNMFAVAEFWKNDLGAIENYLQKTNWNHSVFDVPLHYNLYNASKSGGNYDMRNIFNGTVVQRHPSHAVTFVDNHDSQPEEALESFVDEWFKPLAYALTLTREQGYPSVFYGDYYGIPTHGVPAMRSKIDPILEARQKYAYGPQHDYLDHPDVIGWTREGDSSHPKSGLATLITDGPGGSKRMYAGLKNAGETWYDITGNRSDTVKIGSDGWGEFHVNDQSVSIYVQK

SEQ ID NO: 29884 - protein, 485 aa, Bacillus sp.
HHNGTNGTMMQYFEWYLPNDGNHWNRLNSDASNLKSKGITAVWIPPAWKAVSQNDVGYGAYDLYDLGEFNQKGTVRTKYGTRSQLQAAVTSLKNNGIQVYGDVVMNHKGGADLTEMVRAVEVNPNNRNQEVTGEYTIEAWTRFDFPGRGNTHSSFKWRWYHFDGVDWDQSREFTNRIYKFRGHGKAWDWEVDTEFGNYDYLMYVDYDMDHPEVVNELRNWGVWYTNTLGLDGFRIDAVKHIKYSFTRDWINHVRSATGKNMFAVAEFWKNDLGAIENYLQKTNWNHSVFDVPLHYNLYNASKSGGNYDMRNIFNGTVVQRHPSHAVTFVDNHDSQPEEALESFVDEWFKPLAYALTLTREQGYPSVFYGDYYGIPTHGVPAMRSKIDPILEARQKYAYGPQHDYVDHPDVIGWKREGDSSHPKSGLATLITDGPGGSKRMYAGLKNAGETWYDITGNRSDTVKIGSDGWGEFHVNDGSVSIYVQK

SEQ ID NO: 29885 - protein, 483 aa, Bacillus sp.
HHNGTNGTMMQYFEWYLPNDGNHWNRLNSDASNLKSKGITAVWIPPAWKATSQNDVGYGAYDLYDLGEFNQKGTVRTKYGTRSQLQAAVTSLKNNGIQVYGDVVMNHKGGADATEMVRAVEVNPNNRNQEVTGEYTIEAWTRFDFPGRGNTHSSFKWRWYHFDGVDWDQSRELNNRIYKFRGKAWDWEVDTEFGNYDYLMYTDYDMDHPEVVNELRNWGVWYTNTLGLDGFRIDAVKHIKYSFTRDWINHVRSATGKNMFAVAEFWKNDLGAIENYLQKTNWNHSVFDVPLHYNLYNASKSGGNYDMRNIFNGTVVQRHPSHAVTFVDNHDSQPEEALESFVETWFKPLAYALTLTREQGYPSVFYGDYYGIPTHGVPAMRSKIDPILEARQKYAYGPQHDYLDHPDVIGWTREGDSSHPKSGLATLITDGPGGSKRMYAGLKNAGETWYDITGNRSDTVKIGSDGWGEFHVNDASVSIYVQK

SEQ ID NO: 29886 - protein, 483 aa, Bacillus sp.
HHNGTNGTMMQYFEWYLPNDGNHWNRLNSDASNLKSKGITAVWIPPAWKGASQNDVGYGAYDLYDLGEFNQKGTVRTKYGTRSQLQAAVTSLKNNGIQVYGDVVMNHKGGADATEMVRAVEVNPNNRNQEVTGEYTIEAWTRFDFPGRGNTHSSFKWRWYHFDGVDWDQSRRLNNRIYKFRGKAWDWEVDTEFGNYDYLMYADYDMDHPEVVNELRNWGVWYTNTLGLDGFRIDAVKHIKYSFTRDWINHVRSATGKNMFAVAEFWKNDLGAIENYLQKTNWNHSVFDVPLHYNLYNASKSGSNYDMRNIFNGTVVQRHPSHAVTFVDNHDSQPEEALESFVDPWFKPLAYALTLTREQGYPSVFYGDYYGIPTHGVPAMRSKIDPILEARQKYAYGPQHDYLDHPDVIGWTREGDSSHPKSGLATLITDGPGGSKRMYAGLKNAGETWYDITGNRSDTVKIGSDGWGEFHVNDQSVSIYVQK

SEQ ID NO: 29887 - protein, 485 aa, Bacillus sp.
HHNGTNGTMMQYFEWYLPNDGNHWNRLNSDASNLKSKGITAVWIPPAWKGASQNDVGYGAYDLYDLGEFNQKGTVRTKYGTRSQLQAAVTSLKNNGIQVYGDVVMNHKGGADATEMVRAVEVNPNNRNQEVTGEYTIEAWTRFDFPGRGNTHSSFKWRWYHFDGVDWDQSRRLNNRIYKFRGHGKAWDWEVDTEFGNYDYLMYADYDMDHPEVVNELRNWGVWYTNTLGLDGFRIDAVKHIKYSFTRDWINHVRSATGKNMFAVAEFWKNDLGAIENYLQKTNWNHSVFDVPLHYNLYNASKSSGNYDMRNIFNGTVVQRHPSHAVTFVDNHDSQPEEALESFVEPWFKPLAYALTLTREQGYPSVFYGDYYGIPTHGVPAMRSKIDPILEARQKYAYGPQHDYLDHPDVIGWTREGDSSHPKSGLATLITDGPGGSKRMYAGLKNAGETWYDITGNRSDTVKIGSDGWGEFHVNKKSVSIYVQK

SEQ ID NO: 29888 - protein, 485 aa, Bacillus sp.
HHNGTNGTMMQYFEWYLPNDGNHWNRLNSDASNLKSKGITAVWIPPAWKGASQNDVGYGAYDLYDLGEFNQKGTVRTKYGTRSQLQAAVTSLKNNGIQVYGDVVMNHKGGADATEMVRAVEVNPNNRNQEVTGEYTIEAWTRFDFPGRGNTHSSFKWRWYHFDGVDWDQSRRLNNRIYKFRGHGKAWDWEVDTEFGNYDYLMYADYDMDHPEVVNELRNWGVWYTNTLGLDGFRIDAVKHIKYSFTRDWINHVRSATGKNMFAVAEFWKNDLGAIENYLQKTNWNHSVFDVPLHYNLYNASKSSGNYDMRNIFNGTVVQRHPSHAVTFVDNHDSQPEEALESFVEPWFKPLAYALTLTREQGYPSVFYGDYYGIPTHGVPAMRSKIDPILEARQKYAYGPQHDYLDHPDVIGWTREGDSSHPKSGLATLITDGPGGSKRMYAGLKNAGETWYDITGNRSDTVKIGSDGWGEFHVNKSSVSIYVQK

SEQ ID NO: 29889 - protein, 483 aa, Bacillus sp.
HHNGTNGTMMQYFEWYLPNDGNHWNRLNSDASNLKSKGITAVWIPPAWKAVSQNDVGYGAYDLYDLGEFNQKGTVRTKYGTRSQLQAAVTSLKNNGIQVYGDVVMNHKGGADATEMVRAVEVNPNNRNQEVTGEYTIEAYTRFDFPGRGNTHSSFKWRWYHFDGVDWDQSRNLTNRIYKFRGKAWDWEVDTEFGNYDYLMYTDYDMDHPEVVNELRNWGVWYTNTLGLDGFRIDAVKHIKYSFTRDWINHVRSATGKNMFAVAEFWKNDLGAIENYLQKTNWNHSVFDVPLHYNLYNASKSGGNYDMRNIFNGTVVQRHPSHAVTFVDNHDSQPEEALESFVEEWFKPLAYALTLTREQGYPSVFYGDYYGIPTHGVPAMRSKIDPILEARQKYAYGPQHDYLDHPDVIGWTREGDSSHPKSGLATLITDGPGGSKRMYAGLKNAGETWYDITGNRSDTVKIGSDGWGEFHVNDGSVSIYVQK

SEQ ID NO: 29890 - protein, 483 aa, Bacillus sp.
HHNGTNGTMMQYFEWYLPNDGNHWNRLNSDASNLKSKGITAVWIPPAWKGASQNDVGYGAYDLYDLGEFNQKGTVRTKYGTRSQLQAAVTSLKNNGIQVYGDVVMNHKGGADATEMVRAVEVNPNNRNQEVTGEYTIEAWTRFDFPGRGNTHSSFKWRWYHFDGVDWDQSRRLNNRIYKFRGKAWDWEVDTEFGNYDYLMYADYDMDHPEVVNELRNWGVWYTNTLGLDGFRIDAVKHIKYSFTRDWINHVRSATGKNMFAVAEFWKNDLGAIENYLQKTNWNHSVFDVPLHYNLYNASKSSGNYDMRNIFNGTVVQRHPSHAVTFVDNHDSQPEEALESFVEPWFKPLAYALTLTREQGYPSVFYGDYYGIPTHGVPAMRSKIDPILEARQKYAYGPQHDYLDHPDVIGWTREGDSSHPKSGLATLITDGPGGSKRMYAGLKNAGETWYDITGNRSDTVKIGSDGWGEFHVNQSSVSIYVQK

SEQ ID NO: 29891 - protein, 483 aa, Bacillus sp.
HHNGTNGTMMQYFEWYLPNDGNHWNRLNSDASNLKSKGITAVWIPPAWKGASQNDVGYGAYDLYDLGEFNQKGTVRTKYGTRSQLQAAVTSLKNNGIQVYGDVVMNHKGGADATEMVRAVEVNPNNRNQEVTGEYTIEAWTRFDFPGRGNTHSSFKWRWYHFDGVDWDQSRRLNNRIYKFRGKAWDWEVDTENGFYDYLMYADIDYDYPEVVTELRVWGVWYTNTLGLDGFRIDAVKHIKYSFTRDWINHVRSATGKNMFAVAEFWKNDLGAIENYLQKTNWNHSVFDVPLHYNLYNASKSGGNYDMRNIFNGTVVQRHPSHAVTFVDNHDSQPEEALESFVEEWFKPLAYALTLTREQGYPSVFYGDYYGIPTHGVPAMRSKIDPILEARQKYAYGPQHDYLDHPDVIGWTREGDSSHPKSGLATLITDGPGGSKRMYAGLKNAGETWYDITGNRSDTVKIGSDGWGEFHVNDGSVSIYVQK

SEQ ID NO: 29892 - protein, 483 aa, Bacillus sp.
HHNGTNGTMMQYFEWYLPNDGNHWNRLNSDASNLKSKGITAVWIPPAWKGASQNDVGYGAYDLYDLGEFNQKGTVRTKYGTRSQLQAAVTSLKNNGIQVYGDVVMNHKGGADATEMVRAVEVNPNNRNQEVTGEYTIEAWTRFDFPGRGNTHSSFKWRWYHFDGVDWDQSERLNNRIYKFRGKAWDWEVDTEFGNYDYLMYADYDMDHPEVVNELRNWGVWYTNTLGLDGFRIDAVKHIKYSFTRDWINHVRSATGKNMFAVAEFWKNDLGAIENYLQKTNWNHSVFDVPLHYNLYNASKSGGNYDMRNIFNGTVVQRHPSHAVTFVDNHDSQPEEALESFVEEWFKPLAYALTLTREAGLPSVFYGDYYGIPTHGVPAMRSKIDPILEARQKYAYGPQHDYLDHPDVIGWTREGDSSHPKSGLATLITDGPGGSKRMYAGLKNAGETWYDITGNRSDTVKIGSDGWGEFHVNDGSVSIYVQK

SEQ ID NO: 29893 - protein, 485 aa, Bacillus sp.
HHNGTNGTMMQYFEWYLPNDGNHWNRLNSDASNLKSKGITAVWIPPAWKGASQNDVGYGAYDLYDLGEFNQKGTVRTKYGTRSQLQAAVTSLKNNGIQVYGDVVMNHKGGADATEMVRAVEVNPNNRNQEVTGEYTIEAWTRFDFPGRGNTHSSFKWRWYHFDGVDWDQSRNFQNRIYKFRGHGKAWDWEVDTEFGNYDYLMYADYDMDHPESTNEMRNWGVWYTNTLGLDGFRIDAVKHIKYSFTRDWINHVRSATGKNMFAVAEFWKNDLGAIENYLQKTNWNHSVFDVPLHYNLYNASKSQGNYDMRNIFNGTVVQRHPSHAVTFVDNHDSQPEEALESFVDTWFKPLAYALTLTREQGYPSVFYGDYYGIPTHGVPAMRSKIDPILEARQKYAYGPQHDYLDHPDVIGWTREGDSSHPKSGLATLITDGPGGSKRMYAGLKNAGETWYDITGNRSDTVKIGSDGWGEFHVNDGSVSIYVQK

SEQ ID NO: 29894 - protein, 485 aa, Bacillus sp.
HHNGTNGTMMQYFEWYLPNDGNHWNRLNSDASNLKSKGITAVWIPPAWKGASQNDVGYGAYDLYDLGEFNQKGTVRTKYGTRSQLQAAVTSLKNNGIQVYGDVVMNHKGGADATEMVRAVEVNPNNRNQEVTGEYTIEAWTRFDFPGRGNTHSSFKWRWYHFDGVDWDQSRRLNNRIYKFRGHGKAWDWEVDTEFGNYDYLMYADYDMDHPEVVNELRNWGVWYTNTLGLDGFRIDAVKHIKYSFTRDWINHVRSATGKNMFAVAEFWKNDLGAIENYLQKTNWNHSVFDVPLHYNLYNASKSAGNYDMRNIFNGTVVQRHPSHAVTFVDNHDSQPEEALESFVEPWFKPLAYALTLTREQGYPSVFYGDYYGIPTHGVPAMRSKIDPILEARQKYAYGPQHDYLDHPDVIGWTREGDSSHPKSGLATLITDGPGGSKRMYAGLKNAGETWYDITGNRSDTVKIGSDGWGEFHVNKQSVSIYVQK

SEQ ID NO: 29895 - protein, 483 aa, Bacillus sp.
HHNGTNGTMMQYFEWYLPNDGNHWNRLNSDASNLKSKGITAVWIPPAWKGASQNDVGYGAYDLYDLGEFNQKGTVRTKYGTRSQLQAAVTSLKNNGIQVYGDVVMNHKGGADATEMVRAVEVNPNNRNQEVTGEYTIEAWTRFDFPGRGNTHSSFKWRWYHFDGVDWDQSRRLNNRIYKFRGKAWDWEVDTEFGNYDYLMYADYDMDHPEVVNELRNWGVWYTNTLGLDGFRIDAVKHIKYSFTRDWINHVRSATGKNMFAVAEFWKNDLGAIENYLQKTNWNHSVFDVPLHYNLYNASKSGSNYDMRNIFNGTVVQRHPSHAVTFVDNHDSQPEEALESFVEPWFKPLAYALTLTREQGYPSVFYGDYYGIPTHGVPAMRSKIDPILEARQKYAYGPQHDYLDHPDVIGWTREGDSSHPKSGLATLITDGPGGSKRMYAGLKNAGETWYDITGNRSDTVKIGSDGWGEFHVNQTSVSIYVQK

SEQ ID NO: 29896 - protein, 483 aa, Bacillus sp.
HHNGTNGTMMQYFEWYLPNDGNHWNRLNSDASNLKSKGITAVWIPPAWKGASQNDVGYGAYDLYDLGEFNQKGTVRTKYGTRSQLQAAVTSLKNNGIQVYGDVVMNHKGGADATEMVRAVEVNPNNRNQEVTGEYTIEAWTRFDFPGRGNTHSSFKWRWYHFDGVDWDQSRRLNNRIYKFRSKAWDWEVDTEFGNYDYLMYADYDMDDPEVINELRNWGVWYTNTLGLDGFRIDAVKHIKYSFTRDWINHVRSATGKNMFAVAEFWKNDLGAIENYLQKTNWNHSVFDVPLHYNLYNASKSGGNYDMRNIFNGTVVQRHPSHAVTFVDNHDSQPEEALESFVEEWFKPLAYALTLTREQGYPSVFYGDYYGIPTHGVPAMRSKIDPILEARQKYAYGPQHDYLDHPDVIGWTREGDSSHPKSGLATLITDGPGGSKRMYAGLKNAGETWYDITGNRSDTVKIGSDGWGEFHVNDGSVSIYVQK

SEQ ID NO: 29897 - protein, 485 aa, Bacillus sp.
HHNGTNGTMMQYFEWYLPNDGNHWNRLNSDASNLKSKGIKAVWIPPAWKGASQNDTGYGAYDLYDLGEFNQKGTVRTKYGTRSQLQAAVTSLKNNGIQVYGDVVMNHKGGADATEMVRAVEVNPNNRNQEVTGEYTIEAWTRFDFPGRGNTHSSFKWRWYHFDGVDWDQSERLNNRIYKFRGHGKAWDWEVDTEFGNYDYLMYADYDMDHPEVVNELRNWGVWYTNTLGLDGFRIDAVKHIKYSFTRDWINHVRSATGKNMFAVAEFWKNDLGAIENYLQKTNWNHSVFDVPLHYNLYNASKSGGNYDMRNIFNGTVVQRHPSHAVTFVDNHDSQPEEALESFVEEWFKPLAYALTLTREQGYPSVFYGDYYGIPTHGVPAMRSKIDPILEARQKYAYGPQHDYLDHPDVIGWTREGDSSHPKSGLATLITDGPGGSKRMYAGLKNAGETWYDITGNRSDTVKIGSDGWGEFHVNDGSVSIYVQK

SEQ ID NO: 29898 - protein, 485 aa, Bacillus sp.
HHNGTNGTMMQYFEWYLPNDGNHWNRLNSDASNLKSKGIKAVWIPPAWKGASQNDVGYGAYDLYDLGEFNQKGTVRTKYGTRSQLQAAVTSLKNNGIQVYGDVVMNHKGGADATEMVRAVEVNPNNRNQEVTGEYTIEAWTRFDFPGRGNTHSSFKWRWYHFDGVDFDQSRRTNNRIYKFRGHGKAWDWEVDTEFGNYDYLMYTDYDMDHPEVVNELRNWGVWYTNTLGLDGFRIDAVKHIKYSFTRDWINHVRSATGKNMFAVAEFWKNDLGAIENYLQKTNWNHSVFDVPLHYNLYNASKSGGNYDMRNIFNGTVVQRHPSHAVTFVDNHDSQPEEALESFVEEWFKPLAYALTLTREQGYPSVFYGDYYGIPTHGVPAMRSKIDPILEARQKYAYGPQHDYLDHPDVIGWTREGDSSHPKSGLATLITDGPGGSKRMYAGLKNAGETWYDITGNRSDTVKIGSDGWGEFHVNDGSVSIYVQK

SEQ ID NO: 29899 - protein, 483 aa, Bacillus sp.
HHNGTNGTMMQYFEWYLPNDGNHWNRLNSDASNLKSKGITAVWIPPAWKGASQNDVGYGAYDLYDLGEFNQKGTVRTKYGTRSQLQAAVTSLKNNGIQVYGDVVMNHKGGADATEMVRAVEVNPNNRNQEVTGEYTIEAWTRFDFPGRGNTHSSFKWRWYHFDGVDWDQSRRLNNRIYKFRGKAWEWEVDTENGFYDYLMYADIDYDHPSVVNELRNWGVWYTNTLGLDGFRIDAVKHIKYSFTRDWINHVRSATGKNMFAVAEFWKNDLGAIENYLQKTNWNHSVFDVPLHYNLYNASKSGGNYDMRNIFNGTVVQRHPSHAVTFVDNHDSQPEEALESFVEEWFKPLAYALTLTREQGYPSVFYGDYYGIPTHGVPAMRSKIDPILEARQKYAYGPQHDYLDHPDVIGWTREGDSSHPKSGLATLITDGPGGSKRMYAGLKNAGETWYDITGNRSDTVKIGSDGWGEFHVNDGSVSIYVQK

SEQ ID NO: 29900 - protein, 485 aa, Bacillus sp.
HHNGTNGTMMQYFEWYLPNDGNHWNRLNSDASNLKSKGITAVWIPPAWKGASQNDVGYGAYDLYDLGEFNQKGTVRTKYGTRSQLQAAVTSLKNNGIQVYGDVVMNHEGDTHATEMVRAVEVNPNNRNQEVTGEYTIEAWTRFDFPGRGNTHSSFKWRWYHFDGVDWDQSRRLNNRIYKFRGHGKAWDWEVDTEFGNYDYLMYADYDMDHPEVVNELRNWGVWYTNTLGLDGFRIDAVKHIKYSFTRDWINHVRSATGKNMFAVAEFWKNDLGAIENYLQKTNWNHSVFDVPLHYNLYNASKSGGNYDMRNIFNGTVVQSHPMHAVTFVDNHDSQPEEALESFVEEWFKPLAYALTLTREQGYPSVFYGDYYGIPTHGVPAMRSKIDPILEARQKYAYGPQHDYLDHPDVIGWTREGDSSHPKSGLATLITDGPGGSKRMYAGLKNAGETWYDITGNRSDTVKIGSDGWGEFHVNDGSVSIYVQK

SEQ ID NO: 29901 - protein, 483 aa, Synthetic construct
HHNGTNGTMMQYFEWYLPNDGNHWNRLNSDASNLKSKGITAVWIPPAWKGASQNDVGYGAYDLYDLGEFNQKGTVRTKYGTRSQLQAAVTSLKNNGIQVYGDVVMNHKGGADATEMVRAVEVNPNNRNQEVTGEYTIEAWTRFDFPGRGNTHSSFKWRWYHFDGVDWDQSRRLNNRIYKFRGKAWDWEVDTEFGNYDYLMYADYDMDYPETTNELRNWGVWYTNTLGLDGFRIDAVKHIKYSFTRDWINHVRSATGKNMFAVAEFWKNDLGAIENYLQKTNWNHSVFDVPLHYNLYNASKSGGNYDMRNIFNGTVVQRHPSHAVTFVDNHDSQPEEALESFVEEWFKPLAYALTLTREQGYPSVFYGDYYGIPTHGVPAMRSKIDPILEARQKYAYGPQHDYLDHPDVIGWTREGDSSHPKSGLATLITDGPGGSKRMYAGLKNAGETWYDITGNRSDTVKIGSDGWGEFHVNDGSVSIYVQK

SEQ ID NO: 29902 - protein, 485 aa, Bacillus sp.
HHNGTNGTMMQYFEWYLPNDGNHWNRLNSDASNLKSKGITAVWIPPAWKGASQNDVGYGAYDLYDLGEFNQKGTVRTKYGTRSQLQAAVTSLKNNGIQVYGDVVMNHKGGADATEMVRAVEVNPNNRNQEVTGEYTIEAWTRFDFPGRGNTHSSFKWRWYHFDGVDWDQSREFDNRIYKFRGHGKAWDWEVDTEFGNYDYLMYADYDYDHPESTNEMRNWGVWYTNTLGLDGFRIDAVKHIKYSFTRDWINHVRSATGKNMFAVAEFWKNDLGAIENYLQKTNWNHSVFDVPLHYNLYNASKSGGNYDMRNIFNGTVVQRHPSHAVTFVDNHDSQPEEALESFVEEWFKPLAYALTLTREQGYPSVFYGDYYGIPTHGVPAMRSKIDPILEARQKYAYGPQHDYLDHPDVIGWTREGDSSHPKSGLATLITDGPGGSKRMYAGLKNAGETWYDITGNRSDTVKIGSDGWGEFHVNDGSVSIYVQK

SEQ ID NO: 29903 - protein, 485 aa, Bacillus sp.
HHNGTNGTMMQYFEWYLPNDGNHWNRLNSDASNLKSKGITAVWIPPAWKGASQNDVGYGAYDLYDLGEFNQKGTVRTKYGTRSQLQAAVTSLKNNGIQVYGDVVMNHKGGADATEMVRAVEVNPNNRNQEVTGEYTIEAWTRFDFPGRGNTHSSFKWRWYHFDGVDWDQSRRLNNRIYKFRGHGKAWDWEVDTEFGNYDYLMYADYDMDHPEVVNELRNWGVWYTNTLGLDGFRIDAVKHIKYSFTRDWINHVRSATGKNMFAVAEFWKNDLGAIENYLQKTNWNHSVFDVPLHYNLYNASKSSGNYDMRNIFNGTVVQRHPSHAVTFVDNHDSQPEEALESFVDPWFKPLAYALTLTREQGYPSVFYGDYYGIPTHGVPAMRSKIDPILEARQKYAYGPQHDYLDHPDVIGWTREGDSSHPKSGLATLITDGPGGSKRMYAGLKNAGETWYDITGNRSDTVKIGSDGWGEFHVNKQSVSIYVQK

SEQ ID NO: 29904 - protein, 485 aa, Bacillus sp.
HHNGTNGTMMQYFEWYLPNDGNHWNRLNSDASNLKSKGITAVWIPPAWKGASQNDVGYGAYDLYDLGEFNQKGTVRTKYGTRSQLQAAVTSLKNNGIQVYGDVVMNHKGGADATEMVRAVEVNPNNRNQEVTGEYTIEAYTRFDFSGRGNTHSSFKWRWYHFDGVDWDQSRKLNNRIYKFRGHGKAWDWEVDTEFGNYDYLMYVDYDMDHPEVVNELRNWGVWYTNTLGLDGFRIDAVKHIKYSFTRDWINHVRSATGKNMFAVAEFWKNDLGAIENYLQKTNWNHSVFDVPLHYNLYNASKSGGNYDMRNIFNGTVVQRHPSHAVTFVDNHDSQPEEALESFVEEWFKPLAYALTLTREQGYPSVFYGDYYGIPTHGVPAMRSKIDPILEARQKYAYGPQHDYLDHPDVIGWTREGDSSHPKSGLATLITDGPGGSKRMYAGLKNAGETWYDITGNRSDTVKIGSDGWGEFHVNDGSVSIYVQK

SEQ ID NO: 29905 - protein, 485 aa, Bacillus sp.
HHNGTNGTMMQYFEWYLPNDGNHWNRLNSDASNLKSKGITAVWIPPAWKAVSQNDVGYGAYDLYDLGEFNQKGTVRTKYGTRSQLQAAVTSLKNNGIQVYGDVVMNHKGGADATEMVRAVEVNPNNRNQEVTGEYTIEAWTRFDFPGRGNTHSSFKWRWYHFDGVDWDQSRQLNNRIYKFRGHGKAWDWEVDTEFGNYDYLMYVDYDMDHPEVVNELRNWGVWYTNTLGLDGFRIDAVKHIKYSFTRDWINHVRSATGKNMFAVAEFWKNDLGAIENYLQKTNWNHSVFDVPLHYNLYNASKSQGNYDMRNIFNGTVVQRHPSHAVTFVDNHDSQPEEALESFVDTWFKPLAYALTLTREQGYPSVFYGDYYGIPTHGVPAMRSKIDPILEARQKYAYGPQHDYLDHPDVIGWTREGDSSHPKSGLATLITDGPGGSKRMYAGLKNAGETWYDITGNRSDTVKIGSDGWGEFHVNGSSVSIYVQK

SEQ ID NO: 29906 - protein, 485 aa, Bacillus sp.
HHNGTNGTMMQYFEWYLPNDGNHWNRLNSDASNLKSKGITAVWIPPAWKGASQNDVGYGAYDLYDLGEFNQRGTVRTKYGTRSQLQAAVTSLKNNGIQVYGDVVMNHKGGADLTEMVRAVEVNPNNRNQEVTGEYTIEAWTRFDFPGRGNTHSSFKWRWYHFDGVDWDQSRRLNNRIYKFRGHGKAWDWEVDTEFGNYDYLMYADYDMDHPEVVNELRNWGVWYTNTLGLDGFRIDAVKHIKYSFTRDWINHVRIATGKNMFAVAEFWKNDLGAIENYLQKTNWNHSVFDVPLHYNLYNASKSGGNYDMRNIFNGTVVQRHPSHAVTFVDNHDSQPEEALESFVDEWFKPLAYALTLTREQGYPSVFYGDYYGIPTHGVPAMRSKIDPILEARQKYAYGPQHDYLDHPDVIGWTREGDSSHPKSGLATLITDGPGGSKRMYAGLKNAGETWYDITGNRSDTVKIGSDGWGEFHVNDQSVSIYVQK

SEQ ID NO: 29907 - protein, 485 aa, Bacillus sp.
HHNGTNGTMMQYFEWYLPNDGNHWNRLNSDASNLKSKGITAVWIPPAWKAVSQNDVGYGAYDLYDLGEFNQKGTVRTKYGTRSQLQAAVTSLKNNGIQVYGDVVMNHKGGADATEMVRAVEVNPNNRNQEVTGEYTIEAWTRFDFPGRGNTHSSFKWRWYHFDGVDWDQSRDLENRIYKFRGHGKAWDWEVDTEFGNYDYLMYADYDMDHPEVVNELRNWGVWYTNTLGLDGFRIDAVKHIKYSFTRDWINHVRSATGKNMFAVAEFWKNDLGAIENYLQKTNWNHSVFDVPLHYNLYNASKSSGNYDMRNIFNGTVVQRHPSHAVTFVDNHDSQPEEALESFVDEWFKPLAYALTLTREQGYPSVFYGDYYGIPTHGVPAMRSKIDPILEARQKYAYGPQHDYLDHPDVIGWTREGDSSHPKSGLATLITDGPGGSKRMYAGLKNAGETWYDITGNRSDTVKIGSDGWGEFHVNKQSVSIYVQK

SEQ ID NO: 29908 - protein, 485 aa, Bacillus sp.
HHNGTNGTMMQYFEWYLPNDGNHWNRLNSDASNLKSKGITAVWIPPAWKGASQNDVGYGAYDLYDLGEFNQKGTVRTKYGTRSQLQAAVTSLKNNGIQVYGDVVMNHKGGADATEMVRAVEVNPNNRNQEVTGEYTIEAWTRFDFPGRGNTHSSFKWRWYHFDGVDWDQSRELSNRIYKFRGHGKAWDWEVDTEFGNYDYLMYADYDMDHPEVVNELRNWGVWYTNTLGLDGFRIDAVKHIKYSFTRDWINHVRSATGKNMFAVAEFWKNDLGAIENYLQKTNWNHSVFDVPLHYNLYNASKSQGNYDMRNIFNGTVVQANPNHAVTFVDNHDSQPEEALESFVDTWFKPLAYALTLTREQGYPSVFYGDYYGIPTHGVPAMRSKIDPILEARQKYAYGPQHDYLDHPDVIGWTREGDSSHPKSGLATLITDGPGGSKRMYAGLKNAGETWYDITGNRSDTVKIGSDGWGEFHVNGSSVSIYVQK

SEQ ID NO: 29909 - protein, 485 aa, Bacillus sp.
HHNGTNGTMMQYFEWYLPNDGNHWNRLNSDASNLKSKGITAVWIPPAWKATSQNDVGYGAYDLYDLGEFNQKGTVRTKYGTRSQLQAAVTSLKNNGIQVYGDVVMNHKGGADLTEMVRAVEVNPNNRNQEVTGEYTIEAWTRFDFPGRGNTHSSFKWRWYHFDGVDWDQSRELSNRIYKFRGHGKAWDWEVDTEFGNYDYLMYADYDMDHPEVVNELRNWGVWYTNTLGLDGFRIDAVKHIKYSFTRDWINHVRSATGKNMFAVAEFWKNDLGAIENYLQKTNWNHSVFDVPLHYNLYNASKSVGNYDMRNIFNGTVVQRHPSHAVTFVDNHDSQPEEALESFVDTWFKPLAYALTLTREQGYPSVFYGDYYGIPTHGVPAMRSKIDPILEARQKYAYGPQHDYLDHPDVIGWTREGDSSHPKSGLATLITDGPGGSKRMYAGLKNAGETWYDITGNRSDTVKIGSDGWGEFHVNGSSVSIYVQK

SEQ ID NO: 29910 - protein, 483 aa, Synthetic construct
HHNGTNGTMMQYFEWYLPNDGNHWNRLNSDASNLKSKGITAVWIPPAWKGASQNDVGYGAYDLYDLGEFNQKGTVRTKYGTRSQLQAAVTSLKNNGIQVYGDVVMNHKGGADATEMVRAVEVNPNNRNQEVTGEYTIEAWTRFDFPGRGNTHSSFKWRWYHFDGVDWDQSRRLNNRIYLFRPKVWDWPVDTENGNYDYLMYADIDMDHPEVVNELRNWGVWYTNTLGLDGFRIDAVKHIKYSFTRDWINHVRSATGKNMFAVAEFWKNDLGAIENYLQKTNWNHSVFDVPLHYNLYNASKSGGNYDMRNIFNGTVVQRHPSHAVTFVDNHDSQPEEALESFVEEWFKPLAYALTLTREQGYPSVFYGDYYGIPTHGVPAMRSKIDPILEARQKYAYGPQHDYLDHPDVIGWTREGDSSHPKSGLATLITDGPGGSKRMYAGLKNAGETWYDITGNRSDTVKIGSDGWGEFHVNDGSVSIYVQK

SEQ ID NO: 29911 - protein, 485 aa, Bacillus sp.
HHNGTNGTMMQYFEWYLPNDGNHWNRLNSDASNLKSKGITAVWIPPAWKAASQNDVGYGAYDLYDLGEFNQKGTVRTKYGTRSQLQAAVTSLKNNGIQVYGDVVMNHKGGADATEMVRAVEVNPNNRNQEVTGEYTIEAWTRFDFPGRGNTHSSFKWRWYHFDGVDWDQSRRLDNRIYKFRGHGKAWDWEVDTEFGNYDYLMYTDYDMDHPEVVNELRNWGVWYTNTLGLDGFRIDAVKHIKYSFTRDWINHVRIATGKNMFAVAEFWKNDLGAIENYLQKTNWNHSVFDVPLHYNLYNASKSGGNYDMRNIFNGTVVQRHPSHAVTFVDNHDSQPEEALESFVDEWFKPLAYALTLTREQGYPSVFYGDYYGIPTHGVPAMRSKIDPILEARQKYAYGPQHDYLDHPDVIGWTREGDSSHPKSGLATLITDGPGGSKRMYAGLKNAGETWYDITGNRSDTVKIGSDGWGEFHVNDQSVSIYVQK

SEQ ID NO: 29912 - protein, 485 aa, Bacillus sp.
HHNGTNGTMMQYFEWYLPNDGNHWNRLNSDASNLKSKGITAVWIPPAWKGASQNDVGYGAYDLYDLGEFNQKGTVRTKYGTRSQLQAAVTSLKNNGIQVYGDVVMNHKGGADATEMVRAVEVNPNNRNQEVTGEYTIEAWTRFDFPGRGNTHSSFKWRWYHFDGVDWDQSRRLNNRIYKFRGHGKAWDWEVDTEFGNYDYLMYADYDMDHPEVVNELRNWGVWYTNTLGLDGFRIDAVKHIKYSFTRDWINHVRSATGKNMFAVAEFWKNDLGAIENYLQKTNWNHSVFDVPLHYNLYNASQSAGNYDMRNIFNGTVVQRHPSHAVTFVDNHDSQPEEALESFVETWFKPLAYALTLTREQGYPSVFYGDYYGIPTHGVPAMRSKIDPILEARQKYAYGPQHDYLDHPDVIGWTREGDSSHPKSGLATLITDGPGGSKRMYAGLKNAGETWYDITGNRSDTVKIGSDGWGEFHVNDKSVSIYVQK

SEQ ID NO: 29913 - protein, 485 aa, Bacillus sp.
HHNGTNGTMMQYFEWYLPNDGNHWNRLNSDASNLKSKGITAVWIPPAWKGASQNDVGYGAYDLYDLGEFNQKGTVRTKYGTRSQLQAAVTSLKNNGIQVYGDVVMNHKGGADATEMVRAVEVNPNNRNQEVTGEYTIEAWTRFDFPGRGNTHSSFKWRWYHFDGVDWDQSRRLNNRIYKFRGHGKAWDWEVDTEFGNYDYLMYADYDMDHPEVVNELRNWGVWYTNTLGLDGFRIDAVKHIKYSFTRDWINHVRSATGKNMFAVAEFWKNDLGAIENYLQKTNWNHSVFDVPLHYNLYNASKSQGNYDMRNIFNGTVVQRHPSHAVTFVDNHDSQPEEALESFVDPWFKPLAYALTLTREQGYPSVFYGDYYGIPTHGVPAMRSKIDPILEARQKYAYGPQHDYLDHPDVIGWTREGDSSHPKSGLATLITDGPGGSKRMYAGLKNAGETWYDITGNRSDTVKIGSDGWGEFHVNKQSVSIYVQK

SEQ ID NO: 29914 - protein, 483 aa, Bacillus sp.
HHNGTNGTMMQYFEWYLPNDGNHWNRLNSDASNLKSKGITAVWIPPAWKGASQNDVGYGAYDLYDLGEFNQKGTVRTKYGTRSQLQAAVTSLKNNGIQVYGDVVMNHKGGADATEMVRAVEVNPNNRNQEVTGEYTIEAWTRFDFPGRGNTHSSFKWRWYHFDGVDWDQSRRLNNRIYKFRGKAWDWEVDTEFGNYDYLMYADYDMDHPEVVNELRNWGVWYTNTLGLDGFRIDAVKHIKYSFTRDWINHVRSATGKNMFAVAEFWKNDLGAIENYLQKTNWNHSVFDVPLHYNLYNASKSQGNYDMRNIFNGTVVQRHPSHAVTFVDNHDSQPEEALESFVDPWFKPLAYALTLTREQGYPSVFYGDYYGIPTHGVPAMRSKIDPILEARQKYAYGPQHDYLDHPDVIGWTREGDSSHPKSGLATLITDGPGGSKRMYAGLKNAGETWYDITGNRSDTVKIGSDGWGEFHVNQQSVSIYVQK

SEQ ID NO: 29915 - protein, 485 aa, Bacillus sp.
HHNGTNGTMMQYFEWYLPNDGNHWNRLNSDASNLKSKGITAVWIPPAWKGASQNDVGYGAYDLYDLGEFNQKGTVRTKYGTRSQLQAAVTSLKNNGIQVYGDVVMNHKGGADATEMVRAVEVNPNNRNQEVTGEYTIEAYTRFDFPGRGNTHSSFKWRWYHFDGVDFDQSRDLTNRIYKFRGHGKAWDWEVDTEFGNYDYLMYVDYDMDHPEVVNELRNWGVWYTNTLGLDGFRIDAVKHIKYSFTRDWINHVRNATGKNMFAVAEFWKNDLGAIENYLQKTNWNHSVFDVPLHYNLYNASKSGGNYDMRNIFNGTVVQRHPSHAVTFVDNHDSQPEEALESFVDEWFKPLAYALTLTREQGYPSVFYGDYYGIPTHGVPAMRSKIDPILEARQKYAYGPQHDYLDHPDVIGWTREGDSSHPKSGLATLITDGPGGSKRMYAGLKNAGETWYDITGNRSDTVKIGSDGWGEFHVNDQSVSIYVQK

SEQ ID NO: 29916 - protein, 485 aa, Bacillus sp.
HHNGTNGTMMQYFEWYLPNDGNHWNRLNSDASNLKSKGITAVWIPPAWKATSQNDVGYGAYDLYDLGEFNQKGTVRTKYGTRSQLQAAVTSLKNNGIQVYGDVVMNHKGGADATEMVRAVEVNPNNRNQEVTGEYTIEAWTRFDFPGRGNTHSSFKWRWYHFDGVDWDMSRELSNRIYKFRGHGKAWDWEVDTEFGNYDYLMYADYDMDHPEVVNELRNWGVWYTNTLGLDGFRIDAVKHIKYSFTRDWINHVRSATGKNMFAVAEFWKNDLGAIENYLQKTNWNHSVFDVPLHYNLYNASKSQGNYDMRNIFNGTVVQRHPSHAVTFVDNHDSQPEEALESFVDTWFKPLAYALTLTREQGYPSVFYGDYYGIPTHGVPAMRSKIDPILEARQKYAYGPQHDYLDHPDVIGWTREGDSSHPKSGLATLITDGPGGSKRMYAGLKNAGETWYDITGNRSDTVKIGSDGWGEFHVNGSSVSIYVQK

SEQ ID NO: 29917 - protein, 483 aa, Bacillus sp. 707
HHNGTNGTMMQYFEWYLPNDGNHWNRLNSDASNLKSKGITAVWIPPAWKGTSQNDVGYGAYDLYDLGEFNQKGTVRTKYGTRSQLQAAVTSLKNNGIQVYGDVVMNHKGGADATEMVRAVEVNPNNRNQEVTGEYTIEAWTRFDFPGRGNTHSNFKWRWYHFDGVDWDQSRRLNNRIYKFDGKAWDWPVSSENGNYDYLMYADLDFDHPDVANEMKNWGTWYANELNLDGFRLDAVKHIDHEYLRDWVNHVRQQTGKNMFAVAEFWKNDLGAIENYLQKTNWNQSVFDAPLHYNLYNASKSGGNYDMRNIFNGTVVQRHPSHAVTFVDNHDSQPEEALESFVEEWFKPLAYALTLTREQGYPSVFYGDYYGIPTHGVPAMRSKIDPILEARQKYAYGKQNDYLDHHNIIGWTREGDSTKANSGLATIMSDGPGGSKWMNVGKQNAGEVWYDITGNRTGTVTINSDGWGQFFVNGGSVSIWVNK

SEQ ID NO: 29918 - protein, 485 aa, Bacillus sp.
HHNGTNGTMMQYFEWYLPNDGNHWNRLNSDASNLKSKGITAVWIPPAWKGASQNDVGYGAYDLYDLGEFNQKGTVRTKYGTRSQLQAAVTSLKNNGIQVYGDVVMNHKGGADATEMVRAVEVNPNNRNQEVTGEYTIEAWTRFDFPGRGNTHSSFKWRWYHFDGVDWDQSRELDNRIYKFRGHGKAWDWEVDTEFGNYDYLMYTDYDMDHPEVVNELRNWGVWYTNTLGLDGFRIDAVKHIKYSFTRDWINHVRSATGKNMFAVAEFWKNDLGAIENYLQKTNWNHSVFDVPLHYNLYNASKSQGNYDMRNIFNGTVVQRHPSHAVTFVDNHDSQPEEALESFVDTWFKPLAYALTLTREQGYPSVFYGDYYGIPTHGVPAMRSKIDPILEARQKYAYGPQHDYLDHPDVIGWTREGDSSHPKSGLATLITDGPGGSKRMYAGLKNAGETWYDITGNRSDTVKIGSDGWGEFHVNGSSVSIYVQK

SEQ ID NO: 29919 - protein, 483 aa, Bacillus sp.
HHNGTNGTMMQYFEWYLPNDGNHWNRLNSDASNLKSKGITAVWIPPAWKGASQNDVGYGAYDIYDLGEFNQKGTVRTKYGTRSQLQAAVTSLKNNGIQVYGDVVMNHKGGADATEMVRAVEVNPNNRNQEVTGEYTIEAWTRFDFPGRGNTHSSFKWRWYHFDGVDWDQSRRLNNRIYKFRGKAWDWEVDTENGFYDYLMYADIDYDHPSVVNELRNWGVWYTNTLGLDGFRIDAVKHIKYSFTRDWINHVRSATGKNMFAVAEFWKNDLGAIENYLQKTNWNHSVFDVPLHYNLYNASKSGGNYDMRNIFNGTVVQRHPSHAVTFVDNHDSQPEEALESFVEEWFKPLAYALTLTREQGYPSVFYGDYYGIPTHGVPAMRSKIDPILEARQKYAYGPQHDYLDHPDVIGWTREGDSSHPKSGLATLITDGPGGSKRMYAGLKNAGETWYDITGNRSDTVKIGSDGWGEFHVNDGSVSIYVQK

SEQ ID NO: 29920 - protein, 485 aa, Bacillus sp.
HHNGTNGTMMQYFEWYLPNDGNHWNRLNSDASNLKSKGITAVWIPPAWKAVSQNDVGYGAYDLYDLGEFNQKGTVRTKYGTRSQLQAAVTSLKNNGIQVYGDVVMNHKGGADATEMVRAVEVNPNNRNQEVTGEYTIEAWTRFDFPGRGNTHSSFKWRWYHFDGVDWDQSRDLENRIYKFRGHGKAWDWEVDTEFGNYDYLMYADYDMDHPEVVNELRNWGVWYTNTLGLDGFRIDAVKHIKYSFTRDWINHVRSATGKNMFAVAEFWKNDLGAIENYLQKTNWNHSVFDVPLHYNLYNASKSGGNYDMRNIFNGTVVQRHPSHAVTFVDNHDSQPEEALESFVETWFKPLAYALTLTREQGYPSVFYGDYYGIPTHGVPAMRSKIDPILEARQKYAYGPQHDYLDHPDVIGWTREGDSSHPKSGLATLITDGPGGSKRMYAGLKNAGETWYDITGNRSDTVKIGSDGWGEFHVNKASVSIYVQK

SEQ ID NO: 29921 - protein, 483 aa, Bacillus sp.
HHNGTNGTMMQYFEWYLPNDGNHWNRLNSDASNLKSKGITAVWIPPAWKGASQNDVGYGAYDLYDLGEFNQKGTVRTKYGTRSQLQAAVTSLKNNGIQVYGDVVMNHEGDTHATEMVRAVEVNPNNRNQEVTGEYTIEAWTRFDFPGRGNTHSSFKWRWYHFDGVDWDQSRRLNNRIYKFRGKAWDWEVDTEFGNYDYLMYADYDMDHPEVVNELRNWGVWYTNTLGLDGFRIDAVKHIKYSFTRDWINHVRSATGKNMFAVAEFWKNDLGAIENYLQKTNWNHSVFDVPLHYNLYNASKSGGNYDMRNIFNGTVVQSHPMHAVTFVDNHDSQPEEALESFVEEWFKPLAYALTLTREQGYPSVFYGDYYGIPTHGVPAMRSKIDPILEARQKYAYGPQHDYLDHPDVIGWTREGDSSHPKSGLATLITDGPGGSKRMYAGLKNAGETWYDITGNRSDTVKIGSDGWGEFHVNDGSVSIYVQK

SEQ ID NO: 29922 - protein, 485 aa, Bacillus sp.
HHNGTNGTMMQYFEWYLPNDGNHWNRLNSDASNLKSKGITAVWIPPAWKGASQNDVGYGAYDLYDLGEFNQKGTVRTKYGTRSQLQAAVTSLKNNGIQVYGDVVMNHKGGADATEMVRAVEVNPNNRNQEVTGEYTIEAWTRFDFPGRGNTHSSFKWRWYHFDGVDWDQSRRLNNRIYKFRGHGKAWDWEVDTEFGNYDYLMYADYDMDHPEVVNELRNWGVWYTNTLGLDGFRIDAVKHIKYSFTRDWINHVRSATGKNMFAVAEFWKNDLGAIENYLQKTNWNHSVFDVPLHYNLYNASKSQGNYDMRNIFNGTVVQRHPSHAVTFVDNHDSQPEEALESFVDPWFKPLAYALTLTREQGYPSVFYGDYYGIPTHGVPAMRSKIDPILEARQKYAYGPQHDYLDHPDVIGWTREGDSSHPKSGLATLITDGPGGSKRMYAGLKNAGETWYDITGNRSDTVKIGSDGWGEFHVNQQSVSIYVQK

SEQ ID NO: 29923 - protein, 485 aa, Bacillus sp.
HHNGTNGTMMQYFEWYLPNDGNHWNRLNSDASNLKSKGITAVWIPPAWKGASQNDVGYGAYDLYDLGEFNQKGTVRTKYGTRSQLQAAVTSLKNNGIQVYGDVVMNHKGGADATEMVRAVEVNPNNRNQEVTGEYTIEAWTRFDFPGRGNTHSSFKWRWYHFDGVDWDQSRRLNNRIYKFRGHGKAWDWEVDTEFGNYDYLMYADYDMDHPEVVNELRNWGVWYTNTLGLDGFRIDAVKHIKYSFTRDWINHVRSATGKNMFAVAEFWKNDLVAIENYLQKTNWNHSVFDVPLHYNLYNASKSSGNYDMRNIFNGTVVQRHPSHAVTFVDNHDSQPEEALESFVEPWFKPLAYALTLTREQGYPSVFYGDYYGIPTHGVPAMRSKIDPILEARQKYAYGPQHDYLDHPDVIGWTREGDSSHPKSGLATLITDGPGGSKRMYAGLKNAGETWYDITGNRSDTVKIGSDGWGEFHVNGTSVSIYVQK

SEQ ID NO: 29924 - protein, 483 aa, Bacillus sp.
HHNGTNGTMMQYFEWYLPNDGNHWNRLNSDASNLKSKGITAVWIPPAWKGTSQNDVGYGAYDLYDLGEFNQKGTVRTKYGTRSQLQAAVTSLKNNGIQVYGDVVMNHKGGADATEMVRAVEVNPNNRNQEVTGEYTIEAWTRFDFPGRGNTHSSFKWRWYHFDGVDFDQSRNLNNRIYKFRGKAWDWEVDTEFGNYDYLMYVDYDMDHPEVVNELRNWGVWYTNTLGLDGFRIDAVKHIKYSFTRDWINHVRSATGKNMFAVAEFWKNDLGAIENYLQKTNWNHSVFDVPLHYNLYNASKSQGNYDMRNIFNGTVVQRHPSHAVTFVDNHDSQPEEALESFVDTWFKPLAYALTLTREQGYPSVFYGDYYGIPTHGVPAMRSKIDPILEARQKYAYGPQHDYLDHPDVIGWTREGDSSHPKSGLATLITDGPGGSKRMYAGLKNAGETWYDITGNRSDTVKIGSDGWGEFHVNGSSVSIYVQK

SEQ ID NO: 29925 - protein, 485 aa, Bacillus sp.
HHNGTNGTMMQYFEWYLPNDGNHWNRLNSDASNLKSKGITAVWIPPAWKGASQNDVGYGAYDLYDLGEFNQKGTVRTKYGTRSQLQAAVTSLKNNGIQVYGDVVMNHKGGADATEMVRAVEVNPNNRNQEVTGEYTIEAWTRFDFPGRGNTHSSFKWRWYHFDGVDWDQSRRLNNRIYKFRGHGKAWDWEVDTEFGNYDYLMYADYDMDHPEVVNELRNWGVWYTNTLGLDGFRIDAVKHIKYSFTRDWINHVRSATGKNMFAVAEFWKNDLGAIENYLQKTNWNHSVFDVPLHYNLYNASKSSGNYDMRNIFNGTVVQRHPSHAVTFVDNHDSQPEEALESFVDTWFKPLAYALTLTREQGYPSVFYGDYYGIPTHGVPAMRSKIDPILEARQKYAYGPQHDYLDHPDVIGWTREGDSSHPKSGLATLITDGPGGSKRMYAGLKNAGETWYDITGNRSDTVKIGSDGWGEFHVNQASVSIYVQK

SEQ ID NO: 29926 - protein, 483 aa, Bacillus sp.
HHNGTNGTMMQYFEWYLPNDGNHWNRLNSDASNLKSKGIKAVWIPPAWKGASQNDVGYGAYDLYDLGEFNQRGTVRTKYGTRSQLQAAVTSLKNNGIQVYGDVVMNHKGGADATEMVRAVEVNPNNRNQEVTGEYTIEAWTRFDFPGRGNTHSSFKWRWYHFDGVDFDQSRNFQNRIYKFRGKAWDWEVDTEFGNYDYLMYADYDMDHPEVVNELRNWGVWYTNTLGLDGFRIDAVKHIKYSFTRDWINHVRSATGKNMFAVAEFWKNDLGAIENYLQKTNWNHSVFDVPLHYNLYNASKSQGNYDMRNIFNGTVVQRHPSHAVTFVDNHDSQPEEALESFVDTWFKPLAYALTLTREQGYPSVFYGDYYGIPTHGVPAMRSKIDPILEARQKYAYGPQHDYLDHPDVIGWTREGDSSHPKSGLATLITDGPGGSKRMYAGLKNAGETWYDITGNRSDTVKIGSDGWGEFHVNGSSVSIYVQK

SEQ ID NO: 29927 - protein, 485 aa, Bacillus sp.
HHNGTNGTMMQYFEWYLPNDGNHWNRLNSDASNLKSKGITAVWIPPAWKGASQNDVGYGAYDLYDLGEFNQKGTVRTKYGTRSQLQAAVTSLKNNGIQVYGDVVMNHKGGADATEMVRAVEVNPNNRNQEVTGEYTIEAWTRFDFPGRGNTHSSFKWRWYHFDGVDWDQSRRTNNRIYKFRGHGKAWDWEVDTEFGNYDYLMYTDYDMDHPEVVNELRNWGVWYTNTLGLDGFRIDAVKHIKYSFTRDWINHVRSATGKNMFAVAEFWKNDLGAIENYLQKTNWNHSVFDVPLHYNLYNASKSGGNYDMRNIFNGTVVQRHPSHAVTFVDNHDSQPEEALESFVETWFKPLAYALTLTREQGYPSVFYGDYYGIPTHGVPAMRSKIDPILEARQKYAYGPQHDYLDHPDVIGWTREGDSSHPKSGLATLITDGPGGSKRMYAGLKNAGETWYDITGNRSDTVKIGSDGWGEFHVNKASVSIYVQK

SEQ ID NO: 29928 - protein, 485 aa, Bacillus sp.
HHNGTNGTMMQYFEWYLPNDGNHWNRLNSDASNLKSKGITAVWIPPAWKGASQNDVGYGAYDLYDLGEFNQKGTVRTKYGTRSQLQAAVTSLKNNGIQVYGDVVMNHKGGADATEMVRAVEVNPNNRNQEVTGEYTIEAWTRFDFPGRGNTHSSFKWRWYHFDGVDWDQSRRLNNRIYKFRGHGKAWDWEVDTEFGNYDYLMYADYDMDHPEVVNELRNWGVWYTNTLGLDGFRIDAVKHIKYSFTRDWINHVRSATGKNMFAVAEFWKNDLGAIENYLQKTNWNHSVFDVPLHYNLYNASKSQGNYDMRNIFNGTVVQRHPSHAVTFVDNHDSQPEEALESFVEPWFKPLAYALTLTREQGYPSVFYGDYYGIPTHGVPAMRSKIDPILEARQKYAYGPQHDYLDHPDVIGWTREGDSSHPKSGLATLITDGPGGSKRMYAGLKNAGETWYDITGNRSDTVKIGSDGWGEFHVNKSSVSIYVQK

SEQ ID NO: 29929 - protein, 485 aa, Bacillus sp.
HHNGTNGTMMQYFEWYLPNDGNHWNRLNSDASNLKSKGITAVWIPPAWKAVSQNDVGYGAYDLYDLGEFNQRGTVRTKYGTRSQLQAAVTSLKNNGIQVYGDVVMNHKGGADATEMVRAVEVNPNNRNQEVTGEYTIEAWTRFDFPGRGNTHSSFKWRWYHFDGVDFDQSREFTNRIYKFRGHGKAWDWEVDTEFGNYDYLMYVDYDMDHPEVVNELRNWGVWYTNTLGLDGFRIDAVKHIKYSFTRDWINHVRSATGKNMFAVAEFWKNDLGAIENYLQKTNWNHSVFDVPLHYNLYNASKSGGNYDMRNIFNGTVVQRHPSHAVTFVDNHDSQPEEALESFVEEWFKPLAYALTLTREQGYPSVFYGDYYGIPTHGVPAMRSKIDPILEARQKYAYGPQHDYLDHPDVIGWTREGDSSHPKSGLATLITDGPGGSKRMYAGLKNAGETWYDITGNRSDTVKIGSDGWGEFHVNDGSVSIYVQK

SEQ ID NO: 29930 - protein, 483 aa, Bacillus sp.
HHNGTNGTMMQYFEWYLPNDGNHWNRLNSDASNLKSKGITAVWIPPAWKGASQNDVGYGAYDLYDLGEFNQKGTVRTKYGTRSQLQAAVTSLKNNGIQVYGDVVMNHKGGADATEMVRAVEVNPNNRNQEVTGEYTIEAWTRFDFPGRGNTHSSFKWRWYHFDGVDWDQSRRLNNRIYLFRCKAWKWEVPTENGNYDYLMYADIDMDHPEVVNELRNWGVWYTNTLGLDGFRIDAVKHIKYSFTRDWINHVRSATGKNMFAVAEFWKNDLGAIENYLQKTNWNHSVFDVPLHYNLYNASKSGGNYDMRNIFNGTVVQRHPSHAVTFVDNHDSQPEEALESFVEEWFKPLAYALTLTREQGYPSVFYGDYYGIPTHGVPAMRSKIDPILEARQKYAYGPQHDYLDHPDVIGWTREGDSSHPKSGLATLITDGPGGSKRMYAGLKNAGETWYDITGNRSDTVKIGSDGWGEFHVNDGSVSIYVQK

SEQ ID NO: 29931 - protein, 485 aa, Bacillus sp.
HHNGTNGTMMQYFEWYLPNDGNHWNRLNSDASNLKSKGITAVWIPPAWKAASQNDVGYGAYDLYDLGEFNQKGTVRTKYGTRSQLQAAVTSLKNNGIQVYGDVVMNHKGGADATEMVRAVEVNPNNRNQEVTGEYTIEAWTRFDFPGRGNTHSSFKWRWYHFDGVDWDQSRDLQNRIYKFRGHGKAWDWEVDTEFGNYDYLMYADYDMDHPEVVNELRNWGVWYTNTLGLDGFRIDAVKHIKYSFTRDWINHVRSATGKNMFAVAEFWKNDLGAIENYLQKTNWNHSVFDVPLHYNLYNASKSSGNYDMRNIFNGTVVQRHPSHAVTFVDNHDSQPEEALESFVDEWFKPLAYALTLTREQGYPSVFYGDYYGIPTHGVPAMRSKIDPILEARQKYAYGPQHDYLDHPDVIGWTREGDSSHPKSGLATLITDGPGGSKRMYAGLKNAGETWYDITGNRSDTVKTESDGWGEFHVNKQSVSIYVQK

SEQ ID NO: 29932 - protein, 483 aa, Bacillus sp.
HHNGTNGTMMQYFEWYLPNDGNHWNRLNSDASNLKSKGITAVWIPPAWKGASQNDVGYGAYDLYDLGEFNQKGTVRTKYGTRSQLQAAVTSLKNNGIQVYGDVVMNHKGGADATEMVRAVEVNPNNRNQEVTGEYTIEAWTRFDFPGRGNTHSSFKWRWYHFDGVDWDQSRRLNNRIYKFRGKAWDWEVDTEFGNYDYLMYADYDMDHPEVVNELRNWGVWYTNTLGLDGFRIDAVKHIKYSFTRDWINHVRSATGKNMFAVAEFWKNDLGAIENYLQKTNWNHSVFDVPLHYNLYNASKSSGNYDMRNIFNGTVVQRHPSHAVTFVDNHDSQPEEALESFVEPWFKPLAYALTLTREQGYPSVFYGDYYGIPTHGVPAMRSKIDPILEARQKYAYGPQHDYLDHPDVIGWTREGDSSHPKSGLATLITDGPGGSKRMYAGLKNAGETWYDITGNRSDTVKIGSDGWGEFHVNKSSVSIYVQK

SEQ ID NO: 29933 - protein, 485 aa, Bacillus sp.
HHNGTNGTMMQYFEWYLPNDGNHWNRLNSDASNLKSKGITAVWIPPAWKAASQNDVGYGAYDLYDLGEFNQKGTVRTKYGTRSQLQAAVTSLKNNGIQVYGDVVMNHKGGADATEMVRAVEVNPNNRNQEVTGEYTIEAWTRFDFPGRGNTHSSFKWRWYHFDGVDWDQSRRLDNRIYKFRGHGKAWDWEVDTEFGNYDYLMYTDYDMDHPEVVNELRNWGVWYTNTLGLDGFRIDAVKHIKYSFTRDWINHVRSATGKNMFAVAEFWKNDLGAIENYLQKTNWNHSVFDVPLHYNLYNASKSGGNYDMRNIFNGTVVQRHPSHAVTFVDNHDSQPEEALESFVDEWFKPLAYALTLTREQGYPSVFYGDYYGIPTHGVPAMRSKIDPILEARQKYAYGPQHDYLDHPDVIGWTREGDSSHPKSGLATLITDGPGGSKRMYAGLKNAGETWYDITGNRSDTVKIGSDGWGEFHVNKSSVSIYVQK

SEQ ID NO: 29934 - protein, 485 aa, Bacillus sp.
HHNGTNGTMMQYFEWYLPNDGNHWNRLNSDASNLKSKGITAVWIPPAWKGASQNDVGYGAYDLYDLGEFNQKGTVRTKYGTRSQLQAAVTSLKNNGIQVYGDVVMNHKGGADATEMVRAVEVNPNNRNQEVTGEYTIEAWTRFDFPGRGNTHSSFKWRWYHFDGVDWDQSRRLNNRIYKFRGHGKAWDWEVDTEFGNYDYLMYADYDMDHPEVVNELRNWGVWYTNTLGLDGFRIDAVKHIKYSFTRDWINHVRSATGKNMFAVAEFWKNDLGAIENYLQKTNWNHSVFDVPLHYNLYNASKSAGNYDMRNIFNGTVVQRHPSHAVTFVDNHDSQPEEALESFVDTWFKPLAYALTLTREQGYPSVFYGDYYGIPTHGVPAMRSKIDPILEARQKYAYGPQHDYLDHPDVIGWTREGDSSHPKSGLATLITDGPGGSKRMYAGLKNAGETWYDITGNRSDTVKIGSDGWGEFHVNQQSVSIYVQK

SEQ ID NO: 29935 - protein, 483 aa, Bacillus sp.
HHNGTNGTMMQYFEWYLPNDGNHWNRLNSDASNLKSKGITAVWIPPAWKAVSQNDVGYGAYDLYDLGEFNQKGTVRTKYGTRSQLQAAVTSLKNNGIQVYGDVVMNHKGGADLTEMVRAVEVNPNNRNQEVTGEYTIEAWTRFDFPGRGNTHSSFKWRWYHFDGVDWDQSRNLTNRIYKFRGKAWDWEVDTEFGNYDYLMYTDYDMDHPEVVNELRNWGVWYTNTLGLDGFRIDAVKHIKYSFTRDWINHVRSATGKNMFAVAEFWKNDLGAIENYLQKTNWNHSVFDVPLHYNLYNASKSGGNYDMRNIFNGTVVQRHPSHAVTFVDNHDSQPEEALESFVEEWFKPLAYALTLTREQGYPSVFYGDYYGIPTHGVPAMRSKIDPILEARQKYAYGPQHDYLDHPDVIGWTREGDSSHPKSGLATLITDGPGGSKRMYAGLKNAGETWYDITGNRSDTVKIGSDGWGEFHVNDGSVSIYVQK

SEQ ID NO: 29936 - protein, 485 aa, Bacillus sp.
HHNGTNGTMMQYFEWYLPNDGNHWNRLNSDASNLKSKGITAVWIPPAWKGASQNDVGYGAYDLYDLGEFNQKGTVRTKYGTRSQLQAAVTSLKNNGIQVYGDVVMNHKGGADATEMVRAVEVNPNNRNQEVTGEYTIEAWTRFDFPGRGNTHSSFKWRWYHFDGVDWDQSRRLNNRIYKFRGHGKAWDWEVDTEFGNYDYLMYTDYDMDHPEVVNELRNWGVWYTNTLGLDGFRIDAVKHIKYSFTRDWINHVRSATGKNMFAVAEFWKNDLGAIENYLQKTNWNHSVFDVPLHYNLYNASKSQGNYDMRNIFNGTVVQRHPSHAVTFVDNHDSQPEEALESFVDTWFKPLAYALTLTREQGYPSVFYGDYYGIPTHGVPAMRSKIDPILEARQKYAYGPQHDYLDHPDVIGWTREGDSSHPKSGLATLITDGPGGSKRMYAGLKNAGETWYDITGNRSDTVKIGSDGWGEFHVNGSSVSIYVQK

SEQ ID NO: 29937 - protein, 483 aa, Bacillus sp.
HHNGTNGTMMQYFEWYLPNDGNHWNRLNSDASNLKSKGITAVWIPPAWKGASQNDVGYGAYDLYDLGEFNQKGTVRTKYGTRSQLQAAVTSLKNNGIQVYGDVVMNHKGGADATEMVRAVEVNPNNRNQEVTGEYTIEAWTRFDFPGRGNTHSSFKWRWYHFDGVDFDQSRDLTNRIYKFRGKAWDWEVDTEFGNYDYLMYVDYDMDHPEVVNELRNWGVWYTNTLGLDGFRIDAVKHIKYSFTRDWINHVRIATGKNMFAVAEFWKNDLGAIENYLQKTNWNHSVFDVPLHYNLYNASKSGGNYDMRNIFNGTVVQRHPSHAVTFVDNHDSQPEEALESFVDEWFKPLAYALTLTREQGYPSVFYGDYYGIPTHGVPAMRSKIDPILEARQKYAYGPQHDYLDHPDVIGWTREGDSSHPKSGLATLITDGPGGSKRMYAGLKNAGETWYDITGNRSDTVKIGSDGWGEFHVNDQSVSIYVQK

SEQ ID NO: 29938 - protein, 483 aa, Bacillus sp.
HHNGTNGTMMQYFEWYLPNDGNHWNRLNSDASNLKSKGITAVWIPPAWKGASQNDVGYGAYDLYDLGEFNQRGTVRTKYGTRSQLQAAVTSLKNNGIQVYGDVVMNHKGGADATEMVRAVEVNPNNRNQEVTGEYTIEAWTRFDFPGRGNTHSSFKWRWYHFDGVDFDQSRRLNNRIYKFRGKAWDWEVDTEFGNYDYLMYADYDMDHPEVVNELRNWGVWYTNTLGLDGFRIDAVKHIKYSFTRDWINHVRSATGKNMFAVAEFWKNDLGAIENYLQKTNWNHSVFDVPLHYNLYNASKSGGNYDMRNIFNGTVVQRHPSHAVTFVDNHDSQPEEALESFVETWFKPLAYALTLTREQGYPSVFYGDYYGIPTHGVPAMRSKIDPILEARQKYAYGPQHDYLDHPDVIGWTREGDSSHPKSGLATLITDGPGGSKRMYAGLKNAGETWYDITGNRSDTVKIGSDGWGEFHVNDGSVSIYVQK

SEQ ID NO: 29939 - protein, 483 aa, Bacillus sp.
HHNGTNGTMMQYFEWYLPNDGNHWNRLNSDASNLKSKGITAVWIPPAWKGASQNDVGYGAYDLYDLGEFNQRGTVRTKYGTRSQLQAAVTSLKNNGIQVYGDVVMNHKGGADATEMVRAVEVNPNNRNQEVTGEYTIEAWTRFDFPGRGNTHSSFKWRWYHFDGVDFDQSRRLNNRIYKFRGKAWDWEVDTEFGNYDYLMYADYDMDHPEVVNELRNWGVWYTNTLGLDGFRIDAVKHIKYSFTRDWINHVRSATGKNMFAVAEFWKNDLGAIENYLQKTNWNHSVFDVPLHYNLYNASKSGGNYDMRNIFNGTVVQRHPSHAVTFVDNHDSQPEEALESFVETWFKPLAYALTLTREQGYPSVFYGDYYGIPTHGVPAMRSKIDPILEARQKYAYGPQHDYLDHPDVIGWTREGDSSHPKSGLATLITDGPGGSKRMYAGLKNAGETWYDITGNRSDTVKIGSDGWGEFHVNKGSVSIYVQK

SEQ ID NO: 29940 - protein, 483 aa, Bacillus sp.
HHNGTNGTMMQYFEWYLPNDGNHWNRLNSDASNLKSKGIKAVWIPPAWKAASQNDVGYGAYDLYDLGEFNQKGTVRTKYGTRSQLQAAVTSLKNNGIQVYGDVVMNHKGGADATEMVRAVEVNPNNRNQEVTGEYTIEAWTRFDFPGRGNTHSSFKWRWYHFDGVDWDQSRNLNNRIYKFRGKAWDWEVDTEFGNYDYLMYTDYDMDHPEVVNELRNWGVWYTNTLGLDGFRIDAVKHIKYSFTRDWINHVRSATGKNMFAVAEFWKNDLGAIENYLQKTNWNHSVFDVPLHYNLYNASKSGGNYDMRNIFNGTVVQRHPSHAVTFVDNHDSQPEEALESFVEEWFKPLAYALTLTREQGYPSVFYGDYYGIPTHGVPAMRSKIDPILEARQKYAYGPQHDYLDHPDVIGWTREGDSSHPKSGLATLITDGPGGSKRMYAGLKNAGETWYDITGNRSDTVKIGSDGWGEFHVNDGSVSIYVQK

SEQ ID NO: 29941 - protein, 483 aa, Synthetic construct
HHNGTNGTMMQYFEWYLPNDGNHWNRLNSDASNLKSKGITAVWIPPAWKGASQNDVGYGAYDVYDLGEFNQKGTVRTKYGTRSQLQAAVTSLKNNGIQVYGDVVFNHKGGADATEMVRAVEVNPNNRNQEVTGEYTIEAWTRFDFPGRGNTHSSFKWRWYHFDGVDWDQSRRLNNRIYKFRGKAWDWEVDTENGNYDYLMYADYDMDFPEVVNEIRNWGVWYTNTLGLDGFRIDAVKHIKYSFTRDWINHVRSATGKNMFAVAEFWKNDLGAIENYLQKTNWNHSVFDVPLHYNLYNASKSGGNYDMRNIFNGTVVQRHPSHAVTFVDNHDSQPEEALESFVEEWFKPLAYALTLTREQGYPSVFYGDYYGIPTHGVPAMRSKIDPILEARQKYAYGPQHDYLDHPDVIGWTREGDSSHPKSGLATLITDGPGGSKRMYAGLKNAGETWYDITGNRSDTVKIGSDGWGEFHVNDGSVSIYVQK

SEQ ID NO: 29942 - protein, 483 aa, Bacillus sp.
HHNGTNGTMMQYFEWYLPNDGNHWNRLNSDASNLKSKGITAVWIPPAWKGASQNDVGYGAYDLYDLGEFNQKGTVRTKYGTRSQLQAAVTSLKNNGIQVYGDVVMNHKGGADATEMVRAVEVNPNNRNQEVTGEYTIEAWTRFDFPGRGNTHSSFKWRWYHFDGVDWDQSRRLNNRIYKFRGKAWDWEVDTEFGNYDYLMYADYDMDHPEVVNELRNWGVWYTNTLGLDGFRIDAVKHIKYSFTRDWINHVRSATGKNMFAVAEFWKNDLGAIENYLQKTNWNHSVFDVPLHYNLYNASKSQGNYDMRNIFNGTVVQRHPSHAVTFVDNHDSQPEEALESFVEPWFKPLAYALTLTREQGYPSVFYGDYYGIPTHGVPAMRSKIDPILEARQKYAYGPQHDYLDHPDVIGWTREGDSSHPKSGLATLITDGPGGSKRMYAGLKNAGETWYDITGNRSDTVKIGSDGWGEFHVNKASVSIYVQK

SEQ ID NO: 29943 - protein, 483 aa, Bacillus sp.
HHNGTNGTMMQYFEWYLPNDGNHWNRLNSDASNLKSKGITAVWIPPAWKGASQNDVGYGAYDLYDLGEFNQKGTVRTKYGTRSQLQAAVTSLKNNGIQVYGDVVMNHKGGADATEMVRAVEVNPNNRNQEVTGEYTIEAWTRFDFPGRGNTHSSFKWRWYHFDGVDWDQSRRLNNRIYKFRGKAWDWEVDTEFGNYDYLMYADYDMDHPEVVNELRNWGVWYTNTLGLDGFRIDAVKHIKYSFTRDWINHVRSATGKNMFAVAEFWKNDLGAIENYLQKTNWNHSVFDVPLHYNLYNASKSQGNYDMRNIFNGTVVQRHPSHAVTFVDNHDSQPEEALESFVEPWFKPLAYALTLTREQGYPSVFYGDYYGIPTHGVPAMRSKIDPILEARQKYAYGPQHDYLDHPDVIGWTREGDSSHPKSGLATLITDGPGGSKRMYAGLKNAGETWYDITGNRSDTVKIGSDGWGEFHVNKSSVSIYVQK

SEQ ID NO: 29944 - protein, 485 aa, Bacillus sp.
HHNGTNGTMMQYFEWYLPNDGNHWNRLNSDASNLKSKGITAVWIPPAWKGASQNDVGYGAYDLYDLGEFNQKGTVRTKYGTRSQLQAAVTSLKNNGIQVYGDVVMNHKGGADATEMVRAVEVNPNNRQQEVTGEYTIEAWTRFDFPGRGNTHSSFKWRWYHFDGVDWDQSRRLNNRIYLFRGHGKSWDWEVDTEFGNYDYLMYADYDMDHPEVVNELRNWGVWYTNTLGLDGFRIDAVKHIKYSFTRDWINHVRSATGKNMFAVAEFWKNDLGAIENYLQKTNWNHSVFDVPLHYNLYNASKSGGNYDMRNIFNGTVVQRHPSHAVTFVDNHDSQPEEALESFVEEWFKPLAYALTLTREQGYPSVFYGDYYGIPTHGVPAMRSKIDPILEARQKYAYGPQHDYLDHPDVIGWTREGDSSHPKSGLATLITDGPGGSKRMYAGLKNAGETWYDITGNRSDTVKIGSDGWGEFHVNDGSVSIYVQK

SEQ ID NO: 29945 - protein, 485 aa, Bacillus sp.
HHNGTNGTMMQYFEWYLPNDGNHWNRLNSDASNLKSKGITAVWIPPAWKGASQNDVGYGAYDLYDLGEFNQKGTVRTKYGTRSQLQAAVTSLKNNGIQVYGDVVMNHKGGADATEMVRAVEVNPNNRNQEVTGEYTIEAWTRFDFPGRGNTHSSFKWRWYHFDGVDWDQSRRLDNRIYKFRGHGKAWDWEVDTEFGNYDYLMYTDYDMDHPEVVNELRNWGVWYTNTLGLDGFRIDAVKHIKYSFTRDWINHVRSATGKNMFAVAEFWKNDLGAIENYLQKTNWNHSVFDVPLHYNLYNASKSSGNYDMRNIFNGTVVQRHPSHAVTFVDNHDSQPEEALESFVDEWFKPLAYALTLTREQGYPSVFYGDYYGIPTHGVPAMRSKIDPILEARQKYAYGPQHDYLDHPDVIGWTREGDSSHPKSGLATLITDGPGGSKRMYAGLKNAGETWYDITGNRSDTVKIGSDGWGEFHVNKQSVSIYVQK

SEQ ID NO: 29946 - protein, 483 aa, Bacillus sp.
HHNGTNGTMMQYFEWYLPNDGNHWNRLNSDASNLKSKGITAVWIPPAWKAVSQNDVGYGAYDLYDLGEFNQKGTVRTKYGTRSQLQAAVTSLKNNGIQVYGDVVMNHKGGADLTEMVRAVEVNPNNRNQEVTGEYTIEAWTRFDFPGRGNTHSSFKWRWYHFDGVDWDQSREFTNRIYKFRGKAWDWEVDTEFGNYDYLMYVDYDMDHPEVVNELRNWGVWYTNTLGLDGFRIDAVKHIKYSFTRDWINHVRSATGKNMFAVAEFWKNDLGAIENYLQKTNWNHSVFDVPLHYNLYNASKSGGNYDMRNIFNGTVVQRHPSHAVTFVDNHDSQPEEALESFVDEWFKPLAYALTLTREQGYPSVFYGDYYGIPTHGVPAMRSKIDPILEARQKYAYGPQHDYVDHPDVIGWKREGDSSHPKSGLATLITDGPGGSKRMYAGLKNAGETWYDITGNRSDTVKIGSDGWGEFHVNDGSVSIYVQK

SEQ ID NO: 29947 - protein, 485 aa, Bacillus sp.
HHNGTNGTMMQYFEWYLPNDGNHWNRLNSDASNLKSKGITAVWIPPAWKAVSQNDVGYGAYDLYDLGEFNQKGTVRTKYGTRSQLQAAVTSLKNNGIQVYGDVVMNHKGGADATEMVRAVEVNPNNRNQEVTGEYTIEAWTRFDFPGRGNTHSSFKWRWYHFDGVDWDQSRDLENRIYKFRGHGKAWDWEVDTEFGNYDYLMYADYDMDHPEVVNELRNWGVWYTNTLGLDGFRIDAVKHIKYSFTRDWINHVRSATGKNMFAVAEFWKNDLGAIENYLQKTNWNHSVFDVPLHYNLYNASQSGGNYDMRNIFNGTVVQRHPSHAVTFVDNHDSQPEEALESFVEPWFKPLAYALTLTREQGYPSVFYGDYYGIPTHGVPAMRSKIDPILEARQKYAYGPQHDYLDHPDVIGWTREGDSSHPKSGLATLITDGPGGSKRMYAGLKNAGETWYDITGNRSDTVKIGSDGWGEFHVNKSSVSIYVQK

SEQ ID NO: 29948 - protein, 483 aa, Bacillus sp.
HHNGTNGTMMQYFEWYLPNDGNHWNRLNSDASNLKSKGITAVWIPPAWKAVSQNDVGYGAYDLYDLGEFNQKGTVRTKYGTRSQLQAAVTSLKNNGIQVYGDVVMNHKGGADATEMVRAVEVNPNNRNQEVTGEYTIEAWTRFDFPGRGNTHSSFKWRWYHFDGVDWDQSRDLENRIYKFRGKAWDWEVDTEFGNYDYLMYADYDMDHPEVVNELRNWGVWYTNTLGLDGFRIDAVKHIKYSFTRDWINHVRSATGKNMFAVAEFWKNDLGAIENYLQKTNWNHSVFDVPLHYNLYNASKSGGNYDMRNIFNGTVVQRHPSHAVTFVDNHDSQPEEALESFVETWFKPLAYALTLTREQGYPSVFYGDYYGIPTHGVPAMRSKIDPILEARQKYAYGPQHDYLDHPDVIGWTREGDSSHPKSGLATLITDGPGGSKRMYAGLKNAGETWYDITGNRSDTVKIGSDGWGEFHVNKASVSIYVQK

SEQ ID NO: 29949 - protein, 483 aa, Bacillus sp.
HHNGTNGTMMQYFEWYLPNDGNHWNRLNSDASNLKSKGITAVWIPPAWKGASQNDVGYGAYDLYDLGEFNQKGTVRTKYGTRSQLQAAVTSLKNNGIQVYGDVVMNHKGGADATEMVRAVEVNPNNRNQEVTGEYTIEAWTRFDFPGRGNTHSSFKWRWYHFDGVDWDQSRRLNNRIYKFRGKAWDWEVDTEFGNYDYLMYADYDMDHPEVVNELRNWGVWYTNTLGLDGFRIDAVKHIKYSFTRDWINHVRSATGKNMFAVAEFWKNDLGAIENYLQKTNWNHSVFDVPLHYNLYNASKSSGNYDMRNIFNGTVVQRHPSHAVTFVDNHDSQPEEALESFVDTWFKPLAYALTLTREQGYPSVFYGDYYGIPTHGVPAMRSKIDPILEARQKYAYGPQHDYLDHPDVIGWTREGDSSHPKSGLATLITDGPGGSKRMYAGLKNAGETWYDITGNRSDTVKIGSDGWGEFHVNQQSVSIYVQK

SEQ ID NO: 29950 - protein, 483 aa, Bacillus sp.
HHNGTNGTMMQYFEWYLPNDGNHWNRLNSDASNLKSKGITAVWIPPAWKGASQNDVGYGAYDLYDLGEFNQKGTVRTKYGTRSQLQAAVTSLKNNGIQVYGDVVMNHKGGADATEMVRAVEVNPNNRNQEVTGEYTIEAWTRFDFPGRGNTHSSFKWRWYHFDGVDWDQSRRLNNRIYKFRGKAWDWEVDTEFGNYDYLMYADYDMDHPEVVNELRNWGVWYTNTLGLDGFRIDAVKHIKYSFTRDWINHVRSATGKNMFAVAEFWKNDLGAIENYLQKTNWNHSVFDVPLHYNLYNASKSAGNYDMRNIFNGTVVQRHPSHAVTFVDNHDSQPEEALESFVDTWFKPLAYALTLTREQGYPSVFYGDYYGIPTHGVPAMRSKIDPILEARQKYAYGPQHDYLDHPDVIGWTREGDSSHPKSGLATLITDGPGGSKRMYAGLKNAGETWYDITGNRSDTVKIGSDGWGEFHVNQKSVSIYVQK

SEQ ID NO: 29951 - protein, 483 aa, Synthetic construct
HHNGTNGTMMQYFEWYLPNDGNHWNRLNSDASNLKSKGITAVWIPPAWKGASQNDVGYGAYDLYDLGEFNQKGTVRTKYGTRSQLQAAVTSLKNNGIQVYGDVVMNHKGGADATEMVRAVEVNPNNRNQEVTGEYTIEAWTRFDFPGRGNTHSSFKWRWYHFDGVDWDQSRRLNNRIYKFRGKEWDWEVDTEFGNYDYLMYTDYDMDSPEVVNELRNWGVWYTNTLGLDGFRIDAVKHIKYSFTRDWINHVRSATGKNMFAVAEFWKNDLGAIENYLQKTNWNHSVFDVPLHYNLYNASKSGGNYDMRNIFNGTVVQRHPSHAVTFVDNHDSQPEEALESFVEEWFKPLAYALTLTREQGYPSVFYGDYYGIPTHGVPAMRSKIDPILEARQKYAYGPQHDYLDHPDVIGWTREGDSSHPKSGLATLITDGPGGSKRMYAGLKNAGETWYDITGNRSDTVKIGSDGWGEFHVNDGSVSIYVQK

SEQ ID NO: 29952 - protein, 483 aa, Synthetic construct
HHNGTNGTMMQYFEWYLPNDGNHWNRLNSDASNLKSKGITAVWIPPAWKGASQNDVGYGAYDLYDLGEFNQKGTVRTKYGTRSQLQAAVTSLKNNGIQVYGDVVMNHKGGADATEMVRAVEVNPNNRNQEVTGEYTIEAWTRFDFPGRGNTHSSFKWRWYHFDGVDWDQSRRLNNRIYLFRPKSWDWPVDTENGNYDYLMYADIDMDHPEVVNELRNWGVWYTNTLGLDGFRIDAVKHIKYSFTRDWINHVRSATGKNMFAVAEFWKNDLGAIENYLQKTNWNHSVFDVPLHYNLYNASKSGGNYDMRNIFNGTVVQRHPSHAVTFVDNHDSQPEEALESFVEEWFKPLAYALTLTREQGYPSVFYGDYYGIPTHGVPAMRSKIDPILEARQKYAYGPQHDYLDHPDVIGWTREGDSSHPKSGLATLITDGPGGSKRMYAGLKNAGETWYDITGNRSDTVKIGSDGWGEFHVNDGSVSIYVQK

SEQ ID NO: 29953 - protein, 485 aa, Bacillus sp.
HHNGTNGTMMQYFEWYLPNDGNHWNRLNSDASNLKSKGITAVWIPPAWKAASQNDVGYGAYDLYDLGEFNQKGTVRTKYGTRSQLQAAVTSLKNNGIQVYGDVVMNHKGGADATEMVRAVEVNPNNRNQEVTGEYTIEAWTRFDFPGRGNTHSSFKWRWYHFDGVDWDQSRDLDNRIYKFRGHGKAWDWEVDTEFGNYDYLMYADYDMDHPEVVNELRNWGVWYTNTLGLDGFRIDAVKHIKYSFTRDWINHVRSATGKNMFAVAEFWKNDLGAIENYLQKTNWNHSVFDVPLHYNLYNASKSQGNYDMRNIFNGTVVQRHPSHAVTFVDNHDSQPEEALESFVDTWFKPLAYALTLTREQGYPSVFYGDYYGIPTHGVPAMRSKIDPILEARQKYAYGPQHDYLDHPDVIGWTREGDSSHPKSGLATLITDGPGGSKRMYAGLKNAGETWYDITGNRSDTVKIGSDGWGEFHVNGSSVSIYVQK

SEQ ID NO: 29954 - protein, 483 aa, Bacillus sp.
HHNGTNGTMMQYFEWYLPNDGNHWNRLNSDASNLKSKGIKAVWIPPAWKGTSQNDVGYGAYDLYDLGEFNQKGTVRTKYGTRSQLQAAVTSLKNNGIQVYGDVVMNHKGGADATEMVRAVEVNPNNRNQEVTGEYTIEAWTRFDFPGRGNTHSSFKWRWYHFDGVDWDQSRNLNNRIYKFRGKAWDWEVDTEFGNYDYLMYVDYDMDHPEVVNELRNWGVWYTNTLGLDGFRIDAVKHIKYSFTRDWINHVRSATGKNMFAVAEFWKNDLGAIENYLQKTNWNHSVFDVPLHYNLYNASKSQGNYDMRNIFNGTVVQRHPSHAVTFVDNHDSQPEEALESFVDTWFKPLAYALTLTREQGYPSVFYGDYYGIPTHGVPAMRSKIDPILEARQKYAYGPQHDYLDHPDVIGWTREGDSSHPKSGLATLITDGPGGSKRMYAGLKNAGETWYDITGNRSDTVKIGSDGWGEFHVNGSSVSIYVQK

SEQ ID NO: 29955 - protein, 485 aa, Bacillus sp.
HHNGTNGTMMQYFEWYLPNDGNHWNRLNSDASNLKSKGITAVWIPPAWKGASQNDVGYGAYDLYDLGEFNQKGTVRTKYGTRSQLQAAVTSLKNNGIQVYGDVVMNHKGGADATEMVRAVEVNPNNRNQEVTGEYTIEAWTRFDFPGRGNTHSSFKWRWYHFDGVDWDQSRRLNNRIYKFRGHGKAWDWEVDTEFGNYDYLMYADYDMDHPEVVNELRNWGVWYTNTLGLDGFRIDAVKHIKYSFTRDWINHVRSATGKNMFAVAEFWKNDLGAIENYLQKTNWNHSVFDVPLHYNLYNASKSQGNYDMRNIFNGTVVQRHPSHAVTFVDNHDSQPEEALESFVDTWFKPLAYALTLTREQGYPSVFYGDYYGIPTHGVPAMRSKIDPILEARQKYAYGPQHDYLDHPDVIGWTREGDSSHPKSGLATLITDGPGGSKRMYAGLKNAGETWYDITGNRSDTVKIGSDGWGEFHVNQTSVSIYVQK

SEQ ID NO: 29956 - protein, 485 aa, Bacillus sp.
HHNGTNGTMMQYFEWYLPNDGNHWNRLNSDASNLKSKGITAVWIPPAWKGASQNDVGYGAYDLYDLGEFNQKGTVRTKYGTRSQLQAAVTSLKNNGIQVYGDVVMNHKGGADTTEMVRAVEVNPNNRNQEVTGEYTIEAWTRFDFPGRGNTHSSFKWRWYHFDGVDWDQSRRLNNRIYKFRGHGKAWDWEVDTEFGNYDYLMYADYDMDHPEVVNELRNWGVWYTNTLGLDGFRIDAVKHIKYSFTRDWINHVRSATGKNMFAVAEFWKNDLGAIENYLQKTNWNHSVFDVPLHYNLYNASKSSGNYDMRNIFNGTVVQRHPSHAVTFVDNHDSQPEEALESFVDPWFKPLAYALTLTREQGYPSVFYGDYYGIPTHGVPAMRSKIDPILEARQKYAYGPQHDYLDHPDVIGWTREGDSSHPKSGLATLITDGPGGSKRMYAGLKNAGETWYDITGNRSDTVKIGSDGWGEFHVNGQSVSIYVQK

SEQ ID NO: 29957 - protein, 485 aa, Bacillus sp.
HHNGTNGTMMQYFEWYLPNDGNHWNRLNSDASNLKSKGITAVWIPPAWKGASQNDVGYGAYDLYDLGEFNQKGTVRTKYGTRSQLQAAVTSLKNNGIQVYGDVVMNHKGGADATEMVRAVEVNPNNRNQEVTGEYTIEAWTRFDFPGRGNTHSSFKWRWYHFDGVDWDQSRRLNNRIYKFRGHGKAWDWEVDTEFGNYDYLMYADYDMDHPEVVNELRNWGVWYTNTLGLDGFRIDAVKHIKYSFTRDWINHVRSATGKNMFAVAEFWKNDLGAIENYLQKTNWNHSVFDVPLHYNLYNASKSGSNYDMRNIFNGTVVQRHPSHAVTFVDNHDSQPEEALESFVETWFKPLAYALTLTREQGYPSVFYGDYYGIPTHGVPAMRSKIDPILEARQKYAYGPQHDYLDHPDVIGWTREGDSSHPKSGLATLITDGPGGSKRMYAGLKNAGETWYDITGNRSDTVKIGSDGWGEFHVNKKSVSIYVQK

SEQ ID NO: 29958 - protein, 483 aa, Bacillus sp.
HHNGTNGTMMQYFEWYLPNDGNHWNRLNSDASNLKSKGITAVWIPPAWKGASQNDVGYGAYDLYDLGEFNQKGTVRTKYGTRSQLQAAVTSLKNNGIQVYGDVVMNHKGGADATEMVRAVEVNPNNRNQEVTGEYTIEAWTRFDFPGRGNTHSSFKWRWYHFDGVDWDQSRELDNRIYKFRGKAWDWEVDTEFGNYDYLMYTDYDMDHPEVVNELRNWGVWYTNTLGLDGFRIDAVKHIKYSFTRDWINHVRSATGKNMFAVAEFWKNDLGAIENYLQKTNWNHSVFDVPLHYNLYNASKSQGNYDMRNIFNGTVVQAHPNHAVTFVDNHDSQPEEALESFVDTWFKPLAYALTLTREQGYPSVFYGDYYGIPTHGVPAMRSKIDPILEARQKYAYGPQHDYLDHPDVIGWTREGDSSHPKSGLATLITDGPGGSKRMYAGLKNAGETWYDITGNRSDTVKIGSDGWGEFHVNGSSVSIYVQK

SEQ ID NO: 29959 - protein, 483 aa, Bacillus sp.
HHNGTNGTMMQYFEWYLPNDGNHWNRLNSDASNLKSKGITAVWIPPAWKGASQNDVGYGAYDLYDLGEFNQKGTVRTKYGTRSQLQAAVTSLKNNGIQVYGDVVMNHKGGADATEMVRAVEVNPNNRNQEVTGEYTIEAWTRFDFPGRGNTHSSFKWRWYHFDGVDWDQSRRLNNRIYKFRGKAWDWEVDTENGFYDYLMYADIDMDYPEVVTTLRVWGVWYTNTLGLDGFRIDAVKHIKYSFTRDWINHVRSATGKNMFAVAEFWKNDLGAIENYLQKTNWNHSVFDVPLHYNLYNASKSGGNYDMRNIFNGTVVQRHPSHAVTFVDNHDSQPEEALESFVEEWFKPLAYALTLTREQGYPSVFYGDYYGIPTHGVPAMRSKIDPILEARQKYAYGPQHDYLDHPDVIGWTREGDSSHPKSGLATLITDGPGGSKRMYAGLKNAGETWYDITGNRSDTVKIGSDGWGEFHVNDGSVSIYVQK

SEQ ID NO: 29960 - protein, 485 aa, Bacillus sp.
HHNGTNGTMMQYFEWYLPNDGNHWNRLNSDASNLKSKGITAVWIPPAWKGASQNDVGYGAYDLYDLGEFNQKGTVRTKYGTRSQLQAAVTSLKNNGIQVYGDVVMNHKGGADATEMVRAVEVNPNNRNQEVTGEYTIEAWTRFDFPGRGNTHSSFKWRWYHFDGVDWDQSRRLNNRIYKFRGHGKAWDWEVDTEFGNYDYLMYADYDMDHPEVVNELRNWGVWYTNTLGLDGFRIDAVKHIKYSFTRDWINHVRSATGKNMFAVAEFWKNDLGAIENYLQKTNWNHSVFDVPLHYNLYNASKSAGNYDMRNIFNGTVVQRHPSHAVTFVDNHDSQPEEALESFVEPWFKPLAYALTLTREQGYPSVFYGDYYGIPTHGVPAMRSKIDPILEARQKYAYGPQHDYLDHPDVIGWTREGDSSHPKSGLATLITDGPGGSKRMYAGLKNAGETWYDITGNRSDTVKIGSDGWGEFHVNQTSVSIYVQK

SEQ ID NO: 29961 - protein, 483 aa, Bacillus sp.
HHNGTNGTMMQYFEWYLPNDGNHWNRLNSDASNLKSKGITAVWIPPAWKGASQNDVGYGAYDLYDLGEFNQKGTVRTKYGTRSQLQAAVTSLKNNGIQVYGDVVMNHKGGADATEMVRAVEVNPNNRNQEVTGEYTIEAWTRFDFPGRGNTHSSFKWRWYHFDGVDWDQSRRLNNRIYKFRGKAWDWEVDTEFGNYDYLMYADYDMDHPEVVNELRNWGVWYTNTLGLDGFRIDAVKHIKYSFTRDWINHVRSATGKNMFAVAEFWKNDLGAIENYLQKTNWNHSVFDVPLHYNLYNASKSSGNYDMRNIFNGTVVQRHPSHAVTFVDNHDSQPEEALESFVEPWFKPLAYALTLTREQGYPSVFYGDYYGIPTHGVPAMRSKIDPILEARQKYAYGPQHDYLDHPDVIGWTREGDSSHPKSGLATLITDGPGGSKRMYAGLKNAGETWYDITGNRSDTVKIGSDGWGEFHVNKKSVSIYVQK

SEQ ID NO: 29962 - protein, 485 aa, Bacillus sp.
HHNGTNGTMMQYFEWYLPNDGNHWNRLNSDASNLKSKGITAVWIPPAWKGTSQNDVGYGAYDLYDLGEFNQKGTVRTKYGTRSQLQAAVTSLKNNGIQVYGDVVMNHKGGADATEMVRAVEVNPNNRNQEVTGEYTIEAWTRFDFPGRGNTHSSFKWRWYHFDGVDFDQSRNLNNRIYKFRGHGKAWDWEVDTEFGNYDYLMYVDYDMDHPEVVNELRNWGVWYTNTLGLDGFRIDAVKHIKYSFTRDWINHVRSATGKNMFAVAEFWKNDLGAIENYLQKTNWNHSVFDVPLHYNLYNASKSQGNYDMRNIFNGTVVQRHPSHAVTFVDNHDSQPEEALESFVDTWFKPLAYALTLTREQGYPSVFYGDYYGIPTHGVPAMRSKIDPILEARQKYAYGPQHDYLDHPDVIGWTREGDSSHPKSGLATLITDGPGGSKRMYAGLKNAGETWYDITGNRSDTVKIGSDGWGEFHVNDGSVSIYVQK

SEQ ID NO: 29963 - protein, 485 aa, Bacillus sp.
HHNGTNGTMMQYFEWYLPNDGNHWNRLNSDASNLKSKGITAVWIPPAWKAVSQNDVGYGAYDLYDLGEFNQKGTVRTKYGTRSQLQAAVTSLKNNGIQVYGDVVMNHKGGADATEMVRAVEVNPNNRNQEVTGEYTIEAYTRFDFPGRGNTHSSFKWRWYHFDGVDWDQSRNLTNRIYKFRGHGKAWDWEVDTEFGNYDYLMYTDYDMDHPEVVNELRNWGVWYTNTLGLDGFRIDAVKHIKYSFTRDWINHVRSATGKNMFAVAEFWKNDLGAIENYLQKTNWNHSVFDVPLHYNLYNASKSGGNYDMRNIFNGTVVQRHPSHAVTFVDNHDSQPEEALESFVEEWFKPLAYALTLTREQGYPSVFYGDYYGIPTHGVPAMRSKIDPILEARQKYAYGPQHDYLDHPDVIGWTREGDSSHPKSGLATLITDGPGGSKRMYAGLKNAGETWYDITGNRSDTVKIGSDGWGEFHVNDGSVSIYVQK

SEQ ID NO: 29964 - protein, 483 aa, Bacillus sp.
HHNGTNGTMMQYFEWYLPNDGNHWNRLNSDASNLKSKGITAVWIPPAWKGASQNDVGYGAYDLYDLGEFNQKGTVRTKYGTRSQLQAAVTSLKNNGIQVYGDVVMNHKGGADLTEMVDAVEVNPNNRNQEVTGEYTIEAWTRFDFPGRGNTHSSFKWRWYHFDGVDFDQSRRLNNRIYKFRGKAWDWEVDTEFGNYDYLMYADYDMDHPEVVNELRNWGVWYTNTLGLDGFRIDAVKHIKYSFTRDWINHVRIATGKNMFAVAEFWKNDLGAIENYLQKTNWNHSVFDVPLHYNLYNASKSGGNYDMRNIFNGTVVQRHPSHAVTFVDNHDSQPEEALESFVDEWFKPLAYALTLTREQGYPSVFYGDYYGIPTHGVPAMRSKIDPILEARQKYAYGPQHDYLDHPDVIGWTREGDSSHPKSGLATLITDGPGGSKRMYAGLKNAGETWYDITGNRSDTVKIGSDGWGEFHVNDQSVSIYVQK

SEQ ID NO: 29965 - protein, 485 aa, Bacillus sp.
HHNGTNGTMMQYFEWYLPNDGNHWNRLNSDASNLKSKGITAVWIPPAWKATSQNDVGYGAYDLYDLGEFNQKGTVRTKYGTRSQLQAAVTSLKNNGIQVYGDVVMNHKGGADATEMVRAVEVNPNNRNQEVTGEYTIEAWTRFDFPGRGNTHSSFKWRWYHFDGVDWDQSRELSNRIYKFRGHGKAWDWEVDTEFGNYDYLMYADYDMDHPEVVNELRNWGVWYTNTLGLDGFRIDAVKHIKYSFTRDWINHVRSATGKNMFAVAEFWKNDLGAIENYLQKTNWNHSVFDVPLHYNLYNASKSQGNYDMRNIFNGTVVQANPNHAVTFVDNHDSQPEEALESFVDTWFKPLAYALTLTREQGYPSVFYGDYYGIPTHGVPAMRSKIDPILEARQKYAYGPQHDYLDHPDVIGWTREGDSSHPKSGLATLITDGPGGSKRMYAGLKNAGETWYDITGNRSDTVKIGSDGWGEFHVNGSSVSIYVQK

SEQ ID NO: 29966 - protein, 485 aa, Bacillus sp.
HHNGTNGTMMQYFEWYLPNDGNHWNRLNSDASNLKSKGITAVWIPPAWKAASQNDVGYGAYDLYDLGEFNQKGTVRTKYGTRSQLQAAVTSLKNNGIQVYGDVVMNHKGGADATEMVRAVEVNPNNRNQEVTGEYTIEAYTRFDFPGRGNTHSSFKWRWYHFDGVDWDQSRNLNNRIYKFRGHGKAWDWEVDTEFGNYDYLMYTDYDMDHPEVVNELRNWGVWYTNTLGLDGFRIDAVKHIKYSFTRDWINHVRSATGKNMFAVAEFWKNDLGAIENYLQKTNWNHSVFDVPLHYNLYNASKSGGNYDMRNIFNGTVVQRHPSHAVTFVDNHDSQPEEALESFVEEWFKPLAYALTLTREQGYPSVFYGDYYGIPTHGVPAMRSKIDPILEARQKYAYGPQHDYLDHPDVIGWTREGDSSHPKSGLATLITDGPGGSKRMYAGLKNAGETWYDITGNRSDTVKIGSDGWGEFHVNDGSVSIYVQK

SEQ ID NO: 29967 - protein, 483 aa, Bacillus sp.
HHNGTNGTMMQYFEWYLPNDGNHWNRLNSDASNLKSKGITAVWIPPAWKGASQNDVGYGAYDLYDLGEFNQKGTVRTKYGTRSQLQAAVTSLKNNGIQVYGDVVMNHKGGADATEMVRAVEVNPNNRNQEVTGEYTIEAWTRFDFPGRGNTHSSFKWRWYHFDGVDWDQSRRLNNRIYKFRGKAWDWEVDTEFGNYDYLMYADYDMDHPEVVNELRNWGVWYTNTLGLDGFRIDAVKHIKYSFTRDWINHVRSATGKNMFAVAEFWKNDLGAIENYLQKTNWNHSVFDVPLHYNLYNASKSGSNYDMRNIFNGTVVQRHPSHAVTFVDNHDSQPEEALESFVEPWFKPLAYALTLTREQGYPSVFYGDYYGIPTHGVPAMRSKIDPILEARQKYAYGPQHDYLDHPDVIGWTREGDSSHPKSGLATLITDGPGGSKRMYAGLKNAGETWYDITGNRSDTVKIGSDGWGEFHVNKQSVSIYVQK

SEQ ID NO: 29968 - protein, 485 aa, Bacillus sp.
HHNGTNGTMMQYFEWYLPNDGNHWNRLNSDASNLKSKGITAVWIPPAWKGASQNDVGYGAYDLYDLGEFNQKGTVRTKYGTRSQLQAAVTSLKNNGIQVYGDVVMNHKGGADATEMVRAVEVNPNNRNQEVTGEYTIEAWTRFDFPGRGNTHSSFKWRWYHFDGVDWDQSRRLNNRIYKFRGHGKAWDWEVDTEFGNYDYLMYADYDMDHPEVVNELRNWGVWYTNTLGLDGFRIDAVKHIKYSFTRDWINHVRSATGKNMFAVAEFWKNDLGAIENYLQKTNWNHSVFDVPLHYNLYNASKSQGNYDMRNIFNGTVVQRHPSHAVTFVDNHDSQPEEALESFVEPWFKPLAYALTLTREQGYPSVFYGDYYGIPTHGVPAMRSKIDPILEARQKYAYGPQHDYLDHPDVIGWTREGDSSHPKSGLATLITDGPGGSKRMYAGLKNAGETWYDITGNRSDTVKIGSDGWGEFHVNKASVSIYVQK

SEQ ID NO: 29969 - protein, 483 aa, Bacillus sp.
HHNGTNGTMMQYFEWYLPNDGNHWNRLNSDASNLKSKGITAVWIPPAWKGASQNDVGYGAYDLYDLGEFNQKGTVRTKYGTRSQLQAAVTSLKNNGIQVYGDVVMNHKGGADATEMVRAVEVNPNNRNQEVTGEYTIEAWTRFDFPGRGNTHSSFKWRWYHFDGVDWDQSRRLNNRIYKFRGKAWDWEVDTENGFYDYLMYADIDYDHPEVVPTLRNWGVWYTNTLGLDGFRIDAVKHIKYSFTRDWINHVRSATGKNMFAVAEFWKNDLGAIENYLQKTNWNHSVFDVPLHYNLYNASKSGGNYDMRNIFNGTVVQRHPSHAVTFVDNHDSQPEEALESFVEEWFKPLAYALTLTREQGYPSVFYGDYYGIPTHGVPAMRSKIDPILEARQKYAYGPQHDYLDHPDVIGWTREGDSSHPKSGLATLITDGPGGSKRMYAGLKNAGETWYDITGNRSDTVKIGSDGWGEFHVNDGSVSIYVQK

SEQ ID NO: 29970 - protein, 483 aa, Synthetic construct
HHNGTNGTMMQYFEWYLPNDGNHWNRLNSDASNLKSKGITAVWIPPAWKGASQNDVGYGAYDLYDLGEFNQKGTVRTKYGTRSQLQAAVTSLKNNGIQVYGDVVMNHKGGADATEMVRAVEVNPNNRNQEVTGEYTIEAWTRFDFPGRGNTHSSFKWRWYHFDGVDWDQSRRLNNRIYLFRCKKWDWPVDTENGNYDYLMYADIDMDHPEVVNELRNWGVWYTNTLGLDGFRIDAVKHIKYSFTRDWINHVRSATGKNMFAVAEFWKNDLGAIENYLQKTNWNHSVFDVPLHYNLYNASKSGGNYDMRNIFNGTVVQRHPSHAVTFVDNHDSQPEEALESFVEEWFKPLAYALTLTREQGYPSVFYGDYYGIPTHGVPAMRSKIDPILEARQKYAYGPQHDYLDHPDVIGWTREGDSSHPKSGLATLITDGPGGSKRMYAGLKNAGETWYDITGNRSDTVKIGSDGWGEFHVNDGSVSIYVQK

SEQ ID NO: 29971 - protein, 483 aa, Bacillus sp.
HHNGTNGTMMQYFEWYLPNDGNHWNRLNSDASNLKSKGIKAVWIPPAWKGASQNDVGYGAYDLYDLGEFNQKGTVRTKYGTRSQLQAAVTSLKNNGIQVYGDVVMNHKGGADATEMVRAVEVNPNNRNQEVTGEYTIEAWTRFDFPGRGNTHSSFKWRWYHFDGVDFDQSRRTNNRIYKFRGKAWDWEVDTEFGNYDYLMYTDYDMDHPEVVNELRNWGVWYTNTLGLDGFRIDAVKHIKYSFTRDWINHVRSATGKNMFAVAEFWKNDLGAIENYLQKTNWNHSVFDVPLHYNLYNASKSGGNYDMRNIFNGTVVQRHPSHAVTFVDNHDSQPEEALESFVEEWFKPLAYALTLTREQGYPSVFYGDYYGIPTHGVPAMRSKIDPILEARQKYAYGPQHDYLDHPDVIGWTREGDSSHPKSGLATLITDGPGGSKRMYAGLKNAGETWYDITGNRSDTVKIGSDGWGEFHVNDGSVSIYVQK

SEQ ID NO: 29972 - protein, 483 aa, Bacillus sp.
HHNGTNGTMMQYFEWYLPNDGNHWNRLNSDASNLKSKGITAVWIPPAWKGTSQNDVGYGAYDLYDLGEFNQKGTVRTKYGTRSQLQAAVTSLKNNGIQVYGDVVMNHKGGADATEMVRAVEVNPNNRNQEVTGEYTIEAWTRFDFPGRGNTHSSFKWRWYHFDGVDWDQSRNLNNRIYKFRGKAWDWEVDTEFGNYDYLMYVDYDMDHPEVVNELRNWGVWYTNTLGLDGFRIDAVKHIKYSFTRDWINHVRSATGKNMFAVAEFWKNDLGAIENYLQKTNWNHSVFDVPLHYNLYNASKSQGNYDMRNIFNGTVVQRHPSHAVTFVDNHDSQPEEALESFVDTWFKPLAYALTLTREQGYPSVFYGDYYGIPTHGVPAMRSKIDPILLARQKYAYGPQHDYLDHPDVIGWTREGDSSHPKSGLATLITDGPGGSKRMYAGLKNAGETWYDITGNRSDTVKIGSDGWGEFHVNGSSVSIYVQK

SEQ ID NO: 29973 - protein, 485 aa, Bacillus sp.
HHNGTNGTMMQYFEWYLPNDGNHWNRLNSDASNLKSKGIKAVWIPPAWKGASQNDVGYGAYDLYDLGEFNQRGTVRTKYGTRSQLQAAVTSLKNNGIQVYGDVVMNHKGGADATEMVRAVEVNPNNRNQEVTGEYTIEAWTRFDFPGRGNTHSSFKWRWYHFDGVDFDQSRRLNNRIYKFRGHGKAWDWEVDTEFGNYDYLMYADYDMDHPEVVNELRNWGVWYTNTLGLDGFRIDAVKHIKYSFTRDWINHVRSATGKNMFAVAEFWKNDLGAIENYLQKTNWNHSVFDVPLHYNLYNASKSGGNYDMRNIFNGTVVQVHPSHAVTFVDNHDSQPEEALESFVEEWFKPLAYALTLTREQGYPSVFYGDYYGIPTHGVPAMRSKIDPILEARQKYAYGPQHDYLDHPDVIGWTREGDSSHPKSGLATLITDGPGGSKRMYAGLKNAGETWYDITGNRSDTVKIGSDGWGEFHVNYGSVSIYVQK

SEQ ID NO: 29974 - protein, 483 aa, Bacillus sp.
HHNGTNGTMMQYFEWYLPNDGNHWNRLNSDASNLKSKGITAVWIPPAWKGASQNDVGYGAYDLYDLGEFNQKGTVRTKYGTRSQLQAAVTSLKNNGIQVYGDVVMNHKGGADATEMVRAVEVNPNNRNQEVTGEYTIEAWTRFDFPGRGNTHSSFKWRWYHFDGVDWDQSRRLNNRIYKFRGKAWDWEVDTEFGNYDYLMYADYDMDHPEVVNELRNWGVWYTNTLGLDGFRIDAVKHIKYSFTRDWINHVRSATGKNMFAVAEFWKNDLGAIENYLQKTNWNHSVFDVPLHYNLYNASKSGNNYDMRNIFNGTVVQRHPSHAVTFVDNHDSQPEEALESFVEPWFKPLAYALTLTREQGYPSVFYGDYYGIPTHGVPAMRSKIDPILEARQKYAYGPQHDYLDHPDVIGWTREGDSSHPKSGLATLITDGPGGSKRMYAGLKNAGETWYDITGNRSDTVKIGSDGWGEFHVNKTSVSIYVQK

SEQ ID NO: 29975 - protein, 483 aa, Bacillus sp.
HHNGTNGTMMQYFEWYLPNDGNHWNRLNSDASNLKSKGITAVWIPPAWKAASQNDVGYGAYDLYDLGEFNQKGTVRTKYGTRSQLQAAVTSLKNNGIQVYGDVVMNHKGGADATEMVRAVEVNPNNRNQEVTGEYTIEAWTRFDFPGRGNTHSSFKWRWYHFDGVDWDQSRDLDNRIYKFRGKAWDWEVDTEFGNYDYLMYADYDMDHPEVVNELRNWGVWYTNTLGLDGFRIDAVKHIKYSFTRDWINHVRSATGKNMFAVAEFWKNDLGAIENYLQKTNWNHSVFDVPLHYNLYNASKSQGNYDMRNIFNGTVVQRHPSHAVTFVDNHDSQPEEALESFVDTWFKPLAYALTLTREQGYPSVFYGDYYGIPTHGVPAMRSKIDPILEARQKYAYGPQHDYLDHPDVIGWTREGDSSHPKSGLATLITDGPGGSKRMYAGLKNAGETWYDITGNRSDTVKIGSDGWGEFHVNGSSVSIYVQK

SEQ ID NO: 29976 - protein, 483 aa, Bacillus sp.
HHNGTNGTMMQYFEWYLPNDGNHWNRLNSDASNLKSKGITAVWIPPAWKATSQNDVGYGAYDLYDLGEFNQKGTVRTKYGTRSQLQAAVTSLKNNGIQVYGDVVMNHKGGADATEMVRAVEVNPNNRNQEVTGEYTIEAWTRFDFPGRGNTHSSFKWRWYHFDGVDWDQSRELNNRIYKFRGKAWDWEVDTEFGNYDYLMYTDYDMDHPEVVNELRNWGVWYTNTLGLDGFRIDAVKHIKYSFTRDWINHVRSATGKNMFAVAEFWKNDLGAIENYLQKTNWNHSVFDVPLHYNLYNASKSGGNYDMRNIFNGTVVQRHPSHAVTFVDNHDSQPEEALESFVETWFKPLAYALTLTREQGYPSVFYGDYYGIPTHGVPAMRSKIDPILEARQKYAYGPQHDYLDHPDVIGWTREGDSSHPKSGLATLITDGPGGSKRMYAGLKNAGETWYDITGNRSDTVKIGSDGWGEFHVNKASVSIYVQK

SEQ ID NO: 29977 - protein, 483 aa, Bacillus sp.
HHNGTNGTMMQYFEWYLPNDGNHWNRLNSDASNLKSKGITAVWIPPAWKAASQNDVGYGAYDLYDLGEFNQKGTVRTKYGTRSQLQAAVTSLKNNGIQVYGDVVMNHKGGADATEMVRAVEVNPNNRNQEVTGEYTIEAWTRFDFPGRGNTHSSFKWRWYHFDGVDWDQSRNLTNRIYKFRGKAWDWEVDTEFGNYDYLMYADYDMDHPEVVNELRNWGVWYTNTLGLDGFRIDAVKHIKYSFTRDWINHVRSATGKNMFAVAEFWKNDLGAIENYLQKTNWNHSVFDVPLHYNLYNASKSGGNYDMRNIFNGTVVQRHPSHAVTFVDNHDSQPEEALESFVETWFKPLAYALTLTREQGYPSVFYGDYYGIPTHGVPAMRSKIDPILEARQKYAYGPQHDYLDHPDVIGWTREGDSSHPKSGLATLITDGPGGSKRMYAGLKNAGETWYDITGNRSDTVKIGSDGWGEFHVNKASVSIYVQK

SEQ ID NO: 29978 - protein, 485 aa, Bacillus sp.
HHNGTNQTMMQYFEWYLPNDGNHWNRLNSDASNLKSKGITAVWIPPAWKGASQNDVGYGAYDLYDLGEFNQKGTVRTKYGTRSQLQAAVTSLKNNGISVYGDVVMNHKGGADATEMVRAVEVNPNNRNQEVTGEYTIEAWTRFDFPGRGNTHSSFKWRWYHFDGVDWDQSRRLNNRIYKFRGHGKAWDWEVDTEFGNYDYLMYADYDMDHPEVVNELRNWGVWYTNTLGLDGFRIDAVKHIKYSFTRDWINHVRSATGKNMFAVAEFWKNDLGAIENYLQKTNWNHSVFDVPLHYNLYNASKSGGNYDMRNIFNGTVVQSHPSQAVTFVDNHDSQPEEALESFVEEWFKPLAYALTLTREQGYPSVFYGDYYGIPTHGVPAMRSKIDPILEARQKYAYGPQHDYLDHPDVIGWTREGDSSHPKSGLATLITDGPGGSKRMYAGLKNAGETWYDITGNRSDTVKIGSDGWGEFHVNDGSVSIYVQK

SEQ ID NO: 29979 - protein, 483 aa, Bacillus sp.
HHNGTNGTMMQYFEWYLPNDGNHWNRLNSDASNLKSKGIKAVWIPPAWKGASQNDVGYGAYDLYDLGEFNQRGTVRTKYGTRSQLQAAVTSLKNNGIQVYGDVVMNHKGGADATEMVDAVEVNPNNRNQEVTGEYTIEAWTRFDFPGRGNTHSSFKWRWYHFDGVDFDQSRRLNNRIYKFRGKAWDWEVDTEFGNYDYLMYADYDMDHPEVVNELRNWGVWYTNTLGLDGFRIDAVKHIKYSFTRDWINHVRSATGKNMFAVAEFWKNDLGAIENYLQKTNWNHSVFDVPLHYNLYNASKSGGNYDMRNIFNGTVVQRHPSHAVTFVDNHDSQPEEALESFVEEWFKPLAYALTLTREQGYPSVFYGDYYGIPTHGVPAMRSKIDPILEARQKYAYGPQHDYLDHPDVIGWTREGDSSHPKSGLATLITDGPGGSKRMYAGLKNAGETWYDITGNRSDTVKIGSDGWGEFHVNDGSVSIYVQK

SEQ ID NO: 29980 - protein, 485 aa, Bacillus sp.
HHNGTNGTMMQYFEWYLPNDGNHWNRLNSDASNLKSKGITAVWIPPAWKGASQNDVGYGAYDLYDLGEFNQKGTVRTKYGTRSQLQAAVTSLKNNGIQVYGDVVMNHKGGADATEMVRAVEVNPNNRNQEVTGEYTIEAWTRFDFPGRGNTHSSFKWRWYHFDGVDWDQSRRTNNRIYKFRGHGKAWDWEVDTEFGNYDYLMYTDYDMDHPEVVNELRNWGVWYTNTLGLDGFRIDAVKHIKYSFTRDWINHVRSATGKNMFAVAEFWKNDLGAIENYLQKTNWNHSVFDVPLHYNLYNASKSGGNYDMRNIFNGTVVQRHPSHAVTFVDNHDSQPEEALESFVETWFKPLAYALTLTREQGYPSVFYGDYYGIPTHGVPAMRSKIDPILEARQKYAYGPQHDYLDHPDVIGWTREGDSSHPKSGLATLITDGPGGSKRMYAGLKNAGETWYDITGNRSDTVKIGSDGWGEFHVNDASVSIYVQK

SEQ ID NO: 29981 - protein, 485 aa, Bacillus sp.
HHNGTNGTMMQYFEWYLPNDGNHWNRLNSDASNLKSKGITAVWIPPAWKGASQNDVGYGAYDLYDLGEFNQKGTVRTKYGTRSQLQAAVTSLKNNGIQVYGDVVMNHKGGADATEMVRAVEVNPNNRNQEVTGEYTIEAWTRFDFPGRGNTHSSFKWRWYHFDGVDWDQSRELDNRIYKFRGHGKAWDWEVDTEFGNYDYLMYTDYDMDHPEVVNELRNWGVWYTNTLGLDGFRIDAVKHIKYSFTRDWINHVRSATGKNMFAVAEFWKNDLGAIENYLQKTNWNHSVFDVPLHYNLYNASKSQGNYDMRNIFNGTVVQAHPNHAVTFVDNHDSQPEEALESFVDTWFKPLAYALTLTREQGYPSVFYGDYYGIPTHGVPAMRSKIDPILEARQKYAYGPQHDYLDHPDVIGWTREGDSSHPKSGLATLITDGPGGSKRMYAGLKNAGETWYDITGNRSDTVKIGSDGWGEFHVNGSSVSIYVQK

SEQ ID NO: 29982 - protein, 485 aa, Synthetic construct
HHNGTNGTMMQYFEWYLPNDGNHWNRLNSDASNLKSKGITAVWIPPAWKGASQNDVGYGAYDVYDLGEFNQKGTVRTKYGTRSQLQAAVTSLKNNGIQVYGDVVFNHKGGADATEMVRAVEVNPNNRNQEVTGEYTIEAWTRFDFPGRGNTHSSFKWRWYHFDGVDWDQSRRLNNRIYKFRGHGKAWDWEVDTENGNYDYLMYADYDFDHPEVVNEIRNWGVWYTNTLGLDGFRIDAVKHIKYSFTRDWINHVRSATGKNMFAVAEFWKNDLGAIENYLQKTNWNHSVFDVPLHYNLYNASKSGGNYDMRNIFNGTVVQRHPSHAVTFVDNHDSQPEEALESFVEEWFKPLAYALTLTREQGYPSVFYGDYYGIPTHGVPAMRSKIDPILEARQKYAYGPQHDYLDHPDVIGWTREGDSSHPKSGLATLITDGPGGSKRMYAGLKNAGETWYDITGNRSDTVKIGSDGWGEFHVNDGSVSIYVQK

SEQ ID NO: 29983 - protein, 483 aa, Bacillus sp.
HHNGTNGTMMQYFEWYLPNDGNHWNRLNSDASNLKSKGITAVWIPPAWKGASQNDVGYGAYDLYDLGEFNQKGTVRTKYGTRSQLQAAVTSLKNNGIQVYGDVVMNHKGGADATEMVRAVEVNPNNRNQEVTGEYTIEAWTRFDFPGRGNTHSSFKWRWYHFDGVDWDQSRNFQNRIYKFRGKAWDWEVDTEFGNYDYLMYADYDMDHPESTNEMRNWGVWYTNTLGLDGFRIDAVKHIKYSFTRDWINHVRSATGKNMFAVAEFWKNDLGAIENYLQKTNWNHSVFDVPLHYNLYNASKSQGNYDMRNIFNGTVVQRHPSHAVTFVDNHDSQPEEALESFVDTWFKPLAYALTLTREQGYPSVFYGDYYGIPTHGVPAMRSKIDPILEARQKYAYGPQHDYLDHPDVIGWTREGDSSHPKSGLATLITDGPGGSKRMYAGLKNAGETWYDITGNRSDTVKIGSDGWGEFHVNDGSVSIYVQK

SEQ ID NO: 29984 - protein, 483 aa, Bacillus sp.
HHNGTNGTMMQYFEWYLPNDGNHWNRLNSDASNLKSKGITAVWIPPAWKGASQNDVGYGAYDLYDLGEFNQKGTVRTKYGTRSQLQAAVTSLKNNGIQVYGDVVMNHKGGADATEMVRAVEVNPNNRNQEVTGEYTIEAWTRFDFPGRGNTHSSFKWRWYHFDGVDWDQSRRLNNRIYKFRGKAWDWEVDTEFGNYDYLMYADYDMDHPEVVNELRNWGVWYTNTLGLDGFRIDAVKHIKYSFTRDWINHVRSATGKNMFAVAEFWKNDLVAIENYLQKTNWNHSVFDVPLHYNLYNASKSSGNYDMRNIFNGTVVQRHPSHAVTFVDNHDSQPEEALESFVEPWFKPLAYALTLTREQGYPSVFYGDYYGIPTHGVPAMRSKIDPILEARQKYAYGPQHDYLDHPDVIGWTREGDSSHPKSGLATLITDGPGGSKRMYAGLKNAGETWYDITGNRSDTVKIGSDGWGEFHVNGTSVSIYVQK

SEQ ID NO: 29985 - protein, 485 aa, Bacillus sp.
HHNGTNGTMMQYFEWYLPNDGNHWNRLNSDASNLKSKGITAVWIPPAWKAASQNDVGYGAYDLYDLGEFNQKGTVRTKYGTRSQLQAAVTSLKNNGIQVYGDVVMNHKGGADATEMVRAVEVNPNNRNQEVTGEYTIEAWTRFDFPGRGNTHSSFKWRWYHFDGVDWDQSRRTENRIYKFRGHGKAWDWEVDTEFGNYDYLMYTDYDMDHPEVVNELRNWGVWYTNTLGLDGFRIDAVKHIKYSFTRDWINHVRSATGKNMFAVAEFWKNDLGAIENYLQKTNWNHSVFDVPLHYNLYNASKSGGNYDMRNIFNGTVVQRHPSHAVTFVDNHDSQPEEALESFVDEWFKPLAYALTLTREQGYPSVFYGDYYGIPTHGVPAMRSKIDPILEARQKYAYGPQHDYLDHPDVIGWTREGDSSHPKQGLATLITDGPGGSKRMYAGLKNAGETWYDITGNRSDTVKIGSDGWGEFHVNDGSVSIYVQK

SEQ ID NO: 29986 - protein, 483 aa, Bacillus sp.
HHNGTNGTMMQYFEWYLPNDGNHWNRLNSDASNLKSKGITAVWIPPAWKGASQNDVGYGAYDLYDLGEFNQKGTVRTKYGTRSQLQAAVTSLKNNGIQVYGDVVMNHKGGADATEMVRAVEVNPNNRNQEVTGEYTIEAWTRFDFPGRGNTHSSFKWRWYHFDGVDWDQSRRLNNRIYKFRGKAWDWEVDTENGFYDYLMYADIDYDHPEVVGTLRNWGVWYTNTLGLDGFRIDAVKHIKYSFTRDWINHVRSATGKNMFAVAEFWKNDLGAIENYLQKTNWNHSVFDVPLHYNLYNASKSGGNYDMRNIFNGTVVQRHPSHAVTFVDNHDSQPEEALESFVEEWFKPLAYALTLTREQGYPSVFYGDYYGIPTHGVPAMRSKIDPILEARQKYAYGPQHDYLDHPDVIGWTREGDSSHPKSGLATLITDGPGGSKRMYAGLKNAGETWYDITGNRSDTVKIGSDGWGEFHVNDGSVSIYVQK

SEQ ID NO: 29987 - protein, 485 aa, Bacillus sp.
HHNGTNGTMMQYFEWYLPNDGNHWNRLNSDASNLKSKGITAVWIPPAWKGASQNDVGYGAYDLYDLGEFNQKGTVRTKYGTRSQLQAAVTSLKNNGIQVYGDVVMNHKGGADATEMVRAVEVNPNNRNQEVTGEYTIEAYTRFDFPGRGNTHSSFKWRWYHFDGVDFDQSRRLNNRIYKFRGHGKAWDWEVDTEFGNYDYLMYVDYDMDHPEVVNELRNWGVWYTNTLGLDGFRIDAVKHIKYSFTRDWINHVRSATGKNMFAVAEFWKNDLGAIENYLQKTNWNHSVFDVPLHYNLYNASKSGGNYDMRNIFNGTVVQRHPSHAVTFVDNHDSQPEEALESFVEEWFKPLAYALTLTREQGYPSVFYGDYYGIPTHGVPAMRSKIDPILEARQKYAYGPQHDYLDHPDVIGWTREGDSSHPKSGLATLITDGPGGSKRMYAGLKNAGETWYDITGNRSDTVKIGSDGWGEFHVNDGSVSIYVQK

SEQ ID NO: 29988 - protein, 485 aa, Bacillus sp.
HHNGTNGTMMQYFEWYLPNDGNHWNRLNSDASNLKSKGITAVWIPPAWKGASQNDVGYGAYDLYDLGEFNQKGTVRTKYGTRSQLQAAVTSLKNNGIQVYGDVVMNHKGGADATEMVRAVEVNPNNRNQEVTGEYTIEAWTRFDFPGRGNTHSSFKWRWYHFDGVDWDQSRRLNNRIYKFRGHGKAWDWEVDTEFGNYDYLMYADYDMDHPEVVNELRNWGVWYTNTLGLDGFRIDAVKHIKYSFTRDWINHVRSATGKNMFAVAEFWKYDLGAIENYLQKTNWNHSVFDVPLHNNLYTASKSGGNYDMRNIFNGTVVQRHPSHAVTFVDNHDSQPEEALESFVEEWFKPLAYALTLTREQGYPSVFYGDYYGIPTHGVPAMRSKIDPILEARQKYAYGPQHDYLDHPDVIGWTREGDSSHPKSGLATLITDGPGGSKRMYAGLKNAGETWYDITGNRSDTVKIGSDGWGEFHVNDGSVSIYVQK

SEQ ID NO: 29989 - protein, 483 aa, Bacillus sp.
HHNGTNGTMMQYFEWYLPNDGNHWNRLNSDASNLKSKGITAVWIPPAWKGASQNDVGYGAYDLYDLGEFNQKGTVRTKYGTRSQLQAAVTSLKNNGIQVYGDVVMNHKGGADATEMVRAVEVNPNNRNQEVTGEYTIEAWTRFDFPGRGNTHSSFKWRWYHFDGVDWDQSRELNNRIYKFRGKAWDWEVDTEFGNYDYLMYTDYDMDHPEVVNELRNWGVWYTNTLGLDGFRIDAVKHIKYSFTRDWINHVRSATGKNMFAVAEFWKNDLGAIENYLQKTNWNHSVFDVPLHYNLYNASKSSGNYDMRNIFNGTVVQRHPSHAVTFVDNHDSQPEEALESFVDEWFKPLAYALTLTREQGYPSVFYGDYYGIPTHGVPAMRSKIDPILEARQKYAYGPQHDYLDHPDVIGWTREGDSSHPKSGLATLITDGPGGSKRMYAGLKNAGETWYDITGNRSDTVKIGSDGWGEFHVNKQSVSIYVQK

SEQ ID NO: 29990 - protein, 485 aa, Bacillus sp.
HHNGTNGTMMQYFEWYLPNDGNHWNRLNSDASNLKSKGITAVWIPPAWKGASQNDVGYGAYDLYDLGEFNQKGTVRTKYGTRSQLQAAVTSLKNNGIQVYGDVVMNHKGGADATEMVRAVEVNPNNRNQEVTGEYTIEAWTRFDFPGRGNTHSSFKWRWYHFDGVDWDQSRRLNNRIYKFRGHGKAWDWEVDTEFGNYDYLMYADYDMDHPEVVNELRNWGVWYTNTLGLDGFRIDAVKHIKYSFTRDWINHVRSATGKNMFAVAEFWKNDLGAIENYLQKTNWNHSVFDVPLHYNLYNASKSGSNYDMRNIFNGTVVQRHPSHAVTFVDNHDSQPEEALESFVETWFKPLAYALTLTREQGYPSVFYGDYYGIPTHGVPAMRSKIDPILEARQKYAYGPQHDYLDHPDVIGWTREGDSSHPKSGLATLITDGPGGSKRMYAGLKNAGETWYDITGNRSDTVKIGSDGWGEFHVNQQSVSIYVQK

SEQ ID NO: 29991 - protein, 483 aa, Bacillus sp.
HHNGTNGTMMQYFEWYLPNDGNHWNRLNSDASNLKSKGITAVWIPPAWKGASQNDVGYGAYDLYDLGEFNQKGTVRTKYGTRSQLQAAVTSLKNNGIQVYGDVVMNHKGGADATEMVRAVEVNPNNRNQEVTGEYTIEAYTRFDFPGRGNTHSSFKWRWYHFDGVDFDQSRRLNNRIYKFRGKAWDWEVDTEFGNYDYLMYVDYDMDHPEVVNELRNWGVWYTNTLGLDGFRIDAVKHIKYSFTRDWINHVRSATGKNMFAVAEFWKNDLGAIENYLQKTNWNHSVFDVPLHYNLYNASKSGGNYDMRNIFNGTVVQRHPSHAVTFVDNHDSQPEEALESFVEEWFKPLAYALTLTREQGYPSVFYGDYYGIPTHGVPAMRSKIDPILEARQKYAYGPQHDYLDHPDVIGWTREGDSSHPKSGLATLITDGPGGSKRMYAGLKNAGETWYDITGNRSDTVKIGSDGWGEFHVNDGSVSIYVQK

SEQ ID NO: 29992 - protein, 485 aa, Bacillus sp.
HHNGTNGTMMQYFEWYLPNDGNHWNRLNSDASNLKSKGITAVWIPPAWKATSQNDVGYGAYDLYDLGEFNQKGTVRTKYGTRSQLQAAVTSLKNNGIQVYGDVVMNHKGGADATEMVRAVEVNPNNRNQEVTGEYTIEAWTRFDFPGRGNTHSSFKWRWYHFDGVDWDQSRELSNRIYKFRGHGKAWDWEVDTEFGNYDYLMYADYDMDHPEVVNELRNWGVWYTNTLGLDGFRIDAVKHIKYSFTRDWINHVRSATGKNMFAVAEFWKNDLGAIENYLQKTNWNHSVFDVPLHYNLYNASKSQGNYDMRNIFNGTVVQRHPSHAVTFVDNHDSQPEEALESFVDTWFKPLAYALTLTREQGYPSVFYGDYYGIPTHGVPAMRSKIDPILLARQKYAYGPQHDYLDHPDVIGWTREGDSSHPKSGLATLITDGPGGSKRMYAGLKNAGETWYDITGNRSDTVKIGSDGWGEFHVNGSSVSIYVQK

SEQ ID NO: 29993 - protein, 483 aa, Bacillus sp.
HHNGTNGTMMQYFEWYLPNDGNHWNRLNSDASNLKSKGITAVWIPPAWKGASQNDVGYGAYDLYDLGEFNQKGTVRTKYGTRSQLQAAVTSLKNNGIQVYGDVVMNHKGGADATEMVRAVEVNPNNRNQEVTGEYTIEAWTRFDFPGRGNTHSSFKWRWYHFDGVDWDQSRRLDNRIYKFRGKAWDWEVDTEFGNYDYLMYTDYDMDHPEVVNELRNWGVWYTNTLGLDGFRIDAVKHIKYSFTRDWINHVRSATGKNMFAVAEFWKNDLGAIENYLQKTNWNHSVFDVPLHYNLYNASKSGGNYDMRNIFNGTVVQRHPSHAVTFVDNHDSQPEEALESFVDPWFKPLAYALTLTREQGYPSVFYGDYYGIPTHGVPAMRSKIDPILEARQKYAYGPQHDYLDHPDVIGWTRKGDSSHPKSGLATLITDGPGGSKRMYAGLKNAGETWYDITGNRSDTVKIGSDGWGEFHVNDGSVSIYVQK

SEQ ID NO: 29994 - protein, 485 aa, Bacillus sp.
HHNGTNGTMMQYFEWYLPNDGNHWNRLNSDASNLKSKGITAVWIPPAWKGASQNDVGYGAYDLYDLGEFNQKGTVRTKYGTRSQLQAAVTSLKNNGIQVYGDVVMNHKGGADATEMVRAVEVNPNNRNQEVTGEYTIEAWTRFDFPGRGNTHSSFKWRWYHFDGVDWDQSRRLNNRIYKFRGHGKAWDWEVDTEFGNYDYLMYADYDMDHPEVVNELRNWGVWYTNTLGLDGFRIDAVKHIKYSFTRDWINHVRSATGKNMFAVAEFWKNDLGAIENYLQKTNWNHSVFDVPLHYNLYNASKSGNNYDMRNIFNGTVVQRHPSHAVTFVDNHDSQPEEALESFVEPWFKPLAYALTLTREQGYPSVFYGDYYGIPTHGVPAMRSKIDPILEARQKYAYGPQHDYLDHPDVIGWTREGDSSHPKSGLATLITDGPGGSKRMYAGLKNAGETWYDITGNRSDTVKIGSDGWGEFHVNKTSVSIYVQK

SEQ ID NO: 29995 - protein, 483 aa, Bacillus sp.
HHNGTNGTMMQYFEWYLPNDGNHWNRLNSDASNLKSKGITAVWIPPAWKGASQNDVGYGAYDLYDLGEFNQKGTVRTKYGTRSQLQAAVTSLKNNGIQVYGDVVMNHKGGADATEMVRAVEVNPNNRNQEVTGEYTIEAWTRFDFPGRGNTHSSFKWRWYHFDGVDWDQSRRLNNRIYKFRGKAWDWEVDTEFGNYDYLMYADYDMDHPEVVNELRNWGVWYTNTLGLDGFRIDAVKHIKYSFTRDWINHVRSATGKNMFAVAEFWKNDLGAIENYLQKTNWNHSVFDVPLHYNLYNASKSGSNYDMRNIFNGTVVQRHPSHAVTFVDNHDSQPEEALESFVETWFKPLAYALTLTREQGYPSVFYGDYYGIPTHGVPAMRSKIDPILEARQKYAYGPQHDYLDHPDVIGWTREGDSSHPKSGLATLITDGPGGSKRMYAGLKNAGETWYDITGNRSDTVKIGSDGWGEFHVNQQSVSIYVQK

SEQ ID NO: 29996 - protein, 483 aa, Bacillus sp.
HHNGTNGTMMQYFEWYLPNDGNHWNRLNSDASNLKSKGITAVWIPPAWKGASQNDVGYGAYDLYDLGEFNQKGTVRTKYGTRSQLQAAVTSLKNNGIQVYGDVVMNHKGGADATEMVRAVEVNPNNRNQEVTGEYTIEAYTRFDFSGRGNTHSSFKWRWYHFDGVDWDQSRKLNNRIYKFRGKAWDWEVDTEFGNYDYLMYVDYDMDHPEVVNELRNWGVWYTNTLGLDGFRIDAVKHIKYSFTRDWINHVRSATGKNMFAVAEFWKNDLGAIENYLQKTNWNHSVFDVPLHYNLYNASKSGGNYDMRNIFNGTVVQRHPSHAVTFVDNHDSQPEEALESFVEEWFKPLAYALTLTREQGYPSVFYGDYYGIPTHGVPAMRSKIDPILEARQKYAYGPQHDYLDHPDVIGWTREGDSSHPKSGLATLITDGPGGSKRMYAGLKNAGETWYDITGNRSDTVKIGSDGWGEFHVNDGSVSIYVQK

SEQ ID NO: 29997 - protein, 483 aa, Bacillus sp.
HHNGTNQTMMQYFEWYLPNDGNHWNRLNSDASNLKSKGITAVWIPPAWKGASQNDVGYGAYDLYDLGEFNQKGTVRTKYGTRSQLQAAVTSLKNNGISVYGDVVMNHKGGADATEMVRAVEVNPNNRNQEVTGEYTIEAWTRFDFPGRGNTHSSFKWRWYHFDGVDWDQSRRLNNRIYKFRGKAWDWEVDTEFGNYDYLMYADYDMDHPEVVNELRNWGVWYTNTLGLDGFRIDAVKHIKYSFTRDWINHVRSATGKNMFAVAEFWKNDLGAIENYLQKTNWNHSVFDVPLHYNLYNASKSGGNYDMRNIFNGTVVQSHPSQAVTFVDNHDSQPEEALESFVEEWFKPLAYALTLTREQGYPSVFYGDYYGIPTHGVPAMRSKIDPILEARQKYAYGPQHDYLDHPDVIGWTREGDSSHPKSGLATLITDGPGGSKRMYAGLKNAGETWYDITGNRSDTVKIGSDGWGEFHVNDGSVSIYVQK

SEQ ID NO: 29998 - protein, 483 aa, Bacillus sp.
HHNGTNGTMMQYFEWYLPNDGNHWNRLNSDASNLKSKGITAVWIPPAWKGASQNDVGYGAYDLYDLGEFNQKGTVRTKYGTRSQLQAAVTSLKNNGIQVYGDVVMNHKGGADATEMVRAVEVNPNNRNQEVTGEYTIEAWTRFDFPGRGNTHSSFKWRWYHFDGVDWDQSRRLNNRIYKFRGKAWDWEVDTEFGNYDYLMYADYDMDHPEVVNELRNWGVWYTNTLGLDGFRIDAVKHIKYSFTRDWINHVRSATGKNMFAVAEFWKNDLGAIENYLQKTNWNHSVFDVPLHYNLYNASKSSGNYDMRNIFNGTVVQRHPSHAVTFVDNHDSQPEEALESFVDPWFKPLAYALTLTREQGYPSVFYGDYYGIPTHGVPAMRSKIDPILEARQKYAYGPQHDYLDHPDVIGWTREGDSSHPKSGLATLITDGPGGSKRMYAGLKNAGETWYDITGNRSDTVKIGSDGWGEFHVNKQSVSIYVQK

SEQ ID NO: 29999 - protein, 485 aa, Bacillus sp.
HHNGTNGTMMQYFEWYLPNDGNHWNRLNSDASNLKSKGITAVWIPPAWKATSQNDVGYGAYDLYDLGEFNQKGTVRTKYGTRSQLQSAVTSLKNNGIQVYGDVVMNHKGGADATEMVRAVEVNPNNRNQEVTGEYTIEAWTRFDFPGRGNTHSSFKWRWYHFDGVDWDMSRNTDNRIYKFRGHGKAWDWEVDTEFGNYDYLMYADYDMDHPEVVNELRNWGVWYTNTLGLDGFRIDAVKHIKYSFTRDWINHVRSATGKNMFAVAEFWKNDLGAIENYLQKTNWNHSVFDVPLHYNLYNASKSQGNYDMRNIFNGTVVQRHPSHAVTFVDNHDSQPEEALESFVDTWFKPLAYALTLTREQGYPSVFYGDYYGIPTHGVPAMRSKIDPILEARQKYAYGPQHDYLDHPDVIGWTREGDSSHPKSGLVTLITDGPGGSKRMYAGLKNAGETWYDITGNRSDTVKIGSDGWGEFHVNGSSVSIYVQK

SEQ ID NO: 30000 - protein, 485 aa, Bacillus sp.
HHNGTNGTMMQYFEWYLPNDGNHWNRLNSDASNLKSKGITAVWIPPAWKGTSQNDVGYGAYDLYDLGEFNQKGTVRTKYGTRSQLQAAVTSLKNNGIQVYGDVVMNHKGGADATEMVRAVEVNPNNRNQEVTGEYTIEAYTRFDFPGRGNTHSSFKWRWYHFDGVDWDQSRNLNNRIYKFRGHGKAWDWEVDTEFGNYDYLMYVDYDMDHPEVVNELRNWGVWYTNTLGLDGFRIDAVKHIKYSFTRDWINHVRSATGKNMFAVAEFWKNDLGAIENYLQKTNWNHSVFDVPLHYNLYNASKSQGNYDMRNIFNGTVVQRHPSHAVTFVDNHDSQPEEALESFVDTWFKPLAYALTLTREQGYPSVFYGDYYGIPTHGVPAMRSKIDPILEARQKYAYGPQHDYLDHPDVIGWTREGDSSHPKSGLATLITDGPGGSKRMYAGLKNAGETWYDITGNRSDTVKIGSDGWGEFHVNGSSVSIYVQK

SEQ ID NO: 30001 - protein, 483 aa, Bacillus sp. NSP9.1
INGTLMQYFEWYLPNDGQHWKRLQNDAAYLSDLGVTAVWIPPAYKGTSQSDVGYGAYDLYDLGEFQQKGTVRTKYGTKGELQSAIGNLHSRNIHVYGDVVINHKGGADGTEDVTAVEVNPGDRNQETSGEQRIKAWTAFHFPGRGSTYSGFKWHWYHFDGTDWDESRKLNRIYKFRGEGKAWDWEVSSENGNYDYLMYADIDYNHPDVVAELKKWGTWYANELNLDGFRLDAVKHIKFSFLRDWLKSVRESTGKDMFAVAEYWRNDQGALENYLKKTDFQHSVFDVPLHYNLHAASSQGGGYDMRQLLNGTVVSKYPEKAVTFVDNHDTQPGQSLESTVEPWFKPLAYCFIMTRKSGYPQVFYGDLYGTKGSTSREIPVLKNKLEPILKARKHYAYGAQHDYFDHHDIIGWTREGDSSIQKSGLAALITDGPGGSKRMYVGRENAGETWYDITGNRSDSVAIDSNGWGEFRVNGGSVSIYVQR

SEQ ID NO: 30002 - protein, 482 aa, Bacillus sp.
HHNGTNGTMMQYFEWYLPNDGNHWNRLNSDASNLKSKGITAVWIPPAWKAASQNDVGYGAYDLYDLGEFNQKGTVRTKYGTRSQLQAAVTSLKNNGIQVYGDVVMNHKGGADATEMVPAVEVNPNNRNQEVTGEYTIEAWTRFDFPGRGNTHSSFKWRWYHFDGVDWDQSRDLDNRIYKFRKAWDWEVDTEFGNYDYLMYADYDMDHPEVVNELRNWGVWYTNTLGLDGFRIDAVKHIKYSFTRDWINHVRSATGKNMFAVAEFWKNDLGAIENYLQKTNWNHSVFDVPLHYNLYNASKSGGNYDMRNIFNGTVVQRHPSHAVTFVDNHDSQPEEALESFVETWFKPLAYALTLTREQGYPSVFYGDYYGIPTHGVPAMRSKIDPILEARQKYAYGPQHDYLDHPDVIGWTREGDSSHPKSGLATLITDGPGGSKRMYAGLKNAGETWYDITGNRSDTVKIGSDGWGEFHVNKASVSIYVQK

SEQ ID NO: 30003 - protein, 482 aa, Synthetic construct
HAGTNGTMMQYFEWYLPNDGNHWNRLNSDASNLASKGITAVWIPPAWKGTSQADVGYGAYDLYDLGEFNQKGTVRTKYGTRSQLQAAVTSLKNNGIQVYGDVVMNHKAGADATEMVTAVEVNPNNRNQEVTGEYTIEAYTRFDFPGRGNTHSSFKWRWYHFDGVDWDQSRSLSNRIYKFQGKAWDWPVDTENGNYDYLMYADLDMDHPEVVNELRNWGVWYTNTLGLDGFRLDAVKHIKFSFTRDWINHVRSATGKNMFAVAEYWKNDLGAIENYLNFTNWNHSVFDVPLHYNLYAASTSGGNYDMRNIFNGTVVQKHPSHAVTFVDNHDTQPEESLESFVQPWFKPLAYALILTRESGYPSVFYGDYYGIPTHGVPAMRSKIDPILEARQKYAYGPQHDYLDHHDIVGWTREGDSSHPNSGLATLITDGPGGAKRMYVGRQNAGETWHDITGNRSEPVVINSEGWGEFHVNKGSVSIYVQR

SEQ ID NO: 30004 - protein, 482 aa, Synthetic construct
HAGTNGTMMQYFEWYLPNDGNHWNRLNSDASNLASKGITAVWIPPAWKGTSQADVGYGAYDLYDLGEFNQKGTVRTKYGTRSQLQAAVTSLKNNGIQVYGDVVMNHKAGADATEMVTAVEVNPNNRNQEVTGEYTIEAYTRFDFPGRGNTHSSFKWRWYHFDGVDWDQSRSLSNRIYKFQGKAWDWPVDTENGNYDYLMYADLDMDHPEVVNELRNWGVWYTNTLGLDGFRLDAVKHIKFSFTRDWINHVRSATGKNMFAVAEYWKNDLGAIENYLNFTNWNHSVFDVPLHYNLYAASTSGGNYDMRNIFNGTVVQKHPSHAVTFVDNHDTQPEESLESFVQPWFKPLAYALTLTREQGYPSVFYGDYYGIPTHGVPAMRSKIDPILEARQKYAYGPQHDYLDHHDIVGWTREGDSSHPNSGLATLITDGPGGAKRMYVGRQNAGETWHDITGNRSEPVVINSEGWGEFHVNKGSVSIYVQR

SEQ ID NO: 30005 - protein, 482 aa, Bacillus sp.
HNGTNGTMMQYFEWYLPNDGNHWNRLNSDASNLKSKGITAVWIPPAWKGASQNDVGYGAYDLYDLGEFNQKGTVRTKYGTRSQLQAAVTSLKNNGIQVYGDVVMNHKGGADYTEMVRAVEVNPNNRNQEVTGEYTIEAWTRFDFPGRGNTHSSFKWRWYHFDGVDWDQSERLNNRIYKFRGKAWDWEVETEFGNYDYLMYADYDMDHPEVVNELRNWGVWYTNTLGLDGFRIDAVKHIKYSFTRDWINHVRSATGKNMFAVAEFWKNDLGAIENYLQKTNWNHSVFDVPLHYNLYNASKSGGNYDMRNIFNGTVVQRHPSHAVTFVDNHDSQPEEALESFVEEWFKPLAYALTLTREQGYPSVFYGDYYGIPTHGVPAMRSKIDPILEARQKYAYGPQHDYLDHPDVIGWTREGDSSHPKSGLATLITDGPGGSKRMYAGLKNAGETWYDITGNRSDTVKIGSDGWGEFHVNDGSVSIYVQK

SEQ ID NO: 30006 - protein, 482 aa, Bacillus sp.
HNGTNGTMMQYFEWYLPNDGNHWNRLNSDASNLKSKGIKAVWIPPAWKGASQNDTGYGAYDLYDLGEFNQKGTVRTKYGTRSQLQAAVTSLKNNGIQVYGDVVMNHKGGADATEMVRAVEVNPNNRNQEVTGEYTIEAWTRFDFPGRGNTHSSFKWRWYHFDGVDWDQSRRLNNRIYKFRGKAWDWEVDTEFGNYDYLMYADYDMDHPEVVNELRNWGVWYTNTLGLDGFRIDAVKHIKYSFTRDWINHVRSATGKNMFAVAEFWKNDLGAIENYLQKTNWNHSVFDVPLHYNLYNASKSGGNYDMRNIFNGTVVQRHPSHAVTFVDNHDSQPEEALESFVEEWFKPLAYALTLTREQGYPSVFYGDYYGIPTHGVPAMRSKIDPILLARQKYAYGPQHDYLDHPDVIGWTREGDSSHPPSGLATLITDGPGGSKRMYAGLKNAGETWYDITGNRSDTVKIGSDGWGEFHVNDGSVSIYVQK

SEQ ID NO: 30007 - protein, 484 aa, Bacillus sp.
HNGTNGTMMQYFEWYLPNDGNHWNRLNSDASNLKSKGITAVWIPPAWKGASQNDVGYGAYDLYDLGEFNQKGTVRTKYGTRSQLQAAVTSLKNNGIQVYGDVVMNHKGGADYTEMVRAVEVNPNNRNQEVTGEYTIEAWTRFDFPGRGNTHSSFKWRWYHFDGVDWDQSERLNNRIYKFRGHGKAWDWEVETEFGNYDYLMYADYDMDHPEVVNELRNWGVWYTNTLGLDGFRIDAVKHIKYSFTRDWINHVRSATGKNMFAVAEFWKNDLGAIENYLQKTNWNHSVFDVPLHYNLYNASKSGGNYDMRNIFNGTVVQRHPSHAVTFVDNHDSQPEEALESFVEEWFKPLAYALTLTREQGYPSVFYGDYYGIPTHGVPAMRSKIDPILEARQKYAYGPQHDYLDHPDVIGWTREGDSSHPKSGLATLITDGPGGSKRMYAGLKNAGETWYDITGNRSDTVKIGSDGWGEFHVNDGSVSIYVQK

SEQ ID NO: 30008 - protein, 481 aa, Bacillus amyloliquefaciens
VNGTLMQYFEWYTPNDGQHWKRLQNDAEHLSDIGITAVWIPPAYKAISQADVGYGAYDLYDLGEFHQKGTVRTKYGTKGELQSAIKSLHSRDINVYGDVVINHKAGADATEDVTAVEVDPADRNRVISGEHLIKAWTHFHFPGRGSTYSDFKWYWYHFDGTDWDESRKLNRIYLFQGKTWDWPVSNEFGNYDYLMYADFDYDHPDVVAEIKRWGTWYANELQLDGFRLDAVKHIKFSFLRDWVNHVREKTGKEMFTVAEYWSNDLGALENYLNKTNWNHSVFDVPLHYQFHAASTQGGGYDMRKLLNGTVVSKHPLKSVTFVDNHDTQPGQSLESTVQTWFKPLAYAFILTRESGYPQVFYGDMYGTKGDSQREIPALKHKIEPILKARKQYAYGAQHDYFDHHDIVGWTREGDSSVANSGLAALITDGPGGAKRMYVGRQNAGETWHDITGNRSEPVVINSEGWGEFHVNGGSVSIYVQR

SEQ ID NO: 30009 - protein, 481 aa, Bacillus amyloliquefaciens
VNGTLMQYFEWYTPNDGQHWKRLQNDAEHLSDIGITAVWIPPAYKAISQADVGYGAYDLYDLGEFHQKGTVRTKYGTKGELQSAIKSLHSRDINVYGDVVINHKAGADATEDVTAVEVDPADRNRVISGEHLIKAWTHFHFPGRGSTYSDFKWYWYHFDGTDWDESRKLNRIYLFQGKTWDWPVSNEFGNYDYLMYADFDYDHPDVVAEIKRWGTWYANELQLDGFRLDAVKHIKFSFLRDWVNHVREKTGKEMFTVAEYWSNDLGALENYLNKTNFNHSVFDVPLHYQFHAASTQGGGYDMRKLLNGTVVSKWPLKSVTFVDNHDTQPGQSLESTVQTWFKPLAYAFILTRESGYPQVFYGDMYGTKGDSQREIPALKHKIEPILKARKQYAYGAQHDYFDHHDIVGWTREGDSSVANSGLAALITDGPGGAKRMYVGRQNAGETWHDITGNRSEPVVINSEGWGEFHVNGGSVSIYVQR

SEQ ID NO: 30010 - protein, 481 aa, Bacillus licheniformis
VNGTLMQYFEWYTPNDGQHWKRLQNDAEHLSDIGITAVWIPPAYKAISQADVGYGAYDLYDLGEFHQKWTVRTKYGTKGELQSAIKSLHSRDINVYGDVVINHKAGADATEDVTAVEVDPADRNRVISGEHLIKAWTHFHFPGRGSTYSDFKWYWYHFDGTDWDESRKLNRIYLFQGKTWDWPVSNEFGNYDYLMYADFDYDHPDVVAEIKRWGTWYANELQLDGFRLDAVKHIKFSFLRDWVNHVREKTGKEMFTVAEYWSNDLGALENYLNKTNFNHSVFDVPLHYQFHAASTQGGGYDMRKLLNGTVVSKHPLKSVTFVDNHDTQPGQSLESTVQTWFKPLAYAFILTRESGYPQVFYGDMYGTKGDSQREIPALKHKIEPILKARKQYAYGAQHDYFDHHDIVGWTREGDSSVANSGLAALITDGPGGAKRMYVGRQNAGETWHDITGNRSEPVVINSEGWGEFHVNGGSVSIYVQR

SEQ ID NO: 30011 - protein, 481 aa, Bacillus licheniformis
VNGTLMQYFEWYTPNDGQHWKRLQNDAEHLSDIGITAVWIPPAYKAISQADVGYGAYDLYDLGEFHQKGTVRTKYGTKGELQSAIKSLHSRDINVYGDVVINHKAGADATEDVTAVEVDPADRNRVISGEHLIKAWTHFHFPGRGSTYSDFKWYWYHFDGTDWDESRKLNRIYLFQGKTWDWPVSNEFGNYDYLMYADFDYDHPDVVAEIKRWGTWYANELQLDGFRLDAVKHIKFSFDRDWVNHVREKTGKEMFTVAEYWSNDLGALENYLNKTNFNHSVFDVPLHYQFHAASTQGGGYDMRKLLNGTVVSKHPLKSVTFVDNHDTQPGQSLESTVQTWFKPLAYAFILTRESGYPQVFYGDMYGTKGDSQREIPALKHKIEPILKARKQYAYGAQHDYFDHHDIVGWTREGDSSVANSGLAALITDGPGGAKRMYVGRQNAGETWHDITGNRSEPVVINSEGWGEFHVNGGSVSIYVQR

SEQ ID NO: 30012 - protein, 481 aa, Bacillus licheniformis
VNGTLMQYFEWYTPNDGQHWKRLQNDAEHLSDIGITAVWIPPAYKAISQADVGYGAYDLYDLGEFHQKGTVRTKYGTKGELQSAIKSLHSRDINVYGDVVINHKAGADATEDVTAVEVDPADRNRVISGEHLIKAWTHFHFPGRGSTYSDFKWYWWHFDGTDWDESRKLNRIYLFQGKTWDWPVSNEFGNYDYLMYADFDYDHPDVVAEIKRWGTWYANELQLDGFRLDAVKHIKFSFLRDWVNHVREKTGKEMFTVAEYWSNDLGALENYLNKTNFNHSVFDVPLHYQFHAASTQGGGYDMRKLLNGTVVSKHPLKSVTFVDNHDTQPGQSLESTVQTWFKPLAYAFILTRESGYPQVFYGDMYGTKGDSQREIPALKHKIEPILKARKQYAYGAQHDYFDHHDIVGWTREGDSSVANSGLAALITDGPGGAKRMYVGRQNAGETWHDITGNRSEPVVINSEGWGEFHVNGGSVSIYVQR

SEQ ID NO: 30013 - protein, 481 aa, Bacillus amyloliquefaciens
VNGTLMQYFEWYTPNDGQHWKRLQNDAEHLSDIGITAVWIPPAYKAISQADVGYGAYDLYDLGEFHQKGTVRTKYGTKGELQSAIKSLHSRDINVYGDVVINHKAGADATEDVGAVEVDPADRNRVISGEHLIKAWTHFHFPGRGSTYSDFKWYWYHFDGTDWDESRKLNRIYLFQGKTWDWPVSNEFGNYDYLMYADFDYDHPDVVAEIKRWGTWYANELQLDGFRLDAVKHIKFSFLRDWVNHVREKTGKEMFTVAEYWSNDLGALENYLNKTNFNHSVFDVPLHYQFHAASTQGGGYDMRKLLNGTVVSKHPLKSVTFVDNHDTQPGQSLESTVQTWFKPLAYAFILTRESGYPQVFYGDMYGTKGDSQREIPALKHKIEPILKARKQYAYGAQHDYFDHHDIVGWTREGDSSVANSGLAALITDGPGGAKRMYVGRQNAGETWHDITGNRSEPVVINSEGWGEFHVNGGSVSIYVQR

SEQ ID NO: 30014 - protein, 481 aa, Bacillus licheniformis
VNGTLMQYFEWYTPNDGQHWKRLQNDAEHLSDIGITAVWIPPAYKAISQADVGYGAYDLYDLGEFHQKGTVRTKYGTKGELQSAIKSLHSRDINVYGDVVINHKAGADATEDVTAVEVDPADRNRVISGEHLIKAWTHFHFWGRGSTYSDFKWYWYHFDGTDWDESRKLNRIYLFQGKTWDWPVSNEFGNYDYLMYADFDYDHPDVVAEIKRWGTWYANELQLDGFRLDAVKHIKFSFLRDWVNHVREKTGKEMFTVAEYWSNDLGALENYLNKTNFNHSVFDVPLHYQFHAASTQGGGYDMRKLLNGTVVSKHPLKSVTFVDNHDTQPGQSLESTVQTWFKPLAYAFILTRESGYPQVFYGDMYGTKGDSQREIPALKHKIEPILKARKQYAYGAQHDYFDHHDIVGWTREGDSSVANSGLAALITDGPGGAKRMYVGRQNAGETWHDITGNRSEPVVINSEGWGEFHVNGGSVSIYVQR

SEQ ID NO: 30015 - protein, 481 aa, Bacillus amyloliquefaciens
VNGTLMQYFEWYTPNDGQHWKRLQNDAEHLSDIGITAVWIPPAYKAISQADVGYGAYDLYDLGEFHQKGTVRTKYGTKGELQSAIKSLHSRDINVYGDVVINHKAGADATEDVTAVEVDPADRNRVISGEYLIKAWTHFHFPGRGSTYSDFKWYWYHFDGTDWDESRKLNRIYLFQGKTWDWPVSNEFGNYDYLMYADFDYDHPDVVAEIKRWGTWYANELQLDGFRLDAVKHIKFSFLRDWVNHVREKTGKEMFTVAEYWSNDLGALENYLNKTNFNHSVFDVPLHYQFHAASTQGGGYDMRKLLNGTVVSKHPLKSVTFVDNHDTQPGQSLESTVQTWFKPLAYAFILTRESGYPSVFYGDMYGTKGDSQREIPALKHKIEPILKARKQYAYGAQHDYFDHHDIVGWTREGDSSVANSGLAALITDGPGGAKWMYVGRQNAGETWHDITGNRSEPVVINSEGWGEFHVNGGSVSIYVQR

SEQ ID NO: 30016 - protein, 481 aa, Bacillus licheniformis
VNGTLMQYFEWYTPNDGQHWKRLQNDAEHLSDIGITAVWIPPAYKAISQADVGYGAYDLYDLGEFHQKGTVRTKYGTKGELQSAIKSLHSRDINVYGDVVINHKAGADATEDVTAVEVDPADRNRVISGEHLIKAWTHFHFPGRGSTYSDFKWYWYHFDGTDWDESRKLNRIYLFQGKTWDWPVSNEFGNYDYLMYADFDYDHPDVVAEIKRWGTWYANELQLDGFRLDAVKHIKFSFLRDWVNHVREKTGKEMFTVAEYWSNDLGALENYLNKTNFNHSVFDVPLHYQFHAASTQGGGYDMRKLLNGTVVSKHPLKSVTFVDNHDTQPGQSLESTVQTWFKPLAYAFILTRESGYPQVFYGDMYGTKGDSQREIPALKHKIEPILKARKQYAYGAQHDYFDHHDIVGWTREGDSSVANSGLAALITDGPGGAKWMYVGRQNAGETWHDITGNRSEPVVINSEGWGEFHVNGGSVSIYVQR

SEQ ID NO: 30017 - protein, 481 aa, Bacillus amyloliquefaciens
VNGTLMQYFEWYTPNDGQHWKRLQNDAEHLSDIGITAVWIPPAYKAISQADVGYGAYDLYDLGEFWQKGTVRTKYGTKGELQSAIKSLHSRDINVYGDVVINHKAGADATEDVTAVEVDPADRNRVISGEHLIKAWTHFHFPGRGSTYSDFKWYWYHFDGTDWDESRKLNRIYLFQGKTWDWPVSNEFGNYDYLMYADFDYDHPDVVAEIKRWGTWYANELQLDGFRLDAVKHIKFSFLRDWVNHVREKTGKEMFTVAEYWSNDLGALENYLNKTNWNHSVFDVPLHYQFHAASTQGGGYDMRKLLNGTVVSKHPLKSVTFVDNHDTQPGQSLESTVQTWFKPLAYAFILTRESGYPQVFYGDMYGTKGDSQREIPALKHKIEPILKARKQYAYGAQHDYFDHHDIVGWTREGDSSVANSGLAALITDGPGGAKRMYVGRQNAGETWHDITGNRSEPVVINSEGWGEFHVNGGSVSIYVQR

SEQ ID NO: 30018 - protein, 481 aa, Bacillus amyloliquefaciens
VNGTLMQYFEWYTPNDGQHWKRLQNDAEHLSDIGITAVWIPPAYKAISQADVGYGAYDLYDLGEFWQKGTVRTKYGTKGELQSAIKSLHSRDINVYGDVVINHKAGADATEDVTAVEVDPADRNRVISGEHLIKAWTHFHFPGRGSTYSDFKWYWWHFDGTDWDESRKLNRIYLFQGKTWDWPVSNEFGNYDYLMYADFDYDHPDVVAEIKRWGTWYANELQLDGFRLDAVKHIKFSFLRDWVNHVREKTGKEMFTVAEYWSNDLGALENYLNKTNFNHSVFDVPLHYQFHAASTQGGGYDMRKLLNGTVVSKHPLKSVTFVDNHDTQPGQSLESTVQTWFKPLAYAFILTRESGYPQVFYGDMYGTKGDSQREIPALKHKIEPILKARKQYAYGAQHDYFDHHDIVGWTREGDSSVANSGLAALITDGPGGAKRMYVGRQNAGETWHDITGNRSEPVVINSEGWGEFHVNGGSVSIYVQR

SEQ ID NO: 30019 - protein, 481 aa, Bacillus amyloliquefaciens
VNGTLMQYFEWYTPNDGQHWKRLQNDAEHLSDIGITAVWIPPAYKAISQADVGYGAYDLYDLGEFHQKGTVRTKYGTKGELQSAIKSLHSRDINVYGDVVINHKAGADATEDVTAVEVDPADRNRVISGEYLIKAWTHFHFPGRGSTYSDFKWYWYHFDGTDWDESRKLNRIYLFQGKTWDWPVSNEFGNYDYLMYADFDYDHPDVVAEIKRWGTWYANELQLDGFRLDAVKHIKFSFLRDWVNHVREKTGKEMFTVAEYWSNDLGALENYLNKTNFNHSVFDVPLHYQFHAASTQGGGYDMRKLLNGTVVSKWPLKSVTFVDNHDTQPGQSLESTVQTWFKPLAYAFILTRESGYPQVFYGDMYGTKGDSQREIPALKHKIEPILKARKQYAYGAQHDYFDHHDIVGWTREGDSSVANSGLAALITDGPGGAKWMYVGRQNAGETWHDITGNRSEPVVINSEGWGEFHVNGGSVSIYVQR

SEQ ID NO: 30020 - protein, 481 aa, Bacillus licheniformis
LNGTLMQYFEWYTPNDGQHWKRLQNDSAYLAEHGITAVWIPPAYKGTSQADVGYGAYDLYDLGEFHQKGTVRTKYGTKGELQSAIKSLHSRDINVYGDVVINHKGGADATEDVTAVEVDPADRNRVISGEHLIKAWTHFHFPGRGSTYSDFKWHWYHFDGTDWDESRKLNRIYKFQGKAWDWEVSSENGNYDYLMYADIDYDHPDVAAEIKRWGTWYANELQLDGFRLDAVKHIKFSFLRDWVNHVREKTGKEMFTVAEYWQNDLGALENYLNKTNFNHSVFDVPLHYQFHAASTQGGGYDMRKLLNGTVVSKHPLKSVTFVDNHDTQPGQSLESTVQTWFKPLAYAFILTRESGYPQVFYGDMYGTKGDSQREIPALKHKIEPILKARKQYAYGAQHDYFDHHDIVGWTREGDSSVANSGLAALITDGPGGAKRMYVGRQNAGETWHDITGNRSEPVVINSEGWGEFHVNGGSVSIYVQR

SEQ ID NO: 30021 - protein, 481 aa, Bacillus licheniformis
LNGTLMQYFEWYTPNDGQHWKRLQNDSAYLAEHGITAVWIPPAYKGTSQADVGYGAYDLYDLGEFHQKGTVRTKYGTKGELQSAIKSLHSRDINVYGDVVINHKGGADATEDVTAVEVDPADRNRVISGEYLIKAWTHFHFPGRGSTYSDFKWHWYHFDGTDWDESRKLNRIYKFQGKAWDWEVSNENGNYDYLMYADIDYDHPDVAAEIKRWGTWYANELQLDGFRLDAVKHIKFSFLRDWVNHVREKTGKEMFTVAEYWQNDLGALENYLNKTNFNHSVFDVPLHYQFHAASTQGGGYDMRKLLNGTVVSKHPLKSVTFVDNHDTQPGQSLESTVQTWFKPLAYAFILTRESGYPQVFYGDMYGTKGDSQREIPALKHKIEPILKARKQYAYGAQHDYFDHHDIVGWTREGDSSVANSGLAALITDGPGGAKRMYVGRQNAGETWHDITGNRSEPVVINSEGWGEFHVNGGSVSIYVQR

SEQ ID NO: 30022 - protein, 480 aa, Bacillus sp.
APINETMMQYFEWDLPNDGTLWTKVKNEAANLSSLGITALWLPPAYKGTSQSDVGYGVYDLYDLGEFNQKGTIRTKYGTKTQLERAIRSLKANGIQVYADVVFNHKAGADQTEFVDAVEVDPSNRNQEVSGTYQIEAWTKFDFPGRGNTYSSFKWRWYHFDGTDWDESRKLNRIYKFRGKAWDWEVDTENGNYDYLMFADLDMDHPEVVTELKNWGTWYVNTTNIDGFRLDAVKHIKFSFMRDWLTYVRNQTGKNLFAVGEFWSYDVNKLHNYITKTNGSMSLFDAPLHNNFYTASKSSGYFDMRNLLNGTLVQRHPSHAVTLVDNHDTQPGQSLQSWVEPWFKPLAYAFILTRQEGYPCVFYGDYYGIPSDGVPGLKSKIDPLLIARRDYAYGTQRDYIDHQDIIGWTREGIDTKPNSGLAALITDGPGGSKWMYVGKKHAGKVFYDLTGNRSDTVTINADGWGEFKVNGGSVSIWVAK

SEQ ID NO: 30023 - protein, 480 aa, Bacillus sp.
APINETMMQYFEWDLPNDGTLWNRLHNNAQNLKNAGITALWLPPAYKGTSQSDVGYGVYDLYDLGEFNQKGTIRTKYGTKTQYIQAIQAAKAAGMQVYADVVFNHKAGADQTEFVDAVEVDPSNRNQEVSGTYQIEAWTKFDFPGRGNTYSSFKWRWYHFDGTDWDESRKLNRIYKFRGKAWDWEVDTENGNYDYLMFADLDMDHPEVVTELKNWGTWYVNTTNIDGFRLDAVKHIKFSFMRDWLTYVRNQTGKNLFAVGEFWSYDVNKLHNYITKTNGSMSLFDAPLHNNFYTASKSSGYFDMRNLLNGTLVQRHPSHAVTLVDNHDTQPGQSLQSWVEPWFKPLAYAFILTRQEGYPCVFYGDYYGIPSDGVPGLKSKIDPLLIARRDYAYGTQRDYIDHQDIIGWTREGIDTKPNSGLAALITDGPGGSKWMYVGKKHAGKVFYDLTGNRSDTVTINADGWGEFKVNGGSVSIWVAK

SEQ ID NO: 30024 - protein, 480 aa, Bacillus sp.
APINETMMQYFEWDLPNDGTLWTKVKNEAANLSSLGITALWLPPAYKGTSQSDVGYGVYDLYDLGEFNQKGTIRTKYGTKTQLERAIRSLKANGIQVYADVVFNHKAGADQTEFVDAVEVDPSNRNQEVSGTYQIEAWTKFDFPGRGNTYSSFKWRWYHFDGTDWDESRKLNRIYKFRGKAWDWEVDTENGNYDYLMFADLDMDHPEVVTELKNWGTWYVNTTNIDGFRLDAVKHIKFSFMRDWLTYVRNQTGKNLFAVGEFWSYDVNKLHNYITKTNGSMSLFDAPLHNNFYTASKSSGYFDMRNLLNGTLVQRHPSHAVTLVDNHDTQPGEALESFVQGWFKPLAYAFILTRQEGYPCVFYGDYYGIPKYNIPGLKSKIDPLLIARRDYAYGTQRDYIDHQDIIGWTREGIDTKPNSGLAALITDGPGGSKWMYVGKKHAGKVFYDLTGNRSDTVTINADGWGEFKVNGGSVSIWVAK

SEQ ID NO: 30025 - protein, 480 aa, Geobacillus stearothermophilus
NGTLMQYFEWYTPNDGQHWKRLQNDSAYLAEHGITAVWIPPAYKGTSQADVGYGAYDLYDLGEFHQKGTVRTKYGTKGELQSAIKSLHSRDINVYGDVVINHKGGADATEDVTAVEVDPADRNRVISGEYLIKAWTHFHFPGRGSTYSDFKWHWYHFDGTDWDESRKLNRIYKFQGKAWDWEVSTENGNYDYLMYADIDYDHPDVVAEIKRWGTWYANELQLDGFRLDAVKHIKFSFLRDWVNHVREKTGKEMFTVGEYWSYDINKLHNYITKTNGTMSLFDAPLHNKFYTASKSGGAFDMRTLMTNTLMKDQPTLAVTFVDNHDTEPGQALQSWVDPWFKPLAYAFILTRQEGYPCVFYGDYYGIPQYNIPSLKSKIDPLLIARRDYAYGTQHDYLDHSDIIGWTREGVTEKPGSGLAALITDGPGGSKWMYVGKQHAGKVFYDLTGNRSDTVTINSDGWGEFKVNGGSVSVWVPRKTT

SEQ ID NO: 30026 - protein, 485 aa, Bacillus sp.
HHNGTNGTMMQYFEWYLPNDGNHWNRLNSDASNLKSKGIKAVWIPPAWKAVSQNDVGYGAYDLYDLGEFNQRGTVRTKYGTRSQLQAAVTSLKNNGIQVYGDVVMNHKGGADATEMVRAVEVNPNNRNQEVTGEYTIEAWTRFDFPGRGNTHSSFKWRWYHFDGVDFDQSRDLENRIYKFRGHGKAWDWEVDTEFGNYDYLMYADYDMDHPEVVNELRNWGVWYTNTLGLDGFRIDAVKHIKYSFTRDWINHVRSATGKNMFAVAEFWKNDLGAIENYLQKTNWNHSVFDVPLHYNLYNASKSGGNYDMRNIFNGTVVQRHPSHAVTFVDNHDSQPEEALESFVEEWFKPLAYALTLTREQGYPSVFYGDYYGIPTHGVPAMRSKIDPILEARQKYAYGPQHDYLDHPDVIGWTREGDSSHPKSGLATLITDGPGGSKRMYAGLKNAGETWYDITGNRSDTVKIGSDGWGEFHVNDGSVSIYVQK

SEQ ID NO: 30027 - protein, 483 aa, Bacillus sp.
HHNGTNGTMMQYFEWYLPNDGNHWNRLNSDASNLKSKGITAVWIPPAWKGASQNDVGYGAYDLYDLGEFNQKGTVRTKYGTRSQLQAAVTSLKNNGINVYGDVVMNHKGGADATEMVRAVEVNPNNRNQEVTGEYTIEAWTRFDFPGRGNTHSSFKWRWYHFDGVDWDQSRRLNNRIYKFRGKAWDWEVDTEFGNYDYLMYADIDYDHPETTNEMRNWGVWYTNTLGLDGFRIDAVKHIKYSFTRDWINHVRSATGKNMFAVAEFWKNDLGAIENYLQKTNWNHSVFDVPLHYNLYNASKSGGNYDMRNIFNGTVVQAHPMHAVTFVDNHDSQPEEALESFVEEWFKPLAYALTLTREQGYPSVFYGDYYGIPTHGVPAMRSKIDPILEARQKYAYGPQHDYLDHPDVIGWTREGDSSHPKSGLATLITDGPGGSKRMYAGLKNAGETWYDITGNRSDTVKIGSDGWGEFHVNDGSVSIYVQK

SEQ ID NO: 30028 - protein, 483 aa, Bacillus sp.
HHNGTNGTMMQYFEWYLPNDGNHWNRLNSDASNLKSKGITAVWIPPAWKGASQNDVGYGAYDLYDLGEFNQKGTVRTKYGTRSQLQAAVTSLKNNGIQVYGDVVMNHKGGADATEMVRAVEVNPNNRNQEVTGEYTIEAWTRFDFPGRGNTHSSFKWRWYHFDGVDWDQSRRLNNRIYKFRGKAWDWEVDTEFGNYDYLMYADIDYDHPESTNEMRNWGVWYTNTLGLDGFRIDAVKHIKYSFTRDWINHVRSATGKNMFAVAEFWKNDLGAIENYLQKTNWNHSVFDVPLHYNLYNASKSGGNYDMRNIFNGTVVQRHPSHAVTFVDNHDSQPEEALESFVEEWFKPLAYALTLTREQGYPSVFYGDYYGIPTHGVPAMRSKIDPILEARQKYAYGPQHDYLDHPDVIGWTREGDSSHPKSGLATLITDGPGGSKRMYAGLKNAGETWYDITGNRSDTVKIGSDGWGEFHVNDGSVSIYVQK

SEQ ID NO: 30029 - protein, 485 aa, Bacillus sp.
HHNGTNETMMQYFEWYLPNDGNHWNRLNSDASNLKSKGIKAVWIPPAWKGASQNDVGYGAYDLYDLGEFNQRGTVRTKYGTRSQLQAAVTSLKNNGIQVYGDVVMNHKGGADATEMVRAVEVNPNNRNQEVTGEYTIEAWTRFDFPGRGNTHSSFKWRWYHFDGVDFDQSRRLNNRIYKFRGHGKAWDWEVDTEFGNYDYLMYADYDMDHPEVVNELRNWGVWYTNTLGLDGFRIDAVKHIKYSFTRDWINHVRSATGKNMFAVAEFWKNDLGAIENYLQKTNWNHSVFDVPLHYNLYNASKSGGNYDMRNIFNGTVVQRHPSHAVTFVDNHDSQPEEALESFVEEWFKPLAYALTLTREQGYPSVFYGDYYGIPTHGVPAMRSKIDPILEARQKYAYGPQHDYLDHPDVIGWTREGDSSHPKSGLATLITDGPGGSKRMYAGLKNAGETWYDITGNRSDTVKIGSDGWGEFHVNDGSVSIYVQK

SEQ ID NO: 30030 - protein, 483 aa, Bacillus sp.
HHNGTNQTMMQYFEWYLPNDGNHWNRLNSDASNLKSKGIKAVWIPPAWKGASQNDVGYGAYDLYDLGEFNQRGTVRTKYGTRSQLQAAVTSLKNNGIQVYGDVVMNHKGGADATEMVRAVEVNPNNRNQEVTGEYTIEAWTRFDFPGRGNTHSSFKWRWYHFDGVDFDQSRRLNNRIYKFRGKAWDWEVDTEFGNYDYLMYADYDMDHPEVVNELRNWGVWYTNTLGLDGFRIDAVKHIKYSFTRDWINHVRSATGKNMFAVAEFWKNDLGAIENYLQKTNWNHSVFDVPLHYNLYNASKSGGNYDMRNIFNGTVVQRHPSHAVTFVDNHDSQPEEALESFVEEWFKPLAYALTLTREQGYPSVFYGDYYGIPTHGVPAMRSKIDPILEARQKYAYGPQHDYLDHPDVIGWTREGDSSHPKSGLATLITDGPGGSKRMYAGLKNAGETWYDITGNRSDTVKIGSDGWGEFHVNDGSVSIYVQK

SEQ ID NO: 30031 - protein, 483 aa, Bacillus sp.
HHNGTNGTMMQYFEWYLPNDGNHWNRLNSDASNLKSKGIKAVWIPPAWKAVSQNDVGYGAYDLYDLGEFNQRGTVRTKYGTRSQLQAAVTSLKNNGIQVYGDVVMNHKGGADATEMVRAVEVNPNNRNQEVTGEYTIEAWTRFDFPGRGNTHSSFKWRWYHFDGVDFDQSRELSNRIYKFRGKAWDWEVDTEFGNYDYLMYADYDMDHPEVVNELRNWGVWYTNTLGLDGFRIDAVKHIKYSFTRDWINHVRSATGKNMFAVAEFWKNDLGAIENYLQKTNWNHSVFDVPLHYNLYNASKSGGNYDMRNIFNGTVVQRHPSHAVTFVDNHDSQPEEALESFVEEWFKPLAYALTLTREQGYPSVFYGDYYGIPTHGVPAMRSKIDPILEARQKYAYGPQHDYLDHPDVIGWTREGDSSHPKSGLATLITDGPGGSKRMYAGLKNAGETWYDITGNRSDTVKIGSDGWGEFHVNDGSVSIYVQK

SEQ ID NO: 30032 - protein, 483 aa, Bacillus sp.
HHNGTNGTMMQYFEWYLPNDGNHWNRLNSDASNLKSKGITAVWIPPAWKGASQNDVGYGAYDLYDLGEFNQKGTVRTKYGTRSQLQAAVTSLKNNGIQVYGDVVMNHKGGAHATEMVRAVEVNPNNRNQEVTGEYTIEAWTRFDFPGRGNTHSSFKWRWYHFDGVDWDQSRRLNNRIYKFRGKAWDWEVDTEFGNYDYLMYADYDMDHPEVVNELRNWGVWYTNTLGLDGFRIDAVKHIKYSFTRDWINHVRSATGKNMFAVAEFWKNDLGAIENYLQKTNWNHSVFDVPLHYNLYNASKSAGNYDMRNIFNGTVVQRHPSHAVTFVDNHDSQPEEALESFVDTWFKPLAYALTLTREQGYPSVFYGDYYGIPTHGVPAMRSKIDPILEARQKYAYGPQHDYLDHPDVIGWTREGDSSHPKSGLATLITDGPGGSKRMYAGLKNAGETWYDITGNRSDTVKIGSDGWGEFHVNQSSVSIYVQK

SEQ ID NO: 30033 - protein, 485 aa, Bacillus sp.
HHNGTNGTMMQYFEWYLPNDGNHWNRLNSDASNLKSKGITAVWIPPAWKAVSQNDVGYGAYDLYDLGEFNQKGTVRTKYGTRSQLQAAVTSLKNNGIQVYGDVVMNHKGGADATEMVRAVEVNPNNRNQEVTGEYTIEAWTRFDFPGRGNTHSSFKWRWYHFDGVDFDQSREFTNRIYKFRGHGKAWDWEVDTEFGNYDYLMYVDYDMDHPEVVNELRNWGVWYTNTLGLDGFRIDAVKHIKYSFTRDWINHVRSATGKNMFAVAEFWKNDLGAIENYLQKTNWNHSVFDVPLHYNLYNASKSGGNYDMRNIFNGTVVQRHPSHAVTFVDNHDSQPEEALESFVETWFKPLAYALTLTREQGYPSVFYGDYYGIPTHGVPAMRSKIDPILEARQKYAYGPQHDYLDHPDVIGWTREGDSSHPKSGLATLITDGPGGSKRMYAGLKNAGETWYDITGNRSDTVKIGSDGWGEFHVNDASVSIYVQK

SEQ ID NO: 30034 - protein, 483 aa, Bacillus sp.
HHNGTNGTMMQYFEWYLPNDGNHWNRLNSDASNLKSKGITAVWIPPAWKAVSQNDVGYGAYDLYDLGEFNQKGTVRTKYGTRSQLQAAVTSLKNNGIQVYGDVVMNHKGGADLTEMVRAVEVNPNNRNQEVTGEYTIEAWTRFDFPGRGNTHSSFKWRWYHFDGVDWDQSREFTNRIYKFRGKAWDWEVDTEFGNYDYLMYVDYDMDHPEVVNELRNWGVWYTNTLGLDGFRIDAVKHIKYSFTRDWINHVRSATGKNMFAVAEFWKNDLGAIENYLQKTNWNHSVFDVPLHYNLYNASQSGGNYDMRNIFNGTVVQRHPSHAVTFVDNHDSQPEEALESFVEPWFKPLAYALTLTREQGYPSVFYGDYYGIPTHGVPAMRSKIDPILEARQKYAYGPQHDYLDHPDVIGWTREGDSSHPKSGLATLITDGPGGSKRMYAGLKNAGETWYDITGNRSDTVKIGSDGWGEFHVNKSSVSIYVQK

SEQ ID NO: 30035 - protein, 483 aa, Bacillus sp.
HHNGTNGTMMQYFEWYLPNDGNHWNRLNSDASNLKSKGITAVWIPPAWKGASQNDVGYGAYDLYDLGEFNQKGTVRTKYGTRSQLQAAVTSLKNNGINVYGDVVMNHKGGADATEMVRAVEVNPNNRNQEVTGEYTIEAWTRFDFPGRGNTHSSFKWRWYHFDGVDWDQSRRLNNRIYKFRGKAWDWEVDTEFGNYDYLMYADIDYDHPESTNEMRNWGVWYTNTLGLDGFRIDAVKHIKYSFTRDWINHVRSATGKNMFAVAEFWKNDLGAIENYLQKTNWNHSVFDVPLHYNLYNASKSGGNYDMRNIFNGTVVQAHPMHAVTFVDNHDSQPEEALESFVEEWFKPLAYALTLTREQGYPSVFYGDYYGIPTHGVPAMRSKIDPILEARQKYAYGPQHDYLDHPDVIGWTREGDSSHPKSGLATLITDGPGGSKRMYAGLKNAGETWYDITGNRSDTVKIGSDGWGEFHVNDGSVSIYVQK

SEQ ID NO: 30036 - protein, 483 aa, Bacillus sp.
HHNGTNGTMMQYFEWYLPNDGNHWNRLNSDASNLKSKGITAVWIPPAWKAVSQNDVGYGAYDLYDLGEFNQKGTVRTKYGTRSQLQAAVTSLKNNGIQVYGDVVMNHKGGADATEMVRAVEVNPNNRNQEVTGEYTIEAYTRFDFSGRGNTHSSFKWRWYHFDGVDFDQSREFTNRIYKFRGKAWDWEVDTEFGNYDYLMYVDYDMDHPEVVNELRNWGVWYTNTLGLDGFRIDAVKHIKYSFTRDWINHVRSATGKNMFAVAEFWKNDLGAIENYLQKTNWNHSVFDVPLHYNLYNASKSGGNYDMRNIFNGTVVQAHPNHAVTFVDNHDSQPEEALESFVEEWFKPLAYALTLTREQGYPSVFYGDYYGIPTHGVPAMRSKIDPILEARQKYAYGPQHDYLDHPDVIGWTREGDSSHPKSGLATLITDGPGGSKRMYAGLKNAGETWYDITGNRSDTVKIGSDGWGEFHVNDGSVSIYVQK

SEQ ID NO: 30037 - protein, 485 aa, Bacillus sp.
HHNGTNGTMMQYFEWYLPNDGNHWNRLNSDASNLKSKGIKAVWIPPAWKGASQNDVGYGAYDLYDLGEFNQRGTVRTKYGTRSQLQAAVTSLKNNGIQVYGDVVMNHKGGADATEMVRAVEVNPNNRNQEVTGEYTIEAWTRFDFPGRGNTHSSFKWRWYHFDGVDFDQSRRLDNRIYKFRGHGKAWDWEVDTEFGNYDYLMYTDYDMDHPEVVNELRNWGVWYTNTLGLDGFRIDAVKHIKYSFTRDWINHVRSATGKNMFAVAEFWKNDLGAIENYLQKTNWNHSVFDVPLHYNLYNASKSGGNYDMRNIFNGTVVQRHPSHAVTFVDNHDSQPEEALESFVEEWFKPLAYALTLTREQGYPSVFYGDYYGIPTHGVPAMRSKIDPILEARQKYAYGPQHDYLDHPDVIGWTREGDSSHPKSGLATLITDGPGGSKRMYAGLKNAGETWYDITGNRSDTVKIGSDGWGEFHVNDGSVSIYVQK

SEQ ID NO: 30038 - protein, 485 aa, Bacillus sp.
HHNGTNGTMMQYFEWYLPNDGNHWNRLNSDASNLKSKGITAVWIPPAWKAASQNDVGYGAYDLYDLGEFNQKGTVRTKYGTRSQLQAAVTSLKNNGIQVYGDVVMNHKGGADATEMVRAVEVNPNNRNQEVTGEYTIEAWTRFDFPGRGNTHSSFKWRWYHFDGVDWDQSRNLNNRIYKFRGHGKAWDWEVDTEFGNYDYLMYTDYDMDHPEVVNELRNWGVWYTNTLGLDGFRIDAVKHIKYSFTRDWINHVRSATGKNMFAVAEFWKNDLGAIENYLQKTNWNHSVFDVPLHYNLYNASKSGGNYDMRNIFNGTVVQRHPSHAVTFVDNHDSQPEEALESFVETWFKPLAYALTLTREQGYPSVFYGDYYGIPTHGVPAMRSKIDPILEARQKYAYGPQHDYLDHPDVIGWTREGDSSHPKSGLATLITDGPGGSKRMYAGLKNAGETWYDITGNRSDTVKIGSDGWGEFHVNKASVSIYVQK

SEQ ID NO: 30039 - protein, 485 aa, Bacillus sp.
HHNGTNGTMMQYFEWYLPNDGNHWNRLNSDASNLKSKGIKAVWIPPAWKAVSQNDVGYGAYDLYDLGEFNQRGTVRTKYGTRSQLQAAVTSLKNNGIQVYGDVVMNHKGGADATEMVRAVEVNPNNRNQEVTGEYTIEAWTRFDFPGRGNTHSSFKWRWYHFDGVDFDQSREFTNRIYKFRGHGKAWDWEVDTEFGNYDYLMYVDYDMDHPEVVNELRNWGVWYTNTLGLDGFRIDAVKHIKYSFTRDWINHVRSATGKNMFAVAEFWKNDLGAIENYLQKTNWNHSVFDVPLHYNLYNASKSGGNYDMRNIFNGTVVQAHPNHAVTFVDNHDSQPEEALESFVEEWFKPLAYALTLTREQGYPSVFYGDYYGIPTHGVPAMRSKIDPILEARQKYAYGPQHDYLDHPDVIGWTREGDSSHPKSGLATLITDGPGGSKRMYAGLKNAGETWYDITGNRSDTVKIGSDGWGEFHVNDGSVSIYVQK

SEQ ID NO: 30040 - protein, 485 aa, Bacillus sp.
HHNGTNGTMMQYFEWYLPNDGNHWNRLNSDASNLKSKGITAVWIPPAWKATSQNDVGYGAYDLYDLGEFNQKGTVRTKYGTRSQLQAAVTSLKNNGIQVYGDVVMNHKGGADLTEMVRAVEVNPNNRNQEVTGEYTIEAWTRFDFPGRGNTHSSFKWRWYHFDGVDWDQSRELSNRIYKFRGHGKAWDWEVDTEFGNYDYLMYADYDMDHPEVVNELRNWGVWYTNTLGLDGFRIDAVKHIKYSFTRDWINHVRSATGKNMFAVAEFWKNDLGAIENYLQKTNWNHSVFDVPLHYNLYNASKSQGNYDMRNIFNGTVVQRHPSHAVTFVDNHDSQPEEALESFVDTWFKPLAYALTLTREQGYPSVFYGDYYGIPTHGVPAMRSKIDPILEARQKYAYGPQHDYLDHPDVIGWTREGDSSHPKSGLATLITDGPGGSKRMYAGLKNAGETWYDITGNRSDTVKIGSDGWGEFHTNDGSVSIYVQK

SEQ ID NO: 30041 - protein, 485 aa, Bacillus sp.
HHNGTNGTMMQYFEWYLPNDGNHWNRLNSDASNLKSKGITAVWIPPAWKGASQNDVGYGAYDLYDLGEFNQKGTVRTKYGTRSQLQAAVTSLKNNGIQVYGDVVMNHKGGADATEMVRAVEVNPNNRNQEVTGEYTIEAWTRFDFPGRGNTHSSFKWRWYHFDGVDWDQSRKLNNRIYKFRGHGKAWDWEVDTEFGNYDYLMYADYDYDHPETTNEMRNWGVWYTNTLGLDGFRIDAVKHIKYSFTRDWINHVRSATGKNMFAVAEFWKNDLGAIENYLQKTNWNHSVFDVPLHYNLYNASKSGGNYDMRNIFNGTVVQRHPSHAVTFVDNHDSQPEEALESFVEEWFKPLAYALTLTREQGYPSVFYGDYYGIPTHGVPAMRSKIDPILEARQKYAYGPQHDYLDHPDVIGWTREGDSSHPKSGLATLITDGPGGSKRMYAGLKNAGETWYDITGNRSDTVKIGSDGWGEFHVNDGSVSIYVQK

SEQ ID NO: 30042 - protein, 485 aa, Bacillus sp.
HHNGTNGTMMQYFEWYLPNDGNHWNRLNSDASNLKSKGITAVWIPPAWKGASQNDVGYGAYDLYDLGEFNQKGTVRTKYGTRSQLQAAVTSLKNNGINVYGDVVMNHKGGADATEMVRAVEVNPNNRNQEVTGEYTIEAWTRFDFPGRGNTHSSFKWRWYHFDGVDWDQSRRLNNRIYKFRGHGKAWDWEVDTEFGNYDYLMYADIDYDHPESTNEMRNWGVWYTNTLGLDGFRIDAVKHIKYSFTRDWINHVRSATGKNMFAVAEFWKNDLGAIENYLQKTNWNHSVFDVPLHYNLYNASKSGGNYDMRNIFNGTVVQAHPMHAVTFVDNHDSQPEEALESFVEEWFKPLAYALTLTREQGYPSVFYGDYYGIPTHGVPAMRSKIDPILEARQKYAYGPQHDYLDHPDVIGWTREGDSSHPKSGLATLITDGPGGSKRMYAGLKNAGETWYDITGNRSDTVKIGSDGWGEFHVNDGSVSIYVQK

SEQ ID NO: 30043 - protein, 483 aa, Synthetic construct
HHNGTNGTMMQYFEWYLPNDGNHWNRLNSDASNLKSKGITAVWIPPAWKGASQNDVGYGAYDLYDLGEFNQKGTVRTKYGTRSQLQAAVTSLKNNGIQVYGDVVMNHKGGADATEMVRAVEVNPNNRNQEVTGEYTIEAWTRFDFPGRGNTHSSFKWRWYHFDGVDWDQSRRLNNRIYKFRGKAWDWEVDTEFGNYDYLMYADYDMDYPETTNEQRNWGVWYTNTLGLDGFRIDAVKHIKYSFTRDWINHVRSATGKNMFAVAEFWKNDLGAIENYLQKTNWNHSVFDVPLHYNLYNASKSGGNYDMRNIFNGTVVQRHPSHAVTFVDNHDSQPEEALESFVEEWFKPLAYALTLTREQGYPSVFYGDYYGIPTHGVPAMRSKIDPILEARQKYAYGPQHDYLDHPDVIGWTREGDSSHPKSGLATLITDGPGGSKRMYAGLKNAGETWYDITGNRSDTVKIGSDGWGEFHVNDGSVSIYVQK

SEQ ID NO: 30044 - protein, 485 aa, Synthetic construct
HHDGTNGTIMQYFEWNVPNDGQHWNRLHNNAQNLKNAGITAIWIPPAWKGTSQNDVGYGAYDLYDLGEFNQKGTVRTKYGTKAELERAIRSLKANGIQVYGDVVMNHKGGADATEMVRAVEVNPNNRNQEVTGEYTIEAWTRFDFPGRGNTHSSFKWRWYHFDGVDWDQSRRLNNRIYKFRGHGKAWDWEVDTENGNYDYLMYADIDMDHPEVINELNRWGVWYANTLNLDGFRLDAVKHIKFSFMRDWLGHVRGQTGKNLFAVAEYWKNDLGALENYLSKTNWTMSAFDVPLHYNLYQASNSSGNYDMRNLLNGTLVQRHPSHAVTFVDNHDTQPGEALESFVQGWFKPLAYATILTREQGYPQVFYGDYYGIPSDGVPSYRQQIDPLLKARQQYAYGRQHDYFDHWDVIGWTREGNASHPNSGLATIMSDGPGGSKWMYVGRQKAGEVWHDMTGNRSGTVTINQDGWGHFFVNGGSVSVWVKR

SEQ ID NO: 30045 - protein, 483 aa, Bacillus sp.
HHNGTNGTMMQYFEWYLPNDGNHWNRLNSDASNLKSKGIKAVWIPPAWKGASQNDVGYGAYDLYDLGEFNQRGTVRTKYGTRSQLQAAVTSLKNNGIQVYGDVVMNHKGGADATEMVRAVEVNPNNRNQEVTGEYTIEAWTRFDFPGRGNTHSSFKWRWYHFDGVDFDQSRRLNNRIYKFRGKAWDWEVDTEFGNYDYLMYADYDMDHPEVVNELRNWGVWYTNTLGLDGFRIDAVKHIKYSFTRDWINHVRSATGKNMFAVAEFWKNDLGAIENYLQKTNWNHSVFDVPLHYNLYNASKSGGNYDMRNIFNGTVVQAHPSQAVTFVDNHDSQPEEALESFVEEWFKPLAYALTLTREQGYPSVFYGDYYGIPTHGVPAMRSKIDPILEARQKYAYGPQHDYLDHPDVIGWTREGDSSHPKSGLATLITDGPGGSKRMYAGLKNAGETWYDITGNRSDTVKIGSDGWGEFHVNDGSVSIYVQK

SEQ ID NO: 30046 - protein, 485 aa, Bacillus sp.
HHNGTNGTMMQYFEWYLPNDGNHWNRLNSDASNLKSKGIKAVWIPPAWKAVSQNDVGYGAYDLYDLGEFNQKGTVRTKYGTRSQLQAAVTSLKNNGIQVYGDVVMNHKGGADATEMVRAVEVNPNNRNQEVTGEYTIEAWTRFDFPGRGNTHSSFKWRWYHFDGVDFDQSRNLTNRIYKFRGHGKAWDWEVDTEFGNYDYLMYTDYDMDHPEVVNELRNWGVWYTNTLGLDGFRIDAVKHIKYSFTRDWINHVRSATGKNMFAVAEFWKNDLGAIENYLQKTNWNHSVFDVPLHYNLYNASKSGGNYDMRNIFNGTVVQRHPSHAVTFVDNHDSQPEEALESFVEEWFKPLAYALTLTREQGYPSVFYGDYYGIPTHGVPAMRSKIDPILEARQKYAYGPQHDYLDHPDVIGWTREGDSSHPKSGLATLITDGPGGSKRMYAGLKNAGETWYDITGNRSDTVKIGSDGWGEFHVNDGSVSIYVQK

SEQ ID NO: 30047 - protein, 485 aa, Bacillus sp.
HHNGTNGTMMQYFEWYLPNDGNHWNRLNSDASNLKSKGIKAVWIPPAWKGASQNDVGYGAYDLYDLGEFNQRGTVRTKYGTRSQLQAAVTSLKNNGIQVYGDVVMNHKGGADLTEMVRAVEVNPNNRNQEVTGEYTIEAWTRFDFPGRGNTHSSFKWRWYHFDGVDFDQSRRLNNRIYKFRGHGKAWDWEVDTEFGNYDYLMYADYDMDHPEVVNELRNWGVWYTNTLGLDGFRIDAVKHIKYSFTRDWINHVRSATGKNMFAVAEFWKNDLGAIENYLQKTNWNHSVFDVPLHYNLYNASKSGGNYDMRNIFNGTVVQRHPSHAVTFVDNHDSQPEEALESFVEEWFKPLAYALTLTREQGYPSVFYGDYYGIPTHGVPAMRSKIDPILEARQKYAYGPQHDYLDHPDVIGWTREGDSSHPKSGLATLITDGPGGSKRMYAGLKNAGETWYDITGNRSDTVKIGSDGWGEFHVNDGSVSIYVQK

SEQ ID NO: 30048 - protein, 485 aa, Bacillus sp.
HHNGTNGTMMQYFEWYLPNDGNHWNRLNSDASNLKSKGITAVWIPPAWKAVSQNDVGYGAYDLYDLGEFNQKGTVRTKYGTRSQLQAAVTSLKNNGIQVYGDVVMNHKGGADATEMVRAVEVNPNNRNQEVTGEYTIEAWTRFDFPGRGNTHSSFKWRWYHFDGVDWDQSRNLTNRIYKFRGHGKAWDWEVDTEFGNYDYLMYTDYDMDHPEVVNELRNWGVWYTNTLGLDGFRIDAVKHIKYSFTRDWINHVRSATGKNMFAVAEFWKNDLGAIENYLQKTNWNHSVFDVPLHYNLYNASKSQGNYDMRNIFNGTVVQRHPSHAVTFVDNHDSQPEEALESFVDTWFKPLAYALTLTREQGYPSVFYGDYYGIPTHGVPAMRSKIDPILEARQKYAYGPQHDYLDHPDVIGWTREGDSSHPKSGLATLITDGPGGSKRMYAGLKNAGETWYDITGNRSDTVKIGSDGWGEFHVNGTSVSIYVQK

SEQ ID NO: 30049 - protein, 483 aa, Bacillus sp.
HHNGTNGTMMQYFEWYLPNDGNHWNRLNSDASNLKSKGITAVWIPPAWKATSQNDVGYGAYDLYDLGEFNQKGTVRTKYGTRSQLQAAVTSLKNNGIQVYGDVVMNHKGGADLTEMVRAVEVNPNNRNQEVTGEYTIEAWTRFDFPGRGNTHSSFKWRWYHFDGVDWDQSRELSNRIYKFRGKAWDWEVDTEFGNYDYLMYADYDMDHPEVVNELRNWGVWYTNTLGLDGFRIDAVKHIKYSFTRDWINHVRSATGKNMFAVAEFWKNDLGAIENYLQKTNWNHSVFDVPLHYNLYNASKSQGNYDMRNIFNGTVVQRHPSHAVTFVDNHDSQPEEALESFVDTWFKPLAYALTLTREQGYPSVFYGDYYGIPTHGVPAMRSKIDPILEARQKYAYGPQHDYLDHPDVIGWTREGDSSHPKSGLATLITDGPGGSKRMYAGLKNAGETWYDITGNRSDTVKIGSDGWGEFHTNDGSVSIYVQK

SEQ ID NO: 30050 - protein, 485 aa, Bacillus sp.
HHNGTNGTMMQYFEWYLPNDGNHWNRLNSDASNLKSKGITAVWIPPAWKGASQNDVGYGAYDLYDLGEFNQKGTVRTKYGTRSQLQAAVTSLKNNGIQVYGDVVMNHKGGADATEMVRAVEVNPNNRNQEVTGEYTIEAWTRFDFPGRGNTHSSFKWRWYHFDGVDWDQSRELDNRIYKFRGHGKAWDWEVDTEFGNYDYLMYTDYDMDHPEVVNELRNWGVWYTNTLGLDGFRIDAVKHIKYSFTRDWINHVRSATGKNMFAVAEFWKNDLGAIENYLQKTNWNHSVFDVPLHYNLYNASKSQGNYDMRNIFNGTVVQRHPSHAVTFVDNHDSQPEEALESFVDTWFKPLAYALTLTREQGYPSVFYGDYYGIPTHGVPAMRSKIDPILLARQKYAYGPQHDYLDHPDVIGWTREGDSSHPKSGLATLITDGPGGSKRMYAGLKNAGETWYDITGNRSDTVKIGSDGWGEFHVNDGSVSIYVQK

SEQ ID NO: 30051 - protein, 483 aa, Bacillus sp.
HHNGTNGTMMQYFEWYLPNDGNHWNRLNSDASNLKSKGITAVWIPPAWKAVSQNDVGYGAYDLYDLGEFNQKGTVRTKYGTRSQLQAAVTSLKNNGIQVYGDVVMNHKGGADATEMVRAVEVNPNNRNQEVTGEYTIEAWTRFDFPGRGNTHSSFKWRWYHFDGVDFDQSREFTNRIYKFRGKAWDWEVDTEFGNYDYLMYADYDYDHPESTNEMRNWGVWYTNTLGLDGFRIDAVKHIKYSFTRDWINHVRSATGKNMFAVAEFWKNDLGAIENYLQKTNWNHSVFDVPLHYNLYNASKSGGNYDMRNIFNGTVVQRHPSHAVTFVDNHDSQPEEALESFVPEWFKPLAYALTLTREQGYPSVFYGDYYGIPTHGVPAMRSKIDPILEARQKYAYGPQHDYLDHPDVIGWTREGDSSHPKSGLATLITDGPGGSKRMYAGLKNAGETWYDITGNRSDTVKIGSDGWGEFHVNGGSVSIYVQK

SEQ ID NO: 30052 - protein, 483 aa, Bacillus sp.
HHNGTNGTMMQYFEWYLPNDGNHWNRLNSDASNLKSKGIKAVWIPPAWKAVSQNDVGYGAYDLYDLGEFNQRGTVRTKYGTRSQLQAAVTSLKNNGIQVYGDVVMNHKGGADATEMVRAVEVNPNNRNQEVTGEYTIEAWTRFDFPGRGNTHSSFKWRWYHFDGVDWDQSRNLTNRIYKFRGKAWDWEVDTEFGNYDYLMYTDYDMDHPEVVNELRNWGVWYTNTLGLDGFRIDAVKHIKYSFTRDWINHVRSATGKNMFAVAEFWKNDLGAIENYLQKTNWNHSVFDVPLHYNLYNASKSGGNYDMRNIFNGTVVQRHPSHAVTFVDNHDSQPEEALESFVEEWFKPLAYALTLTREQGYPSVFYGDYYGIPTHGVPAMRSKIDPILEARQKYAYGPQHDYLDHPDVIGWTREGDSSHPKSGLATLITDGPGGSKRMYAGLKNAGETWYDITGNRSDTVKIGSDGWGEFHVNDGSVSIYVQK

SEQ ID NO: 30053 - protein, 485 aa, Bacillus sp.
HHNGTNGTMMQYFEWYLPNDGNHWNRLNSDASNLKSKGITAVWIPPAWKGASQNDVGYGAYDLYDLGEFNQKGTVRTKYGTRSQLQAAVTSLKNNGIQVYGDVVMNHKGGADATEMVRAVEVNPNNRNQEVTGEYTIEAWTRFDFPGRGNTHSSFKWRWYHFDGVDWDQSERLNNRIYKFRGHGKAWDWEVETEFGNYDYLMYADYDMDHPEVVNELRNWGVWYTNTLGLDGFRIDAVKHIKYSFTRDWINHVRSATGKNMFAVAEFWKNDLGAIENYLQKTNWNHSVFDVPLHYNLYNASKSGGNYDMRNIFNGTVVQRHPSHAVTFVDNHDSQPEEALESFVEEWFKPLAYALTLTREAGLPSVFYGDYYGIPTHGVPAMRSKIDPILEARQKYAYGPQHDYLDHPDVIGWTREGDSSHPKSGLATLITDGPGGSKRMYAGLKNAGETWYDITGNRSDTVKIGSDGWGEFHVNDGSVSIYVQK

SEQ ID NO: 30054 - protein, 485 aa, Synthetic construct
HHNGTNGTMMQYFEWYLPNDGNHWNRLNSDASNLKSKGITAVWIPPAWKGASQNDVGYGAYDLYDLGEFNQKGTVRTKYGTRSQLQAAVTSLKNNGIQVYGDVVMNHKGGADATEMVRAVEVNPNNRNQEVTGEYTIEAWTRFDFPGRGNTHSSFKWRWYHFDGVDWDQSRRLNNRIYKFRGHGKAWDWEVDTEFGNYDYLMYADYDYDHPETTNEQRNWGVWYTNTLGLDGFRIDAVKHIKYSFTRDWINHVRSATGKNMFAVAEFWKNDLGAIENYLQKTNWNHSVFDVPLHYNLYNASKSGGNYDMRNIFNGTVVQRHPSHAVTFVDNHDSQPEEALESFVEEWFKPLAYALTLTREQGYPSVFYGDYYGIPTHGVPAMRSKIDPILEARQKYAYGPQHDYLDHPDVIGWTREGDSSHPKSGLATLITDGPGGSKRMYAGLKNAGETWYDITGNRSDTVKIGSDGWGEFHVNDGSVSIYVQK

SEQ ID NO: 30055 - protein, 483 aa, Bacillus sp.
HHNGTNGTMMQYFEWYLPNDGNHWNRLNSDASNLKSKGIKAVWIPPAWKAVSQNDVGYGAYDLYDLGEFNQKGTVRTKYGTRSQLQAAVTSLKNNGIQVYGDVVMNHKGGADATEMVRAVEVNPNNRNQEVTGEYTIEAWTRFDFPGRGNTHSSFKWRWYHFDGVDFDQSRNLTNRIYKFRGKAWDWEVDTEFGNYDYLMYTDYDMDHPEVVNELRNWGVWYTNTLGLDGFRIDAVKHIKYSFTRDWINHVRSATGKNMFAVAEFWKNDLGAIENYLQKTNWNHSVFDVPLHYNLYNASKSGGNYDMRNIFNGTVVQRHPSHAVTFVDNHDSQPEEALESFVEEWFKPLAYALTLTREQGYPSVFYGDYYGIPTHGVPAMRSKIDPILEARQKYAYGPQHDYLDHPDVIGWTREGDSSHPKSGLATLITDGPGGSKRMYAGLKNAGETWYDITGNRSDTVKIGSDGWGEFHVNDGSVSIYVQK

SEQ ID NO: 30056 - protein, 483 aa, Synthetic construct
HHNGTNGTMMQYFEWYLPNDGNHWNRLNSDASNLKSKGITAVWIPPAWKGASQNDVGYGAYDLYDLGEFNQKGTVRTKYGTRSQLQAAVTSLKNNGIQVYGDVVMNHKGGADATEMVRAVEVNPNNRNQEVTGEYTIEAWTRFDFPGRGNTHSSFKWRWYHFDGVDWDQSRRLNNRIYKFRGKAWDWEVDTEFGNYDYLMYADYDMDLPETTNEVRNWGVWYTNTLGLDGFRIDAVKHIKYSFTRDWINHVRSATGKNMFAVAEFWKNDLGAIENYLQKTNWNHSVFDVPLHYNLYNASKSGGNYDMRNIFNGTVVQRHPSHAVTFVDNHDSQPEEALESFVEEWFKPLAYALTLTREQGYPSVFYGDYYGIPTHGVPAMRSKIDPILEARQKYAYGPQHDYLDHPDVIGWTREGDSSHPKSGLATLITDGPGGSKRMYAGLKNAGETWYDITGNRSDTVKIGSDGWGEFHVNDGSVSIYVQK

SEQ ID NO: 30057 - protein, 483 aa, Bacillus sp.
HHNGTNGTMMQYFEWYLPNDGNHWNRLNSDASNLKSKGITAVWIPPAWKAASQNDVGYGAYDLYDLGEFNQKGTVRTKYGTRSQLQAAVTSLKNNGIQVYGDVVMNHKGGADATEMVRAVEVNPNNRNQEVTGEYTIEAWTRFDFPGRGNTHSSFKWRWYHFDGVDWDQSRNLNNRIYKFRGKAWDWEVDTEFGNYDYLMYTDYDMDHPEVVNELRNWGVWYTNTLGLDGFRIDAVKHIKYSFTRDWINHVRSATGKNMFAVAEFWKNDLGAIENYLQKTNWNHSVFDVPLHYNLYNASQSGGNYDMRNIFNGTVVQRHPSHAVTFVDNHDSQPEEALESFVEPWFKPLAYALTLTREQGYPSVFYGDYYGIPTHGVPAMRSKIDPILEARQKYAYGPQHDYLDHPDVIGWTREGDSSHPKSGLATLITDGPGGSKRMYAGLKNAGETWYDITGNRSDTVKIGSDGWGEFHVNKSSVSIYVQK

SEQ ID NO: 30058 - protein, 483 aa, Bacillus sp.
HHNGTNGTMMQYFEWYLPNDGNHWNRLNSDASNLKSKGIKAVWIPPAWKGTSQNDVGYGAYDLYDLGEFNQKGTVRTKYGTRSQLQAAVTSLKNNGIQVYGDVVMNHKGGADATEMVRAVEVNPNNRNQEVTGEYTIEAWTRFDFPGRGNTHSSFKWRWYHFDGVDFDQSRNLNNRIYKFRGKAWDWEVDTEFGNYDYLMYVDYDMDHPEVVNELRNWGVWYTNTLGLDGFRIDAVKHIKYSFTRDWINHVRSATGKNMFAVAEFWKNDLGAIENYLQKTNWNHSVFDVPLHYNLYNASKSQGNYDMRNIFNGTVVQRHPSHAVTFVDNHDSQPEEALESFVDTWFKPLAYALTLTREQGYPSVFYGDYYGIPTHGVPAMRSKIDPILEARQKYAYGPQHDYLDHPDVIGWTREGDSSHPKSGLATLITDGPGGSKRMYAGLKNAGETWYDITGNRSDTVKIGSDGWGEFHVNGSSVSIYVQK

SEQ ID NO: 30059 - protein, 485 aa, Synthetic construct
HHNGTNGTMMQYFEWYLPNDGNHWNRLNSDASNLKSKGITAVWIPPAWKGASQNDVGYGAYDLYDLGEFNQKGTVRTKYGTRSQLQAAVTSLKNNGIQVYGDVVMNHKGGADATEMVRAVEVNPNNRNQEVTGEYTIEAWTRFDFPGRGNTHSSFKWRWYHFDGVDWDQSRRLNNRIYKFRGHGKAWDWEVDTEFGNYDYLMYADYDYDHPETTNEMRNWGVWYTNTLGLDGFRIDAVKHIKYSFTRDWINHVRSATGKNMFAVAEFWKNDLGAIENYLQKTNWNHSVFDVPLHYNLYNASKSGGNYDMRNIFNGTVVQRHPSHAVTFVDNHDSQPEEALESFVEEWFKPLAYALTLTREQGYPSVFYGDYYGIPTHGVPAMRSKIDPILEARQKYAYGPQHDYLDHPDVIGWTREGDSSHPKSGLATLITDGPGGSKRMYAGLKNAGETWYDITGNRSDTVKIGSDGWGEFHVNDGSVSIYVQK

SEQ ID NO: 30060 - protein, 485 aa, Bacillus sp.
HHNGTNGTMMQYFEWYLPNDGNHWNRLNSDASNLKSKGIKAVWIPPAWKGASQNDVGYGAYDLYDLGEFNQRGTVRTKYGTRSQLQAAVTSLKNNGIQVYGDVVMNHKGGADATEMVRAVEVNPNNRNQEVTGEYTIEAWTRFDFPGRGNTHSSFKWRWYHFDGVDFDQSRRLNNRIYKFRGHGKAWDWEVDTEFGNYDYLMYADYDMDHPEVVNELRNWGVWYTNTLGLDGFRIDAVKHIKYSFTRDWINHVRIATGKNMFAVAEFWKNDLGAIENYLQKTNWNHSVFDVPLHYNLYNASKSGGNYDMRNIFNGTVVQRHPSHAVTFVDNHDSQPEEALESFVDEWFKPLAYALTLTREQGYPSVFYGDYYGIPTHGVPAMRSKIDPILEARQKYAYGPQHDYLDHPDVIGWTREGDSSHPKSGLATLITDGPGGSKRMYAGLKNAGETWYDITGNRSDTVKIGSDGWGEFHVNDQSVSIYVQK

SEQ ID NO: 30061 - protein, 483 aa, Bacillus sp.
HHNGTNGTMMQYFEWYLPNDGNHWNRLNSDASNLKSKGITAVWIPPAWKAVSQNDVGYGAYDLYDLGEFNQKGTVRTKYGTRSQLQAAVTSLKNNGIQVYGDVVMNHKGGADLTEMVRAVEVNPNNRNQEVTGEYTIEAWTRFDFPGRGNTHSSFKWRWYHFDGVDWDQSREFTNRIYKFRGKAWDWEVDTEFGNYDYLMYVDYDMDHPEVVNELRNWGVWYTNTLGLDGFRIDAVKHIKYSFTRDWINHVRSATGKNMFAVAEFWKNDLGAIENYLQKTNWNHSVFDVPLHYNLYNASKSGGNYDMRNIFNGTVVQRHPSHAVTFVDNHDSQPEEALESFVETWFKPLAYALTLTREQGYPSVFYGDYYGIPTHGVPAMRSKIDPILEARQKYAYGPQHDYLDHPDVIGWTREGDSSHPKSGLATLITDGPGGSKRMYAGLKNAGETWYDITGNRSDTVKIGSDGWGEFHVNKASVSIYVQK

SEQ ID NO: 30062 - protein, 483 aa, Bacillus sp.
HHNGTNGTMMQYFEWYLPNDGNHWNRLNSDASNLKSKGITAVWIPPAWKAASQNDVGYGAYDLYDLGEFNQKGTVRTKYGTRSQLQAAVTSLKNNGIQVYGDVVMNHKGGADATEMVRAVEVNPNNRNQEVTGEYTIEAYTRFDFPGRGNTHSSFKWRWYHFDGVDFDQSRNLNNRIYKFRGKAWDWEVDTEFGNYDYLMYTDYDMDHPEVVNELRNWGVWYTNTLGLDGFRIDAVKHIKYSFTRDWINHVRSATGKNMFAVAEFWKNDLGAIENYLQKTNWNHSVFDVPLHYNLYNASKSGGNYDMRNIFNGTVVQRHPSHAVTFVDNHDSQPEEALESFVEEWFKPLAYALTLTREQGYPSVFYGDYYGIPTHGVPAMRSKIDPILEARQKYAYGPQHDYLDHPDVIGWTREGDSSHPKSGLATLITDGPGGSKRMYAGLKNAGETWYDITGNRSDTVKIGSDGWGEFHVNDGSVSIYVQK

SEQ ID NO: 30063 - protein, 483 aa, Bacillus sp.
HHNGTNGTMMQYFEWYLPNDGNHWNRLNSDASNLKSKGITAVWIPPAWKGASQNDVGYGAYDLYDLGEFNQKGTVRTKYGTRSQLQAAVTSLKNNGIQVYGDVVMNHKGGADATEMVRAVEVNPNNRNQEVTGEYTIEAWTRFDFPGRGNTHSSFKWRWYHFDGVDWDQSRRLNNRIYKFRGKAWEWEVDTENGFYDYLMYTDIDYDHSEVVNELRNWGVWYTNTLGLDGFRIDAVKHIKYSFTRDWINHVRSATGKNMFAVAEFWKNDLGAIENYLQKTNWNHSVFDVPLHYNLYNASKSGGNYDMRNIFNGTVVQRHPSHAVTFVDNHDSQPEEALESFVEEWFKPLAYALTLTREQGYPSVFYGDYYGIPTHGVPAMRSKIDPILEARQKYAYGPQHDYLDHPDVIGWTREGDSSHPKSGLATLITDGPGGSKRMYAGLKNAGETWYDITGNRSDTVKIGSDGWGEFHVNDGSVSIYVQK

SEQ ID NO: 30064 - protein, 483 aa, Bacillus sp.
HHNGTNGTMMQYFEWYLPNDGNHWNRLNSDASNLKSKGITAVWIPPAWKAVSQNDVGYGAYDLYDLGEFNQKGTVRTKYGTRSQLQAAVTSLKNNGIQVYGDVVMNHKGGADLTEMVRAVEVNPNNRNQEVTGEYTIEAWTRFDFPGRGNTHSSFKWRWYHFDGVDWDQSREFTNRIYKFRGKAWDWEVDTEFGNYDYLMYVDYDMDHPEVVNELRNWGVWYTNTLGLDGFRIDAVKHIKYSFTRDWINHVRSATGKNMFAVAEFWKNDLGAIENYLQKTNWNHSVFDVPLHYNLYNASKSGGNYDMRNIFNGTVVQRHPSHAVTFVDNHDSQPEEALESFVETWFKPLAYALTLTREQGYPSVFYGDYYGIPTHGVPAMRSKIDPILEARQKYAYGPQHDYLDHPDVIGWTREGDSSHPKSGLATLITDGPGGSKRMYAGLKNAGETWYDITGNRSDTVKIGSDGWGEFHVNDASVSIYVQK

SEQ ID NO: 30065 - protein, 483 aa, Bacillus sp.
HHNGTNGTMMQYFEWYLPNDGNHWNRLNSDASNLKSKGITAVWIPPAWKGASQNDVGYGAYDLYDLGEFNQKGTVRTKYGTRSQLQAAVTSLKNNGIQVYGDVVMNHKGGADATEMVRAVEVNPNNRNQEVTGEYTIEAWTRFDFPGRGNTHSSFKWRWYHFDGVDWDQSRELDNRIYKFRGKAWDWEVDTEFGNYDYLMYTDYDMDHPEVVNELRNWGVWYTNTLGLDGFRIDAVKHIKYSFTRDWINHVRSATGKNMFAVAEFWKNDLGAIENYLQKTNWNHSVFDVPLHYNLYNASKSQGNYDMRNIFNGTVVQANPNHAVTFVDNHDSQPEEALESFVDTWFKPLAYALTLTREQGYPSVFYGDYYGIPTHGVPAMRSKIDPILEARQKYAYGPQHDYLDHPDVIGWTREGDSSHPKSGLATLITDGPGGSKRMYAGLKNAGETWYDITGNRSDTVKIGSDGWGEFHVNGSSVSIYVQK

SEQ ID NO: 30066 - protein, 485 aa, Synthetic construct
HHNGTNGTMMQYFEWYLPNDGNHWNRLNSDASNLKSKGITAVWIPPAWKGASQNDVGYGAYDLYDLGEFNQKGTVRTKYGTRSQLQAAVTSLKNNGIQVYGDVVMNHKGGADATEMVRAVEVNPNNRNQEVTGEYTIEAWTRFDFPGRGNTHSSFKWRWYHFDGVDWDQSRRLNNRIYKFRGHGKAWDWEVDTEFGNYDYLMYADYDYDHPETTNEIRNWGVWYTNTLGLDGFRIDAVKHIKYSFTRDWINHVRSATGKNMFAVAEFWKNDLGAIENYLQKTNWNHSVFDVPLHYNLYNASKSGGNYDMRNIFNGTVVQRHPSHAVTFVDNHDSQPEEALESFVEEWFKPLAYALTLTREQGYPSVFYGDYYGIPTHGVPAMRSKIDPILEARQKYAYGPQHDYLDHPDVIGWTREGDSSHPKSGLATLITDGPGGSKRMYAGLKNAGETWYDITGNRSDTVKIGSDGWGEFHVNDGSVSIYVQK

SEQ ID NO: 30067 - protein, 483 aa, Bacillus sp.
HHNGTNGTMMQYFEWYLPNDGNHWNRLNSDASNLKSKGITAVWIPPAWKAVSQNDVGYGAYDLYDLGEFNQKGTVRTKYGTRSQLQAAVTSLKNNGIQVYGDVVMNHKGGADATEMVRAVEVNPNNRNQEVTGEYTIEAWTRFDFPGRGNTHSSFKWRWYHFDGVDWDQSRNLTNRIYKFRGKAWDWEVDTEFGNYDYLMYTDYDMDHPEVVNELRNWGVWYTNTLGLDGFRIDAVKHIKYSFTRDWINHVRSATGKNMFAVAEFWKNDLGAIENYLQKTNWNHSVFDVPLHYNLYNASKSGGNYDMRNIFNGTVVQRHPSHAVTFVDNHDSQPEEALESFVETWFKPLAYALTLTREQGYPSVFYGDYYGIPTHGVPAMRSKIDPILEARQKYAYGPQHDYLDHPDVIGWTREGDSSHPKSGLATLITDGPGGSKRMYAGLKNAGETWYDITGNRSDTVKIGSDGWGEFHVNDASVSIYVQK

SEQ ID NO: 30068 - protein, 483 aa, Bacillus sp.
HHNGTNGTMMQYFEWYLPNDGNHWNRLNSDASNLKSKGITAVWIPPAWKGASQNDVGYGAYDLYDLGEFNQRGTVRTKYGTRSQLQAAVTSLKNNGIQVYGDVVMNHKGGADLTEMVRAVEVNPNNRNQEVTGEYTIEAWTRFDFPGRGNTHSSFKWRWYHFDGVDFDQSRQLNNRIYKFRGKAWDWEVDTEFGNYDYLMYADYDMDHPEVVGELRNWGVWYTNTLGLDGFRIDAVKHIKYSFTRDWINHVRSATGKNMFAVAEFWKNDLGAIENYLQKTNWNHSVFDVPLHYNLYNASKSGGNYDMRNIFNGTVVQRHPSHAVTFVDNHDSQPEEALESFVEEWFKPLAYALTLTREQGLPSVFYGDYYGIPTHGVPAMRSKIDPILEARQKYAYGPQHDYLDHPDVIGWTREGDSSHPKSGLATLITDGPGGSKRMYAGLKNAGETWYDITGNRSDTVKIGSDGWGEFHVNDGSVSIYVQK

SEQ ID NO: 30069 - protein, 485 aa, Bacillus sp.
HHNGTNGTMMQYFEWYLPNDGNHWNRLNSDASNLKSKGIKAVWIPPAWKGASQNDVGYGAYDLYDLGEFNQRGTVRTKYGTRSQLQAAVTSLKNNGIQVYGDVVMNHKGGADATEMVRAVEVNPNNRNQEVTGEYTIEAYTRFDFPGRGNTHSSFKWRWYHFDGVDFDQSRRLNNRIYKFRGHGKAWDWEVDTEFGNYDYLMYADYDMDHPEVVNELRNWGVWYTNTLGLDGFRIDAVKHIKYSFTRDWINHVRSATGKNMFAVAEFWKNDLGAIENYLQKTNWNHSVFDVPLHYNLYNASKSGGNYDMRNIFNGTVVQRHPSHAVTFVDNHDSQPEEALESFVEEWFKPLAYALTLTREQGYPSVFYGDYYGIPTHGVPAMRSKIDPILEARQKYAYGPQHDYLDHPDVIGWTREGDSSHPKSGLATLITDGPGGSKRMYAGLKNAGETWYDITGNRSDTVKIGSDGWGEFHVNDGSVSIYVQK

SEQ ID NO: 30070 - protein, 483 aa, Bacillus sp.
HHNGTNGTMMQYFEWYLPNDGNHWNRLNSDASNLKSKGITAVWIPPAWKGASQNDVGYGAYDLYDLGEFNQKGTVRTKYGTRSQLQAAVTSLKNNGIQVYGDVVMNHKGGADATEMVRAVEVNPNNRNQEVTGEYTIEAYTRFDFPGRGNTHSSFKWRWYHFDGVDWDQSRELDNRIYKFRGKAWDWEVDTEFGNYDYLMYTDYDMDHPEVVNELRNWGVWYTNTLGLDGFRIDAVKHIKYSFTRDWINHVRSATGKNMFAVAEFWKNDLGAIENYLQKTNWNHSVFDVPLHYNLYNASKSQGNYDMRNIFNGTVVQRHPSHAVTFVDNHDSQPEEALESFVDTWFKPLAYALTLTREQGYPSVFYGDYYGIPTHGVPAMRSKIDPILEARQKYAYGPQHDYLDHPDVIGWTREGDSSHPKSGLATLITDGPGGSKRMYAGLKNAGETWYDITGNRSDTVKIGSDGWGEFHVNGSSVSIYVQK

SEQ ID NO: 30071 - protein, 483 aa, Bacillus sp.
HHNGTNGTMMQYFEWYLPNDGNHWNRLNSDASNLKSKGITAVWIPPAWKGASQNDVGYGAYDLYDLGEFNQKGTVRTKYGTRSQLQAAVTSLKNNGIQVYGDVVMNHKGGADYTEMVRAVEVNPNNRNQEVTGEYTIEAWTRFDFPGRGNTHSSFKWRWYHFDGVDWDQSERLNNRIYKFRGKAWDWEVDTEFGNYDYLMYADYDMDHPEVVNELRNWGVWYTNTLGLDGFRIDAVKHIKYSFTRDWINHVRSATGKNMFAVAEFWKNDLGAIENYLQKTNWNHSVFDVPLHYNLYNASKSGGNYDMRNIFNGTVVQRHPSHAVTFVDNHDSQPEEALESFVEEWFKPLAYALTLTREQGLPSVFYGDYYGIPTHGVPAMRSKIDPILLARQKYAYGPQHDYLDHPDVIGWTREGDSSHPPSGLATLITDGPGGSKRMYAGLKNAGETWYDITGNRSDTVKIGSDGWGEFHVNDGSVSIYVQK

SEQ ID NO: 30072 - protein, 483 aa, Bacillus sp.
HHNGTNKTMMQYFEWYLPNDGNHWNRLNSDASNLKSKGIKAVWIPPAWKGASQNDVGYGAYDLYDLGEFNQRGTVRTKYGTRSQLQAAVTSLKNNGIQVYGDVVMNHKGGADATEMVRAVEVNPNNRNQEVTGEYTIEAWTRFDFPGRGNTHSSFKWRWYHFDGVDFDQSRRLNNRIYKFRGKAWDWEVDTEFGNYDYLMYADYDMDHPEVVNELRNWGVWYTNTLGLDGFRIDAVKHIKYSFTRDWINHVRSATGKNMFAVAEFWKNDLGAIENYLQKTNWNHSVFDVPLHYNLYNASKSGGNYDMRNIFNGTVVQRHPSHAVTFVDNHDSQPEEALESFVEEWFKPLAYALTLTREQGYPSVFYGDYYGIPTHGVPAMRSKIDPILEARQKYAYGPQHDYLDHPDVIGWTREGDSSHPKSGLATLITDGPGGSKRMYAGLKNAGETWYDITGNRSDTVKIGSDGWGEFHVNDGSVSIYVQK

SEQ ID NO: 30073 - protein, 483 aa, Bacillus sp.
HHNGTNGTMMQYFEWYLPNDGNHWNRLNSDASNLKSKGITAVWIPPAWKGASQNDVGYGAYDLYDLGEFNQKGTVRTKYGTRSQLQAAVTSLKNNGIQVYGDVVMNHKGGADATEMVRAVEVNPNNRNQEVTGEYTIEAWTRFDFPGRGNTHSSFKWRWYHFDGVDWDQSRRLNNRIYKFRGKAWEWEVDTENGFYDYLMYTDIDYDHPSVVNELRNWGVWYTNTLGLDGFRIDAVKHIKYSFTRDWINHVRSATGKNMFAVAEFWKNDLGAIENYLQKTNWNHSVFDVPLHYNLYNASKSGGNYDMRNIFNGTVVQRHPSHAVTFVDNHDSQPEEALESFVEEWFKPLAYALTLTREQGYPSVFYGDYYGIPTHGVPAMRSKIDPILEARQKYAYGPQHDYLDHPDVIGWTREGDSSHPKSGLATLITDGPGGSKRMYAGLKNAGETWYDITGNRSDTVKIGSDGWGEFHVNDGSVSIYVQK

SEQ ID NO: 30074 - protein, 485 aa, Bacillus sp.
HHNGTNGTMMQYFEWYLPNDGNHWNRLNSDASNLKSKGITAVWIPPAWKGASQNDVGYGAYDLYDLGEFNQKGTVRTKYGTRSQLQAAVTSLKNNGIQVYGDVVMNHKGGAHATEMVRAVEVNPNNRNQEVTGEYTIEAWTRFDFPGRGNTHSSFKWRWYHFDGVDWDQSRRLNNRIYKFRGHGKAWDWEVDTEFGNYDYLMYADYDMDHPEVVNELRNWGVWYTNTLGLDGFRIDAVKHIKYSFTRDWINHVRSATGKNMFAVAEFWKNDLGAIENYLQKTNWNHSVFDVPLHYNLYNASKSAGNYDMRNIFNGTVVQRHPSHAVTFVDNHDSQPEEALESFVDTWFKPLAYALTLTREQGYPSVFYGDYYGIPTHGVPAMRSKIDPILEARQKYAYGPQHDYLDHPDVIGWTREGDSSHPKSGLATLITDGPGGSKRMYAGLKNAGETWYDITGNRSDTVKIGSDGWGEFHVNQSSVSIYVQK

SEQ ID NO: 30075 - protein, 483 aa, Bacillus sp.
HHNGTNGTMMQYFEWYLPNDGNHWNRLNSDASNLKSKGIKAVWIPPAWKGASQNDVGYGAYDLYDLGEFNQRGTVRTKYGTRSQLQAAVTSLKNNGIQVYGDVVMNHKGGADATEMVRAVEVNPNNRNQEVTGEYTIEAWTRFDFPGRGNTHSSFKWRWYHFDGVDFDQSRRLDNRIYKFRGKAWDWEVDTEFGNYDYLMYTDYDMDHPEVVNELRNWGVWYTNTLGLDGFRIDAVKHIKYSFTRDWINHVRSATGKNMFAVAEFWKNDLGAIENYLQKTNWNHSVFDVPLHYNLYNASKSGGNYDMRNIFNGTVVQRHPSHAVTFVDNHDSQPEEALESFVEEWFKPLAYALTLTREQGYPSVFYGDYYGIPTHGVPAMRSKIDPILEARQKYAYGPQHDYLDHPDVIGWTREGDSSHPKSGLATLITDGPGGSKRMYAGLKNAGETWYDITGNRSDTVKIGSDGWGEFHVNDGSVSIYVQK

SEQ ID NO: 30076 - protein, 485 aa, Bacillus sp.
HHNGTNGTMMQYFEWYLPNDGNHWNRLNSDASNLKSKGIKAVWIPPAWKGASQNDVGYGAYDLYDLGEFNQRGTVRTKYGTRSQLQAAVTSLKNNGIQVYGDVVMNHKGGADATEMVPAVEVNPNNRNQEVTGEYTIEAWTRFDFPGRGNTHSSFKWRWYHFDGVDFDQSRRLNNRIYKFRGHSKAWDWEVDTEFGNYDYLMYADYDMDHPEVVNELRNWGVWYTNTLGLDGFRIDAVKHIKYSFTRDWINHVRSATGKNMFAVAEFWKNDLGAIENYLQKTNWNHSVFDVPLHYNLYNASKSGGNYDMRNIFNGTVVQANPNHAVTFVDNHDSQPEEALESFVEEWFKPLAYALTLTREQGYPSVFYGDYYGIPTHGVPAMRSKIDPILEARQKYAYGPQHDYLDHPDVIGWTREGDSSHPKSGLATLITDGPGGSKRMYAGLKNAGETWYDITGNRSDTVKIGSDGWGEFHVNDGSVSIYVQK

SEQ ID NO: 30077 - protein, 483 aa, Bacillus sp.
HHNGTNGTMMQYFEWYLPNDGNHWNRLNSDASNLKSKGITAVWIPPAWKGASQNDVGYGAYDLYDLGEFNQKGTVRTKYGTRSQLQAAVTSLKNNGIQVYGDVVMNHKGGADATEMVRAVEVNPNNRNQEVTGEYTIEAWTRFDFPGRGNTHSSFKWRWYHFDGVDWDQSRRLNNRIYKFRGKAWDWEVDTENGFYDYLMYADIDYDYPEVVTTLRVWGVWYTNTLGLDGFRIDAVKHIKYSFTRDWINHVRSATGKNMFAVAEFWKNDLGAIENYLQKTNWNHSVFDVPLHYNLYNASKSGGNYDMRNIFNGTVVQRHPSHAVTFVDNHDSQPEEALESFVEEWFKPLAYALTLTREQGYPSVFYGDYYGIPTHGVPAMRSKIDPILEARQKYAYGPQHDYLDHPDVIGWTREGDSSHPKSGLATLITDGPGGSKRMYAGLKNAGETWYDITGNRSDTVKIGSDGWGEFHVNDGSVSIYVQK

SEQ ID NO: 30078 - protein, 483 aa, Bacillus sp.
HHNGTNGTMMQYFEWYLPNDGNHWNRLNSDASNLKSKGITAVWIPPAWKGASQNDVGYGAYDLYDLGEFNQKGTVRTKYGTRSQLQAAVTSLKNNGIQVYGDVVMNHKGGADATEMVRAVEVNPNNRNQEVTGEYTIEAWTRFDFPGRGNTHSSFKWRWYHFDGVDWDQSRELDNRIYKFRGKAWDWEVDTEFGNYDYLMYTDYDMDHPEVVNELRNWGVWYTNTLGLDGFRIDAVKHIKYSFTRDWINHVRSATGKNMFAVAEFWKNDLGAIENYLQKTNWNHSVFDVPLHYNLYNASKSQGNYDMRNIFNGTVVQRHPSHAVTFVDNHDSQPEEALESFVDTWFKPLAYALTLTREQGYPSVFYGDYYGIPTHGVPAMRSKIDPILLARQKYAYGPQHDYLDHPDVIGWTREGDSSHPKSGLATLITDGPGGSKRMYAGLKNAGETWYDITGNRSDTVKIGSDGWGEFHVNGSSVSIYVQK

SEQ ID NO: 30079 - protein, 483 aa, Bacillus sp.
HHNGTNGTMMQYFEWYLPNDGNHWNRLNSDASNLKSKGITAVWIPPAWKGASQNDVGYGAYDLYDLGEFNQKGTVRTKYGTRSQLQAAVTSLKNNGIQVYGDVVMNHKGGADATEMVRAVEVNPNNRNQEVTGEYTIEAWTRFDFPGRGNTHSSFKWRWYHFDGVDWDQSRRLNNRIYKFRGKAWDWEVDTEFGNYDYLMYADYDMDHPEVVNELRNWGVWYTNTLGLDGFRIDAVKHIKYSFTRDWINHVRSATGKNMFAVAEFWKNDLGAIENYLQKTNWNHSVFDVPLHYNLYNASKSAGNYDMRNIFNGTVVQRHPSHAVTFVDNHDSQPEEALESFVDPWFKPLAYALTLTREQGYPSVFYGDYYGIPTHGVPAMRSKIDPILEARQKYAYGPQHDYLDHPDVIGWTREGDSSHPKSGLATLITDGPGGSKRMYAGLKNAGETWYDITGNRSDTVKIGSDGWGEFHVNDTSVFIYVQK

SEQ ID NO: 30080 - protein, 485 aa, Synthetic construct
HHNGTNGTMMQYFEWYLPNDGNHWNRLNSDASNLKSKGITAVWIPPAWKGASQNDVGYGAYDLYDLGEFNQKGTVRTKYGTRSQLQAAVTSLKNNGIQVYGDVVMNHKGGADATEMVRAVEVNPNNRNQEVTGEYTIEAWTRFDFPGRGNTHSSFKWRWYHFDGVDWDQSRRLNNRIYKFRGHGKAWDWEVDTEFGNYDYLMYADIDYDHPETTNEVRNWGVWYTNTLGLDGFRIDAVKHIKYSFTRDWINHVRSATGKNMFAVAEFWKNDLGAIENYLQKTNWNHSVFDVPLHYNLYNASKSGGNYDMRNIFNGTVVQRHPSHAVTFVDNHDSQPEEALESFVEEWFKPLAYALTLTREQGYPSVFYGDYYGIPTHGVPAMRSKIDPILEARQKYAYGPQHDYLDHPDVIGWTREGDSSHPKSGLATLITDGPGGSKRMYAGLKNAGETWYDITGNRSDTVKIGSDGWGEFHVNDGSVSIYVQK

SEQ ID NO: 30081 - protein, 483 aa, Bacillus sp.
HHNGTNGTMMQYFEWYLPNDGNHWNRLNSDASNLKSKGITAVWIPPAWKGASQNDVGYGAYDLYDLGEFNQKGTVRTKYGTRSQLQAAVTSLKNNGIQVYGDVVMNHKGGADATEMVRAVEVNPNNRNQEVTGEYTIEAWTRFDFPGRGNTHSSFKWRWYHFDGVDWDQSRRLNNRIYKFRGKAWDWEVDTENGFYDYLMYADIDYDLPEVVTTLRVWGVWYTNTLGLDGFRIDAVKHIKYSFTRDWINHVRSATGKNMFAVAEFWKNDLGAIENYLQKTNWNHSVFDVPLHYNLYNASKSGGNYDMRNIFNGTVVQRHPSHAVTFVDNHDSQPEEALESFVEEWFKPLAYALTLTREQGYPSVFYGDYYGIPTHGVPAMRSKIDPILEARQKYAYGPQHDYLDHPDVIGWTREGDSSHPKSGLATLITDGPGGSKRMYAGLKNAGETWYDITGNRSDTVKIGSDGWGEFHVNDGSVSIYVQK

SEQ ID NO: 30082 - protein, 483 aa, Synthetic construct
HHNGTNGTMMQYFEWYLPNDGNHWNRLNSDASNLKSKGITAVWIPPAWKGASQNDVGYGAYDLYDLGEFNQKGTVRTKYGTRSQLQAAVTSLKNNGIQVYGDVVMNHKGGADATEMVRAVEVNPNNRNQEVTGEYTIEAWTRFDFPGRGNTHSSFKWRWYHFDGVDWDQSRRLNNRIYKFRGKAWDWEVDTEFGNYDYLMYADYDMDYPETTNEMRNWGVWYTNTLGLDGFRIDAVKHIKYSFTRDWINHVRSATGKNMFAVAEFWKNDLGAIENYLQKTNWNHSVFDVPLHYNLYNASKSGGNYDMRNIFNGTVVQRHPSHAVTFVDNHDSQPEEALESFVEEWFKPLAYALTLTREQGYPSVFYGDYYGIPTHGVPAMRSKIDPILEARQKYAYGPQHDYLDHPDVIGWTREGDSSHPKSGLATLITDGPGGSKRMYAGLKNAGETWYDITGNRSDTVKIGSDGWGEFHVNDGSVSIYVQK

SEQ ID NO: 30083 - protein, 483 aa, Synthetic construct
HHNGTNGTMMQYFEWYLPNDGNHWNRLNSDASNLKSKGITAVWIPPAWKGASQNDVGYGAYDLYDLGEFNQKGTVRTKYGTRSQLQAAVTSLKNNGIQVYGDVVMNHKGGADATEMVRAVEVNPNNRNQEVTGEYTIEAWTRFDFPGRGNTHSSFKWRWYHFDGVDWDQSRRLNNRIYKFRGKAWDWEVDTEFGNYDYLMYADYDMDYPETTNEIRNWGVWYTNTLGLDGFRIDAVKHIKYSFTRDWINHVRSATGKNMFAVAEFWKNDLGAIENYLQKTNWNHSVFDVPLHYNLYNASKSGGNYDMRNIFNGTVVQRHPSHAVTFVDNHDSQPEEALESFVEEWFKPLAYALTLTREQGYPSVFYGDYYGIPTHGVPAMRSKIDPILEARQKYAYGPQHDYLDHPDVIGWTREGDSSHPKSGLATLITDGPGGSKRMYAGLKNAGETWYDITGNRSDTVKIGSDGWGEFHVNDGSVSIYVQK

SEQ ID NO: 30084 - protein, 483 aa, Bacillus sp.
HHNGTNGTMMQYFEWYLPNDGNHWNRLNSDASNLKSKGITAVWIPPAWKAVSQNDVGYGAYDLYDLGEFNQKGTVRTKYGTRSQLQAAVTSLKNNGIQVYGDVVMNHKGGADATEMVRAVEVNPNNRNQEVTGEYTIEAWTRFDFPGRGNTHSSFKWRWYHFDGVDFDQSREFTNRIYKFRGKAWDWEVDTEFGNYDYLMYVDYDMDHPEVVNELRNWGVWYTNTLGLDGFRIDAVKHIKYSFTRDWINHVRSATGKNMFAVAEFWKNDLGAIENYLQKTNWNHSVFDVPLHYNLYNASKSGGNYDMRNIFNGTVVQRHPSHAVTFVDNHDSQPEEALESFVETWFKPLAYALTLTREQGYPSVFYGDYYGIPTHGVPAMRSKIDPILEARQKYAYGPQHDYLDHPDVIGWTREGDSSHPKSGLATLITDGPGGSKRMYAGLKNAGETWYDITGNRSDTVKIGSDGWGEFHVNDASVSIYVQK

SEQ ID NO: 30085 - protein, 483 aa, Bacillus sp.
HHNGTNGTMMQYFEWYLPNDGNHWNRLNSDASNLKSKGIKAVWIPPAWKGASQNDVGYGAYDLYDLGEFNQRGTVRTKYGTRSQLQAAVTSLKNNGIQVYGDVVMNHKGGADATEMVRAVEVNPNNRNQEVTGEYTIEAWTRFDFPGRGNTHSSFKWRWYHFDGVDFDQSRRLNNRIYKFRGKAWDWEVDTEFGNYDYLMYADYDMDHPEVVNELRNWGVWYTNTLGLDGFRIDAVKHIKYSFTRDWINHVRSATGKNMFAVAEFWKNDLGAIENYLQKTNWNHSVFDVPLHYNLYNASKSGGNYDMRNIFNGTVVQANPSHAVTFVDNHDSQPEEALESFVEEWFKPLAYALTLTREQGYPSVFYGDYYGIPTHGVPAMRSKIDPILEARQKYAYGPQHDYLDHPDVIGWTREGDSSHPKSGLATLITDGPGGSKRMYAGLKNAGETWYDITGNRSDTVKIGSDGWGEFHVNDGSVSIYVQK

SEQ ID NO: 30086 - protein, 483 aa, Bacillus sp.
HHNGTNGTMMQYFEWYLPNDGNHWNRLNSDASNLKSKGITAVWIPPAWKGASQNDVGYGAYDLYDLGEFNQKGTVRTKYGTRSQLQAAVTSLKNNGIQVYGDVVMNHKGGADATEMVRAVEVNPNNRNQEVTGEYTIEAWTRFDFPGRGNTHSSFKWRWYHFDGVDWDQSRKLNNRIYKFRGKAWDWEVDTEFGNYDYLMYADYDYDHPESTNEMRNWGVWYTNTLGLDGFRIDAVKHIKYSFTRDWINHVRSATGKNMFAVAEFWKNDLGAIENYLQKTNWNHSVFDVPLHYNLYNASKSGGNYDMRNIFNGTVVQRHPSHAVTFVDNHDSQPEEALESFVEEWFKPLAYALTLTREQGYPSVFYGDYYGIPTHGVPAMRSKIDPILEARQKYAYGPQHDYLDHPDVIGWTREGDSSHPKSGLATLITDGPGGSKRMYAGLKNAGETWYDITGNRSDTVKIGSDGWGEFHVNDGSVSIYVQK

SEQ ID NO: 30087 - protein, 485 aa, Bacillus sp.
HHNGTNGTMMQYFEWYLPNDGNHWNRLNSDASNLKSKGITAVWIPPAWKAASQNDVGYGAYDLYDLGEFNQKGTVRTKYGTRSQLQAAVTSLKNNGIQVYGDVVMNHKGGADATEMVRAVEVNPNNRNQEVTGEYTIEAWTRFDFPGRGNTHSSFKWRWYHFDGVDWDQSRNLNNRIYKFRGHGKAWDWEVDTEFGNYDYLMYTDYDMDHPEVVNELRNWGVWYTNTLGLDGFRIDAVKHIKYSFTRDWINHVRSATGKNMFAVAEFWKNDLGAIENYLQKTNWNHSVFDVPLHYNLYNASQSGGNYDMRNIFNGTVVQRHPSHAVTFVDNHDSQPEEALESFVEPWFKPLAYALTLTREQGYPSVFYGDYYGIPTHGVPAMRSKIDPILEARQKYAYGPQHDYLDHPDVIGWTREGDSSHPKSGLATLITDGPGGSKRMYAGLKNAGETWYDITGNRSDTVKIGSDGWGEFHVNKSSVSIYVQK

SEQ ID NO: 30088 - protein, 483 aa, Bacillus sp.
HHNGTNGTMMQYFEWYLPNDGNHWNRLNSDASNLKSKGITAVWIPPAWKGASQNDVGYGAYDLYDLGEFNQKGTVRTKYGTRSQLQAAVTSLKNNGIQVYGDVVMNHKGGADATEMVRAVEVNPNNRNQEVTGEYTIEAWTRFDFPGRGNTHSSFKWRWYHFDGVDWDQSRRLNNRIYKFRGKAWDWEVDTENGFYDYLMYADIDYDYPEVVTTLRNWGVWYTNTLGLDGFRIDAVKHIKYSFTRDWINHVRSATGKNMFAVAEFWKNDLGAIENYLQKTNWNHSVFDVPLHYNLYNASKSGGNYDMRNIFNGTVVQRHPSHAVTFVDNHDSQPEEALESFVEEWFKPLAYALTLTREQGYPSVFYGDYYGIPTHGVPAMRSKIDPILEARQKYAYGPQHDYLDHPDVIGWTREGDSSHPKSGLATLITDGPGGSKRMYAGLKNAGETWYDITGNRSDTVKIGSDGWGEFHVNDGSVSIYVQK

SEQ ID NO: 30089 - protein, 483 aa, Bacillus sp.
HHNSTNGTMMQYFEWDLPNDGNHWNRLNSDASNLKSKGIKAVWIPPAWKAASQNDVGYGAYDLYDLGEFNQKGTVRTKYGTRSQLQAAVTSLKNNGIQVYGDVVMNHKGGADATEMVRAVEVNPNNRNQEVTGEYTIEAWTRFDFPGRGNTHSSFKWRWYHFDGVDWDQSRNLSNRIYKFRGKAWDWEVDTEFGNYDYLMYTDYDMDHPEVVNELRNWGVWYTNTLGLDGFRIDAVKHIKYSFTRDWINHVRSATGKNMFAVAEFWKNDLGAIENYLQKTNWNHSVFDVPLHYNLYNASKSGGNYDMRNIFNGTVVQRHPSHAVTFVDNHDSQPEEALESFVEEWFKPLAYALTLTREQGYPSVFYGDYYGIPTHGVPAMRSKIDPILEARQKYAYGPQHDYLDHPDVIGWTREGDSSHPKSGLATLITDGPGGSKRMYAGLKNAGETWYDITGNRSDTVKIGSDGWGEFHVNDGSVSIYVQK

SEQ ID NO: 30090 - protein, 483 aa, Bacillus sp.
HHNGTNGTMMQYFEWYLPNDGNHWNRLNSDASNLKSKGITAVWIPPAWKAASQNDVGYGAYDLYDLGEFNQKGTVRTKYGTRSQLQAAVTSLKNNGIQVYGDVVMNHKGGADATEMVRAVEVNPNNRNQEVTGEYTIEAWTRFDFPGRGNTHSSFKWRWYHFDGVDWDQSRNLNNRIYKFRGKAWDWEVDTEFGNYDYLMYTDYDMDHPEVVNELRNWGVWYTNTLGLDGFRIDAVKHIKYSFTRDWINHVRSATGKNMFAVAEFWKNDLGAIENYLQKTNWNHSVFDVPLHYNLYNASKSGGNYDMRNIFNGTVVQRHPSHAVTFVDNHDSQPEEALESFVETWFKPLAYALTLTREQGYPSVFYGDYYGIPTHGVPAMRSKIDPILEARQKYAYGPQHDYLDHPDVIGWTREGDSSHPKSGLATLITDGPGGSKRMYAGLKNAGETWYDITGNRSDTVKIGSDGWGEFHVNKASVSIYVQK

SEQ ID NO: 30091 - protein, 483 aa, Synthetic construct
HHNGTNGTMMQYFEWYLPNDGNHWNRLNSDASNLKSKGITAVWIPPAWKGASQNDVGYGAYDLYDLGEFNQKGTVRTKYGTRSQLQAAVTSLKNNGIQVYGDVVMNHKGGADATEMVRAVEVNPNNRNQEVTGEYTIEAWTRFDFPGRGNTHSSFKWRWYHFDGVDWDQSRRLNNRIYKFRGKAWDWEVDTEFGNYDYLMYADYDMDLPETTNEMRNWGVWYTNTLGLDGFRIDAVKHIKYSFTRDWINHVRSATGKNMFAVAEFWKNDLGAIENYLQKTNWNHSVFDVPLHYNLYNASKSGGNYDMRNIFNGTVVQRHPSHAVTFVDNHDSQPEEALESFVEEWFKPLAYALTLTREQGYPSVFYGDYYGIPTHGVPAMRSKIDPILEARQKYAYGPQHDYLDHPDVIGWTREGDSSHPKSGLATLITDGPGGSKRMYAGLKNAGETWYDITGNRSDTVKIGSDGWGEFHVNDGSVSIYVQK

SEQ ID NO: 30092 - protein, 483 aa, Bacillus sp.
HHNGTNGTMMQYFEWYLPNDGNHWNRLNSDASNLKSKGIKAVWIPPAWKAVSQNDVGYGAYDLYDLGEFNQRGTVRTKYGTRSQLQAAVTSLKNNGIQVYGDVVMNHKGGADATEMVRAVEVNPNNRNQEVTGEYTIEAWTRFDFPGRGNTHSSFKWRWYHFDGVDFDQSRDLENRIYKFRGKAWDWEVDTEFGNYDYLMYADYDMDHPEVVNELRNWGVWYTNTLGLDGFRIDAVKHIKYSFTRDWINHVRSATGKNMFAVAEFWKNDLGAIENYLQKTNWNHSVFDVPLHYNLYNASKSGGNYDMRNIFNGTVVQRHPSHAVTFVDNHDSQPEEALESFVEEWFKPLAYALTLTREQGYPSVFYGDYYGIPTHGVPAMRSKIDPILEARQKYAYGPQHDYLDHPDVIGWTREGDSSHPKSGLATLITDGPGGSKRMYAGLKNAGETWYDITGNRSDTVKIGSDGWGEFHVNDGSVSIYVQK

SEQ ID NO: 30093 - protein, 485 aa, Bacillus sp.
HHNGTNGTMMQYFEWYLPNDGNHWNRLNSDASNLKSKGITAVWIPPAWKGVSQNDVGYGAYDLYDLGEFNQKGTVRTKYGTRSQLQAAVTSLKNNGIQVYGDVVMNHKGGADATEMVRAVEVNPNNRNQEVTGEYTIEAWTRFDFPGRGNTHSSFKWRWYHFDGVDWDQSRELSNRIYKFRGHGKAWDWEVDTEFGNYDYLMYADYDYDHPESTNEMRNWGVWYTNTLGLDGFRIDAVKHIKYSFTRDWINHVRSATGKNMFAVAEFWKNDLGAIENYLQKTNWNHSVFDVPLHYNLYNASKSGGNYDMRNIFNGTVVQRHPSHAVTFVDNHDSQPEEALESFVEEWFKPLAYALTLTREQGYPSVFYGDYYGIPTHGVPAMRSKIDPILEARQKYAYGPQHDYLDHPDVIGWTREGDSSHPKSGLATLITDGPGGSKRMYAGLKNAGETWYDITGNRSDTVKIGSDGWGEFHVNDGSVSIYVQK

SEQ ID NO: 30094 - protein, 483 aa, Bacillus sp.
HHNGTNETMMQYFEWYLPNDGNHWNRLNSDASNLKSKGIKAVWIPPAWKGASQNDVGYGAYDLYDLGEFNQRGTVRTKYGTRSQLQAAVTSLKNNGIQVYGDVVMNHKGGADATEMVRAVEVNPNNRNQEVTGEYTIEAWTRFDFPGRGNTHSSFKWRWYHFDGVDFDQSRRLNNRIYKFRGKAWDWEVDTEFGNYDYLMYADYDMDHPEVVNELRNWGVWYTNTLGLDGFRIDAVKHIKYSFTRDWINHVRSATGKNMFAVAEFWKNDLGAIENYLQKTNWNHSVFDVPLHYNLYNASKSGGNYDMRNIFNGTVVQRHPSHAVTFVDNHDSQPEEALESFVEEWFKPLAYALTLTREQGYPSVFYGDYYGIPTHGVPAMRSKIDPILEARQKYAYGPQHDYLDHPDVIGWTREGDSSHPKSGLATLITDGPGGSKRMYAGLKNAGETWYDITGNRSDTVKIGSDGWGEFHVNDGSVSIYVQK

SEQ ID NO: 30095 - protein, 485 aa, Bacillus sp.
HHNGTNKTMMQYFEWYLPNDGNHWNRLNSDASNLKSKGITAVWIPPAWKGASQNDVGYGAYDLYDLGEFNQRGTVRTKYGTRSQLQAAVTSLKNNGIQVYGDVVMNHKGGADATEMVRAVEVNPNNRNQEVTGEYTIEAWTRFDFPGRGNTHSSFKWRWYHFDGVDFDQSRRLNNRIYKFRGHGKAWDWEVDTEFGNYDYLMYADYDMDHPEVVNELRNWGVWYTNTLGLDGFRIDAVKHIKYSFTRDWINHVRSATGKNMFAVAEFWKNDLGAIENYLQKTNWNHSVFDVPLHYNLYNASKSGGNYDMRNIFNGTVVQMQPSHAVTFVDNHDSQPEEALESFVEEWFKPLAYALTLTREQGYPSVFYGDYYGIPTHGVPAMRSKIDPILEARQKYAYGPQHDYLDHPDVIGWTREGDSSHPKSGLATLITDGPGGSKRMYAGLKNAGETWYDITGNRSDTVKIGSDGWGEFHVNDGSVSIYVQK

SEQ ID NO: 30096 - protein, 485 aa, Bacillus sp.
HHNGTNGTMMQYFEWYLPNDGNHWNRLNSDASNLKSKGITAVWIPPAWKGASQNDVGYGAYDLYDLGEFNQRGTVRTKYGTRSQLQAAVTSLKNNGIQVYGDVVMNHKGGADATEMVRAVEVNPNNRNQEVTGEYTIEAWTRFDFPGRGNTHSSFKWRWYHFDGVDFDQSRRLNNRIYKFRGHGKAWDWEVDTEFGNYDYLMYADYDMDHPEVVNELRNWGVWYTNTLGLDGFRIDAVKHIKYSFTRDWINHVRSATGKNMFAVAEFWKNDLGAIENYLQKTNWNHSVFDVPLHYNLYNASKSGGNYDMRNIFNGTVVQRHPSHAVTFVDNHDSQPEEALESFVETWFKPLAYALTLTREQGYPSVFYGDYYGIPTHGVPAMRSKIDPILEARQKYAYGPQHDYLDHPDVIGWTREGDSSHPKSGLATLITDGPGGSKRMYAGLKNAGETWYDITGNRSDTVKIGSDGWGEFHVNKASVSIFVQK

SEQ ID NO: 30097 - protein, 483 aa, Bacillus sp.
HHNGTNGTMMQYFEWYLPNDGNHWNRLNSDASNLKSKGITAVWIPPAWKGASQNDVGYGAYDLYDLGEFNQKGTVRTKYGTRSQLQAAVTSLKNNGIQVYGDVVMNHKGGADATEMVRAVEVNPNNRNQEVTGEYTIEAWTRFDFPGRGNTHSSFKWRWYHFDGVDWDQSRRLNNRIYKFRGKAWDWEVDTENGFYDYLMYADIDYDFPEVVTTLRMWGVWYTNTLGLDGFRIDAVKHIKYSFTRDWINHVRSATGKNMFAVAEFWKNDLGAIENYLQKTNWNHSVFDVPLHYNLYNASKSGGNYDMRNIFNGTVVQRHPSHAVTFVDNHDSQPEEALESFVEEWFKPLAYALTLTREQGYPSVFYGDYYGIPTHGVPAMRSKIDPILEARQKYAYGPQHDYLDHPDVIGWTREGDSSHPKSGLATLITDGPGGSKRMYAGLKNAGETWYDITGNRSDTVKIGSDGWGEFHVNDGSVSIYVQK

SEQ ID NO: 30098 - protein, 483 aa, Bacillus sp.
HHNGTNGTMMQYFEWYLPNDGNHWNRLNSDASNLKSKGITAVWIPPAWKAVSQNDVGYGAYDLYDLGEFNQKGTVRTKYGTRSQLQAAVTSLKNNGIQVYGDVVMNHKGGADLTEMVRAVEVNPNNRNQEVTGEYTIEAWTRFDFPGRGNTHSSFKWRWYHFDGVDFDQSRNLTNRIYKFRGKAWDWEVDTEFGNYDYLMYTDYDMDHPEVVNELRNWGVWYTNTLGLDGFRIDAVKHIKYSFTRDWINHVRSATGKNMFAVAEFWKNDLGAIENYLQKTNWNHSVFDVPLHYNLYNASKSGGNYDMRNIFNGTVVQRHPSHAVTFVDNHDSQPEEALESFVEEWFKPLAYALTLTREQGYPSVFYGDYYGIPTHGVPAMRSKIDPILEARQKYAYGPQHDYLDHPDVIGWTREGDSSHPKSGLATLITDGPGGSKRMYAGLKNAGETWYDITGNRSDTVKIGSDGWGEFHVNDGSVSIYVQK

SEQ ID NO: 30099 - protein, 485 aa, Bacillus sp.
HHNGTNGTMMQYFEWYLPNDGNHWNRLNSDASNLKSKGITAVWIPPAWKGASQNDVGYGAYDLYDLGEFNQKGTVRTKYGTRSQLQAAVTSLKNNGIQVYGDVVMNHKGGADATEMVRAVEVNPNNRNQEVTGEYTIEAYTRFDFPGRGNTHSSFKWRWYHFDGVDWDQSRELDNRIYKFRGHGKAWDWEVDTEFGNYDYLMYTDYDMDHPEVVNELRNWGVWYTNTLGLDGFRIDAVKHIKYSFTRDWINHVRSATGKNMFAVAEFWKNDLGAIENYLQKTNWNHSVFDVPLHYNLYNASKSQGNYDMRNIFNGTVVQRHPSHAVTFVDNHDSQPEEALESFVDTWFKPLAYALTLTREQGYPSVFYGDYYGIPTHGVPAMRSKIDPILEARQKYAYGPQHDYLDHPDVIGWTREGDSSHPKSGLATLITDGPGGSKRMYAGLKNAGETWYDITGNRSDTVKIGSDGWGEFHVNGSSVSIYVQK

SEQ ID NO: 30100 - protein, 483 aa, Bacillus sp.
HHNGTNGTMMQYFEWYLPNDGNHWNRLNSDASNLKSKGIKAVWIPPAWKAVSQNDVGYGAYDLYDLGEFNQRGTVRTKYGTRSQLQAAVTSLKNNGIQVYGDVVMNHKGGADATEMVRAVEVNPNNRNQEVTGEYTIEAWTRFDFPGRGNTHSSFKWRWYHFDGVDFDQSREFTNRIYKFRGKAWDWEVDTEFGNYDYLMYVDYDMDHPEVVNELRNWGVWYTNTLGLDGFRIDAVKHIKYSFTRDWINHVRSATGKNMFAVAEFWKNDLGAIENYLQKTNWNHSVFDVPLHYNLYNASKSGGNYDMRNIFNGTVVQAHPNHAVTFVDNHDSQPEEALESFVEEWFKPLAYALTLTREQGYPSVFYGDYYGIPTHGVPAMRSKIDPILEARQKYAYGPQHDYLDHPDVIGWTREGDSSHPKSGLATLITDGPGGSKRMYAGLKNAGETWYDITGNRSDTVKIGSDGWGEFHVNDGSVSIYVQK

SEQ ID NO: 30101 - protein, 485 aa, Bacillus sp.
HHNGTNGTMMQYFEWYLPNDGNHWNRLNSDASNLKSKGITAVWIPPAWKAVSQNDVGYGAYDLYDLGEFNQKGTVRTKYGTRSQLQAAVTSLKNNGIQVYGDVVMNHKGGADATEMVRAVEVNPNNRNQEVTGEYTIEAWTRFDFPGRGNTHSSFKWRWYHFDGVDWDQSRNLTNRIYKFRGHGKAWDWEVDTEFGNYDYLMYTDYDMDHPEVVNELRNWGVWYTNTLGLDGFRIDAVKHIKYSFTRDWINHVRSATGKNMFAVAEFWKNDLGAIENYLQKTNWNHSVFDVPLHYNLYNASQSGGNYDMRNIFNGTVVQRHPSHAVTFVDNHDSQPEEALESFVEPWFKPLAYALTLTREQGYPSVFYGDYYGIPTHGVPAMRSKIDPILEARQKYAYGPQHDYLDHPDVIGWTREGDSSHPKSGLATLITDGPGGSKRMYAGLKNAGETWYDITGNRSDTVKIGSDGWGEFHVNKSSVSIYVQK

SEQ ID NO: 30102 - protein, 485 aa, Bacillus sp.
HHNGTNGTMMQYFEWYLPNDGNHWNRLNSDASNLKSKGITAVWIPPAWKAVSQNDVGYGAYDLYDLGEFNQKGTVRTKYGTRSQLQAAVTSLKNNGIQVYGDVVMNHKGGADLTEMVRAVEVNPNNRNQEVTGEYTIEAWTRFDFPGRGNTHSSFKWRWYHFDGVDFDQSRNLTNRIYKFRGHGKAWDWEVDTEFGNYDYLMYTDYDMDHPEVVNELRNWGVWYTNTLGLDGFRIDAVKHIKYSFTRDWINHVRSATGKNMFAVAEFWKNDLGAIENYLQKTNWNHSVFDVPLHYNLYNASKSGGNYDMRNIFNGTVVQRHPSHAVTFVDNHDSQPEEALESFVEEWFKPLAYALTLTREQGYPSVFYGDYYGIPTHGVPAMRSKIDPILEARQKYAYGPQHDYLDHPDVIGWTREGDSSHPKSGLATLITDGPGGSKRMYAGLKNAGETWYDITGNRSDTVKIGSDGWGEFHVNDGSVSIYVQK

SEQ ID NO: 30103 - protein, 485 aa, Bacillus sp.
HHNGTNGTMMQYFEWYLPNDGNHWNRLNSDASNLKSKGITAVWIPPAWKAASQNDVGYGAYDLYDLGEFNQKGTVRTKYGTRSQLQAAVTSLKNNGIQVYGDVVMNHKGGADATEMVRAVEVNPNNRNQEVTGEYTIEAYTRFDFPGRGNTHSSFKWRWYHFDGVDFDQSRRLDNRIYKFRGHGKAWDWEVDTEFGNYDYLMYTDYDMDHPEVVNELRNWGVWYTNTLGLDGFRIDAVKHIKYSFTRDWINHVRSATGKNMFAVAEFWKNDLGAIENYLQKTNWNHSVFDVPLHYNLYNASKSGGNYDMRNIFNGTVVQRHPSHAVTFVDNHDSQPEEALESFVEEWFKPLAYALTLTREQGYPSVFYGDYYGIPTHGVPAMRSKIDPILEARQKYAYGPQHDYLDHPDVIGWTREGDSSHPKSGLATLITDGPGGSKRMYAGLKNAGETWYDITGNRSDTVKIGSDGWGEFHVNDGSVSIYVQK

SEQ ID NO: 30104 - protein, 483 aa, Bacillus sp.
HHNGTNGTMMQYFEWYLPNDGNHWNRLNSDASNLKSKGITAVWIPPAWKAASQNDVGYGAYDLYDLGEFNQKGTVRTKYGTRSQLQAAVTSLKNNGIQVYGDVVMNHKGGADATEMVRAVEVNPNNRNQEVTGEYTIEAWTRFDFPGRGNTHSSFKWRWYHFDGVDWDQSRRLDNRIYKFRGKAWDWEVDTEFGNYDYLMYTDYDMDHPEVVNELRNWGVWYTNTLGLDGFRIDAVKHIKYSFTRDWINHVRSATGKNMFAVAEFWKNDLGAIENYLQKTNWNHSVFDVPLHYNLYNASKSSGNYDMRNIFNGTVVQRHPSHAVTFVDNHDSQPEEALESFVDEWFKPLAYALTLTREQGYPSVFYGDYYGIPTHGVPAMRSKIDPILEARQKYAYGPQHDYLDHPDVIGWTREGDSSHPKSGLATLITDGPGGSKRMYAGLKNAGETWYDITGNRSDTVKIGSDGWGEFHVNKQSVSIYVQK

SEQ ID NO: 30105 - protein, 483 aa, Bacillus sp.
HHNGTNGTMMQYFEWYLPNDGNHWNRLNSDASNLKSKGITAVWIPPAWKGASQNDVGYGAYDLYDLGEFNQKGTVRTKYGTRSQLQAAVTSLKNNGIQVYGDVVMNHKGGADATEMVRAVEVNPNNRNQEVTGEYTIEAWTRFDFPGRGNTHSSFKWRWYHFDGVDWDQSRNFQNRIYKFRGKAWDWEVDTEFGNYDYLMYADIDYDHPESTNEMRNWGVWYTNTLGLDGFRIDAVKHIKYSFTRDWINHVRSATGKNMFAVAEFWKNDLGAIENYLQKTNWNHSVFDVPLHYNLYNASKSQGNYDMRNIFNGTVVQRHPSHAVTFVDNHDSQPEEALESFVDTWFKPLAYALTLTREQGYPSVFYGDYYGIPTHGVPAMRSKIDPILEARQKYAYGPQHDYLDHPDVIGWTREGDSSHPKSGLATLITDGPGGSKRMYAGLKNAGETWYDITGNRSDTVKIGSDGWGEFHVNGSSVSIYVQK

SEQ ID NO: 30106 - protein, 485 aa, Bacillus sp.
HHNGTNGTMMQYFEWYLPNDGNHWNRLNSDASNLKSKGITAVWIPPAWKAVSQNDVGYGAYDLYDLGEFNQKGTVRTKYGTRSQLQAAVTSLKNNGIQVYGDVVMNHKGGADATEMVRAVEVNPNNRNQEVTGEYTIEAWTRFDFPGRGNTHSSFKWRWYHFDGVDFDQSREFTNRIYKFRGHGKAWDWEVDTEFGNYDYLMYVDYDMDHPEVVNELRNWGVWYTNTLGLDGFRIDAVKHIKYSFTRDWINHVRSATGKNMFAVAEFWKNDLGAIENYLQKTNWNHSVFDVPLHYNLYNASKSQGNYDMRNIFNGTVVQRHPSHAVTFVDNHDSQPEEALESFVDTWFKPLAYALTLTREQGYPSVFYGDYYGIPTHGVPAMRSKIDPILEARQKYAYGPQHDYLDHPDVIGWTREGDSSHPKSGLATLITDGPGGSKRMYAGLKNAGETWYDITGNRSDTVKIGSDGWGEFHVNGTSVSIYVQK

SEQ ID NO: 30107 - protein, 485 aa, Bacillus sp.
HHNGTNGTMMQYFEWYLPNDGNHWNRLNSDASNLKSKGIKAVWIPPAWKGASQNDVGYGAYDLYDLGEFNQRGTVRTKYGTRSQLQAAVTSLKNNGIQVYGDVVMNHKGGADATEMVRAVEVNPNNRNQEVTGEYTIEAWTRFDFPGRGNTHSSFKWRWYHFDGVDFDQSRRLNNRIYKFRGHGKAWDWEVDTEFGNYDYLMYADYDMDHPEVVNELRNWGVWYTNTLGLDGFRIDAVKHIKYSFTRDWINHVRSATGKNMFAVAEFWKNDLGAIENYLQKTNWNHSVFDVPLHYNLYNASQSGGNYDMRNIFNGTVVQRHPSHAVTFVDNHDSQPEEALESFVEPWFKPLAYALTLTREQGYPSVFYGDYYGIPTHGVPAMRSKIDPILEARQKYAYGPQHDYLDHPDVIGWTREGDSSHPKSGLATLITDGPGGSKRMYAGLKNAGETWYDITGNRSDTVKIGSDGWGEFHVNKGSVSIYVQK

SEQ ID NO: 30108 - protein, 483 aa, Bacillus sp.
HHNGTNGTMMQYFEWYLPNDGNHWNRLNSDASNLKSKGIKAVWIPPAWKAASQNDVGYGAYDLYDLGEFNQKGTVRTKYGTRSQLQAAVTSLKNNGIQVYGDVVMNHKGGADATEMVRAVEVNPNNRNQEVTGEYTIEAWTRFDFPGRGNTHSSFKWRWYHFDGVDFDQSRNLNNRIYKFRGKAWDWEVDTEFGNYDYLMYTDYDMDHPEVVNELRNWGVWYTNTLGLDGFRIDAVKHIKYSFTRDWINHVRSATGKNMFAVAEFWKNDLGAIENYLQKTNWNHSVFDVPLHYNLYNASKSGGNYDMRNIFNGTVVQRHPSHAVTFVDNHDSQPEEALESFVEEWFKPLAYALTLTREQGYPSVFYGDYYGIPTHGVPAMRSKIDPILEARQKYAYGPQHDYLDHPDVIGWTREGDSSHPKSGLATLITDGPGGSKRMYAGLKNAGETWYDITGNRSDTVKIGSDGWGEFHVNDGSVSIYVQK

SEQ ID NO: 30109 - protein, 485 aa, Bacillus sp.
HHNGTNGTMMQYFEWYLPNDGNHWNRLNSDASNLKSKGIKAVWIPPAWKGASQNDVGYGAYDLYDLGEFNQKGTVRTKYGTRSQLQAAVTSLKNNGIQVYGDVVMNHKGGADATEMVRAVEVNPNNRNQEVTGEYTIEAWTRFDFPGRGNTHSSFKWRWYHFDGVDWDQSRELDNRIYKFRGHGKAWDWEVDTEFGNYDYLMYTDYDMDHPEVVNELRNWGVWYTNTLGLDGFRIDAVKHIKYSFTRDWINHVRSATGKNMFAVAEFWKNDLGAIENYLQKTNWNHSVFDVPLHYNLYNASKSQGNYDMRNIFNGTVVQRHPSHAVTFVDNHDSQPEEALESFVDTWFKPLAYALTLTREQGYPSVFYGDYYGIPTHGVPAMRSKIDPILEARQKYAYGPQHDYLDHPDVIGWTREGDSSHPKSGLATLITDGPGGSKRMYAGLKNAGETWYDITGNRSDTVKIGSDGWGEFHVNGSSVSIYVQK

SEQ ID NO: 30110 - protein, 485 aa, Bacillus sp.
HHNGTNGTMMQYFEWYLPNDGNHWNRLNSDASNLKSKGITAVWIPPAWKGASQNDVGYGAYDLYDLGEFNQKGTVRTKYGTRSQLQAAVTSLKNNGIQVYGDVVMNHKGGADATEMVRAVEVNPNNRNQEVTGEYTIEAWTRFDFPGRGNTHSSFKWRWYHFDGVDWDQSRRLNNRIYKFRGHGKAWDWEVDTEFGNYDYLMYADYDMDHPEVVNELRNWGVWYTNTLGLDGFRIDAVKHIKYSFTRDWINHVRSATGKNMFAVAEFWKNDLGEIENYLQKTNWNHSVFDVPLHYNLYNASKSQSNYDMRNIFNGTVVQRHPSHAVTFVDNHDSQPEEALESFVDEWFKPLAYALTLTREQGYPSVFYGDYYGIPTHGVPAMRSKIDPILEARQKYAYGPQHDYLDHPDVIGWTREGDSSHPKSGLATLITDGPGGSKRMYAGLKNAGETWYDITGNRSDTVKIGSDGWGEFHVNKQSVSIYVQK

SEQ ID NO: 30111 - protein, 483 aa, Bacillus sp.
HHNGTNGTMMQYFEWYLPNDGNHWNRLNSDASNLKSKGITAVWIPPAWKGASQNDVGYGAYDLYDLGEFNQKGTVRTKYGTRSQLQAAVTSLKNNGIQVYGDVVMNHKGGADATEMVRAVEVNPNNRNQEVTGEYTIEAWTRFDFPGRGNTHSSFKWRWYHFDGVDWDQSRRLNNRIYKFRGKAWDWEVDTENGFYDYLMYADIDYDYPEVVTTLRQWGVWYTNTLGLDGFRIDAVKHIKYSFTRDWINHVRSATGKNMFAVAEFWKNDLGAIENYLQKTNWNHSVFDVPLHYNLYNASKSGGNYDMRNIFNGTVVQRHPSHAVTFVDNHDSQPEEALESFVEEWFKPLAYALTLTREQGYPSVFYGDYYGIPTHGVPAMRSKIDPILEARQKYAYGPQHDYLDHPDVIGWTREGDSSHPKSGLATLITDGPGGSKRMYAGLKNAGETWYDITGNRSDTVKIGSDGWGEFHVNDGSVSIYVQK

SEQ ID NO: 30112 - protein, 483 aa, Bacillus sp.
HHNGTNGTMMQYFEWYLPNDGNHWNRLNSDASNLKSKGITAVWIPPAWKGASQNDVGYGAYDLYDLGEFNQKGTVRTKYGTRSQLQAAVTSLKNNGIQVYGDVVMNHKGGADATEMVRAVEVNPNNRNQEVTGEYTIEAWTRFDFPGRGNTHSSFKWRWYHFDGVDWDQSRKLNNRIYKFRGKAWDWEVDTEFGNYDYLMYADYDYDHPETTNEMRNWGVWYTNTLGLDGFRIDAVKHIKYSFTRDWINHVRSATGKNMFAVAEFWKNDLGAIENYLQKTNWNHSVFDVPLHYNLYNASKSGGNYDMRNIFNGTVVQRHPSHAVTFVDNHDSQPEEALESFVEEWFKPLAYALTLTREQGYPSVFYGDYYGIPTHGVPAMRSKIDPILEARQKYAYGPQHDYLDHPDVIGWTREGDSSHPKSGLATLITDGPGGSKRMYAGLKNAGETWYDITGNRSDTVKIGSDGWGEFHVNDGSVSIYVQK

SEQ ID NO: 30113 - protein, 483 aa, Bacillus sp.
HHNGTNGTMMQYFEWYLPNDGNHWNRLNSDASNLKSKGITAVWIPPAWKGASQNDVGYGAYDLYDLGEFNQKGTVRTKYGTRSQLQAAVTSLKNNGIQVYGDVVMNHKGGADATEMVRAVEVNPNNRNQEVTGEYTIEAWTRFDFPGRGNTHSSFKWRWYHFDGVDWDQSRRLNNRIYKFRGKAWDWEVDTENGFYDYLMYADIDYDLPEVVTTLRMWGVWYTNTLGLDGFRIDAVKHIKYSFTRDWINHVRSATGKNMFAVAEFWKNDLGAIENYLQKTNWNHSVFDVPLHYNLYNASKSGGNYDMRNIFNGTVVQRHPSHAVTFVDNHDSQPEEALESFVEEWFKPLAYALTLTREQGYPSVFYGDYYGIPTHGVPAMRSKIDPILEARQKYAYGPQHDYLDHPDVIGWTREGDSSHPKSGLATLITDGPGGSKRMYAGLKNAGETWYDITGNRSDTVKIGSDGWGEFHVNDGSVSIYVQK

SEQ ID NO: 30114 - protein, 483 aa, Bacillus sp.
HHNGTNGTMMQYFEWYLPNDGNHWNRLNSDASNLKSKGITAVWIPPAWKGASQNDVGYGAYDLYDLGEFNQKGTVRTKYGTRSQLQAAVTSLKNNGIQVYGDVVMNHKGGADATEMVRAVEVNPNNRNQEVTGEYTIEAWTRFDFPGRGNTHSSFKWRWYHFDGVDWDQSERLNNRIYKFRGKAWDWEVDTEFGNYDYLMYADYDMDHPEVVNELRNWGVWYTNTLGLDGFRIDAVKHIKYSFTRDWINHVRSATGKNMFAVAEFWKNDLGAIENYLQKTNWNHSVFDVPLHYNLYNASKSGGNYDMRNIFNGTVVQRHPSLAVTFVDNHDSQPEEALESFVEEWFKPLAYALTLTREAGLPSVFYGDYYGIPTHGVPAMRSKIDPILEARQKYAYGPQHDYLDHPDVIGWTREGDSSHPKSGLATLITDGPGGSKRMYAGLKNAGETWYDITGNRSDTVKIGSDGWGEFHVNDGSVSIYVQK

SEQ ID NO: 30115 - protein, 483 aa, Bacillus sp.
HHNGTNGTMMQYFEWYLPNDGNHWNRLNSDASNLKSKGITAVWIPPAWKGASQNDVGYGAYDLYDLGEFNQKGTVRTKYGTRSQLQAAVTSLKNNGIQVYGDVVMNHKGGADYTEMVRAVEVNPNNRNQEVTGEYTIEAWTRFDFPGRQNTHSSFKWRWYHFDGVDWDQSERLNNRIYKFRGKAWDWEVETEFGNYDYLMYADYDMDHPEVVNELRNWGVWYTNTLGLDGFRIDAVKHIKYSFTRDWINHVRSATGKNMFAVAEFWKNDLGAIENYLSKTNWNHSVFDVPLHYNLYNASKSGGNYDMRNIFNGTVVQRHPSHAVTFVDNHDSQPEEALESFVEEWFKPLAYALTLTREQGYPSVFYGDYYGIPTHGVPAMRSKIDPILEARQKYAYGPQHDYLDHPDVIGWTREGDSSHPKSGLATLITDGPGGSKRMYAGLKNAGETWYDITGNRSDTVKIGSDGWGEFHVNDGSVSIYVQK

SEQ ID NO: 30116 - protein, 483 aa, Bacillus sp.
HHNGTNGTMMQYFEWYLPNDGNHWNRLNSDASNLKSKGITAVWIPPAWKGASQNDVGYGAYDLYDLGEFNQKGTVRTKYGTRSQLQAAVTSLKNNGIQVYGDVVMNHKGGADATEMVRAVEVNPNNRNQEVTGEYTIEAWTRFDFPGRGNTHSSFKWRWYHFDGVDWDQSRRLNNRIYKFRGKAWDWEVDTENGFYDYLMYADIDYDYPEVVTTLRMWGVWYTNTLGLDGFRIDAVKHIKYSFTRDWINHVRSATGKNMFAVAEFWKNDLGAIENYLQKTNWNHSVFDVPLHYNLYNASKSGGNYDMRNIFNGTVVQRHPSHAVTFVDNHDSQPEEALESFVEEWFKPLAYALTLTREQGYPSVFYGDYYGIPTHGVPAMRSKIDPILEARQKYAYGPQHDYLDHPDVIGWTREGDSSHPKSGLATLITDGPGGSKRMYAGLKNAGETWYDITGNRSDTVKIGSDGWGEFHVNDGSVSIYVQK

SEQ ID NO: 30117 - protein, 483 aa, Bacillus sp.
HHNGTNGTMMQYFEWYLPNDGNHWNRLNSDASNLKSKGIKAVWIPPAWKGASQNDVGYGAYDLYDLGEFNQRGTVRTKYGTRSQLQAAVTSLKNNGIQVYGDVVMNHKGGADATEMVRAVEVNPNNRNQEVTGEYTIEAWTRFDFPGRGNTHSSFKWRWYHFDGVDFDQSRRLNNRIYKFRGKAWDWEVDTEFGNYDYLMYADYDMDHPEVVNELRNWGVWYTNTLGLDGFRIDAVKHIKYSFTRDWINHVRSATGKNMFAVAEFWKNDLGAIENYLQKTNWNHSVFDVPLHYNLYNASQSGGNYDMRNIFNGTVVQRHPSHAVTFVDNHDSQPEEALESFVEPWFKPLAYALTLTREQGYPSVFYGDYYGIPTHGVPAMRSKIDPILEARQKYAYGPQHDYLDHPDVIGWTREGDSSHPKSGLATLITDGPGGSKRMYAGLKNAGETWYDITGNRSDTVKIGSDGWGEFHVNKGSVSIYVQK

SEQ ID NO: 30118 - protein, 483 aa, Bacillus sp.
HHNGTNGTMMQYFEWYLPNDGNHWNRLNSDASNLKSKGITAVWIPPAWKGASQNDVGYGAYDLYDLGEFNQKGTVRTKYGTRSQLQAAVTSLKNNGIQVYGDVVMNHKGGADATEMVRAVEVNPNNRNQEVTGEYTIEAWTRFDFPGRGNTHSSFKWRWYHFDGVDWDQSRRLNNRIYKFRGKAWDWEVDTENGFYDYLMYADIDYDYPEVVTTLRIWGVWYTNTLGLDGFRIDAVKHIKYSFTRDWINHVRSATGKNMFAVAEFWKNDLGAIENYLQKTNWNHSVFDVPLHYNLYNASKSGGNYDMRNIFNGTVVQRHPSHAVTFVDNHDSQPEEALESFVEEWFKPLAYALTLTREQGYPSVFYGDYYGIPTHGVPAMRSKIDPILEARQKYAYGPQHDYLDHPDVIGWTREGDSSHPKSGLATLITDGPGGSKRMYAGLKNAGETWYDITGNRSDTVKIGSDGWGEFHVNDGSVSIYVQK

SEQ ID NO: 30119 - protein, 485 aa, Bacillus sp.
HHNGTNGTMMQYFEWYLPNDGNHWNRLNSDASNLKSKGIKAVWIPPAWKAASQNDVGYGAYDLYDLGEFNQKGTVRTKYGTRSQLQAAVTSLKNNGIQVYGDVVMNHKGGADATEMVRAVEVNPNNRNQEVTGEYTIEAWTRFDFPGRGNTHSSFKWRWYHFDGVDFDQSRNLSNRIYKFRGHGKAWDWEVDTEFGNYDYLMYTDYDMDHPEVVNELRNWGVWYTNTLGLDGFRIDAVKHIKYSFTRDWINHVRSATGKNMFAVAEFWKNDLGAIENYLQKTNWNHSVFDVPLHYNLYNASKSGGNYDMRNIFNGTVVQRHPSHAVTFVDNHDSQPEEALESFVEEWFKPLAYALTLTREQGYPSVFYGDYYGIPTHGVPAMRSKIDPILEARQKYAYGPQHDYLDHPDVIGWTREGDSSHPKSGLATLITDGPGGSKRMYAGLKNAGETWYDITGNRSDTVKIGSDGWGEFHVNDGSVSIYVQK

SEQ ID NO: 30120 - protein, 483 aa, Bacillus sp.
HHNGTNGTMMQYFEWYLPNDGNHWNRLNSDASNLKSKGITAVWIPPAWKGASQNDVGYGAYDLYDLGEFNQKGTVRTKYGTRSQLQAAVTSLKNNGIQVYGDVVMNHKGGADATEMVRAVEVNPNNRNQEVTGEYTIEAWTRFDFPGRGNTHSSFKWRWYHFDGVDWDQSRRLNNRIYKFRGKAWDWEVDTEFGNYDYLMYADYDMDHPEVVNELRNWGVWYTNTLGLDGFRIDAVKHIKYSFTRDWINHVRSATGKNMFAVAEFWKNDLGEIENYLQKTNWNHSVFDVPLHYNLYNASKSQSNYDMRNIFNGTVVQRHPSHAVTFVDNHDSQPEEALESFVDEWFKPLAYALTLTREQGYPSVFYGDYYGIPTHGVPAMRSKIDPILEARQKYAYGPQHDYLDHPDVIGWTREGDSSHPKSGLATLITDGPGGSKRMYAGLKNAGETWYDITGNRSDTVKIGSDGWGEFHVNKQSVSIYVQK

SEQ ID NO: 30121 - protein, 483 aa, Bacillus sp.
HHNGTNGTMMQYFEWYLPNDGNHWNRLNSDASNLKSKGIKAVWIPPAWKGASQNDVGYGAYDLYDLGEFNQRGTVRTKYGTRSQLQAAVTSLKNNGIQVYGDVVMNHKGGADATEMVRAVEVNPNNRNQEVTGEYTIEAWTRFDFPGRGNTHSSFKWRWYHFDGVDFDQSRRLNNRIYKFRGKAWDWEVDTEFGNYDYLMYADYDMDHPEVVNELRNWGVWYTNTLGLDGFRIDAVKHIKYSFTRDWINHVRIATGKNMFAVAEFWKNDLGAIENYLQKTNWNHSVFDVPLHYNLYNASKSGGNYDMRNIFNGTVVQRHPSHAVTFVDNHDSQPEEALESFVDEWFKPLAYALTLTREQGYPSVFYGDYYGIPTHGVPAMRSKIDPILEARQKYAYGPQHDYLDHPDVIGWTREGDSSHPKSGLATLITDGPGGSKRMYAGLKNAGETWYDITGNRSDTVKIGSDGWGEFHVNDQSVSIYVQK

SEQ ID NO: 30122 - protein, 485 aa, Bacillus sp.
HHNGTNGTMMQYFEWYLPNDGNHWNRLNSDASNLKSKGITAVWIPPAWKAVSQNDVGYGAYDLYDLGEFNQKGTVRTKYGTRSQLQAAVTSLKNNGIQVYGDVVMNHKGGADATEMVRAVEVNPNNRNQEVTGEYTIEAYTRFDFSGRGNTHSSFKWRWYHFDGVDFDQSREFTNRIYKFRGHGKAWDWEVDTEFGNYDYLMYVDYDMDHPEVVNELRNWGVWYTNTLGLDGFRIDAVKHIKYSFTRDWINHVRSATGKNMFAVAEFWKNDLGAIENYLQKTNWNHSVFDVPLHYNLYNASKSGGNYDMRNIFNGTVVQAHPNHAVTFVDNHDSQPEEALESFVEEWFKPLAYALTLTREQGYPSVFYGDYYGIPTHGVPAMRSKIDPILEARQKYAYGPQHDYLDHPDVIGWTREGDSSHPKSGLATLITDGPGGSKRMYAGLKNAGETWYDITGNRSDTVKIGSDGWGEFHVNDGSVSIYVQK

SEQ ID NO: 30123 - protein, 485 aa, Synthetic construct
HHNGTNGTMMQYFEWYLPNDGNHWNRLNSDASNLKSKGITAVWIPPAWKGASQNDVGYGAYDLYDLGEFNQKGTVRTKYGTRSQLQAAVTSLKNNGIQVYGDVVMNHKGGADATEMVRAVEVNPNNRNQEVTGEYTIEAWTRFDFPGRGNTHSSFKWRWYHFDGVDWDQSRRLNNRIYKFRGHGKAWDWEVDTEFGNYDYLMYADYDFDHPETTNEMRNWGVWYTNTLGLDGFRIDAVKHIKYSFTRDWINHVRSATGKNMFAVAEFWKNDLGAIENYLQKTNWNHSVFDVPLHYNLYNASKSGGNYDMRNIFNGTVVQRHPSHAVTFVDNHDSQPEEALESFVEEWFKPLAYALTLTREQGYPSVFYGDYYGIPTHGVPAMRSKIDPILEARQKYAYGPQHDYLDHPDVIGWTREGDSSHPKSGLATLITDGPGGSKRMYAGLKNAGETWYDITGNRSDTVKIGSDGWGEFHVNDGSVSIYVQK

SEQ ID NO: 30124 - protein, 485 aa, Bacillus sp.
HHNGTNGTMMQYFEWYLPNDGNHWNRLNSDASNLKSKGITAVWIPPAWKGASQNDVGYGAYDLYDLGEFNQKGTVRTKYGTRSQLQAAVTSLKNNGIQVYGDVVMNHKGGADYTEMVRAVEVNPNNRNQEVTGEYTIEAWTRFDFPGRQNTHSSFKWRWYHFDGVDWDQSERLNNRIYKFRGHGKAWDWEVETEFGNYDYLMYADYDMDHPEVVNELRNWGVWYTNTLGLDGFRIDAVKHIKYSFTRDWINHVRSATGKNMFAVAEFWKNDLGAIENYLSKTNWNHSVFDVPLHYNLYNASKSGGNYDMRNIFNGTVVQRHPSHAVTFVDNHDSQPEEALESFVEEWFKPLAYALTLTREQGYPSVFYGDYYGIPTHGVPAMRSKIDPILEARQKYAYGPQHDYLDHPDVIGWTREGDSSHPKSGLATLITDGPGGSKRMYAGLKNAGETWYDITGNRSDTVKIGSDGWGEFHVNDGSVSIYVQK

SEQ ID NO: 30125 - protein, 485 aa, Bacillus sp.
HHNGTNGTMMQYFEWYLPNDGNHWNRLNSDASNLKSKGIKAVWIPPAWKAVSQNDVGYGAYDLYDLGEFNQRGTVRTKYGTRSQLQAAVTSLKNNGIQVYGDVVMNHKGGADATEMVRAVEVNPNNRNQEVTGEYTIEAWTRFDFPGRGNTHSSFKWRWYHFDGVDWDQSRNLTNRIYKFRGHGKAWDWEVDTEFGNYDYLMYTDYDMDHPEVVNELRNWGVWYTNTLGLDGFRIDAVKHIKYSFTRDWINHVRSATGKNMFAVAEFWKNDLGAIENYLQKTNWNHSVFDVPLHYNLYNASKSGGNYDMRNIFNGTVVQRHPSHAVTFVDNHDSQPEEALESFVEEWFKPLAYALTLTREQGYPSVFYGDYYGIPTHGVPAMRSKIDPILEARQKYAYGPQHDYLDHPDVIGWTREGDSSHPKSGLATLITDGPGGSKRMYAGLKNAGETWYDITGNRSDTVKIGSDGWGEFHVNDGSVSIYVQK

SEQ ID NO: 30126 - protein, 483 aa, Bacillus sp.
HHNGTNGTMMQYFEWYLPNDGNHWNRLNSDASNLKSKGIKAVWIPPAWKGASQNDVGYGAYDLYDLGEFNQRGTVRTKYGTRSQLQAAVTSLKNNGIQVYGDVVMNHKGGADATEMVRAVEVNPNNRNQEVTGEYTIEAWTRFDFPGRGNTHSSFKWRWYHFDGVDFDQSRKLNNRIYKFRGKAWDWEVDTEFGNYDYLMYVDYDMDHPEVVNELRNWGVWYTNTLGLDGFRIDAVKHIKYSFTRDWINHVRSATGKNMFAVAEFWKNDLGAIENYLQKTNWNHSVFDVPLHYNLYNASKSGGNYDMRNIFNGTVVQRHPSHAVTFVDNHDSQPEEALESFVEEWFKPLAYALTLTREQGYPSVFYGDYYGIPTHGVPAMRSKIDPILEARQKYAYGPQHDYLDHPDVIGWTREGDSSHPKSGLATLITDGPGGSKRMYAGLKNAGETWYDITGNRSDTVKIGSDGWGEFHVNDGSVSIYVQK

SEQ ID NO: 30127 - protein, 483 aa, Bacillus sp.
HHNGTNGTMMQYFEWYLPNDGNHWNRLNSDASNLKSKGITAVWIPPAWKGASQNDVGYGAYDLYDLGEFNQKGTVRTKYGTRSQLQAAVTSLKNNGIQVYGDVVMNHKGGADATEMVRAVEVNPNNRNQEVTGEYTIEAWTRFDFPGRGNTHSSFKWRWYHFDGVDWDQSRRLNNRIYKFRGKAWDWEVDTENGFYDYLMYADIDYDYPEVVSTLRNWGVWYTNTLGLDGFRIDAVKHIKYSFTRDWINHVRSATGKNMFAVAEFWKNDLGAIENYLQKTNWNHSVFDVPLHYNLYNASKSGGNYDMRNIFNGTVVQRHPSHAVTFVDNHDSQPEEALESFVEEWFKPLAYALTLTREQGYPSVFYGDYYGIPTHGVPAMRSKIDPILEARQKYAYGPQHDYLDHPDVIGWTREGDSSHPKSGLATLITDGPGGSKRMYAGLKNAGETWYDITGNRSDTVKIGSDGWGEFHVNDGSVSIYVQK

SEQ ID NO: 30128 - protein, 483 aa, Bacillus sp.
HHNGTNGTMMQYFEWYLPNDGNHWNRLNSDASNLKSKGIKAVWIPPAWKGASQNDVGYGAYDLYDLGEFNQRGTVRTKYGTRSQLQAAVTSLKNNGIQVYGDVVMNHKGGADATEMVRAVEVNPNNRNQEVTGEYTIEAYTRFDFPGRGNTHSSFKWRWYHFDGVDFDQSRRLNNRIYKFRGKAWDWEVDTEFGNYDYLMYADYDMDHPEVVNELRNWGVWYTNTLGLDGFRIDAVKHIKYSFTRDWINHVRSATGKNMFAVAEFWKNDLGAIENYLQKTNWNHSVFDVPLHYNLYNASKSGGNYDMRNIFNGTVVQRHPSHAVTFVDNHDSQPEEALESFVEEWFKPLAYALTLTREQGYPSVFYGDYYGIPTHGVPAMRSKIDPILEARQKYAYGPQHDYLDHPDVIGWTREGDSSHPKSGLATLITDGPGGSKRMYAGLKNAGETWYDITGNRSDTVKIGSDGWGEFHVNDGSVSIYVQK

SEQ ID NO: 30129 - protein, 485 aa, Bacillus sp.
HHNGTNGTMMQYFEWYLPNDGNHWNRLNSDASNLKSKGITAVWIPPAWKAASQNDVGYGAYDLYDLGEFNQKGTVRTKYGTRSQLQAAVTSLKNNGIQVYGDVVMNHKGGADATEMVRAVEVNPNNRNQEVTGEYTIEAWTRFDFPGRGNTHSSFKWRWYHFDGVDWDQSRRLDNRIYKFRGHGKAWDWEVDTEFGNYDYLMYTDYDMDHPEVVNELRNWGVWYTNTLGLDGFRIDAVKHIKYSFTRDWINHVRSATGKNMFAVAEFWKNDLGAIENYLQKTNWNHSVFDVPLHYNLYNASKSSGNYDMRNIFNGTVVQRHPSHAVTFVDNHDSQPEEALESFVDEWFKPLAYALTLTREQGYPSVFYGDYYGIPTHGVPAMRSKIDPILEARQKYAYGPQHDYLDHPDVIGWTREGDSSHPKSGLATLITDGPGGSKRMYAGLKNAGETWYDITGNRSDTVKIGSDGWGEFHVNKQSVSIYVQK

SEQ ID NO: 30130 - protein, 483 aa, Bacillus sp.
HHNGTNGTMMQYFEWYLPNDGNHWNRLNSDASNLKSKGITAVWIPPAWKGASQNDVGYGAYDLYDLGEFNQKGTVRTKYGTRSQLQAAVTSLKNNGIQVYGDVVMNHKGGADATEMVRAVEVNPNNRNQEVTGEYTIEAWTRFDFPGRGNTHSSFKWRWYHFDGVDWDQSRRLNNRIYKFRGKAWDWEVDTEFGNYDYLMYADYDMDHPEVVNELRNWGVWYTNTLGLDGFRIDAVKHIKYSFTRDWINHVRSATGKNMFAVAEFWKNDLGAIENYLQKTNWNHSVFDVPLHYNLYNASKSAGNYDMRNIFNGTVVQRHPSHAVTFVDNHDSQPEEALESFVDPWFKPLAYALTLTREQGYPSVFYGDYYGIPTHGVPAMRSKIDPILEARQKYAYGPQHDYLDHPDVIGWTREGDSSHPKSGLATLITDGPGGSKRMYAGLKNAGETWYDITGNRSDTVKIGSDGWGEFHVNKSSVFIYVQK

SEQ ID NO: 30131 - protein, 483 aa, Bacillus sp.
HHNGTNGTMMQYFEWYLPNDGNHWNRLNSDASNLKSKGIKAVWIPPAWKGASQNDVGYGAYDLYDLGEFNQKGTVRTKYGTRSQLQAAVTSLKNNGIQVYGDVVMNHKGGADATEMVRAVEVNPNNRNQEVTGEYTIEAWTRFDFPGRGNTHSSFKWRWYHFDGVDWDQSRELDNRIYKFRGKAWDWEVDTEFGNYDYLMYTDYDMDHPEVVNELRNWGVWYTNTLGLDGFRIDAVKHIKYSFTRDWINHVRSATGKNMFAVAEFWKNDLGAIENYLQKTNWNHSVFDVPLHYNLYNASKSQGNYDMRNIFNGTVVQRHPSHAVTFVDNHDSQPEEALESFVDTWFKPLAYALTLTREQGYPSVFYGDYYGIPTHGVPAMRSKIDPILEARQKYAYGPQHDYLDHPDVIGWTREGDSSHPKSGLATLITDGPGGSKRMYAGLKNAGETWYDITGNRSDTVKIGSDGWGEFHVNGSSVSIYVQK

SEQ ID NO: 30132 - protein, 483 aa, Bacillus sp.
HHNGTNGTMMQYFEWYLPNDGNHWNRLNSDASNLKSKGIKAVWIPPAWKAASQNDVGYGAYDLYDLGEFNQKGTVRTKYGTRSQLQAAVTSLKNNGIQVYGDVVMNHKGGADATEMVRAVEVNPNNRNQEVTGEYTIEAWTRFDFPGRGNTHSSFKWRWYHFDGVDWDQSRDLDNRIYKFRGKAWDWEVDTEFGNYDYLMYADYDMDHPEVVNELRNWGVWYTNTLGLDGFRIDAVKHIKYSFTRDWINHVRSATGKNMFAVAEFWKNDLGAIENYLQKTNWNHSVFDVPLHYNLYNASKSGGNYDMRNIFNGTVVQRHPSHAVTFVDNHDSQPEEALESFVETWFKPLAYALTLTREQGYPSVFYGDYYGIPTHGVPAMRSKIDPILEARQKYAYGPQHDYLDHPDVIGWTREGDSSHPKSGLATLITDGPGGSKRMYAGLKNAGETWYDITGNRSDTVKIGSDGWGEFHVNKASVSIYVQK

SEQ ID NO: 30133 - protein, 485 aa, Bacillus sp.
HHNGTNGTMMQYFEWYLPNDGNHWNRLNSDASNLKSKGITAVWIPPAWKAVSQNDVGYGAYDLYDLGEFNQKGTVRTKYGTRSQLQAAVTSLKNNGIQVYGDVVMNHKGGADLTEMVRAVEVNPNNRNQEVTGEYTIEAWTRFDFPGRGNTHSSFKWRWYHFDGVDWDQSREFTNRIYKFRGHGKAWDWEVDTEFGNYDYLMYVDYDMDHPEVVNELRNWGVWYTNTLGLDGFRIDAVKHIKYSFTRDWINHVRSATGKNMFAVAEFWKNDLGAIENYLQKTNWNHSVFDVPLHYNLYNASKSQGNYDMRNIFNGTVVQRHPSHAVTFVDNHDSQPEEALESFVDTWFKPLAYALTLTREQGYPSVFYGDYYGIPTHGVPAMRSKIDPILEARQKYAYGPQHDYLDHPDVIGWTREGDSSHPKSGLATLITDGPGGSKRMYAGLKNAGETWYDITGNRSDTVKIGSDGWGEFHVNGTSVSIYVQK

SEQ ID NO: 30134 - protein, 483 aa, Bacillus sp.
HHNGTNGTMMQYFEWYLPNDGNHWNRLNSDASNLKSKGITAVWIPPAWKGASQNDVGYGAYDLYDLGEFNQRGTVRTKYGTRSQLQAAVTSLKNNGIQVYGDVVMNHKGGADLTEMVRAVEVNPNNRNQEVTGEYTIEAWTRFDFPGRGNTHSSFKWRWYHFDGVDFDQSRRLNNRIYKFRGKAWDWEVDTEFGNYDYLMYADYDMDHPEVVNELRNWGVWYTNTLGLDGFRIDAVKHIKYSFTRDWINHVRIATGKNMFAVAEFWKNDLGAIENYLQKTNWNHSVFDVPLHYNLYNASKSGGNYDMRNIFNGTVVQRHPSHAVTFVDNHDSQPEEALESFVDEWFKPLAYALTLTREQGYPSVFYGDYYGIPTHGVPAMRSKIDPILEARQKYAYGPQHDYLDHPDVIGWTREGDSSHPKSGLATLITDGPGGSKRMYAGLKNAGETWYDITGNRSDTVKIGSDGWGEFHVNDQSVSIYVQK

SEQ ID NO: 30135 - protein, 483 aa, Bacillus sp.
HHNGTNGTMMQYFEWYLPNDGNHWNRLNSDASNLKSKGITAVWIPPAWKAASQNDVGYGAYDLYDLGEFNQKGTVRTKYGTRSQLQAAVTSLKNNGIQVYGDVVMNHKGGADATEMVRAVEVNPNNRNQEVTGEYTIEAWTRFDFPGRGNTHSSFKWRWYHFDGVDWDQSRRTNNRIYKFRGKAWDWEVDTEFGNYDYLMYTDYDMDHPEVVNELRNWGVWYTNTLGLDGFRIDAVKHIKYSFTRDWINHVRSATGKNMFAVAEFWKNDLGAIENYLQKTNWNHSVFDVPLHYNLYNASQSGGNYDMRNIFNGTVVQRHPSHAVTFVDNHDSQPEEALESFVEPWFKPLAYALTLTREQGYPSVFYGDYYGIPTHGVPAMRSKIDPILEARQKYAYGPQHDYLDHPDVIGWTREGDSSHPKSGLATLITDGPGGSKRMYAGLKNAGETWYDITGNRSDTVKIGSDGWGEFHVNKSSVSIYVQK

SEQ ID NO: 30136 - protein, 483 aa, Bacillus sp.
HHNGTNGTMMQYFEWYLPNDGNHWNRLNSDASNLKSKGITAVWIPPAWKAVSQNDVGYGAYDLYDLGEFNQKGTVRTKYGTRSQLQAAVTSLKNNGIQVYGDVVMNHKGGADATEMVRAVEVNPNNRNQEVTGEYTIEAWTRFDFPGRGNTHSSFKWRWYHFDGVDWDQSRNLTNRIYKFRGKAWDWEVDTEFGNYDYLMYTDYDMDHPEVVNELRNWGVWYTNTLGLDGFRIDAVKHIKYSFTRDWINHVRSATGKNMFAVAEFWKNDLGAIENYLQKTNWNHSVFDVPLHYNLYNASKSQGNYDMRNIFNGTVVQRHPSHAVTFVDNHDSQPEEALESFVDTWFKPLAYALTLTREQGYPSVFYGDYYGIPTHGVPAMRSKIDPILEARQKYAYGPQHDYLDHPDVIGWTREGDSSHPKSGLATLITDGPGGSKRMYAGLKNAGETWYDITGNRSDTVKIGSDGWGEFHVNGTSVSIYVQK

SEQ ID NO: 30137 - protein, 483 aa, Bacillus sp.
HHNGTNGTMMQYFEWYLPNDGNHWNRLNSDASNLKSKGITAVWIPPAWKGASQNDVGYGAYDLYDLGEFNQKGTVRTKYGTRSQLQAAVTSLKNNGIQVYGDVVMNHKGGADATEMVRAVEVNPNNRNQEVTGEYTIEAWTRFDFPGRGNTHSSFKWRWYHFDGVDWDQSRNFQNRIYKFRGKAWDWEVDTEFGNYDYLMYADIDYDHPETTNEMRNWGVWYTNTLGLDGFRIDAVKHIKYSFTRDWINHVRSATGKNMFAVAEFWKNDLGAIENYLQKTNWNHSVFDVPLHYNLYNASKSQGNYDMRNIFNGTVVQRHPSHAVTFVDNHDSQPEEALESFVDTWFKPLAYALTLTREQGYPSVFYGDYYGIPTHGVPAMRSKIDPILEARQKYAYGPQHDYLDHPDVIGWTREGDSSHPKSGLATLITDGPGGSKRMYAGLKNAGETWYDITGNRSDTVKIGSDGWGEFHVNGSSVSIYVQK

SEQ ID NO: 30138 - protein, 483 aa, Bacillus sp.
HHNGTNGTMMQYFEWYLPNDGNHWNRLNSDASNLKSKGITAVWIPPAWKGASQNDVGYGAYDLYDLGEFNQKGTVRTKYGTRSQLQAAVTSLKNNGIQVYGDVVMNHKGGADATEMVRAVEVNPNNRNQEVTGEYTIEAWTRFDFPGRGNTHSSFKWRWYHFDGVDWDQSRRLNNRIYKFRGKAWDWEVDTENGFYDYLMYADIDYDYPEVVSTLRMWGVWYTNTLGLDGFRIDAVKHIKYSFTRDWINHVRSATGKNMFAVAEFWKNDLGAIENYLQKTNWNHSVFDVPLHYNLYNASKSGGNYDMRNIFNGTVVQRHPSHAVTFVDNHDSQPEEALESFVEEWFKPLAYALTLTREQGYPSVFYGDYYGIPTHGVPAMRSKIDPILEARQKYAYGPQHDYLDHPDVIGWTREGDSSHPKSGLATLITDGPGGSKRMYAGLKNAGETWYDITGNRSDTVKIGSDGWGEFHVNDGSVSIYVQK

SEQ ID NO: 30139 - protein, 483 aa, Synthetic construct
HHNGTNGTMMQYFEWYLPNDGNHWNRLNSDASNLKSKGITAVWIPPAWKGASQNDVGYGAYDLYDLGEFNQKGTVRTKYGTRSQLQAAVTSLKNNGIQVYGDVVMNHKGGADATEMVRAVEVNPNNRNQEVTGEYTIEAWTRFDFPGRGNTHSSFKWRWYHFDGVDWDQSRRLNNRIYKFRGKAWDWEVDTEFGNYDYLMYADYDMDYPESTNEMRNWGVWYTNTLGLDGFRIDAVKHIKYSFTRDWINHVRSATGKNMFAVAEFWKNDLGAIENYLQKTNWNHSVFDVPLHYNLYNASKSGGNYDMRNIFNGTVVQRHPSHAVTFVDNHDSQPEEALESFVEEWFKPLAYALTLTREQGYPSVFYGDYYGIPTHGVPAMRSKIDPILEARQKYAYGPQHDYLDHPDVIGWTREGDSSHPKSGLATLITDGPGGSKRMYAGLKNAGETWYDITGNRSDTVKIGSDGWGEFHVNDGSVSIYVQK

SEQ ID NO: 30140 - protein, 483 aa, Synthetic construct
HHNGTNGTMMQYFEWYLPNDGNHWNRLNSDASNLKSKGITAVWIPPAWKGASQNDVGYGAYDLYDLGEFNQKGTVRTKYGTRSQLQAAVTSLKNNGIQVYGDVVMNHKGGADATEMVRAVEVNPNNRNQEVTGEYTIEAWTRFDFPGRGNTHSSFKWRWYHFDGVDWDQSRRLNNRIYKFRGKAWDWEVDTEFGNYDYLMYADYDMDYPETTNEVRNWGVWYTNTLGLDGFRIDAVKHIKYSFTRDWINHVRSATGKNMFAVAEFWKNDLGAIENYLQKTNWNHSVFDVPLHYNLYNASKSGGNYDMRNIFNGTVVQRHPSHAVTFVDNHDSQPEEALESFVEEWFKPLAYALTLTREQGYPSVFYGDYYGIPTHGVPAMRSKIDPILEARQKYAYGPQHDYLDHPDVIGWTREGDSSHPKSGLATLITDGPGGSKRMYAGLKNAGETWYDITGNRSDTVKIGSDGWGEFHVNDGSVSIYVQK

SEQ ID NO: 30141 - protein, 485 aa, Bacillus sp.
HHNGTNKTMMQYFEWYLPNDGNHWNRLNSDASNLKSKGIKAVWIPPAWKGASQNDVGYGAYDLYDLGEFNQRGTVRTKYGTRSQLQAAVTSLKNNGIQVYGDVVMNHKGGADATEMVRAVEVNPNNRNQEVTGEYTIEAWTRFDFPGRGNTHSSFKWRWYHFDGVDFDQSRRLNNRIYKFRGHGKAWDWEVDTEFGNYDYLMYADYDMDHPEVVNELRNWGVWYTNTLGLDGFRIDAVKHIKYSFTRDWINHVRSATGKNMFAVAEFWKNDLGAIENYLQKTNWNHSVFDVPLHYNLYNASKSGGNYDMRNIFNGTVVQRHPSHAVTFVDNHDSQPEEALESFVEEWFKPLAYALTLTREQGYPSVFYGDYYGIPTHGVPAMRSKIDPILEARQKYAYGPQHDYLDHPDVIGWTREGDSSHPKSGLATLITDGPGGSKRMYAGLKNAGETWYDITGNRSDTVKIGSDGWGEFHVNDGSVSIYVQK

SEQ ID NO: 30142 - protein, 485 aa, Bacillus sp.
HHNGTNGTMMQYFEWYLPNDGNHWNRLNSDASNLKSKGIKAVWIPPAWKAASQNDVGYGAYDLYDLGEFNQKGTVRTKYGTRSQLQAAVTSLKNNGIQVYGDVVMNHKGGADATEMVRAVEVNPNNRNQEVTGEYTIEAWTRFDFPGRGNTHSSFKWRWYHFDGVDFDQSRNLNNRIYKFRGHGKAWDWEVDTEFGNYDYLMYTDYDMDHPEVVNELRNWGVWYTNTLGLDGFRIDAVKHIKYSFTRDWINHVRSATGKNMFAVAEFWKNDLGAIENYLQKTNWNHSVFDVPLHYNLYNASKSGGNYDMRNIFNGTVVQRHPSHAVTFVDNHDSQPEEALESFVEEWFKPLAYALTLTREQGYPSVFYGDYYGIPTHGVPAMRSKIDPILEARQKYAYGPQHDYLDHPDVIGWTREGDSSHPKSGLATLITDGPGGSKRMYAGLKNAGETWYDITGNRSDTVKIGSDGWGEFHVNDGSVSIYVQK

SEQ ID NO: 30143 - protein, 485 aa, Bacillus sp.
HHNGTNGTMMQYFEWYLPNDGNHWNRLNSDASNLKSKGITAVWIPPAWKGASQNDVGYGAYDLYDLGEFNQRGTVRTKYGTRSQLQAAVTSLKNNGIQVYGDVVMNHKGGADLTEMVRAVEVNPNNRNQEVTGEYTIEAWTRFDFPGRGNTHSSFKWRWYHFDGVDFDQSRRLNNRIYKFRGHGKAWDWEVDTEFGNYDYLMYADYDMDHPEVVNELRNWGVWYTNTLGLDGFRIDAVKHIKYSFTRDWINHVRIATGKNMFAVAEFWKNDLGAIENYLQKTNWNHSVFDVPLHYNLYNASKSGGNYDMRNIFNGTVVQRHPSHAVTFVDNHDSQPEEALESFVDEWFKPLAYALTLTREQGYPSVFYGDYYGIPTHGVPAMRSKIDPILEARQKYAYGPQHDYLDHPDVIGWTREGDSSHPKSGLATLITDGPGGSKRMYAGLKNAGETWYDITGNRSDTVKIGSDGWGEFHVNDQSVSIYVQK

SEQ ID NO: 30144 - protein, 485 aa, Bacillus sp.
HHNGTNGTMMQYFEWYLPNDGNHWNRLNSDASNLKSKGITAVWIPPAWKAVSQNDVGYGAYDLYDLGEFNQKGTVRTKYGTRSQLQAAVTSLKNNGIQVYGDVVMNHKGGADLTEMVRAVEVNPNNRNQEVTGEYTIEAWTRFDFPGRGNTHSSFKWRWYHFDGVDWDQSREFTNRIYKFRGHGKAWDWEVDTEFGNYDYLMYVDYDMDHPEVVNELRNWGVWYTNTLGLDGFRIDAVKHIKYSFTRDWINHVRSATGKNMFAVAEFWKNDLGAIENYLQKTNWNHSVFDVPLHYNLYNASKSGGNYDMRNIFNGTVVQRHPSHAVTFVDNHDSQPEEALESFVETWFKPLAYALTLTREQGYPSVFYGDYYGIPTHGVPAMRSKIDPILEARQKYAYGPQHDYLDHPDVIGWTREGDSSHPKSGLATLITDGPGGSKRMYAGLKNAGETWYDITGNRSDTVKIGSDGWGEFHVNKASVSIYVQK

SEQ ID NO: 30145 - protein, 485 aa, Bacillus sp.
HHNGTNGTMMQYFEWYLPNDGNHWNRLNSDASNLKSKGITAVWIPPAWKAASQNDVGYGAYDLYDLGEFNQQGTVRTKYGTRSQLQAAVTSLKNNGIQVYGDVVMNHKGGADLTEMVRAVEVNPNNRNQEVTGEYTIEAWTRFDFPGRGNTHSSFKWRWYHFDGVDFDQSRRLNNRIYKFRGHGKAWDWEVDTEFGNYDYLMYADYDMDHPEVVNELRNWGVWYTNTLGLDGFRIDAVKHIKYSFTRDWINHVRSATGKNMFAVAEFWKNDLGAIENYLQKTNWNHSVFDVPLHYNLYNASKSGGNYDMRNIFNGTVVQRHPSHAVTFVDNHDSQPEEALESFVEEWFKPLAYALTLTREQGYPSVFYGDYYGIPTHGVPAMRSKIDPILEARQKYAYGPQHDYLDHPDVIGWTREGDSSHPKSGLATLITDGPGGSKRMYAGLKNAGETWYDITGNRSDTVKIGSDGWGEFHVNDGSVSIYVQK

SEQ ID NO: 30146 - protein, 485 aa, Bacillus sp.
HHNGTNKTMMQYFEWYLPNDGNHWNRLNSDASNLKSKGIKAVWIPPAWKGASQNDVGYGAYDLYDLGEFNQKGTVRTKYGTRSQLQAAVTSLKNNGIQVYGDVVMNHKGGADATEMVRAVEVNPNNRNQEVTGEYTIEAWTRFDFPGRGNTHSSFKWRWYHFDGVDFDQSRRLNNRIYKFRGHGKAWDWEVDTEFGNYDYLMYADYDMDHPEVVNELRNWGVWYTNTLGLDGFRIDAVKHIKYSFTRDWINHVRSATGKNMFAVAEFWKNDLGAIENYLQKTNWNHSVFDVPLHYNLYNASKSGGNYDMRNIFNGTVVQMQPSHAVTFVDNHDSQPEEALESFVEEWFKPLAYALTLTREQGYPSVFYGDYYGIPTHGVPAMRSKIDPILEARQKYAYGPQHDYLDHPDVIGWTREGDSSHPKSGLATLITDGPGGSKRMYAGLKNAGETWYDITGNRSDTVKIGSDGWGEFHVNDGSVSIYVQK

SEQ ID NO: 30147 - protein, 485 aa, Bacillus sp.
HHNGTNGTMMQYFEWYLPNDGNHWNRLNSDASNLKSKGITAVWIPPAWKGASQNDVGYGAYDLYDLGEFNQKGTVRTKYGTRSQLQAAVTSLKNNGINVYGDVVMNHKGGADATEMVRAVEVNPNNRNQEVTGEYTIEAWTRFDFPGRGNTHSSFKWRWYHFDGVDWDQSRRLNNRIYKFRGHGKAWDWEVDTEFGNYDYLMYADIDYDHPETTNEMRNWGVWYTNTLGLDGFRIDAVKHIKYSFTRDWINHVRSATGKNMFAVAEFWKNDLGAIENYLQKTNWNHSVFDVPLHYNLYNASKSGGNYDMRNIFNGTVVQAHPMHAVTFVDNHDSQPEEALESFVEEWFKPLAYALTLTREQGYPSVFYGDYYGIPTHGVPAMRSKIDPILEARQKYAYGPQHDYLDHPDVIGWTREGDSSHPKSGLATLITDGPGGSKRMYAGLKNAGETWYDITGNRSDTVKIGSDGWGEFHVNDGSVSIYVQK

SEQ ID NO: 30148 - protein, 483 aa, Synthetic construct
HHNGTNGTMMQYFEWYLPNDGNHWNRLNSDASNLKSKGITAVWIPPAWKGASQNDVGYGAYDLYDLGEFNQKGTVRTKYGTRSQLQAAVTSLKNNGIQVYGDVVMNHKGGADATEMVRAVEVNPNNRNQEVTGEYTIEAWTRFDFPGRGNTHSSFKWRWYHFDGVDWDQSRRLNNRIYKFRGKAWDWEVDTEFGNYDYLMYADYDMDFPETTNEVRNWGVWYTNTLGLDGFRIDAVKHIKYSFTRDWINHVRSATGKNMFAVAEFWKNDLGAIENYLQKTNWNHSVFDVPLHYNLYNASKSGGNYDMRNIFNGTVVQRHPSHAVTFVDNHDSQPEEALESFVEEWFKPLAYALTLTREQGYPSVFYGDYYGIPTHGVPAMRSKIDPILEARQKYAYGPQHDYLDHPDVIGWTREGDSSHPKSGLATLITDGPGGSKRMYAGLKNAGETWYDITGNRSDTVKIGSDGWGEFHVNDGSVSIYVQK

SEQ ID NO: 30149 - protein, 483 aa, Bacillus sp.
HHNGTNGTMMQYFEWYLPNDGNHWNRLNSDASNLKSKGITAVWIPPAWKAVSQNDVGYGAYDLYDLGEFNQKGTVRTKYGTRSQLQAAVTSLKNNGIQVYGDVVMNHKGGADATEMVRAVEVNPNNRNQEVTGEYTIEAWTRFDFPGRGNTHSSFKWRWYHFDGVDWDQSRNLTNRIYKFRGKAWDWEVDTEFGNYDYLMYTDYDMDHPEVVNELRNWGVWYTNTLGLDGFRIDAVKHIKYSFTRDWINHVRSATGKNMFAVAEFWKNDLGAIENYLQKTNWNHSVFDVPLHYNLYNASQSGGNYDMRNIFNGTVVQRHPSHAVTFVDNHDSQPEEALESFVEPWFKPLAYALTLTREQGYPSVFYGDYYGIPTHGVPAMRSKIDPILEARQKYAYGPQHDYLDHPDVIGWTREGDSSHPKSGLATLITDGPGGSKRMYAGLKNAGETWYDITGNRSDTVKIGSDGWGEFHVNKSSVSIYVQK

SEQ ID NO: 30150 - protein, 483 aa, Synthetic construct
HHNGTNGTMMQYFEWYLPNDGNHWNRLNSDASNLKSKGITAVWIPPAWKGASQNDVGYGAYDLYDLGEFNQKGTVRTKYGTRSQLQAAVTSLKNNGIQVYGDVVMNHKGGADATEMVRAVEVNPNNRNQEVTGEYTIEAWTRFDFPGRGNTHSSFKWRWYHFDGVDWDQSRRLNNRIYKFRGKAWDWEVDTEFGNYDYLMYADIDMDYPETTNEVRNWGVWYTNTLGLDGFRIDAVKHIKYSFTRDWINHVRSATGKNMFAVAEFWKNDLGAIENYLQKTNWNHSVFDVPLHYNLYNASKSGGNYDMRNIFNGTVVQRHPSHAVTFVDNHDSQPEEALESFVEEWFKPLAYALTLTREQGYPSVFYGDYYGIPTHGVPAMRSKIDPILEARQKYAYGPQHDYLDHPDVIGWTREGDSSHPKSGLATLITDGPGGSKRMYAGLKNAGETWYDITGNRSDTVKIGSDGWGEFHVNDGSVSIYVQK

SEQ ID NO: 30151 - protein, 483 aa, Bacillus sp.
HHNGTNGTMMQYFEWYLPNDGNHWNRLNSDASNLKSKGIKAVWIPPAWKAASQNDVGYGAYDLYDLGEFNQKGTVRTKYGTRSQLQAAVTSLKNNGIQVYGDVVMNHKGGADATEMVRAVEVNPNNRNQEVTGEYTIEAWTRFDFPGRGNTHSSFKWRWYHFDGVDFDQSRNLSNRIYKFRGKAWDWEVDTEFGNYDYLMYTDYDMDHPEVVNELRNWGVWYTNTLGLDGFRIDAVKHIKYSFTRDWINHVRSATGKNMFAVAEFWKNDLGAIENYLQKTNWNHSVFDVPLHYNLYNASKSGGNYDMRNIFNGTVVQRHPSHAVTFVDNHDSQPEEALESFVEEWFKPLAYALTLTREQGYPSVFYGDYYGIPTHGVPAMRSKIDPILEARQKYAYGPQHDYLDHPDVIGWTREGDSSHPKSGLATLITDGPGGSKRMYAGLKNAGETWYDITGNRSDTVKIGSDGWGEFHVNDGSVSIYVQK

SEQ ID NO: 30152 - protein, 485 aa, Bacillus sp.
HHNGTNGTMMQYFEWYLPNDGNHWNRLNSDASNLKSKGITAVWIPPAWKGASQNDVGYGAYDLYDLGEFNQKGTVRTKYGTRSQLQAAVTSLKNNGIQVYGDVVMNHKGGADYTEMVRAVEVNPNNRNQEVTGEYTIEAWTRFDFPGRGNTHSSFKWRWYHFDGVDWDQSERLNNRIYKFRGHGKAWDWEVDTEFGNYDYLMYADYDMDHPEVVNELRNWGVWYTNTLGLDGFRIDAVKHIKYSFTRDWINHVRSATGKNMFAVAEFWKNDLGAIENYLQKTNWNHSVFDVPLHYNLYNASKSGGNYDMRNIFNGTVVQRHPSHAVTFVDNHDSQPEEALESFVEEWFKPLAYALTLTREQGLPSVFYGDYYGIPTHGVPAMRSKIDPILLARQKYAYGPQHDYLDHPDVIGWTREGDSSHPPSGLATLITDGPGGSKRMYAGLKNAGETWYDITGNRSDTVKIGSDGWGEFHVNDGSVSIYVQK

SEQ ID NO: 30153 - protein, 485 aa, Bacillus sp.
HHNGTNGTMMQYFEWYLPNDGNHWNRLNSDASNLKSKGIKAVWIPPAWKGASQNDVGYGAYDLYDLGEFNQRGTVRTKYGTRSQLQAAVTSLKNNGIQVYGDVVMNHKGGADATEMVRAVEVNPNNRNQEVTGEYTIEAWTRFDFPGRGNTHSSFKWRWYHFDGVDFDQSRKLNNRIYKFRGHGKAWDWEVDTEFGNYDYLMYVDYDMDHPEVVNELRNWGVWYTNTLGLDGFRIDAVKHIKYSFTRDWINHVRSATGKNMFAVAEFWKNDLGAIENYLQKTNWNHSVFDVPLHYNLYNASKSGGNYDMRNIFNGTVVQRHPSHAVTFVDNHDSQPEEALESFVEEWFKPLAYALTLTREQGYPSVFYGDYYGIPTHGVPAMRSKIDPILEARQKYAYGPQHDYLDHPDVIGWTREGDSSHPKSGLATLITDGPGGSKRMYAGLKNAGETWYDITGNRSDTVKIGSDGWGEFHVNDGSVSIYVQK

SEQ ID NO: 30154 - protein, 485 aa, Bacillus sp.
HHNGTNGTMMQYFEWYLPNDGNHWNRLNSDASNLKSKGITAVWIPPAWKAASQNDVGYGAYDLYDLGEFNQKGTVRTKYGTRSQLQAAVTSLKNNGIQVYGDVVMNHKGGADATEMVRAVEVNPNNRNQEVTGEYTIEAWTRFDFPGRGNTHSSFKWRWYHFDGVDWDQSRNLNNRIYKFRGHGKAWDWEVDTEFGNYDYLMYTDYDMDHPEVVNELRNWGVWYTNTLGLDGFRIDAVKHIKYSFTRDWINHVRSATGKNMFAVAEFWKNDLGAIENYLQKTNWNHSVFDVPLHYNLYNASKSSGNYDMRNIFNGTVVQRHPSHAVTFVDNHDSQPEEALESFVDEWFKPLAYALTLTREQGYPSVFYGDYYGIPTHGVPAMRSKIDPILEARQKYAYGPQHDYLDHPDVIGWTREGDSSHPKSGLATLITDGPGGSKRMYAGLKNAGETWYDITGNRSDTVKIGSDGWGEFHVNKQSVSIYVQK

SEQ ID NO: 30155 - protein, 485 aa, Bacillus sp.
HHNGTNGTMMQYFEWYLPNDGNHWNRLNSDASNLKSKGIKAVWIPPAWKAVSQNDVGYGAYDLYDLGEFNQRGTVRTKYGTRSQLQAAVTSLKNNGIQVYGDVVMNHKGGADATEMVRAVEVNPNNRNQEVTGEYTIEAWTRFDFPGRGNTHSSFKWRWYHFDGVDFDQSRELSNRIYKFRGHGKAWDWEVDTEFGNYDYLMYADYDMDHPEVVNELRNWGVWYTNTLGLDGFRIDAVKHIKYSFTRDWINHVRSATGKNMFAVAEFWKNDLGAIENYLQKTNWNHSVFDVPLHYNLYNASKSGGNYDMRNIFNGTVVQRHPSHAVTFVDNHDSQPEEALESFVEEWFKPLAYALTLTREQGYPSVFYGDYYGIPTHGVPAMRSKIDPILEARQKYAYGPQHDYLDHPDVIGWTREGDSSHPKSGLATLITDGPGGSKRMYAGLKNAGETWYDITGNRSDTVKIGSDGWGEFHVNDGSVSIYVQK

SEQ ID NO: 30156 - protein, 483 aa, Bacillus sp.
HHNGTNGTMMQYFEWYLPNDGNHWNRLNSDASNLKSKGITAVWIPPAWKGASQNDVGYGAYDLYDLGEFNQKGTVRTKYGTRSQLQAAVTSLKNNGIQVYGDVVMNHKGGADATEMVRAVEVNPNNRNQEVTGEYTIEAWTRFDFPGRGNTHSSFKWRWYHFDGVDWDQSRDLENRIYKFRGKAWDWEVDTEFGNYDYLMYADYDYDHPESTNEMRNWGVWYTNTLGLDGFRIDAVKHIKYSFTRDWINHVRSATGKNMFAVAEFWKNDLGAIENYLQKTNWNHSVFDVPLHYNLYNASKSGGNYDMRNIFNGTVVQRHPSHAVTFVDNHDSQPEEALESFVEEWFKPLAYALTLTREQGYPSVFYGDYYGIPTHGVPAMRSKIDPILEARQKYAYGPQHDYLDHPDVIGWTREGDSSHPKSGLATLITDGPGGSKRMYAGLKNAGETWYDITGNRSDTVKIGSDGWGEFHVNDGSVSIYVQK

SEQ ID NO: 30157 - protein, 485 aa, Bacillus sp.
HHNSTNGTMMQYFEWDLPNDGNHWNRLNSDASNLKSKGIKAVWIPPAWKAASQNDVGYGAYDLYDLGEFNQKGTVRTKYGTRSQLQAAVTSLKNNGIQVYGDVVMNHKGGADATEMVRAVEVNPNNRNQEVTGEYTIEAWTRFDFPGRGNTHSSFKWRWYHFDGVDWDQSRNLSNRIYKFRGHGKAWDWEVDTEFGNYDYLMYTDYDMDHPEVVNELRNWGVWYTNTLGLDGFRIDAVKHIKYSFTRDWINHVRSATGKNMFAVAEFWKNDLGAIENYLQKTNWNHSVFDVPLHYNLYNASKSGGNYDMRNIFNGTVVQRHPSHAVTFVDNHDSQPEEALESFVEEWFKPLAYALTLTREQGYPSVFYGDYYGIPTHGVPAMRSKIDPILEARQKYAYGPQHDYLDHPDVIGWTREGDSSHPKSGLATLITDGPGGSKRMYAGLKNAGETWYDITGNRSDTVKIGSDGWGEFHVNDGSVSIYVQK

SEQ ID NO: 30158 - protein, 485 aa, Bacillus sp.
HHNGTNGTMMQYFEWYLPNDGNHWNRLNSDASNLKSKGITAVWIPPAWKGASQNDVGYGAYDLYDLGEFNQKGTVRTKYGTRSQLQAAVTSLKNNGIQVYGDVVMNHKGGADATEMVRAVEVNPNNRNQEVTGEYTIEAWTRFDFPGRGNTHSSFKWRWYHFDGVDWDQSRDLENRIYKFRGHGKAWDWEVDTEFGNYDYLMYADYDYDHPESTNEMRNWGVWYTNTLGLDGFRIDAVKHIKYSFTRDWINHVRSATGKNMFAVAEFWKNDLGAIENYLQKTNWNHSVFDVPLHYNLYNASKSGGNYDMRNIFNGTVVQRHPSHAVTFVDNHDSQPEEALESFVEEWFKPLAYALTLTREQGYPSVFYGDYYGIPTHGVPAMRSKIDPILEARQKYAYGPQHDYLDHPDVIGWTREGDSSHPKSGLATLITDGPGGSKRMYAGLKNAGETWYDITGNRSDTVKIGSDGWGEFHVNDGSVSIYVQK

SEQ ID NO: 30159 - protein, 485 aa, Bacillus sp.
HHNGTNQTMMQYFEWYLPNDGNHWNRLNSDASNLKSKGIKAVWIPPAWKGASQNDVGYGAYDLYDLGEFNQRGTVRTKYGTRSQLQAAVTSLKNNGIQVYGDVVMNHKGGADATEMVRAVEVNPNNRNQEVTGEYTIEAWTRFDFPGRGNTHSSFKWRWYHFDGVDFDQSRRLNNRIYKFRGHGKAWDWEVDTEFGNYDYLMYADYDMDHPEVVNELRNWGVWYTNTLGLDGFRIDAVKHIKYSFTRDWINHVRSATGKNMFAVAEFWKNDLGAIENYLQKTNWNHSVFDVPLHYNLYNASKSGGNYDMRNIFNGTVVQRHPSHAVTFVDNHDSQPEEALESFVEEWFKPLAYALTLTREQGYPSVFYGDYYGIPTHGVPAMRSKIDPILEARQKYAYGPQHDYLDHPDVIGWTREGDSSHPKSGLATLITDGPGGSKRMYAGLKNAGETWYDITGNRSDTVKIGSDGWGEFHVNDGSVSIYVQK

SEQ ID NO: 30160 - protein, 483 aa, Synthetic construct
HHNGTNGTMMQYFEWYLPNDGNHWNRLNSDASNLKSKGITAVWIPPAWKGASQNDVGYGAYDLYDLGEFNQKGTVRTKYGTRSQLQAAVTSLKNNGIQVYGDVVMNHKGGADATEMVRAVEVNPNNRNQEVTGEYTIEAWTRFDFPGRGNTHSSFKWRWYHFDGVDWDQSRRLNNRIYKGHGKAWDWEVDTENGNYDYLMYADIDMDHPEVVNELRNWGVWYTNTLGLDGFRIDAVKHIKYSFTRDWINHVRSATGKNMFAVAEFWKNDLGAIENYLQKTNWNHSVFDVPLHYNLYNASKSGGNYDMRNIFNGTVVQRHPSHAVTFVDNHDSQPEEALESFVEEWFKPLAYALTLTREQGYPSVFYGDYYGIPTHGVPAMRSKIDPILEARQKYAYGPQHDYIDHPDVIGWTREGDSSAAKSGLAALITDGPGGSKRMYAGLKNAGETWYDITGNRSDTVKIGSDGWGEFHVNDGSVSIYVQK

SEQ ID NO: 30161 - protein, 483 aa, Bacillus sp.
HHNGTNKTMMQYFEWYLPNDGNHWNRLNSDASNLKSKGITAVWIPPAWKGASQNDVGYGAYDLYDLGEFNQRGTVRTKYGTRSQLQAAVTSLKNNGIQVYGDVVMNHKGGADATEMVRAVEVNPNNRNQEVTGEYTIEAWTRFDFPGRGNTHSSFKWRWYHFDGVDFDQSRRLNNRIYKFRGKAWDWEVDTEFGNYDYLMYADYDMDHPEVVNELRNWGVWYTNTLGLDGFRIDAVKHIKYSFTRDWINHVRSATGKNMFAVAEFWKNDLGAIENYLQKTNWNHSVFDVPLHYNLYNASKSGGNYDMRNIFNGTVVQMQPSHAVTFVDNHDSQPEEALESFVEEWFKPLAYALTLTREQGYPSVFYGDYYGIPTHGVPAMRSKIDPILEARQKYAYGPQHDYLDHPDVIGWTREGDSSHPKSGLATLITDGPGGSKRMYAGLKNAGETWYDITGNRSDTVKIGSDGWGEFHVNDGSVSIYVQK

SEQ ID NO: 30162 - protein, 485 aa, Bacillus sp.
HHNGTNGTMMQYFEWYLPNDGNHWNRLNSDASNLKSKGITAVWIPPAWKGASQNDVGYGAYDLYDLGEFNQKGTVRTKYGTRSQLQAAVTSLKNNGIQVYGDVVMNHKGGADATEMVRAVEVNPNNRNQEVTGEYTIEAWTRFDFPGRGNTHSSFKWRWYHFDGVDWDQSRELDNRIYKFRGHGKAWDWEVDTEFGNYDYLMYTDYDMDHPEVVNELRNWGVWYTNTLGLDGFRIDAVKHIKYSFTRDWINHVRSATGKNMFAVAEFWKNDLGAIENYLQKTNWNHSVFDVPLHYNLYNASKSQGNYDMRNIFNGTVVQANPNHAVTFVDNHDSQPEEALESFVDTWFKPLAYALTLTREQGYPSVFYGDYYGIPTHGVPAMRSKIDPILEARQKYAYGPQHDYLDHPDVIGWTREGDSSHPKSGLATLITDGPGGSKRMYAGLKNAGETWYDITGNRSDTVKIGSDGWGEFHVNGSSVSIYVQK

SEQ ID NO: 30163 - protein, 485 aa, Synthetic construct
HHNGTNGTMMQYFEWYLPNDGNHWNRLNSDASNLKSKGITAVWIPPAWKGASQNDVGYGAYDLYDLGEFNQKGTVRTKYGTRSQLQAAVTSLKNNGIQVYGDVVMNHKGGADATEMVRAVEVNPNNRNQEVTGEYTIEAWTRFDFPGRGNTHSSFKWRWYHFDGVDWDQSRRLNNRIYKFRGHGKAWDWEVDTEFGNYDYLMYADYDLDHPETTNEMRNWGVWYTNTLGLDGFRIDAVKHIKYSFTRDWINHVRSATGKNMFAVAEFWKNDLGAIENYLQKTNWNHSVFDVPLHYNLYNASKSGGNYDMRNIFNGTVVQRHPSHAVTFVDNHDSQPEEALESFVEEWFKPLAYALTLTREQGYPSVFYGDYYGIPTHGVPAMRSKIDPILEARQKYAYGPQHDYLDHPDVIGWTREGDSSHPKSGLATLITDGPGGSKRMYAGLKNAGETWYDITGNRSDTVKIGSDGWGEFHVNDGSVSIYVQK

SEQ ID NO: 30164 - protein, 485 aa, Bacillus sp.
HHNGTNGTMMQYFEWYLPNDGNHWNRLNSDASNLKSKGITAVWIPPAWKAASQNDVGYGAYDLYDLGEFNQKGTVRTKYGTRSQLQAAVTSLKNNGIQVYGDVVMNHKGGADATEMVRAVEVNPNNRNQEVTGEYTIEAWTRFDFPGRGNTHSSFKWRWYHFDGVDWDQSRRTNNRIYKFRGHGKAWDWEVDTEFGNYDYLMYTDYDMDHPEVVNELRNWGVWYTNTLGLDGFRIDAVKHIKYSFTRDWINHVRSATGKNMFAVAEFWKNDLGAIENYLQKTNWNHSVFDVPLHYNLYNASQSGGNYDMRNIFNGTVVQRHPSHAVTFVDNHDSQPEEALESFVEPWFKPLAYALTLTREQGYPSVFYGDYYGIPTHGVPAMRSKIDPILEARQKYAYGPQHDYLDHPDVIGWTREGDSSHPKSGLATLITDGPGGSKRMYAGLKNAGETWYDITGNRSDTVKIGSDGWGEFHVNKSSVSIYVQK

SEQ ID NO: 30165 - protein, 483 aa, Bacillus sp.
HHNGTNGTMMQYFEWYLPNDGNHWNRLNSDASNLKSKGITAVWIPPAWKAASQNDVGYGAYDLYDLGEFNQKGTVRTKYGTRSQLQAAVTSLKNNGIQVYGDVVMNHKGGADATEMVRAVEVNPNNRNQEVTGEYTIEAYTRFDFPGRGNTHSSFKWRWYHFDGVDFDQSRRLDNRIYKFRGKAWDWEVDTEFGNYDYLMYTDYDMDHPEVVNELRNWGVWYTNTLGLDGFRIDAVKHIKYSFTRDWINHVRSATGKNMFAVAEFWKNDLGAIENYLQKTNWNHSVFDVPLHYNLYNASKSGGNYDMRNIFNGTVVQRHPSHAVTFVDNHDSQPEEALESFVEEWFKPLAYALTLTREQGYPSVFYGDYYGIPTHGVPAMRSKIDPILEARQKYAYGPQHDYLDHPDVIGWTREGDSSHPKSGLATLITDGPGGSKRMYAGLKNAGETWYDITGNRSDTVKIGSDGWGEFHVNDGSVSIYVQK

SEQ ID NO: 30166 - protein, 483 aa, Bacillus sp.
HHNGTNGTMMQYFEWYLPNDGNHWNRLNSDASNLKSKGIKAVWIPPAWKGASQNDVGYGAYDLYDLGEFNQRGTVRTKYGTRSQLQAAVTSLKNNGIQVYGDVVMNHKGGADLTEMVRAVEVNPNNRNQEVTGEYTIEAWTRFDFPGRGNTHSSFKWRWYHFDGVDFDQSRRLNNRIYKFRGKAWDWEVDTEFGNYDYLMYADYDMDHPEVVNELRNWGVWYTNTLGLDGFRIDAVKHIKYSFTRDWINHVRSATGKNMFAVAEFWKNDLGAIENYLQKTNWNHSVFDVPLHYNLYNASKSGGNYDMRNIFNGTVVQRHPSHAVTFVDNHDSQPEEALESFVEEWFKPLAYALTLTREQGYPSVFYGDYYGIPTHGVPAMRSKIDPILEARQKYAYGPQHDYLDHPDVIGWTREGDSSHPKSGLATLITDGPGGSKRMYAGLKNAGETWYDITGNRSDTVKIGSDGWGEFHVNDGSVSIYVQK

SEQ ID NO: 30167 - protein, 485 aa, Bacillus sp.
HHNGTNGTMMQYFEWYLPNDGNHWNRLNSDASNLKSKGIKAVWIPPAWKGASQNDVGYGAYDLYDLGEFNQRGTVRTKYGTRSQLQAAVTSLKNNGIQVYGDVVMNHKGGADATEMVRAVEVNPNNRNQEVTGEYTIEAWTRFDFPGRGNTHSSFKWRWYHFDGVDFDQSRRLNNRIYKFRGHGKAWDWEVDTEFGNYDYLMYADYDMDHPEVVNELRNWGVWYTNTLGLDGFRIDAVKHIKYSFTRDWINHVRSATGKNMFAVAEFWKNDLGAIENYLQKTNWNHSVFDVPLHYNLYNASKSGGNYDMRNIFNGTVVQANPSHAVTFVDNHDSQPEEALESFVEEWFKPLAYALTLTREQGYPSVFYGDYYGIPTHGVPAMRSKIDPILEARQKYAYGPQHDYLDHPDVIGWTREGDSSHPKSGLATLITDGPGGSKRMYAGLKNAGETWYDITGNRSDTVKIGSDGWGEFHVNDGSVSIYVQK

SEQ ID NO: 30168 - protein, 485 aa, Bacillus sp.
HHNGTNGTMMQYFEWYLPNDGNHWNRLNSDASNLKSKGITAVWIPPAWKGASQNDVGYGAYDLYDLGEFNQKGTVRTKYGTRSQLQAAVTSLKNNGIQVYGDVVMNHKGGADATEMVRAVEVNPNNRNQEVTGEYTIEAWTRFDFPGRGNTHSSFKWRWYHFDGVDWDQSRRLNNRIYKFRGHGKAWDWEVDTEFGNYDYLMYADIDYDHPESTNEMRNWGVWYTNTLGLDGFRIDAVKHIKYSFTRDWINHVRSATGKNMFAVAEFWKNDLGAIENYLQKTNWNHSVFDVPLHYNLYNASKSGGNYDMRNIFNGTVVQRHPSHAVTFVDNHDSQPEEALESFVEEWFKPLAYALTLTREQGYPSVFYGDYYGIPTHGVPAMRSKIDPILEARQKYAYGPQHDYLDHPDVIGWTREGDSSHPKSGLATLITDGPGGSKRMYAGLKNAGETWYDITGNRSDTVKIGSDGWGEFHVNDGSVSIYVQK

SEQ ID NO: 30169 - protein, 483 aa, Bacillus sp.
HHNGTNGTMMQYFEWYLPNDGNHWNRLNSDASNLKSKGITAVWIPPAWKGASQNDVGYGAYDLYDLGEFNQKGTVRTKYGTRSQLQAAVTSLKNNGIQVYGDVVMNHKGGADATEMVRAVEVNPNNRNQEVTGEYTIEAWTRFDFPGRGNTHSSFKWRWYHFDGVDWDQSRRLNNRIYKFRGKAWDWEVDTENGFYDYLMYADIDYDFPEVVTTLRVWGVWYTNTLGLDGFRIDAVKHIKYSFTRDWINHVRSATGKNMFAVAEFWKNDLGAIENYLQKTNWNHSVFDVPLHYNLYNASKSGGNYDMRNIFNGTVVQRHPSHAVTFVDNHDSQPEEALESFVEEWFKPLAYALTLTREQGYPSVFYGDYYGIPTHGVPAMRSKIDPILEARQKYAYGPQHDYLDHPDVIGWTREGDSSHPKSGLATLITDGPGGSKRMYAGLKNAGETWYDITGNRSDTVKIGSDGWGEFHVNDGSVSIYVQK

SEQ ID NO: 30170 - protein, 485 aa, Bacillus sp.
HHNGTNGTMMQYFEWYLPNDGNHWNRLNSDASNLKSKGITAVWIPPAWKGASQNDVGYGAYDLYDLGEFNQKGTVRTKYGTRSQLQAAVTSLKNNGIQVYGDVVMNHKGGADATEMVRAVEVNPNNRNQEVTGEYTIEAWTRFDFPGRGNTHSSFKWRWYHFDGVDWDQSRNFQNRIYKFRGHGKAWDWEVDTEFGNYDYLMYADIDYDHPETTNEMRNWGVWYTNTLGLDGFRIDAVKHIKYSFTRDWINHVRSATGKNMFAVAEFWKNDLGAIENYLQKTNWNHSVFDVPLHYNLYNASKSQGNYDMRNIFNGTVVQRHPSHAVTFVDNHDSQPEEALESFVDTWFKPLAYALTLTREQGYPSVFYGDYYGIPTHGVPAMRSKIDPILEARQKYAYGPQHDYLDHPDVIGWTREGDSSHPKSGLATLITDGPGGSKRMYAGLKNAGETWYDITGNRSDTVKIGSDGWGEFHVNGSSVSIYVQK

SEQ ID NO: 30171 - protein, 485 aa, Bacillus sp.
HHNGTNGTMMQYFEWYLPNDGNHWNRLNSDASNLKSKGITAVWIPPAWKGASQNDVGYGAYDLYDLGEFNQRGTVRTKYGTRSQLQAAVTSLKNNGIQVYGDVVMNHKGGADLTEMVRAVEVNPNNRNQEVTGEYTIEAWTRFDFPGRGNTHSSFKWRWYHFDGVDFDQSRQLNNRIYKFRGHGKAWDWEVDTEFGNYDYLMYADYDMDHPEVVGELRNWGVWYTNTLGLDGFRIDAVKHIKYSFTRDWINHVRSATGKNMFAVAEFWKNDLGAIENYLQKTNWNHSVFDVPLHYNLYNASKSGGNYDMRNIFNGTVVQRHPSHAVTFVDNHDSQPEEALESFVEEWFKPLAYALTLTREQGLPSVFYGDYYGIPTHGVPAMRSKIDPILEARQKYAYGPQHDYLDHPDVIGWTREGDSSHPKSGLATLITDGPGGSKRMYAGLKNAGETWYDITGNRSDTVKIGSDGWGEFHVNDGSVSIYVQK

SEQ ID NO: 30172 - protein, 483 aa, Bacillus sp.
HHNGTNGTMMQYFEWYLPNDGNHWNRLNSDASNLKSKGITAVWIPPAWKGASQNDVGYGAYDLYDLGEFNQKGTVRTKYGTRSQLQAAVTSLKNNGIQVYGDVVMNHKGGADATEMVRAVEVNPNNRNQEVTGEYTIEAWTRFDFPGRGNTHSSFKWRWYHFDGVDWDQSRELDNRIYKFRGKAWDWEVDTEFGNYDYLMYTDYDMDHPEVVNELRNWGVWYTNTLGLDGFRIDAVKHIKYSFTRDWINHVRSATGKNMFAVAEFWKNDLGAIENYLQKTNWNHSVFDVPLHYNLYNASKSQGNYDMRNIFNGTVVQRHPSHAVTFVDNHDSQPEEALESFVDTWFKPLAYALTLTREQGYPSVFYGDYYGIPTHGVPAMRSKIDPILLARQKYAYGPQHDYLDHPDVIGWTREGDSSHPKSGLATLITDGPGGSKRMYAGLKNAGETWYDITGNRSDTVKIGSDGWGEFHVNDGSVSIYVQK

SEQ ID NO: 30173 - protein, 485 aa, Synthetic construct
HHNGTNGTMMQYFEWYLPNDGNHWNRLNSDASNLKSKGITAVWIPPAWKGASQNDVGYGAYDLYDLGEFNQKGTVRTKYGTRSQLQAAVTSLKNNGIQVYGDVVMNHKGGADATEMVRAVEVNPNNRNQEVTGEYTIEAWTRFDFPGRGNTHSSFKWRWYHFDGVDWDQSRRLNNRIYKFRGHGKAWDWEVDTEFGNYDYLMYADYDYDHPETTNEVRNWGVWYTNTLGLDGFRIDAVKHIKYSFTRDWINHVRSATGKNMFAVAEFWKNDLGAIENYLQKTNWNHSVFDVPLHYNLYNASKSGGNYDMRNIFNGTVVQRHPSHAVTFVDNHDSQPEEALESFVEEWFKPLAYALTLTREQGYPSVFYGDYYGIPTHGVPAMRSKIDPILEARQKYAYGPQHDYLDHPDVIGWTREGDSSHPKSGLATLITDGPGGSKRMYAGLKNAGETWYDITGNRSDTVKIGSDGWGEFHVNDGSVSIYVQK

SEQ ID NO: 30174 - protein, 483 aa, Bacillus sp.
HHNGTNGTMMQYFEWYLPNDGNHWNRLNSDASNLKSKGITAVWIPPAWKAASQNDVGYGAYDLYDLGEFNQKGTVRTKYGTRSQLQAAVTSLKNNGIQVYGDVVMNHKGGADATEMVRAVEVNPNNRNQEVTGEYTIEAWTRFDFPGRGNTHSSFKWRWYHFDGVDWDQSRNLNNRIYKFRGKAWDWEVDTEFGNYDYLMYTDYDMDHPEVVNELRNWGVWYTNTLGLDGFRIDAVKHIKYSFTRDWINHVRSATGKNMFAVAEFWKNDLGAIENYLQKTNWNHSVFDVPLHYNLYNASKSSGNYDMRNIFNGTVVQRHPSHAVTFVDNHDSQPEEALESFVDEWFKPLAYALTLTREQGYPSVFYGDYYGIPTHGVPAMRSKIDPILEARQKYAYGPQHDYLDHPDVIGWTREGDSSHPKSGLATLITDGPGGSKRMYAGLKNAGETWYDITGNRSDTVKIGSDGWGEFHVNKQSVSIYVQK

SEQ ID NO: 30175 - protein, 485 aa, Synthetic construct
HHNGTNGTMMQYFEWYLPNDGNHWNRLNSDASNLKSKGITAVWIPPAWKGASQNDVGYGAYDLYDLGEFNQKGTVRTKYGTRSQLQAAVTSLKNNGIQVYGDVVMNHKGGADATEMVRAVEVNPNNRNQEVTGEYTIEAWTRFDFPGRGNTHSSFKWRWYHFDGVDWDQSRRLNNRIYKFRGHGKAWDWEVDTEFGNYDYLMYADYDFDHPETTNEVRNWGVWYTNTLGLDGFRIDAVKHIKYSFTRDWINHVRSATGKNMFAVAEFWKNDLGAIENYLQKTNWNHSVFDVPLHYNLYNASKSGGNYDMRNIFNGTVVQRHPSHAVTFVDNHDSQPEEALESFVEEWFKPLAYALTLTREQGYPSVFYGDYYGIPTHGVPAMRSKIDPILEARQKYAYGPQHDYLDHPDVIGWTREGDSSHPKSGLATLITDGPGGSKRMYAGLKNAGETWYDITGNRSDTVKIGSDGWGEFHVNDGSVSIYVQK

SEQ ID NO: 30176 - protein, 485 aa, Synthetic construct
HHNGTNGTMMQYFEWYLPNDGNHWNRLNSDASNLKSKGITAVWIPPAWKGASQNDVGYGAYDLYDLGEFNQKGTVRTKYGTRSQLQAAVTSLKNNGIQVYGDVVMNHKGGADATEMVRAVEVNPNNRNQEVTGEYTIEAWTRFDFPGRGNTHSSFKWRWYHFDGVDWDQSRRLNNRIYKFRGHGKAWDWEVDTEFGNYDYLMYADYDYDHPESTNEMRNWGVWYTNTLGLDGFRIDAVKHIKYSFTRDWINHVRSATGKNMFAVAEFWKNDLGAIENYLQKTNWNHSVFDVPLHYNLYNASKSGGNYDMRNIFNGTVVQRHPSHAVTFVDNHDSQPEEALESFVEEWFKPLAYALTLTREQGYPSVFYGDYYGIPTHGVPAMRSKIDPILEARQKYAYGPQHDYLDHPDVIGWTREGDSSHPKSGLATLITDGPGGSKRMYAGLKNAGETWYDITGNRSDTVKIGSDGWGEFHVNDGSVSIYVQK

SEQ ID NO: 30177 - protein, 485 aa, Bacillus sp.
HHNGTNGTMMQYFEWYLPNDGNHWNRLNSDASNLKSKGITAVWIPPAWKGASQNDVGYGAYDLYDLGEFNQKGTVRTKYGTRSQLQAAVTSLKNNGIQVYGDVVMNHKGGADATEMVRAVEVNPNNRNQEVTGEYTIEAWTRFDFPGRGNTHSSFKWRWYHFDGVDWDQSRRLNNRIYKFRGHGKAWDWEVDTEFGNYDYLMYADYDMDHPEVVNELRNWGVWYTNTLGLDGFRIDAVKHIKYSFTRDWINHVRSATGKNMFAVAEFWKNDLGAIENYLQKTNWNHSVFDVPLHYNLYNASKSAGNYDMRNIFNGTVVQRHPSHAVTFVDNHDSQPEEALESFVDPWFKPLAYALTLTREQGYPSVFYGDYYGIPTHGVPAMRSKIDPILEARQKYAYGPQHDYLDHPDVIGWTREGDSSHPKSGLATLITDGPGGSKRMYAGLKNAGETWYDITGNRSDTVKIGSDGWGEFHVNDTSVFIYVQK

SEQ ID NO: 30178 - protein, 485 aa, Bacillus sp.
HHNGTNGTMMQYFEWYLPNDGNHWNRLNSDASNLKSKGITAVWIPPAWKGASQNDVGYGAYDLYDLGEFNQKGTVRTKYGTRSQLQAAVTSLKNNGIQVYGDVVMNHKGGADATEMVRAVEVNPNNRNQEVTGEYTIEAWTRFDFPGRGNTHSSFKWRWYHFDGVDWDQSRKLNNRIYKFRGHGKAWDWEVDTEFGNYDYLMYADYDYDHPESTNEMRNWGVWYTNTLGLDGFRIDAVKHIKYSFTRDWINHVRSATGKNMFAVAEFWKNDLGAIENYLQKTNWNHSVFDVPLHYNLYNASKSGGNYDMRNIFNGTVVQRHPSHAVTFVDNHDSQPEEALESFVEEWFKPLAYALTLTREQGYPSVFYGDYYGIPTHGVPAMRSKIDPILEARQKYAYGPQHDYLDHPDVIGWTREGDSSHPKSGLATLITDGPGGSKRMYAGLKNAGETWYDITGNRSDTVKIGSDGWGEFHVNDGSVSIYVQK

SEQ ID NO: 30179 - protein, 485 aa, Bacillus sp.
HHNGTNGTMMQYFEWYLPNDGNHWNRLNSDASNLKSKGITAVWIPPAWKAVSQNDVGYGAYDLYDLGEFNQKGTVRTKYGTRSQLQAAVTSLKNNGIQVYGDVVMNHKGGADATEMVRAVEVNPNNRNQEVTGEYTIEAWTRFDFPGRGNTHSSFKWRWYHFDGVDWDQSRNLTNRIYKFRGHGKAWDWEVDTEFGNYDYLMYTDYDMDHPEVVNELRNWGVWYTNTLGLDGFRIDAVKHIKYSFTRDWINHVRSATGKNMFAVAEFWKNDLGAIENYLQKTNWNHSVFDVPLHYNLYNASKSGGNYDMRNIFNGTVVQRHPSHAVTFVDNHDSQPEEALESFVETWFKPLAYALTLTREQGYPSVFYGDYYGIPTHGVPAMRSKIDPILEARQKYAYGPQHDYLDHPDVIGWTREGDSSHPKSGLATLITDGPGGSKRMYAGLKNAGETWYDITGNRSDTVKIGSDGWGEFHVNDASVSIYVQK

SEQ ID NO: 30180 - protein, 485 aa, Synthetic construct
HHNGTNGTMMQYFEWYLPNDGNHWNRLNSDASNLKSKGITAVWIPPAWKGASQNDVGYGAYDLYDLGEFNQKGTVRTKYGTRSQLQAAVTSLKNNGIQVYGDVVMNHKGGADATEMVRAVEVNPNNRNQEVTGEYTIEAWTRFDFPGRGNTHSSFKWRWYHFDGVDWDQSRRLNNRIYKFRGHGKAWDWEVDTEFGNYDYLMYADYDLDHPETTNEVRNWGVWYTNTLGLDGFRIDAVKHIKYSFTRDWINHVRSATGKNMFAVAEFWKNDLGAIENYLQKTNWNHSVFDVPLHYNLYNASKSGGNYDMRNIFNGTVVQRHPSHAVTFVDNHDSQPEEALESFVEEWFKPLAYALTLTREQGYPSVFYGDYYGIPTHGVPAMRSKIDPILEARQKYAYGPQHDYLDHPDVIGWTREGDSSHPKSGLATLITDGPGGSKRMYAGLKNAGETWYDITGNRSDTVKIGSDGWGEFHVNDGSVSIYVQK

SEQ ID NO: 30181 - protein, 485 aa, Bacillus sp.
HHNGTNGTMMQYFEWYLPNDGNHWNRLNSDASNLKSKGIKAVWIPPAWKAVSQNDVGYGAYDLYDLGEFNQRGTVRTKYGTRSQLQAAVTSLKNNGIQVYGDVVMNHKGGADATEMVRAVEVNPNNRNQEVTGEYTIEAWTRFDFPGRGNTHSSFKWRWYHFDGVDFDQSREFTNRIYKFRGHGKAWDWEVDTEFGNYDYLMYVDYDMDHPEVVNELRNWGVWYTNTLGLDGFRIDAVKHIKYSFTRDWINHVRSATGKNMFAVAEFWKNDLGAIENYLQKTNWNHSVFDVPLHYNLYNASKSGGNYDMRNIFNGTVVQRHPSHAVTFVDNHDSQPEEALESFVEEWFKPLAYALTLTREQGYPSVFYGDYYGIPTHGVPAMRSKIDPILEARQKYAYGPQHDYLDHPDVIGWTREGDSSHPKSGLATLITDGPGGSKRMYAGLKNAGETWYDITGNRSDTVKIGSDGWGEFHVNDGSVSIYVQK

SEQ ID NO: 30182 - protein, 485 aa, Bacillus sp.
HHNGTNKTMMQYFEWYLPNDGNHWNRLNSDASNLKSKGIKAVWIPPAWKGASQNDVGYGAYDLYDLGEFNQKGTVRTKYGTRSQLQAAVTSLKNNGIQVYGDVVMNHKGGADATEMVRAVEVNPNNRNQEVTGEYTIEAWTRFDFPGRGNTHSSFKWRWYHFDGVDFDQSRRLNNRIYKFRGHGKAWDWEVDTEFGNYDYLMYADYDMDHPEVVNELRNWGVWYTNTLGLDGFRIDAVKHIKYSFTRDWINHVRSATGKNMFAVAEFWKNDLGAIENYLQKTNWNHSVFDVPLHYNLYNASKSGGNYDMRNIFNGTVVQAHPNHAVTFVDNHDSQPEEALESFVEEWFKPLAYALTLTREQGYSSVFYGDYYGIPTHGVPAMRSKIDPILEARQKYAYGPQHDYLDHPDVIGWTREGDSSHPKSGLATLITDGPGGSKRMYAGLKNAGETWYDITGNRSDTVKIGSDGWGEFHVNDGSVSIYVQK

SEQ ID NO: 30183 - protein, 485 aa, Bacillus sp.
HHNGTNGTMMQYFEWYLPNDGNHWNRLNSDASNLKSKGITAVWIPPAWKGASQNDVGYGAYDLYDLGEFNQKGTVRTKYGTRSQLQAAVTSLKNNGIQVYGDVVMNHKGGADATEMVRAVEVNPNNRNQEVTGEYTIEAWTRFDFPGRGNTHSSFKWRWYHFDGVDWDQSERLNNRIYKFRGHGKAWDWEVDTEFGNYDYLMYADYDMDHPEVVNELRNWGVWYTNTLGLDGFRIDAVKHIKYSFTRDWINHVRSATGKNMFAVAEFWKNDLGAIENYLQKTNWNHSVFDVPLHYNLYNASKSGGNYDMRNIFNGTVVQRHPSLAVTFVDNHDSQPEEALESFVEEWFKPLAYALTLTREAGLPSVFYGDYYGIPTHGVPAMRSKIDPILEARQKYAYGPQHDYLDHPDVIGWTREGDSSHPKSGLATLITDGPGGSKRMYAGLKNAGETWYDITGNRSDTVKIGSDGWGEFHVNDGSVSIYVQK

SEQ ID NO: 30184 - protein, 485 aa, Bacillus sp.
HHNGTNGTMMQYFEWYLPNDGNHWNRLNSDASNLKSKGITAVWIPPAWKGASQNDVGYGAYDLYDLGEFNQKGTVRTKYGTRSQLQAAVTSLKNNGIQVYGDVVMNHKGGADATEMVPAVEVNPNNRNQEVTGEYTIEAWTRFDFPGRGNTHSSFKWRWYHFDGVDWDQSRELDNRIYKFRGHSKAWDWEVDTEFGNYDYLMYTDYDMDHPEVVNELRNWGVWYTNTLGLDGFRIDAVKHIKYSFTRDWINHVRSATGKNMFAVAEFWKNDLGAIENYLQKTNWNHSVFDVPLHYNLYNASKSQGNYDMRNIFNGTVVQRHPSHAVTFVDNHDSQPEEALESFVDTWFKPLAYALTLTREQGYPSVFYGDYYGIPTHGVPAMRSKIDPILLARQKYAYGPQHDYLDHPDVIGWTREGDSSHPKSGLATLITDGPGGSKRMYAGLKNAGETWYDITGNRSDTVKIGSDGWGEFHVNGSSVSIYVQK

SEQ ID NO: 30185 - protein, 485 aa, Bacillus sp.
HHNGTNGTMMQYFEWYLPNDGNHWNRLNSDASNLKSKGIKAVWIPPAWKGTSQNDVGYGAYDLYDLGEFNQKGTVRTKYGTRSQLQAAVTSLKNNGIQVYGDVVMNHKGGADATEMVRAVEVNPNNRNQEVTGEYTIEAWTRFDFPGRGNTHSSFKWRWYHFDGVDFDQSRNLNNRIYKFRGHGKAWDWEVDTEFGNYDYLMYVDYDMDHPEVVNELRNWGVWYTNTLGLDGFRIDAVKHIKYSFTRDWINHVRSATGKNMFAVAEFWKNDLGAIENYLQKTNWNHSVFDVPLHYNLYNASKSQGNYDMRNIFNGTVVQRHPSHAVTFVDNHDSQPEEALESFVDTWFKPLAYALTLTREQGYPSVFYGDYYGIPTHGVPAMRSKIDPILEARQKYAYGPQHDYLDHPDVIGWTREGDSSHPKSGLATLITDGPGGSKRMYAGLKNAGETWYDITGNRSDTVKIGSDGWGEFHVNGSSVSIYVQK

SEQ ID NO: 30186 - protein, 483 aa, Bacillus sp.
HHNGTNGTMMQYFEWYLPNDGNHWNRLNSDASNLKSKGITAVWIPPAWKAVSQNDVGYGAYDLYDLGEFNQKGTVRTKYGTRSQLQAAVTSLKNNGIQVYGDVVMNHKGGADATEMVRAVEVNPNNRNQEVTGEYTIEAWTRFDFPGRGNTHSSFKWRWYHFDGVDFDQSREFTNRIYKFRGKAWDWEVDTEFGNYDYLMYVDYDMDHPEVVNELRNWGVWYTNTLGLDGFRIDAVKHIKYSFTRDWINHVRSATGKNMFAVAEFWKNDLGAIENYLQKTNWNHSVFDVPLHYNLYNASKSQGNYDMRNIFNGTVVQRHPSHAVTFVDNHDSQPEEALESFVDTWFKPLAYALTLTREQGYPSVFYGDYYGIPTHGVPAMRSKIDPILEARQKYAYGPQHDYLDHPDVIGWTREGDSSHPKSGLATLITDGPGGSKRMYAGLKNAGETWYDITGNRSDTVKIGSDGWGEFHVNGTSVSIYVQK

SEQ ID NO: 30187 - protein, 485 aa, Bacillus sp.
HHNGTNGTMMQYFEWYLPNDGNHWNRLNSDASNLKSKGIKAVWIPPAWKGASQNDVGYGAYDLYDLGEFNQRGTVRTKYGTRSQLQAAVTSLKNNGIQVYGDVVMNHKGGADATEMVRAVEVNPNNRNQEVTGEYTIEAWTRFDFPGRGNTHSSFKWRWYHFDGVDFDQSRRLNNRIYKFRGHGKAWDWEVDTEFGNYDYLMYADYDMDHPEVVNELRNWGVWYTNTLGLDGFRIDAVKHIKYSFTRDWINHVRSATGKNMFAVAEFWKNDLGAIENYLQKTNWNHSVFDVPLHYNLYNASKSGGNYDMRNIFNGTVVQAHPSQAVTFVDNHDSQPEEALESFVEEWFKPLAYALTLTREQGYPSVFYGDYYGIPTHGVPAMRSKIDPILEARQKYAYGPQHDYLDHPDVIGWTREGDSSHPKSGLATLITDGPGGSKRMYAGLKNAGETWYDITGNRSDTVKIGSDGWGEFHVNDGSVSIYVQK

SEQ ID NO: 30188 - protein, 483 aa, Bacillus sp.
HHNGTNGTMMQYFEWYLPNDGNHWNRLNSDASNLKSKGITAVWIPPAWKGASQNDVGYGAYDLYDLGEFNQRGTVRTKYGTRSQLQAAVTSLKNNGIQVYGDVVMNHKGGADATEMVRAVEVNPNNRNQEVTGEYTIEAWTRFDFPGRGNTHSSFKWRWYHFDGVDFDQSRRLNNRIYKFRGKAWDWEVDTEFGNYDYLMYADYDMDHPEVVNELRNWGVWYTNTLGLDGFRIDAVKHIKYSFTRDWINHVRSATGKNMFAVAEFWKNDLGAIENYLQKTNWNHSVFDVPLHYNLYNASKSGGNYDMRNIFNGTVVQRHPSHAVTFVDNHDSQPEEALESFVETWFKPLAYALTLTREQGYPSVFYGDYYGIPTHGVPAMRSKIDPILEARQKYAYGPQHDYLDHPDVIGWTREGDSSHPKSGLATLITDGPGGSKRMYAGLKNAGETWYDITGNRSDTVKIGSDGWGEFHVNKASVSIFVQK

SEQ ID NO: 30189 - protein, 483 aa, Bacillus sp.
HHNGTNGTMMQYFEWYLPNDGNHWNRLNSDASNLKSKGITAVWIPPPWKGASQNDVGYGAYDLYDLGEFNQKGTVRTKYGTRSQLQAAVTSLKNNGIQVYGDVVMNHTGGADPTEMVRAVEVNPNNRNQEVTGEYTIEAWTRFDFPGRGNTHSSFKWRWYHFDGVDWDQSRRLNNRIYKFRGKAWDWEVDTEFGNYDYLMYADYDMDHPEVVNELRNWGVWYTNTLGLDGFRIDAVKHIKYSFTRDWINHVRSATGKNMFAVAEFWKNDLGAIENYLQKTNWNHSVFDVPLHYNLYNASKSGGNYDMRNIFNGTVVQRHPSHAVTFVDNHDSQPEEALESFVEPWFKPLAYALTLTREQGYPSVFYGDYYGIPTHGVPAMRSKIDPILEARQKYAYGPQHDYLDHPDVIGWTREGDSSHPKSGLATLITDGPGGSKRMYAGLKNAGETWYDITGNRSDTVKIGSDGWGEFHVNGSSVSIYVQK

SEQ ID NO: 30190 - protein, 483 aa, Bacillus sp.
HHNGTNKTMMQYFEWYLPNDGNHWNRLNSDASNLKSKGIKAVWIPPAWKGASQNDVGYGAYDLYDLGEFNQKGTVRTKYGTRSQLQAAVTSLKNNGIQVYGDVVMNHKGGADATEMVRAVEVNPNNRNQEVTGEYTIEAWTRFDFPGRGNTHSSFKWRWYHFDGVDFDQSRRLNNRIYKFRGKAWDWEVDTEFGNYDYLMYADYDMDHPEVVNELRNWGVWYTNTLGLDGFRIDAVKHIKYSFTRDWINHVRSATGKNMFAVAEFWKNDLGAIENYLQKTNWNHSVFDVPLHYNLYNASKSGGNYDMRNIFNGTVVQMQPSHAVTFVDNHDSQPEEALESFVEEWFKPLAYALTLTREQGYPSVFYGDYYGIPTHGVPAMRSKIDPILEARQKYAYGPQHDYLDHPDVIGWTREGDSSHPKSGLATLITDGPGGSKRMYAGLKNAGETWYDITGNRSDTVKIGSDGWGEFHVNDGSVSIYVQK

SEQ ID NO: 30191 - protein, 485 aa, Bacillus sp.
HHNGTNGTMMQYFEWYLPNDGNHWNRLNSDASNLKSKGITAVWIPPAWKAVSQNDVGYGAYDLYDLGEFNQKGTVRTKYGTRSQLQAAVTSLKNNGIQVYGDVVMNHKGGADLTEMVRAVEVNPNNRNQEVTGEYTIEAWTRFDFPGRGNTHSSFKWRWYHFDGVDWDQSREFTNRIYKFRGHGKAWDWEVDTEFGNYDYLMYVDYDMDHPEVVNELRNWGVWYTNTLGLDGFRIDAVKHIKYSFTRDWINHVRSATGKNMFAVAEFWKNDLGAIENYLQKTNWNHSVFDVPLHYNLYNASKSGGNYDMRNIFNGTVVQRHPSHAVTFVDNHDSQPEEALESFVETWFKPLAYALTLTREQGYPSVFYGDYYGIPTHGVPAMRSKIDPILEARQKYAYGPQHDYLDHPDVIGWTREGDSSHPKSGLATLITDGPGGSKRMYAGLKNAGETWYDITGNRSDTVKIGSDGWGEFHVNDASVSIYVQK

SEQ ID NO: 30192 - protein, 483 aa, Synthetic construct
HHNGTNGTMMQYFEWYLPNDGNHWNRLNSDASNLKSKGITAVWIPPAWKGASQNDVGYGAYDLYDLGEFNQKGTVRTKYGTRSQLQAAVTSLKNNGIQVYGDVVMNHKGGADATEMVRAVEVNPNNRNQEVTGEYTIEAWTRFDFPGRGNTHSSFKWRWYHFDGVDWDQSRRLNNRIYKFRGKAWDWEVDTEFGNYDYLMYADYDMDFPETTNEMRNWGVWYTNTLGLDGFRIDAVKHIKYSFTRDWINHVRSATGKNMFAVAEFWKNDLGAIENYLQKTNWNHSVFDVPLHYNLYNASKSGGNYDMRNIFNGTVVQRHPSHAVTFVDNHDSQPEEALESFVEEWFKPLAYALTLTREQGYPSVFYGDYYGIPTHGVPAMRSKIDPILEARQKYAYGPQHDYLDHPDVIGWTREGDSSHPKSGLATLITDGPGGSKRMYAGLKNAGETWYDITGNRSDTVKIGSDGWGEFHVNDGSVSIYVQK

SEQ ID NO: 30193 - protein, 485 aa, Bacillus sp.
HHNGTNGTMMQYFEWYLPNDGNHWNRLNSDASNLKSKGITAVWIPPAWKGASQNDVGYGAYDLYDLGEFNQKGTVRTKYGTRSQLQAAVTSLKNNGIQVYGDVVMNHKGGADATEMVRAVEVNPNNRNQEVTGEYTIEAWTRFDFPGRGNTHSSFKWRWYHFDGVDWDQSRELDNRIYKFRGHGKAWDWEVDTEFGNYDYLMYTDYDMDHPEVVNELRNWGVWYTNTLGLDGFRIDAVKHIKYSFTRDWINHVRSATGKNMFAVAEFWKNDLGAIENYLQKTNWNHSVFDVPLHYNLYNASKSQGNYDMRNIFNGTVVQRHPSHAVTFVDNHDSQPEEALESFVDTWFKPLAYALTLTREQGYPSVFYGDYYGIPTHGVPAMRSKIDPILLARQKYAYGPQHDYLDHPDVIGWTREGDSSHPKSGLATLITDGPGGSKRMYAGLKNAGETWYDITGNRSDTVKIGSDGWGEFHVNGSSVSIYVQK

SEQ ID NO: 30194 - protein, 483 aa, Bacillus sp.
HHNGTNKTMMQYFEWYLPNDGNHWNRLNSDASNLKSKGIKAVWIPPAWKGASQNDVGYGAYDLYDLGEFNQKGTVRTKYGTRSQLQAAVTSLKNNGIQVYGDVVMNHKGGADATEMVRAVEVNPNNRNQEVTGEYTIEAWTRFDFPGRGNTHSSFKWRWYHFDGVDFDQSRRLNNRIYKFRGKAWDWEVDTEFGNYDYLMYADYDMDHPEVVNELRNWGVWYTNTLGLDGFRIDAVKHIKYSFTRDWINHVRSATGKNMFAVAEFWKNDLGAIENYLQKTNWNHSVFDVPLHYNLYNASKSGGNYDMRNIFNGTVVQAHPNHAVTFVDNHDSQPEEALESFVEEWFKPLAYALTLTREQGYSSVFYGDYYGIPTHGVPAMRSKIDPILEARQKYAYGPQHDYLDHPDVIGWTREGDSSHPKSGLATLITDGPGGSKRMYAGLKNAGETWYDITGNRSDTVKIGSDGWGEFHVNDGSVSIYVQK

SEQ ID NO: 30195 - protein, 483 aa, Bacillus sp.
HHNGTNGTMMQYFEWYLPNDGNHWNRLNSDASNLKSKGITAVWIPPAWKGVSQNDVGYGAYDLYDLGEFNQKGTVRTKYGTRSQLQAAVTSLKNNGIQVYGDVVMNHKGGADATEMVRAVEVNPNNRNQEVTGEYTIEAWTRFDFPGRGNTHSSFKWRWYHFDGVDWDQSRELSNRIYKFRGKAWDWEVDTEFGNYDYLMYADYDYDHPESTNEMRNWGVWYTNTLGLDGFRIDAVKHIKYSFTRDWINHVRSATGKNMFAVAEFWKNDLGAIENYLQKTNWNHSVFDVPLHYNLYNASKSGGNYDMRNIFNGTVVQRHPSHAVTFVDNHDSQPEEALESFVEEWFKPLAYALTLTREQGYPSVFYGDYYGIPTHGVPAMRSKIDPILEARQKYAYGPQHDYLDHPDVIGWTREGDSSHPKSGLATLITDGPGGSKRMYAGLKNAGETWYDITGNRSDTVKIGSDGWGEFHVNDGSVSIYVQK

SEQ ID NO: 30196 - protein, 483 aa, Bacillus sp.
HHNGTNGTMMQYFEWYLPNDGNHWNRLNSDASNLKSKGIKAVWIPPAWKAVSQNDVGYGAYDLYDLGEFNQRGTVRTKYGTRSQLQAAVTSLKNNGIQVYGDVVMNHKGGADATEMVRAVEVNPNNRNQEVTGEYTIEAWTRFDFPGRGNTHSSFKWRWYHFDGVDFDQSREFTNRIYKFRGKAWDWEVDTEFGNYDYLMYVDYDMDHPEVVNELRNWGVWYTNTLGLDGFRIDAVKHIKYSFTRDWINHVRSATGKNMFAVAEFWKNDLGAIENYLQKTNWNHSVFDVPLHYNLYNASKSGGNYDMRNIFNGTVVQRHPSHAVTFVDNHDSQPEEALESFVEEWFKPLAYALTLTREQGYPSVFYGDYYGIPTHGVPAMRSKIDPILEARQKYAYGPQHDYLDHPDVIGWTREGDSSHPKSGLATLITDGPGGSKRMYAGLKNAGETWYDITGNRSDTVKIGSDGWGEFHVNDGSVSIYVQK

SEQ ID NO: 30197 - protein, 485 aa, Bacillus sp.
HHNGTNGTMMQYFEWYLPNDGNHWNRLNSDASNLKSKGITAVWIPPAWKAVSQNDVGYGAYDLYDLGEFNQKGTVRTKYGTRSQLQAAVTSLKNNGIQVYGDVVMNHKGGADLTEMVRAVEVNPNNRNQEVTGEYTIEAWTRFDFPGRGNTHSSFKWRWYHFDGVDWDQSREFTNRIYKFRGHGKAWDWEVDTEFGNYDYLMYVDYDMDHPEVVNELRNWGVWYTNTLGLDGFRIDAVKHIKYSFTRDWINHVRSATGKNMFAVAEFWKNDLGAIENYLQKTNWNHSVFDVPLHYNLYNASQSGGNYDMRNIFNGTVVQRHPSHAVTFVDNHDSQPEEALESFVEPWFKPLAYALTLTREQGYPSVFYGDYYGIPTHGVPAMRSKIDPILEARQKYAYGPQHDYLDHPDVIGWTREGDSSHPKSGLATLITDGPGGSKRMYAGLKNAGETWYDITGNRSDTVKIGSDGWGEFHVNKSSVSIYVQK

SEQ ID NO: 30198 - protein, 483 aa, Bacillus sp.
HHNGTNGTMMQYFEWYLPNDGNHWNRLNSDASNLKSKGITAVWIPPAWKAVSQNDVGYGAYDLYDLGEFNQKGTVRTKYGTRSQLQAAVTSLKNNGIQVYGDVVMNHKGGADLTEMVRAVEVNPNNRNQEVTGEYTIEAWTRFDFPGRGNTHSSFKWRWYHFDGVDWDQSREFTNRIYKFRGKAWDWEVDTEFGNYDYLMYVDYDMDHPEVVNELRNWGVWYTNTLGLDGFRIDAVKHIKYSFTRDWINHVRSATGKNMFAVAEFWKNDLGAIENYLQKTNWNHSVFDVPLHYNLYNASKSQGNYDMRNIFNGTVVQRHPSHAVTFVDNHDSQPEEALESFVDTWFKPLAYALTLTREQGYPSVFYGDYYGIPTHGVPAMRSKIDPILEARQKYAYGPQHDYLDHPDVIGWTREGDSSHPKSGLATLITDGPGGSKRMYAGLKNAGETWYDITGNRSDTVKIGSDGWGEFHVNGTSVSIYVQK

SEQ ID NO: 30199 - protein, 485 aa, Bacillus sp.
HHNGTNGTMMQYFEWYLPNDGNHWNRLNSDASNLKSKGITAVWIPPAWKGASQNDVGYGAYDLYDLGEFNQKGTVRTKYGTRSQLQAAVTSLKNNGIQVYGDVVMNHKGGADATEMVRAVEVNPNNRNQEVTGEYTIEAWTRFDFPGRGNTHSSFKWRWYHFDGVDWDQSRNFQNRIYKFRGHGKAWDWEVDTEFGNYDYLMYADIDYDHPESTNEMRNWGVWYTNTLGLDGFRIDAVKHIKYSFTRDWINHVRSATGKNMFAVAEFWKNDLGAIENYLQKTNWNHSVFDVPLHYNLYNASKSQGNYDMRNIFNGTVVQRHPSHAVTFVDNHDSQPEEALESFVDTWFKPLAYALTLTREQGYPSVFYGDYYGIPTHGVPAMRSKIDPILEARQKYAYGPQHDYLDHPDVIGWTREGDSSHPKSGLATLITDGPGGSKRMYAGLKNAGETWYDITGNRSDTVKIGSDGWGEFHVNGSSVSIYVQK

SEQ ID NO: 30200 - protein, 485 aa, Bacillus sp.
HHNGTNGTMMQYFEWYLPNDGNHWNRLNSDASNLKSKGIKAVWIPPAWKAASQNDVGYGAYDLYDLGEFNQKGTVRTKYGTRSQLQAAVTSLKNNGIQVYGDVVMNHKGGADATEMVRAVEVNPNNRNQEVTGEYTIEAWTRFDFPGRGNTHSSFKWRWYHFDGVDWDQSRDLDNRIYKFRGHGKAWDWEVDTEFGNYDYLMYADYDMDHPEVVNELRNWGVWYTNTLGLDGFRIDAVKHIKYSFTRDWINHVRSATGKNMFAVAEFWKNDLGAIENYLQKTNWNHSVFDVPLHYNLYNASKSGGNYDMRNIFNGTVVQRHPSHAVTFVDNHDSQPEEALESFVETWFKPLAYALTLTREQGYPSVFYGDYYGIPTHGVPAMRSKIDPILEARQKYAYGPQHDYLDHPDVIGWTREGDSSHPKSGLATLITDGPGGSKRMYAGLKNAGETWYDITGNRSDTVKIGSDGWGEFHVNKASVSIYVQK

SEQ ID NO: 30201 - protein, 485 aa, Bacillus sp.
HHNGTNGTMMQYFEWYLPNDGNHWNRLNSDASNLKSKGITAVWIPPAWKAASQNDVGYGAYDLYDLGEFNQKGTVRTKYGTRSQLQAAVTSLKNNGIQVYGDVVMNHKGGADATEMVRAVEVNPNNRNQEVTGEYTIEAYTRFDFPGRGNTHSSFKWRWYHFDGVDFDQSRNLNNRIYKFRGHGKAWDWEVDTEFGNYDYLMYTDYDMDHPEVVNELRNWGVWYTNTLGLDGFRIDAVKHIKYSFTRDWINHVRSATGKNMFAVAEFWKNDLGAIENYLQKTNWNHSVFDVPLHYNLYNASKSGGNYDMRNIFNGTVVQRHPSHAVTFVDNHDSQPEEALESFVEEWFKPLAYALTLTREQGYPSVFYGDYYGIPTHGVPAMRSKIDPILEARQKYAYGPQHDYLDHPDVIGWTREGDSSHPKSGLATLITDGPGGSKRMYAGLKNAGETWYDITGNRSDTVKIGSDGWGEFHVNDGSVSIYVQK

SEQ ID NO: 30202 - protein, 382 aa, Bacillus sp.
DVVMNHKGGADATEMVRAVEVNPNNRNQEVTGEYTIEAWTRFDFPGRGNTHSSFKWRWYHFDGVDWDQSRRLNNRIYKFRGKAWDWEVDTENGNYDYLMYADIDMDHPEVVNELRNWGVWYTNTLGLDGFRIDAVKHIKYSFTRDWINHVRSATGKNMFAVAEFWKNDLGAIENYLQKTNWNHSVFDVPLHYNLYNASKSGGNYDMRNIFNGTVVQRHPSHAVTFVDNHDSQPEEALESFVEEWFKPLAYALTLTREQGYPSVFYGDYYGIPTHGVPAMRSKIDPILEARQKYAYGPQHDYLDHPDVIGWTREGDSSHPKSGLATLITDGPGGSKRMYAGLKNAGETWYDITGNRSDTVKIGSDGWGEFHVNDGSVSIYVQK

SEQ ID NO: 30203 - protein, 482 aa, Bacillus sp.
HHNGTNGTMMQYFEWYLPNDGNHWNRLDSDASNLKSKGITAVWIPPAWKGASQNDVGYGAYDLYDLGEFNQKGTVRTKYGTRSQLQAAVTSLKNNGIQVYGDVVMNHKSADATEMVRPPEVNPNNRNQEVTGEYTIEAWTRFDFPGRGNTHSSFKWRWYHFDGVDWDQSRDDVSRIYKFRGKAWDWEVDTEFGNYDYLMYADYDMDHPEVVNELRNWGVWYTNTLGLDGFRIDAVKHIKYSFTRDWINHVRSATGKNMFAVAEFWKNDLGAIENYLQKTNWNHSVFDVPLHYNLYNASKSGGNYDMRNIFNGTVVQRHPSHAVTFVDNHDSQPEEALESFVEEWFKPLAYALTLTREQGYPSVFYGDYYGIPTHGVPAMRSKIDPILEARQKYAYGPQHDYLDHPDVIGWTREGDSSHPKSGLATLITDGPGGSKRMYAGLKNAGETWYDITGNRSDTVKIGSDGWGEFHVNDGSVSIYVQK

SEQ ID NO: 30204 - protein, 482 aa, Synthetic construct
HHNGTNGTMMQYFEWYLPNDGNHWNRLNSDASNLASKGITAVWIPPAWKGTSQADVGYGAYDLYDLGEFNQKGTVRTKYGTRSQLQAAVTSLKNNGIQVYGDVVMNHKAGADATEMVTAVEVNPNNRNQEVTGEYTIEAYTRFDFPGRGNTHSSFKWRWYHFDGVDWDQSRSLNRIYKFQGKAWDWPVDTENGNYDYLMYADLDMDHPEVVNELRNWGVWYTNTLGLDGFRLDAVKHIKFSFTRDWINHVRSATGKNMFAVAEYWKNDLGAIENYLNFTNWNHSVFDVPLHYNLYAASTSGGNYDMRNIFNGTVVQKHPSHAVTFVDNHDTQPEESLESFVQPWFKPLAYALTLTREQGYPSVFYGDYYGIPTHGVPAMRSKIDPILEARQKYAYGPQHDYLDHPDIIGWTREGDSSHPKSGLATLITDGPGGSKRMYAGLKNAGETWYDITGNRSDTVKIGSDGWGEFHVNDGSVSIYVQK

SEQ ID NO: 30205 - protein, 482 aa, Bacillus sp.
HNGTNGTMMQYFEWYLPNDGNHWNRLNSDASNLKSKGITAVWIPPAWKGASQNDVGYGAYDLYDLGEFNQKGTVRTKYGTRSQLQAAVTSLKNNGIQVYGDVVMNHKGGADYTEMVRAVEVNPNNRNQEVTGEYTIEAWTRFDFPGRQNTHSSFKWRWYHFDGVDWDQSRRLNNRIYKFRGKAWDWEVDTEFGNYDYLMYADYDMDHPEVVNELRNWGVWYTNTLGLDGFRIDAVKHIKYSFTRDWINHVRSATGKNMFAVAEFWKNDLGAIENYLQKTNWNHSVFDVPLHYNLYNASRSGGNYDMRNIFNGTVVQRHPSLAVTFVDNHDSQPEEALESFVSEWFKPLAYALTLTREQGYPSVFYGDYYGIPTHGVPAMRSKIDPILLARQKYAYGPQHDYLDHPDVIGWTREGDSSHPKSGLATLITDGPGGSKRMYAGLKNAGETWYDITGNRSDTVKIGSDGWGEFHVNDGSVSIYVQK

SEQ ID NO: 30206 - protein, 481 aa, Bacillus sp. (in: firmicutes)
HHDGTNGTIMQYFEWNVPNDGQHWNRLHNNAQNLKNAGITAIWIPPAWKGTSQNDVGYGAYDLYDLGEFNQKGTVRTKYGTKAELERAIRSLKANGIQVYGDVVMNHKGGADFTERVQAVEVNPQNRNQEVSGTYQIEAWTGFNFPGRGNQHSSFKWRWYHFDGTDWDQSRQLANRIYKFRGKAWDWEVDTENGNYDYLMYADVDMDHPEVINELNRWGVWYANTLNLDGFRLDAVKHIKFSFMRDWLGHVRGQTGKNLFAAEFWKNDLGALENYLSKTNWTMSAFDVPLHYNLYQASNSSGNYDMRNLLNGTLVQRHPSHAVTFVDNHDTQPGEALESFVQGWFKPLAYATILTREQGYPKVFYGDYYGIPSDGVPSYRQQIDPLLKARQQYAYGRQHDYFDHHDIGWTREGNASHPNSGLATIMSDGPGGSKWMYVGRQKAGEVWHDMTGNRSGTVTINQDGWGHFFVNGGSVSVWVKR

SEQ ID NO: 30207 - protein, 481 aa, Bacillus amyloliquefaciens
VNGTLMQYFEWYTPNDGQHWKRLQNDAEHLSDIGITAVWIPPAYKAISQADVGYGAYDLYDLGEFHQKGTVRTKYGTKGELQSAIKSLHSRDINVYGDVVINHKAGADATEDVTAVEVDPADRNRVISGEHLIKAWTHFHFPGRGSTYSDFKWWWYHFDGTDWDESRKLNRIYLFQGKTWDWPVSNEFGNYDYLMYADFDYDHPDVVAEIKRWGTWYANELQLDGFRLDAVKHIKFSFLRDWVNHVREKTGKEMFTVAEYWSNDLGALENYLNKTNFNHSVFDVPLHYQFHAASTQGGGYDMRKLLNGTVVSKHPLKSVTFVDNHDTQPGQSLESTVQTWFKPLAYAFILTRESGYPSVFYGDMYGTKGDSQREIPALKHKIEPILKARKQYAYGAQHDYFDHHDIVGWTREGDSSVANSGLAALITDGPGGAKWMYVGRQNAGETWHDITGNRSEPVVINSEGWGEFHVNGGSVSIYVQR

SEQ ID NO: 30208 - protein, 481 aa, Bacillus amyloliquefaciens
VNGTLMQYFEWYTPNDGQHWKRLQNDAEHLSDIGITAVWIPPAYKAISQADVGYGAYDLYDLGEFHQKGTVRTKYGTKGELQSAIKSLHSRDINVYGDVVINHKAGADATEDVTAVEVDPADRNRVISGEHLIKAWTHFHFPGRGSTYSDFKWYWYHFDGTDWDESRKLNRIYLFQGKTWDWPVSNEFGNYDYLMYADYDYDYPDVVAEIKRWGTWYANELQLDGFRLDAVKHIKFSFLRDWVNHVREKTGKEMFTVAEYWSNDLGALENYLNKTNFNHSVFDVPLHYQFHAASTQGGGYDMRKLLNGTVVSKHPLKSVTFVDNHDTQPGQSLESTVQTWFKPLAYAFILTRESGYPQVFYGDMYGTKGDSQREIPALKHKIEPILKARKQYAYGAQHDYFDHHDIVGWTREGDSSVANSGLAALITDGPGGAKWMYVGRQNAGETWHDITGNRSEPVVINSEGWGEFHVNGGSVSIYVQR

SEQ ID NO: 30209 - protein, 481 aa, Bacillus amyloliquefaciens
VNGTLMQYFEWYTPNDGQHWKRLQNDAEHLSDIGITAVWIPPAYKAISQADVGYGAYDLYDLGEFHQKGTVRTKYGTKGELQSAIKSLHSRDINVYGDVVINHKAGADATEDVTAVEVDPADRNRVISGEHLIKAWTHFHFPGRGSTYSDFKWYWYHFDGTDWDESRKLNRIYLFQGKTWDWPVSNEFGNYDYLMYADFDYDHPDVVAEIKRWGTWYANELQLDGFRLDAVKHIKFSFLRDWVNHVREKTGKEMFTVAEYWSNDLGALENYLNKTNFNHSVFDVPLHYQFHAASTQGGGYDMRKLLNGTVVSKWPWKSVTFVDNHDTQPGQSLESTVQTWFKPLAYAFILTRESGYPQVFYGDMYGTKGDSQREIPALKHKIEPILKARKQYAYGAQHDYFDHHDIVGWTREGDSSVANSGLAALITDGPGGAKWMYVGRQNAGETWHDITGNRSEPVVINSEGWGEFHVNGGSVSIYVQR

SEQ ID NO: 30210 - protein, 481 aa, Bacillus licheniformis
VNGTLMQYFEWYTPNDGQHWKRLQNDAEHLSDIGITAVWIPPAYKAISQADVGYGAYDLYDLGEFHQKGTVRTKYGTKGELQSAIKSLHSRDINVYGDVVINHKAGADATEDVTAVEVDPADRNRVISGEHLIKAWTHFWFPGRGSTYSDFKWYWYHFDGTDWDESRKLNRIYLFQGKTWDWPVSNEFGNYDYLMYADFDYDHPDVVAEIKRWGTWYANELQLDGFRLDAVKHIKFSFLRDWVNHVREKTGKEMFTVAEYWSNDLGALENYLNKTNFNHSVFDVPLHYQFHAASTQGGGYDMRKLLNGTVVSKWPLKSVTFVDNHDTQPGQSLESTVQTWFKPLAYAFILTRESGYPQVFYGDMYGTKGDSQREIPALKHKIEPILKARKQYAYGAQHDYFDHHDIVGWTREGDSSVANSGLAALITDGPGGAKWMYVGRQNAGETWHDITGNRSEPVVINSEGWGEFHVNGGSVSIYVQR

SEQ ID NO: 30211 - protein, 481 aa, Bacillus licheniformis
VNGTLMQYFEWYTPNDGQHWKRLQNDAEHLSDIGITAVWIPPAYKAISQADVGYGAYDLYDLGEFHQKGTVRTKYGTKGELQSAIKSLHSRDINVYGDVVINHKAGADATEDVTAVEVDPADRNRVISGEHLIKAWTHFHFPGRGSTYSDFKWYWYHFDGTDWDESRKLNRIYLFQGKTWDWPVSNEFGNYDYLMYADFDYDHPDVVAEIKRWGTWYANELQLDGFRLDAVKHIKFSFLRDWVNHVREKTGKEMFTVAEYWSNDLGALENYLNKTNFNHSVFDVPLHYQFHAASTQGGGYDMRKLLNGTVVSKHPLKSVTFVDNHDTQPGQSLESTVQTWFKPLAYAFILTRESGYPSVFYGDMYGTKGDSQREIPALKHKIEPILKARKQYAYGAQHDYFDHHDIVGWTREGDSSVANSGLAALITDGPGGAKWMYVGRQNAGETWHDITGNRSEPVVINSEGWGEFHVNGGSVSIYVQR

SEQ ID NO: 30212 - protein, 481 aa, Bacillus amyloliquefaciens
VNGTLMQYFEWYTPNDGQHWKRLQNDAEHLSDIGITAVWIPPAYKAISQADVGYGAYDLYDLGEFHQKGTVRTKYGTKGELQSAIKSLHSRDINVYGDVVINHKAGADATEDVTAVEVDPADRNRVISGEHLIKAWTHFWFPGRGSTYSDFKWYWYHFDGTDWDESRKLNRIYLFQGKTWDWPVSNEFGNYDYLMYADFDYDHPDVVAEIKRWGTWYANELQLDGFRLDAVKHIKFSFLRDWVNHVREKTGKEMFTVAEYWSNDLGALENYLNKTNFNHSVFDVPLHYQFHAASTQGGGYDMRKLLNGTVVSKHPLKSVTFVDNHDTQPGQSLESTVQTWFKPLAYAFILTRESGYPSVFYGDMYGTKGDSQREIPALKHKIEPILKARKQYAYGAQHDYFDHHDIVGWTREGDSSVANSGLAALITDGPGGAKWMYVGRQNAGETWHDITGNRSEPVVINSEGWGEFHVNGGSVSIYVQR

SEQ ID NO: 30213 - protein, 481 aa, Bacillus licheniformis
VNGTLMQYFEWYTPNDGQHWKRLQNDAEHLSDIGITAVWIPPAYKAISQADVGYGAYDLYDLGEFHQKGTVRTKYGTKGELQSAIKSLHSRDINVYGDVVINHKAGADATEDVTAVEVDPADRNRVISGEHLIKAWTHFHFPGRGSTYSDFKWYWYHFDGTDWDESRKLNRIYLFQGKTWDWPVSNEFGNYDYLMYADFDYDHPDVVAEIKRWGTWYANELQLDGFRLDAVKHIKFSFLRDWVNHVREKTGKEMFTVAEYWSNDLGALENYLNKTNFNHSVFDVPLHYQFHAASTQGGGYDMRKLLNGTVVSKWPLKSVTFVDNHDTQPGQSLESTVQTWFKPLAYAFILTRESGYPQVFYGDMYGTKGDSQREIPALKHKIEPILKARKQYAYGAQHDYFDHHDIVGWTREGDSSVANSGLAALITDGPGGAKWMYVGRQNAGETWHDITGNRSEPVVINSEGWGEFHVNGGSVSIYVQR

SEQ ID NO: 30214 - protein, 481 aa, Bacillus licheniformis
LNGTLMQYFEWYMPNDGQHWKRLQNDSAYLAEHGITAVWIPPAYKGTSQADVGYGAYDLYDLGEFHQKGTVRTKYGTKGELQSAIKSLHSRDINVYGDVVINHKGGADATEDVTAVEVNPADRNRVISGEHLIKAWTHFHFPGRGSTYSDFKWHWYHFDGTDWDESRKLNRIYKFQGKAWDWEVSNENGNYDYLMYADIDYDHPDVAAEIKRWGTWYANELQLDGFRLDAVKHIKFSFLRDWVNHVREKTGKEMFTVAEYWQNDLGALENYLNKTNFNHSVFDVPLHYQFHAASTQGGGYDMRKLLNGTVVSKHPLKSVTFVDNHDTQPGQSLESTVQTWFKPLAYAFILTRESGYPQVFYGDMYGTKGDSQREIPALKHKIEPILKARKQYAYGAQHDYFDHHDIVGWTREGDSSVANSGLAALITDGPGGAKRMYVGRQNAGETWHDITGNRSEPVVINSEGWGEFHVNGGSVSIYVQR

SEQ ID NO: 30215 - protein, 481 aa, Bacillus licheniformis
LNGTLMQYFEWYMPNDGQHWKRLQNDSAYLAEHGITAVWIPPAYKGTSQADVGYGAYDLYDLGEFHQKGTVRTKYGTKGELQSAIKSLHSRDINVYGDVVINHKGGADATEDVTAVEVDPADRNQVISGEHLIKAWTHFHFPGRGSTYSDFKWHWYHFDGTDWDESRKLNRIYKFQGKAWDWEVSNENGNYDYLMYADIDYDHPDVAAEIKRWGTWYANELQLDGFRLDAVKHIKFSFLRDWVNHVREKTGKEMFTVAEYWQNDLGALENYLNKTNFNHSVFDVPLHYQFHAASTQGGGYDMRKLLNGTVVSKHPLKSVTFVDNHDTQPGQSLESTVQTWFKPLAYAFILTRESGYPQVFYGDMYGTKGDSQREIPALKHKIEPILKARKQYAYGAQHDYFDHHDIVGWTREGDSSVANSGLAALITDGPGGAKRMYVGRQNAGETWHDITGNRSEPVVINSEGWGEFHVNGGSVSIYVQR

SEQ ID NO: 30216 - protein, 481 aa, Bacillus licheniformis
LNGTLMQYFEWYMPNDGQHWKRLQNDSAYLAEHGITAVWIPPAYKGTSQADVGYGAYDLYDLGEFHQKGTVRTKYGTKGELQSAIKSLHSRDINVYGDVVINHKGGADATEDVTAVEVDPADRNRVISGEHLIKAWTHFHFPGRGSTYSDFKWHWYHFDGTDWDESRKLNRIYKFRGKAWDWEVSNENGNYDYLMYADIDYDHPDVAAEIKRWGTWYANELQLDGFRLDAVKHIKFSFLRDWVNHVREKTGKEMFTVAEYWQNDLGALENYLNKTNFNHSVFDVPLHYQFHAASTQGGGYDMRKLLNGTVVSKHPLKSVTFVDNHDTQPGQSLESTVQTWFKPLAYAFILTRESGYPQVFYGDMYGTKGDSQREIPALKHKIEPILKARKQYAYGAQHDYFDHHDIVGWTREGDSSVANSGLAALITDGPGGAKRMYVGRQNAGETWHDITGNRSEPVVINSEGWGEFHVNGGSVSIYVQR

SEQ ID NO: 30217 - protein, 481 aa, Bacillus cereus
LNGTLMQYFEWYMPNDGQHWKRLQNDSAYLAEHGITAVWIPPAYKGTSQADVGYGAYDLYDLGEFHQKGTVRTKYGTKGELQSAIKSLHSRDINVYGDVVINHKGGADATEDVTAVEVDPADRNRVISGEHQIKAWTHFHFPGRGSTYSDFKWHWYHFDGTDWDESRKLNRIYKFQGKAWDWEVSNENGNYDYLMYADIDYDHPDVAAEIKRWGTWYANELQLDGFRLDAVKHIKFSFLRDWVNHVREKTGKEMFTVAEYWQNDLGALETYLNKTNFNHSVFDVPLHYQFHAASTQGGGYDMRKLLNGTVVSKHPLKAVTFVDNHDTQPGQSLESTVQTWFKPLAYAFILTRESGYPQVFYGDMYGTKGDSQREIPALKHKIEPILKARKQYAYGAQHDYFDHHDIVGWTREGDSSVANSGLAALITDGPGGAKRMYVGRQNAGETWHDITGNRSEPVVINSEGWGEFHVNGGSVSIYVQR

SEQ ID NO: 30218 - protein, 481 aa, Bacillus licheniformis
LNGTLMQYFEWYMPNDGQHWKRLQNDSAYLAEHGITAVWIPPAYKGTSQADVGYGAYDLYDLGEFHQKGTVRTKYGTKGELQSAIKSLHSRDINVYGDVVINHKGGADATEDVTAVEVDPADRNREISGEHLIKAWTHFHFPGRGSTYSDFKWHWYHFDGTDWDESRKLNRIYKFQGKAWDWEVSNENGNYDYLMYADIDYDHPDVAAEIKRWGTWYANELQLDGFRLDAVKHIKFSFLRDWVNHVREKTGKEMFTVAEYWQNDLGALENYLNKTNFNHSVFDVPLHYQFHAASTQGGGYDMRKLLNGTVVSKHPLKSVTFVDNHDTQPGQSLESTVQTWFKPLAYAFILTRESGYPQVFYGDMYGTKGDSQREIPALKHKIEPILKARKQYAYGAQHDYFDHHDIVGWTREGDSSVANSGLAALITDGPGGAKRMYVGRQNAGETWHDITGNRSEPVVINSEGWGEFHVNGGSVSIYVQR

SEQ ID NO: 30219 - protein, 481 aa, Bacillus licheniformis
LNGTLMQYFEWYTPNDGQHWKRLQNDSAYLAEHGITAVWIPPAYKGTSQADVGYGAYDLYDLGEFHQKGTVRTKYGTKGELQSAIKSLHSRDINVYGDVVINHKGGADATEDVTAVEVDPADRNRVISGEHLIKAWTHFHFPGRGSTYSDFKWHWYHFDGTDWDESRKLNRIYKFQGKAWDWEVDSENGNYDYLMYADIDYDHPDVAAEIKRWGTWYANELQLDGFRLDAVKHIKFSFLRDWVNHVREKTGKEMFTVAEYWQNDLGALENYLNKTNFNHSVFDVPLHYQFHAASTQGGGYDMRKLLNGTVVSKHPLKSVTFVDNHDTQPGQSLESTVQTWFKPLAYAFILTRESGYPQVFYGDMYGTKGDSQREIPALKHKIEPILKARKQYAYGAQHDYFDHHDIVGWTREGDSSVANSGLAALITDGPGGAKRMYVGRQNAGETWHDITGNRSEPVVINSEGWGEFHVNGGSVSIYVQR

SEQ ID NO: 30220 - protein, 481 aa, Bacillus licheniformis
LNGTLMQYFEWYMPNDGQHWKRLQNDSAYLAEHGITAVWIPPAYKGTSQADVGYGAYDLYDLGEFHQKGTVRTKYGTKGELQSAIKSLHSRDINVYGDVVINHKGGADATEDVTAVEVDPADRNRVISGEYLIKAWTHFHFPGRGSTYSDFKWYWYHFDGTDWDESRKLNRIYKFQGKYWDWEVSNENGNYDYLMYADIDYDHPDVVAEIKRWGTWYANELQLDGFRLDAVKHIKFSFLRDWVNHVREKTGKEMFTVAEYWQNDLGALENYLNKTNFNHSVFDVPLHYQFYAASTQGGGYDMRKLLNDTVVSKHPLKSVTFVDNHDTQPGQSLESTVQTWFKPLAYAFILTRESGYPQVFYGDMYGTKGDSQREIPALKHKIEPILKARKQYAYGAQHDYFDHHDIVGWTREGDSSVANSGLAALITDGPGGAKRMYVGRQNAGETWYDITGNRSEPVVINSEGWGEFHVNDGSVSIYVQR

SEQ ID NO: 30221 - protein, 481 aa, Bacillus licheniformis
LNGTLMQYFEWYMPNDGQHWKRLQNDSAYLAEHGITAVWIPPAYKGTSQADVGYGAYDLYDLGEFHQKGTVRTKYGTKGELQSAIKSLHSRDINVYGDVVINHKGGADATEDVTAVEVDPADRNRVISGEHLIKAWTHFHFPGRGSTYSDFKWHWYHFDGTDWDESRKLNRIYKFQGKAWDWEVSSENGNYDYLMYADIDYDHPDVAAEIKRWGTWYANELQLDGFRLDAVKHIKFSFLRDWVNHVREKTGKEMFTVAEYWQNDLGALENYLNKTNFNHSVFDVPLHYQFHAASTQGGGYDMRKLLNGTVVSKHPLKSVTFVDNHDTQPGQSLESTVQTWFKPLAYAFILTRESGYPQVFYGDMYGTKGDSQREIPALKHKIEPILKARKQYAYGAQHDYFDHHDIVGWTREGDSSVANSGLAALITDGPGGAKRMYVGRQNAGETWHDITGNRSEPVVINSEGWGEFHVNGGSVSIYVQR

SEQ ID NO: 30222 - protein, 481 aa, Synthetic construct
LNGTLMQYFEWYMPNDGQHWKRLQNDSAYLAEHGITAVWIPPAYKGTSQADVGYGAYDLYDLGEFHQKGTVRTKYGTKGELQSAIKSLHSRDINVYGDVVINHKGGADATEDVTAVEVDPADRNREISGEYLIKAWTHFHFPGRGSTYSDFKWHWYHFDGTDWDESRKLNRIYKFQGKAWDWEVDNENGNYDYLMYADIDYDHPDVAAEIKRWGTWYANELQLDGFRLDAVKHIKFSFLRDWVNHVREKTGKEMFTVAEYWQNDLGALENYLNKTNFNHSVFDVPLHYQFHAASTQGGGYDMRKLLNGTVVSKHPLKSVTFVDNHDTQPGQSLESTVQTWFKPLAYAFILTRESGYPQVFYGDMYGTKGDSQREIPALKHKIEPILKARKQYAYGAQHDYFDHHDIVGWTREGDSSVANSGLAALITDGPGGAKRMYVGRQNAGETWHDITGNRSEPVVINSEGWGEFHVNGGSVSIYVQR

SEQ ID NO: 30223 - protein, 481 aa, Bacillus licheniformis
LNGTLMQYFEWYMPNDGQHWKRLQNDSAYLAEHGITAVWIPPAYKGTSQADVGYGAYDLYDLGEFHQKGTVRTKYGTKGELQSAIKSLHSRDINVYGDVVINHKGGADATEDVTAVEVDPADRNRVISGEHLIKAWTHFHFPGRGSTYSDFKWHWYHFDGTDWDESRKLNRIYKFQGKAWDWEVSNENGNYDYLMYADIDYDHPDVAAEIKRWGTWYANELQLDGFRLDAVKHIKFSFLRDWVNHVREATGKEMFTVAEYWQNDLGALENYLNKTNFNHSVFDVPLHYQFHAASTQGGGYDMRKLLNGTVVSKHPLKSVTFVDNHDTQPGQSLESTVQTWFKPLAYAFILTRESGYPQVFYGDMYGTKGDSQREIPALKHKIEPILKARKQYAYGAQHDYFDHHDIVGWTREGDSSVANSGLAALITDGPGGAKRMYVGRQNAGETWHDITGNRSEPVVINSEGWGEFHVNGGSVSIYVQR

SEQ ID NO: 30224 - protein, 481 aa, Bacillus licheniformis
LNGTLMQYFEWYMPNDGQHWKRLQNDSAYLAEHGITAVWIPPAYKGTSQADVGYGAYDLYDLGEFHQKGTVRTKYGTKGELQSAIKSLHSRDINVYGDVVINHKGGADATEDVTAVEVDPADRNRVISGEHRIKAWTHFHFPGRGSTYSDFKWHWYHFDGTDWDESRKLNRIYKFQGKAWDWEVSNENGNYDYLMYADIDYDHPDVAAEIKRWGTWYANELQLDGFRLDAVKHIKFSFLRDWVNHVREKTGKEMFTVAEYWQNDLGALENYLNKTNFNHSVFDVPLHYQFHAASTQGGGYDMRKLLNGTVVSKHPLKAVTFVDNHDTQPGQSLESTVQTWFKPLAYAFILTRESGYPQVFYGDMYGTKGDSQREIPALKHKIEPILKARKQYAYGAQHDYFDHHDIVGWTREGDSSVANSGLAALITDGPGGAKRMYVGRQNAGETWHDITGNRSEPVVINSEGWGEFHVNGGSVSIYVQR

SEQ ID NO: 30225 - protein, 481 aa, Bacillus licheniformis
LNGTLMQYFEWYMPNDGQHWKRLQNDSAYLAEHGITAVWIPPAYKGTSQADVGYGAYDLYDLGEFHQKGTVRTKYGTKGELQSAIKSLHSRDINVYGDVVINHKGGADATEDVTAVEVDPADRNRVISGEYLIKAWTHFHFPGRGSTYSDFKWHWYHFDGTDWDESRKLNRIYKFQGKAWDWEVSNENGNYDYLMYADIDYDHPDVAAESKRWGSWYANELQLDGFRLDAVKHIKFSFLRDWVNHVREKTGKEMFTVAEYWQNDLGALENYLNKTNFNHSVFDVPLHYQFHAASTQGGGYDMRKLLNGTVVSKHPLKSVTFVDNHDIQPGQSLESTVQTWFKPLAYAFILTRESGYPQVFYGDMYGTKGDSQREIPALKHKIEPILKARKQYAYGAQHDYFDHHDIVGWTREGDSSVANSGLAALITDGPGGAKRMYVGRQNAGETWHDITGNRSDPVVINSEGWGEFHVNGGSVSIYVQR

SEQ ID NO: 30226 - protein, 481 aa, Bacillus licheniformis
LNGTLMQYFEWYMPNDGQHWKRLQNDSAYLAEHGITAVWIPPAYKGTSQADVGYGAYDLYDLGEFHQKGTVRTKYGTKGELQSAIKSLHSRDINVYGDVVINHKGGADATEDVTAVEVDPADRNRVISGEHLIKAWTHFHFPGRGNTYSDFKWHWYHFDGTDWDESRKLNRIYKFQGKAWDWEVSNENGNYDYLMYADIDYDHPDVAAEIKRWGTWYANELQLDGFRLDAVKHIKFSFLRDWVNHVREKTGKEMFTVAEYWQNDLGALENYLNKTNFNHSVFDVPLHYQFHAASTQGGGYDMRKLLNGTVVSKHPLKSVTFVDNHDTQPGQSLESTVQTWFKPLAYAFILTRESGYPQVFYGDMYGTKGDSQREIPALKHKIEPILKARKQYAYGAQHDYFDHHDIVGWTREGDSSVANSGLAALITDGPGGAKRMYVGRQNAGETWHDITGNRSEPVVINSEGWGEFHVNGGSVSIYVQR

SEQ ID NO: 30227 - protein, 481 aa, Bacillus licheniformis
LNGTLMQYFEWYLPNDGQHWKRLQNDSAYLAEHGITAVWIPPAYKGTSQADVGYGAYDLYDLGEFHQKGTVRTKYGTKGELQSAIKSLHSRDINVYGDVVINHKGGADATEDVTAVEVDPADRNRVISGEHLIKAWTHFHFPGRGSTYSDFKWHWYHFDGTDWDESRKLNRIYKFQGKAWDWEVSSENGNYDYLMYADIDYDHPDVAAEIKRWGTWYANELQLDGFRLDAVKHIKFSFLRDWVNHVREKTGKEMFTVAEYWQNDLGALENYLNKTNFNHSVFDVPLHYQFHAASTQGGGYDMRKLLNGTVVSKHPLKSVTFVDNHDTQPGQSLESTVQTWFKPLAYAFILTRESGYPQVFYGDMYGTKGDSQREIPALKHKIEPILKARKQYAYGAQHDYFDHHDIVGWTREGDSSVANSGLAALITDGPGGAKRMYVGRQNAGETWHDITGNRSEPVVINSEGWGEFHVNGGSVSIYVQR

SEQ ID NO: 30228 - protein, 481 aa, Bacillus sp.
LNGTLMQYFEWYMPNDGQHWKRLQNDSAYLAEHGITAVWIPPAYKGTSQADVGYGAYDLYDLGEFHQKGTVRTKYGTKGELQSAIKSLHSRDINVYGDVVINHKGGADATEDVTAVEVDPADRNRVISGEHLIKAWTHFHFPGRGSTYSDFKWHWYHFDGTDWDESRKLNRIYKFQGKAWDWEVSNENGNYDYLMYADIDYDHPDVAAEIKRWGTWYANELQLDGFRLDAVKHIKFSFLRDWVNHVREKTGKEMFTVAEYWQNDLGALENYLNKTNFNHSVFDVPLHYQFHAASTQGGGYDMRKLLNGTVVSKHPLKAVTFVDNHDTQPGQSLESTVQTWFKPLAYAFILTRESGYPQVFYGDMYGTKGDSQREIPALKHKIEPILKARKQYAYGAQHDYFDHHDIVGWTREGDSSVANSGLAALITDGPGGAKRMYVGRQNAGETWHDITGNRSEPVVINSEGWGEFHVNGGSVSIYVQR

SEQ ID NO: 30229 - protein, 481 aa, Bacillus licheniformis
LNGTLMQYFEWYMPNDGQHWKRLQNDSAYLAEHGITAVWIPPAYKGTSQADVGYGAYDLYDLGEFHQKGTVRTKYGTKGELQSAIKSLHSRDINVYGDVVINHKGGADATEDVTAVEVDPANRNRVISGEHRIKAWTHFHFPGRGSTYSDFKWHWYHFDGTDWDESRKLNRIYKFQGKAWDWEVSNENGNYDYLMYADIDYDHPDVAAEIKRWGTWYANELQLDGFRLDAVKHIKFSFLRDWVNHVREKTGKEMFTVAEYWQNDLGALENYLNKTNFNHSVFDVPLHYQFHAASTQGGGYDMRKLLNGTVVSKHPLKAVTFVDNHDTQPGQSLESTVQTWFKPLAYAFILTRESGYPQVFYGDMYGTKGDSQREIPALKHKIEPILKARKQYAYGAQHDYFDHHDIVGWTREGDSSVANSGLAALITDGPGGAKRMYVGRQNAGETWHDITGNRSEPVVINXEGWGEFHVNGGSVSIYVQR

SEQ ID NO: 30230 - protein, 481 aa, Synthetic construct
LNGTLMQYFEWYMPNDGQHWKRLQNDSAYLAEHGITAVWIPPAYKGTSQADVGYGAYDLYDLGEFHQKGTVRTKYGTKGELQSAIKSLHSRDINVYGDVVINHKGGADATEDVTAVEVDPADRNRVISGEYLIKAWTHFHFPGRGSTYSDFKWHWYHFDGTDWDESRKLNRIYKFQGKAWDWEVSDENGNYDYLMYADIDYDHPDVAAEIKRWGTWYANELQLDGFRLDAVKHIKFSFLRDWVNHVREKTGKEMFTVAEYWQNDLGALENYLNKTNFNHSVFDVPLHYQFHAASTQGGGYDMRKLLNGTVVSKHPLKSVTFVDNHDTQPGQSLESTVQTWFKPLAYAFILTRESGYPQVFYGDMYGTKGDSQREIPALKHKIEPILKARKQYAYGAQHDYFDHHDIVGWTREGDSSVANSGLAALITDGPGGAKRMYVGRQNAGETWHDITGNRSEPVVINSEGWGEFHVNGGSVSIYVQR

SEQ ID NO: 30231 - protein, 481 aa, Bacillus licheniformis
LNGTLMQYFEWYMPNDGQHWKRLQNDSAYLAEHGITAVWIPPAYKGTSQADVGYGAYDLYDLGEFHQKGTVRTKYGTKGELQSAIKSLHSRDINVYGDVVINHKGGADATEDVTAVEVDPANRNRVISGEHLIKAWTHFHFPGRGSTYSDFKWHWYHFDGTDWDESRKLNRIYKFQGKAWDWEVSNENGNYDYLMYADIDYDHPDVAAEIKRWGTWYANELQLDGFRLDAVKHIKFSFLRDWVNHVREKTGKEMFTVAEYWQNDLGALENYLNKTNFNHSVFDVPLHYQFHAASTQGGGYDMRKLLNGTVVSKHPLKSVTFVDNHDTQPGQSLESTVQTWFKPLAYAFILTRESGYPQVFYGDMYGTKGDSQREIPALKHKIEPILKARKQYAYGAQHDYFDHHDIVGWTREGDSSVANSGLAALITDGPGGAKRMYVGRQNAGETWHDITGNRSEPVVINSEGWGEFHVNGGSVSIYVQR

SEQ ID NO: 30232 - protein, 481 aa, Bacillus licheniformis
LNGTLMQYFEWYTPNDGQHWKRLQNDSAYLAEHGITAVWIPPAYKGTSQADVGYGAYDLYDLGEFHQKGTVRTKYGTKGELQSAIKSLHSRDINVYGDVVINHKGGADATEDVTAVEVDPADRNRVISGEHLIKAWTHFHFPGRGSTYSDFKWHWYHFDGTDWDESRKLNRIYKFQGKAWDWEVSNENGNYDYLMYADIDYDHPDVAAEIKRWGTWYANELQLDGFRLDAVKHIKFSFLRDWVNHVREKTGKEMFTVAEYWQNDLGALENYLNKTNFNHSVFDVPLHYQFHAASTQGGGYDMRKLLNGTVVSKHPLKSVTFVDNHDTQPGQSLESTVQTWFKPLAYAFILTRESGYPQVFYGDMYGTKGDSQREIPALKHKIEPILKARKQYAYGAQHDYFDHHDIVGWTREGDSSVANSGLAALITDGPGGAKRMYVGRQNAGETWHDITGNRSEPVVINSEGWGEFHVNGGSVSIYVQR

SEQ ID NO: 30233 - protein, 481 aa, Bacillus licheniformis
LNGTLMQYFEWYMPNDGQHWKRLQNDSAYLAEHGITAVWIPPAYKGTSQADVGYGAYDLYDLGEFHQKGTVRTKYGTKGELQSAIKSLHSRDINVYGDVVINHKGGADATEDVTAVEVDPADRNRVISGEYLIKAWTHFHFPGRGSTYSDFKWHWYHFDGTDWDESRKLNRIYKFQGKAWDWEVSNENGNYDYLMYADIDYDHPDVVAEIKRWGTWYANELQLDGFRLDAVKHIKFSFLRDWVNHVREKTGKEMFTVAEYWQNDLGALENYLNKTNFNHSLFDVPLHYQFHAASTQGGGYDMRKLLNGTVVSKHPLKSVTFVDNHDTQPGQSLESTVQTWFKPLAYAFILTRESGYPQVFYGDMYGTKGDSQREIPALKHKIEPILKARKQYAYGAQHDYFDHHDIVGWTREGDSSVANSGLAALITDGPGGAKRMYVGRQNAGETWHDITGNRSEPVVINSEGWGEFHVNGGSVSIYVQR

SEQ ID NO: 30234 - protein, 481 aa, Bacillus sp.
LNGTLMQYFEWYMPNDGQHWKRLQNDSAYLAEHGITAVWIPPAYKGTSQADVGYGAYDLYDLGEFHQKGTVRTKYGTKGELQSAIKSLHSRDINVYGDVVINHKGGADATEDVTAVEVDPADRNRVISGEYLIKAWTHFHFPGRGSTYSDFKWHWYHFDGTDWDESRKLNRIYKFQGKAWDWEVSNENGNYDYLMYADIDYDHPDVAAEIKRWGTWYANELQLDGFRLDAVKHIKFSFLRDWVNHVREKTGKEMFTVAEYWQNDLGALENYLNKTNFNHSVFDVPLHYQFHAASTQGGGYDMRKLLNGTVVSKHPLKSVTFVDNHDTQPGQSLESTVQTWFKPLAYAFILTRESGYPQVFYGDMYGTKGDSQREIPALKHKIEPILKARKQYAYGAQHDYFDHHDIVGWTREGDSSVANSGLAALITDGPGGAKRMYVGRQNAGETWHDITGNRSEPVVINSEGWGEFHVNGGSVSIYVQR

SEQ ID NO: 30235 - protein, 480 aa, Bacillus licheniformis
LNGTLMQYFEWYMPNDGQHWKRLQNDSAYLAEHGITAVWIPPAYKGTSQADVGYGAYDLYDLGEFHQKGTVRTKYGTKGELQSAIKSLHSRDINVYGDVVINHKGGADATEDVTAVEVDPADRNRISGEHLIKAWTHFHFPGRGSTYSDFKWHWYHFDGTDWDESRKLNRIYKFQGKAWDWEVSNENGNYDYLMYADIDYDHPDVAAEIKRWGTWYANELQLDGFRLDAVKHIKFSFLRDWVNHVREKTGKEMFTVAEYWQNDLGALENYLNKTNFNHSVFDVPLHYQFHAASTQGGGYDMRKLLNGTVVSKHPLKSVTFVDNHDTQPGQSLESTVQTWFKPLAYAFILTRESGYPQVFYGDMYGTKGDSQREIPALKHKIEPILKARKQYAYGAQHDYFDHHDIVGWTREGDSSVANSGLAALITDGPGGAKRMYVGRQNAGETWHDITGNRSEPVVINSEGWGEFHVNGGSVSIYVQR

SEQ ID NO: 30236 - protein, 480 aa, Bacillus licheniformis
LNGTLMQYFEWYMPNDGQHWKRLQNDSAYLAEHGITAVWIPPAYKGTSQADVGYGAYDLYDLGEFHQKGTVRTKYGTKGELQSAIKSLHSRDINVYGDVVINHKGGADATEDVTAVEVDPADRNRVISGEHLIKAWTHFHFPGRGSTYSDFKWHWYHFDGTDWDESRKLNRIYKFQGKAWDWEVSENGNYDYLMYADIDYDHPDVAAEIKRWGTWYANELQLDGFRLDAVKHIKFSFLRDWVNHVREKTGKEMFTVAEYWQNDLGALENYLNKTNFNHSVFDVPLHYQFHAASTQGGGYDMRKLLNGTVVSKHPLKSVTFVDNHDTQPGQSLESTVQTWFKPLAYAFILTRESGYPQVFYGDMYGTKGDSQREIPALKHKIEPILKARKQYAYGAQHDYFDHHDIVGWTREGDSSVANSGLAALITDGPGGAKRMYVGRQNAGETWHDITGNRSEPVVINSEGWGEFHVNGGSVSIYVQR

SEQ ID NO: 30237 - protein, 480 aa, Bacillus licheniformis
LNGTLMQYFEWYMPNDGQHWKRLQNDSAYLAEHGITAVWIPPAYKGTSQADVGYGAYDLYDLGEFHQKGTVRTKYGTKGELQSAIKSLHSRDINVYGDVVINHKGGADATEDVTAVEVDPADRNRVISGEHLIKAWTHFHFPGRGSTYSDFKWHWYHFDGTDWDESRKLNRIYKFQGKAWDWEVSNENGNYDYLMYADIDYDHPDVAEIKRWGTWYANELQLDGFRLDAVKHIKFSFLRDWVNHVREKTGKEMFTVAEYWQNDLGALENYLNKTNFNHSVFDVPLHYQFHAASTQGGGYDMRKLLNGTVVSKHPLKSVTFVDNHDTQPGQSLESTVQTWFKPLAYAFILTRESGYPQVFYGDMYGTKGDSQREIPALKHKIEPILKARKQYAYGAQHDYFDHHDIVGWTREGDSSVANSGLAALITDGPGGAKRMYVGRQNAGETWHDITGNRSEPVVINSEGWGEFHVNGGSVSIYVQR

SEQ ID NO: 30238 - protein, 480 aa, Bacillus licheniformis
LNGTLMQYFEWYMPNDGQHWKRLQNDSAYLAEHGITAVWIPPAYKGTSQADVGYGAYDLYDLGEFHQKGTVRTKYGTKGELQSAIKSLHSRDINVYGDVVINHKGGADATEDVTAVEVDPADRNRVISGELIKAWTHFHFPGRGSTYSDFKWHWYHFDGTDWDESRKLNRIYKFQGKAWDWEVSNENGNYDYLMYADIDYDHPDVAAEIKRWGTWYANELQLDGFRLDAVKHIKFSFLRDWVNHVREKTGKEMFTVAEYWQNDLGALENYLNKTNFNHSVFDVPLHYQFHAASTQGGGYDMRKLLNGTVVSKHPLKSVTFVDNHDTQPGQSLESTVQTWFKPLAYAFILTRESGYPQVFYGDMYGTKGDSQREIPALKHKIEPILKARKQYAYGAQHDYFDHHDIVGWTREGDSSVANSGLAALITDGPGGAKRMYVGRQNAGETWHDITGNRSEPVVINSEGWGEFHVNGGSVSIYVQR

SEQ ID NO: 30239 - protein, 480 aa, Bacillus licheniformis
LNGTLMQYFEWYPNDGQHWKRLQNDSAYLAEHGITAVWIPPAYKGTSQADVGYGAYDLYDLGEFHQKGTVRTKYGTKGELQSAIKSLHSRDINVYGDVVINHKGGADATEDVTAVEVDPADRNRVISGEHLIKAWTHFHFPGRGSTYSDFKWHWYHFDGTDWDESRKLNRIYKFQGKAWDWEVSNENGNYDYLMYADIDYDHPDVAAEIKRWGTWYANELQLDGFRLDAVKHIKFSFLRDWVNHVREKTGKEMFTVAEYWQNDLGALENYLNKTNFNHSVFDVPLHYQFHAASTQGGGYDMRKLLNGTVVSKHPLKSVTFVDNHDTQPGQSLESTVQTWFKPLAYAFILTRESGYPQVFYGDMYGTKGDSQREIPALKHKIEPILKARKQYAYGAQHDYFDHHDIVGWTREGDSSVANSGLAALITDGPGGAKRMYVGRQNAGETWHDITGNRSEPVVINSEGWGEFHVNGGSVSIYVQR

SEQ ID NO: 30240 - protein, 480 aa, Bacillus sp.
APINETMMQYFEWDLPNDGTLWNRLHNNAQNLKNAGITALWLPPAYKGTSQSDVGYGVYDLYDLGEFNQKGTIRTKYGTKTQLERAIRSLKANGIQVYADVVFNHKAGADQTEFVDAVEVDPSNRNQEVSGTYQIEAWTKFDFPGRGNTYSSFKWRWYHFDGTDWDESRKLNRIYKFRGKAWDWEVDTENGNYDYLMFADLDMDHPEVVTELKNWGTWYVNTTNIDGFRLDAVKHIKFSFMRDWLTYVRNQTGKNLFAVGEFWSYDVNKLHNYITKTNGSMSLFDAPLHNNFYTASKSSGYFDMRYLLNNTLMKDQPSLAVTLVDNHDTQPGQSLQSWVEPWFKPLAYAFILTRQEGYPCVFYGDYYGIPSDGVPGLKSKIDPLLIARRDYAYGTQRDYIDHQDIIGWTREGIDTKPNSGLAALITDGPGGSKWMYVGKKHAGKVFYDLTGNRSDTVTINADGWGEFKVNGGSVSIWVAK

SEQ ID NO: 30241 - protein, 509 aa, Geobacillus thermoleovorans
LAFLLTASLFCPTGQPAKAAAPFNGTMMQYFEWYLPDDGTLWTKVANEANNLSSLGITALWLPPAYKGTSRSDVGYGVYDLYDLGEFNQKGTVRTKYGTKAQYLQAIQAAHAAGMQVYADVVFDHKGGADGTEWVDAVEVNPSDRNQEISGTYQIQAWTKFDFPGRGNTYSSFKWRWYHFDGVDWDESRKLSRIYKFRGIGKAWDWEVDTENGNYDYLMYADLDMDHPEVVTELKNWGKWYVNTTNIDGFRLDAVKHIKFSFFPDWLSYVRSQTGKPLFTVGEYWSYDINKLHNYITKTNGTMSLFDAPLHSKFYTASKSGGAFDMRTLMTNTLMKDQPTLAVTFVDNHDTEPVQALQSWVDPWFKPLAYAFILTRQEGYPCVFYGDYYGIPQYNIPSLKSKIDPLLIARRDSDGWGEFKVNGGSVSVWVPRKTTVSTIAWPITTRPWTGEFVRWTEPRLVAWPYAYGTQHDYLDHSDIIGWTREGVTEKPGSGLAALITDGPGGSKWM

SEQ ID NO: 30242 - protein, 485 aa, Bacillus sp.
HHNGTNGTMMQYFEWYLPNDGNHWNRLNSDASNLKSKGITAVWIPPAWKGASQNDVGYGAYDLYDLGEFNQKGTVRTKYGTRSQLQAAVTSLKNNGIQVYGDVVMNHKGGADATEMVRAVEVNPNNRNQEVTGEYTIEAWTRFDFPGRGNTHSSFKWRWYHFDGVDWDQSRRLNNRIYKFRGHGKAWDWEVDTEFGNYDYLMYADYDMDHPEVVNELRNWGVWYTNTLGLDGFRIDAVKHIKYSFTRDWINHVRSATGKNMFAVAEFWSYDLGKIENYLQKTNWNHSVFDVPLHNNLYTASKSGGNYDMRNIFNGTVVQRHPSHAVTFVDNHDSQPEEALESFVEEWFKPLAYALTLTREQGYPSVFYGDYYGIPTHGVPAMRSKIDPILEARQKYAYGPQHDYLDHPDVIGWTREGDSSHPKSGLATLITDGPGGSKRMYAGLKNAGETWYDITGNRSDTVKIGSDGWGEFHVNDGSVSIYVQK

SEQ ID NO: 30243 - protein, 483 aa, Bacillus sp.
HHNGTNGTMMQYFEWYLPNDGNHWNRLNSDASNLKSKGITAVWIPPAWKAVSQNDVGYGAYDLYDLGEFNQKGTVRTKYGTRSQLQAAVTSLKNNGIQVYGDVVMNHKGGADATEMVRAVEVNPNNRNQEVTGEYTIEAWTRFDFPGRGNTHSSFKWRWYHFDGVDWDQSRDLENRIYKFRGKAWDWEVDTEFGNYDYLMYADYDYDHPESTNEMRNWGVWYTNTLGLDGFRIDAVKHIKYSFTRDWINHVRSATGKNMFAVAEFWKNDLGAIENYLQKTNWNHSVFDVPLHYNLYNASKSGGNYDMRNIFNGTVVQRHPSHAVTFVDNHDSQPEEALESFVEEWFKPLAYALTLTREQGYPSVFYGDYYGIPTHGVPAMRSKIDPILEARQKYAYGPQHDYLDHPDVIGWTREGDSSHPKSGLATLITDGPGGSKRMYAGLKNAGETWYDITGNRSDTVKIGSDGWGEFHVNDGSVSIYVQK

SEQ ID NO: 30244 - protein, 483 aa, Bacillus sp.
HHNGTNGTMMQYFEWYLPNDGNHWNRLNSDASNLKSKGITAVWIPPAWKATSQNDVGYGAYDLYDLGEFNQKGTVRTKYGTRSQLQAAVTSLKNNGIQVYGDVVMNHKGGADATEMVRAVEVNPNNRNQEVTGEYTIEAWTRFDFPGRGNTHSSFKWRWYHFDGVDFDQSRNVNNRIYKFRGKAWDWEVDTEFGNYDYLMYADIDYDHPETTNEMRNWGVWYTNTLGLDGFRIDAVKHIKYSFTRDWINHVRSATGKNMFAVAEFWKNDLGAIENYLQKTNWNHSVFDVPLHYNLYNASKSGGNYDMRNIFNGTVVQRHPSHAVTFVDNHDSQPEEALESFVEEWFKPLAYALTLTREQGYPSVFYGDYYGIPTHGVPAMRSKIDPILEARQKYAYGPQHDYLDHPDVIGWTREGDSSHPKSGLATLITDGPGGSKRMYAGLKNAGETWYDITGNRSDTVKIGSDGWGEFHVNDGSVSIYVQK

SEQ ID NO: 30245 - protein, 485 aa, Bacillus sp.
HHNGTNGTMMQYFEWYLPNDGNHWNRLNSDASNLKSKGITAVWIPPAWKGASQNDVGYGAYDLYDLGEFNQKGTVRTKYGTRSQLQAAVTSLKNNGIQVYGDVVMNHKGGADATEMVRAVEVNPNNRNQEVTGEYTIEAWTRFDFPGRGNTHSSFKWRWYHFDGVDWDQSRRLDNRIYKFRGHGKAWDWEVDTEFGNYDYLMYVDYDYDHPETTNEMRNWGVWYTNTLGLDGFRIDAVKHIKYSFTRDWINHVRSATGKNMFAVAEFWKNDLGAIENYLQKTNWNHSVFDVPLHYNLYNASKSGGNYDMRNIFNGTVVQRHPSHAVTFVDNHDSQPEEALESFVEEWFKPLAYALTLTREQGYPSVFYGDYYGIPTHGVPAMRSKIDPILEARQKYAYGPQHDYLDHPDVIGWTREGDSSHPKSGLATLITDGPGGSKRMYAGLKNAGETWYDITGNRSDTVKIGSDGWGEFHVNDGSVSIYVQK

SEQ ID NO: 30246 - protein, 485 aa, Bacillus sp.
HHNGTNGTMMQYFEWYLPNDGNHWNRLNSDASNLKSKGIKAVWIPPAWKAASQNDVGYGAYDLYDLGEFNQRGTVRTKYGTRSQLQAAVTSLKNNGIQVYGDVVMNHKGGADATEMVRAVEVNPNNRNQEVTGEYTIEAWTRFDFPGRGNTHSSFKWRWYHFDGVDFDQSRNLSNRIYKFRGHGKAWDWEVDTEFGNYDYLMYTDYDMDHPEVVNELRNWGVWYTNTLGLDGFRIDAVKHIKYSFTRDWINHVRSATGKNMFAVAEFWKNDLGAIENYLQKTNWNHSVFDVPLHYNLYNASKSGGNYDMRNIFNGTVVQRHPSHAVTFVDNHDSQPEEALESFVEEWFKPLAYALTLTREQGYPSVFYGDYYGIPTHGVPAMRSKIDPILEARQKYAYGPQHDYLDHPDVIGWTREGDSSHPKSGLATLITDGPGGSKRMYAGLKNAGETWYDITGNRSDTVKIGSDGWGEFHVNDGSVSIYVQK

SEQ ID NO: 30247 - protein, 483 aa, Bacillus sp.
HHNGTNGTMMQYFEWYLPNDGNHWNRLNSDASNLKSKGITAVWIPPAWKATSQNDVGYGAYDLYDLGEFNQRGTVRTKYGTRSQLQAAVTSLKNNGIQVYGDVVMNHKGGADATEMVRAVEVNPNNRNQEVTGEYTIEAWTRFDFPGRGNTHSSFKWRWYHFDGVDFDMSRELSNRIYKFRGKAWDWEVDTEFGNYDYLMYADYDMDHPEVVNELRNWGVWYTNTLGLDGFRIDAVKHIKYSFTRDWINHVRSATGKNMFAVAEFWKNDLGAIENYLQKTNWNHSVFDVPLHYNLYNASKSQGNYDMRNIFNGTVVQRHPSHAVTFVDNHDSQPEEALESFVDTWFKPLAYALTLTREQGYPSVFYGDYYGIPTHGVPAMRSKIDPILEARQKYAYGPQHDYLDHPDVIGWTREGDSSHPKSGLATLITDGPGGSKRMYAGLKNAGETWYDITGNRSDTVKIGSDGWGEFHVNDGSVSIYVQK

SEQ ID NO: 30248 - protein, 483 aa, Bacillus sp.
HHNGTNGTMMQYFEWYLPNDGNHWNRLNSDASNLKSKGITAVWIPPAWKGASQNDVGYGAYDLYDLGEFNQKGTVRTKYGTRSQLQAAVTSLKNNGIQVYGDVVMNHKGGADATEMVRAVEVNPNNRNQEVTGEYTIEAYTRFDFPGRGNTHSSFKWRWYHFDGVDFDQSRDLTNRIYKFRGKAWDWEVDTEFGNYDYLMYVDYDMDHPEVVNELRNWGVWYTNTLGLDGFRIDAVKHIKYSFTRDWINHVRIATGKNMFAVAEFWKNDLGAIENYLQKTNWNHSVFDVPLHYNLYNASKSGGNYDMRNIFNGTVVQRHPSHAVTFVDNHDSQPEEALESFVDPWFKPLAYALTLTREQGYPSVFYGDYYGIPTHGVPAMRSKIDPILEARQKYAYGPQHDYLDHPDVIGWTREGDSSHPKSGLATLITDGPGGSKRMYAGLKNAGETWYDITGNRSDTVKIGSDGWGEFHVNDQSVSIYVQK

SEQ ID NO: 30249 - protein, 483 aa, Bacillus sp.
HHNGTNKTMMQYFEWYLPNDGNHWNRLNSDASNLKSKGIKAVWIPPAWKGASQNDVGYGAYDLYDLGEFNQRGTVRTKYGTRSQLQAAVTSLKNNGIQVYGDVVMNHKGGADATEMVRAVEVNPNNRNQEVTGEYTIEAWTRFDFPGRGNTHSSFKWRWYHFDGVDFDQSRRLNNRIYKFRGKAWDWEVDTEFGNYDYLMYADYDMDHPEVVNELRNWGVWYTNTLGLDGFRIDAVKHIKYSFTRDWINHVRSATGKNMFAVAEFWKNDLGAIENYLQKTNWNHSVFDVPLHYNLYNASKSGGNYDMRNIFNGTVVQAHPNHAVTFVDNHDSQPEEALESFVEEWFKPLAYALTLTREQGYSSVFYGDYYGIPTHGVPAMRSKIDPILEARQKYAYGPQHDYLDHPDVIGWTREGDSSHPKSGLATLITDGPGGSKRMYAGLKNAGETWYDITGNRSDTVKIGSDGWGEFHVNDGSVSIYVQK

SEQ ID NO: 30250 - protein, 483 aa, Bacillus sp.
HHNGTNGTMMQYFEWYLPNDGNHWNRLNSDASNLKSKGITAVWIPPAWKAVSQNDVGYGAYDLYDLGEFNQKGTVRTKYGTRSQLQAAVTSLKNNGIQVYGDVVMNHKGGADATEMVRAVEVNPNNRNQEVTGEYTIEAWTRFDFPGRGNTHSSFKWRWYHFDGVDFDQSREFTNRIYKFRGKAWDWEVDTEFGNYDYLMYADIDYDHPETTNEMRNWGVWYTNTLGLDGFRIDAVKHIKYSFTRDWINHVRSATGKNMFAVAEFWKNDLGAIENYLQKTNWNHSVFDVPLHYNLYNASKSGGNYDMRNIFNGTVVQRHPSHAVTFVDNHDSQPEEALESFVEEWFKPLAYALTLTREQGYPSVFYGDYYGIPTHGVPAMRSKIDPILEARQKYAYGPQHDYLDHPDVIGWTREGDSSHPKSGLATLITDGPGGSKRMYAGLKNAGETWYDITGNRSDTVKIGSDGWGEFHVNDGSVSIYVQK

SEQ ID NO: 30251 - protein, 483 aa, Bacillus sp.
HHNGTNGTMMQYFEWYLPNDGNHWNRLNSDASNLKSKGITAVWIPPAWKGASQNDVGYGAYDLYDLGEFNQKGTVRTKYGTRSQLQAAVTSLKNNGIQVYGDVVMNHKGGADATEMVRAVEVNPNNRNQEVTGEYTIEAWTRFDFPGRGNTHSSFKWRWYHFDGVDWDQSRRLNNRIYKFRGKAWDWEVDTEFGNYDYLMYADYDMDHPEVVNELRNWGVWYTNTLGLDGFRIDAVKHIKYSFTRDWINHVRSATGKNMFAVAEFWSYDLGKIENYLQKTNWNHSVFDVPLHNNLYTASKSGGNYDMRNIFNGTVVQRHPSHAVTFVDNHDSQPEEALESFVEEWFKPLAYALTLTREQGYPSVFYGDYYGIPTHGVPAMRSKIDPILEARQKYAYGPQHDYLDHPDVIGWTREGDSSHPKSGLATLITDGPGGSKRMYAGLKNAGETWYDITGNRSDTVKIGSDGWGEFHVNDGSVSIYVQK

SEQ ID NO: 30252 - protein, 483 aa, Bacillus sp.
HHNGTNGTMMQYFEWYLPNDGNHWNRLNSDASNLKSKGITAVWIPPAWKAVSQNDVGYGAYDLYDLGEFNQKGTVRTKYGTRSQLQAAVTSLKNNGIQVYGDVVMNHKGGADATEMVRAVEVNPNNRNQEVTGEYTIEAWTRFDFPGRGNTHSSFKWRWYHFDGVDWDQSRRLSNRIYKFRGKAWDWEVDTEFGNYDYLMYADYDYDHPESTNEMRNWGVWYTNTLGLDGFRIDAVKHIKYSFTRDWINHVRSATGKNMFAVAEFWKNDLGAIENYLQKTNWNHSVFDVPLHYNLYNASKSGGNYDMRNIFNGTVVQRHPSHAVTFVDNHDSQPEEALESFVEEWFKPLAYALTLTREQGYPSVFYGDYYGIPTHGVPAMRSKIDPILEARQKYAYGPQHDYLDHPDVIGWTREGDSSHPKSGLATLITDGPGGSKRMYAGLKNAGETWYDITGNRSDTVKIGSDGWGEFHVNDGSVSIYVQK

SEQ ID NO: 30253 - protein, 485 aa, Bacillus sp.
HHNGTNGTMMQYFEWYLPNDGNHWNRLNSDASNLKSKGITAVWIPPAWKGTSQNDVGYGAYDLYDLGEFNQKGTVRTKYGTRSQLQAAVTSLKNNGIQVYGDVVMNHKGGADATEMVRAVEVNPNNRNQEVTGEYTIEAWTRFDFPGRGNTHSSFKWRWYHFDGVDWDQSRNLNNRIYKFRGHGKAWDWEVDTEFGNYDYLMYADIDYDHPESTNEMRNWGVWYTNTLGLDGFRIDAVKHIKYSFTRDWINHVRSATGKNMFAVAEFWKNDLGAIENYLQKTNWNHSVFDVPLHYNLYNASKSQGNYDMRNIFNGTVVQRHPSHAVTFVDNHDSQPEEALESFVDTWFKPLAYALTLTREQGYPSVFYGDYYGIPTHGVPAMRSKIDPILEARQKYAYGPQHDYLDHPDVIGWTREGDSSHPKSGLATLITDGPGGSKRMYAGLKNAGETWYDITGNRSDTVKIGSDGWGEFHVNGSSVSIYVQK

SEQ ID NO: 30254 - protein, 485 aa, Bacillus sp.
HHNGTNGTMMQYFEWYLPNDGNHWNRLNSDASNLKSKGITAVWIPPAWKAVSQNDVGYGAYDLYDLGEFNQKGTVRTKYGTRSQLQAAVTSLKNNGIQVYGDVVMNHKGGADATEMVRAVEVNPNNRNQEVTGEYTIEAWTRFDFPGRGNTHSSFKWRWYHFDGVDFDQSREFTNRIYKFRGHGKAWDWEVDTEFGNYDYLMYADYDYDHPESTNEMRNWGVWYTNTLGLDGFRIDAVKHIKYSFTRDWINHVRSATGKNMFAVAEFWKNDLGAIENYLQKTNWNHSVFDVPLHYNLYNASKSGGNYDMRNIFNGTVVQRHPSHAVTFVDNHDSQPEEALESFVDPWFKPLAYALTLTREQGYPSVFYGDYYGIPTHGVPAMRSKIDPILEARQKYAYGPQHDYLDHPDVIGWTREGDSSHPKSGLATLITDGPGGSKRMYAGLKNAGETWYDITGNRSDTVKIGSDGWGEFHVNGGSVSIYVQK

SEQ ID NO: 30255 - protein, 483 aa, Bacillus sp.
HHNGTNGTMMQYFEWYLPNDGNHWNRLNSDASNLKSKGIKAVWIPPAWKGASQNDVGYGAYDLYDLGEFNQRGTVRTKYGTRSQLQAAVTSLKNNGIQVYGDVVMNHKGGADATEMVRAVEVNPNNRNQEVTGEYTIEAWTRFDFPGRGNTHSSFKWRWYHFDGVDFDQSRRLNNRIYKFRGKAWDWEVDTEFGNYDYLMYADYDMDHPEVVNELRNWGVWYTNTLGLDGFRIDAVKHIKYSFTRDWINHVRSATGKNMFAVAEFWKNDLGAIENYLQKTNWNHSVFDVPLHYNLYNASKSSGNYDMRNIFNGTVVQRHPSHAVTFVDNHDSQPEEALESFVDEWFKPLAYALTLTREQGYPSVFYGDYYGIPTHGVPAMRSKIDPILEARQKYAYGPQHDYLDHPDVIGWTREGDSSHPKSGLATLITDGPGGSKRMYAGLKNAGETWYDITGNRSDTVKIGSDGWGEFHVNKQSVSIYVQK

SEQ ID NO: 30256 - protein, 483 aa, Bacillus sp.
HHNGTNGTMMQYFEWYLPNDGNHWNRLNSDASNLKSKGITAVWIPPAWKGASQNDVGYGAYDLYDLGEFNQKGTVRTKYGTRSQLQAAVTSLKNNGIQVYGDVVMNHKGGADATEMVRAVEVNPNNRNQEVTGEYTIEAWTRFDFPGRGNTHSSFKWRWYHFDGVDWDQSRRLDNRIYKFRGKAWDWEVDTEFGNYDYLMYVDYDYDHPETTNEMRNWGVWYTNTLGLDGFRIDAVKHIKYSFTRDWINHVRSATGKNMFAVAEFWKNDLGAIENYLQKTNWNHSVFDVPLHYNLYNASKSGGNYDMRNIFNGTVVQRHPSHAVTFVDNHDSQPEEALESFVEEWFKPLAYALTLTREQGYPSVFYGDYYGIPTHGVPAMRSKIDPILEARQKYAYGPQHDYLDHPDVIGWTREGDSSHPKSGLATLITDGPGGSKRMYAGLKNAGETWYDITGNRSDTVKIGSDGWGEFHVNDGSVSIYVQK

SEQ ID NO: 30257 - protein, 485 aa, Bacillus sp.
HHNGTNGTMMQYFEWYLPNDGNHWNRLNSDASNLKSKGITAVWIPPAWKAVSQNDVGYGAYDLYDLGEFNQKGTVRTKYGTRSQLQAAVTSLKNNGIQVYGDVVMNHKGGADATEMVRAVEVNPNNRNQEVTGEYTIEAWTRFDFPGRGNTHSSFKWRWYHFDGVDWDQSRRLSNRIYKFRGHGKAWDWEVDTEFGNYDYLMYADYDYDHPESTNEMRNWGVWYTNTLGLDGFRIDAVKHIKYSFTRDWINHVRSATGKNMFAVAEFWKNDLGAIENYLQKTNWNHSVFDVPLHYNLYNASKSGGNYDMRNIFNGTVVQRHPSHAVTFVDNHDSQPEEALESFVEEWFKPLAYALTLTREQGYPSVFYGDYYGIPTHGVPAMRSKIDPILEARQKYAYGPQHDYLDHPDVIGWTREGDSSHPKSGLATLITDGPGGSKRMYAGLKNAGETWYDITGNRSDTVKIGSDGWGEFHVNDGSVSIYVQK

SEQ ID NO: 30258 - protein, 485 aa, Bacillus sp.
HHNGTNGTMMQYFEWYLPNDGNHWNRLNSDASNLKSKGIKAVWIPPAWKGASQNDVGYGAYDLYDLGEFNQKGTVRTKYGTRSQLQAAVTSLKNNGIQVYGDVVMNHKGGADATEMVRAVEVNPNNRNQEVTGEYTIEAWTRFDFPGRGNTHSSFKWRWYHFDGVDFDQSRELDNRIYKFRGHGKAWDWEVDTEFGNYDYLMYTDYDMDHPEVVNELRNWGVWYTNTLGLDGFRIDAVKHIKYSFTRDWINHVRSATGKNMFAVAEFWKNDLGAIENYLQKTNWNHSVFDVPLHYNLYNASKSQGNYDMRNIFNGTVVQRHPSHAVTFVDNHDSQPEEALESFVDTWFKPLAYALTLTREQGYPSVFYGDYYGIPTHGVPAMRSKIDPILEARQKYAYGPQHDYLDHPDVIGWTREGDSSHPKSGLATLITDGPGGSKRMYAGLKNAGETWYDITGNRSDTVKIGSDGWGEFHVNGSSVSIYVQK

SEQ ID NO: 30259 - protein, 483 aa, Bacillus sp.
HHNGTNGTMMQYFEWYLPNDGNHWNRLNSDASNLKSKGITAVWIPPAWKAASQNDVGYGAYDLYDLGEFNQKGTVRTKYGTRSQLQAAVTSLKNNGIQVYGDVVMNHKGGADATEMVRAVEVNPNNRNQEVTGEYTIEAWTRFDFPGRGNTHSSFKWRWYHFDGVDWDQSRNLNNRIYKFRGKAWDWEVDTEFGNYDYLMYTDYDMDHPEVVNELRNWGVWYTNTLGLDGFRIDAVKHIKYSFTRDWINHVRSATGKNMFAVAEFWKNDLGAIENYLQKTNWNHSVFDVPLHYNLYNASKSGGNYDMRNIFNGTVVQRHPSHAVTFVDNHDSQPEEALESFVETWFKPLAYALTLTREQGYPSVFYGDYYGIPTHGVPAMRSKIDPILEARQKYAYGPQHDYLDHPDVIGWTREGDSSHPKSGLATLITAGPGGSKRMYAGLKNAGETWYDITGNRSDTVKIGSDGWGEFHVNKASVSIYVQK

SEQ ID NO: 30260 - protein, 485 aa, Bacillus sp.
HHNGTNGTMMQYFEWYLPNDGNHWNRLNSDASNLKSKGITAVWIPPAWKAVSQNDVGYGAYDLYDLGEFNQKGTVRTKYGTRSQLQAAVTSLKNNGIQVYGDVVMNHKGGADATEMVRAVEVNPNNRNQEVTGEYTIEAWTRFDFPGRGNTHSSFKWRWYHFDGVDFDQSREFTNRIYKFRGHGKAWDWEVDTEFGNYDYLMYADIDYDHPESTNEMRNWGVWYTNTLGLDGFRIDAVKHIKYSFTRDWINHVRSATGKNMFAVAEFWKNDLGAIENYLQKTNWNHSVFDVPLHYNLYNASKSGGNYDMRNIFNGTVVQRHPSHAVTFVDNHDSQPEEALESFVEEWFKPLAYALTLTREQGYPSVFYGDYYGIPTHGVPAMRSKIDPILEARQKYAYGPQHDYLDHPDVIGWTREGDSSHPKSGLATLITDGPGGSKRMYAGLKNAGETWYDITGNRSDTVKIGSDGWGEFHVNDGSVSIYVQK

SEQ ID NO: 30261 - protein, 485 aa, Bacillus sp.
HHNGTNGTMMQYFEWYLPNDGNHWNRLNSDASNLKSKGITAVWIPPAWKAVSQNDVGYGAYDLYDLGEFNQKGTVRTKYGTRSQLQAAVTSLKNNGIQVYGDVVMNHKGGADATEMVRAVEVNPNNRNQEVTGEYTIEAWTRFDFPGRGNTHSSFKWRWYHFDGVDWDQSRELSNRIYKFRGHGKAWDWEVDTEFGNYDYLMYADYDYDHPESTNEMRNWGVWYTNTLGLDGFRIDAVKHIKYSFTRDWINHVRSATGKNMFAVAEFWKNDLGAIENYLQKTNWNHSVFDVPLHYNLYNASKSGGNYDMRNIFNGTVVQRHPSHAVTFVDNHDSQPEEALESFVEEWFKPLAYALTLTREQGYPSVFYGDYYGIPTHGVPAMRSKIDPILEARQKYAYGPQHDYLDHPDVIGWTREGDSSHPKSGLATLITDGPGGSKRMYAGLKNAGETWYDITGNRSDTVKIGSDGWGEFHVNDGSVSIYVQK

SEQ ID NO: 30262 - protein, 485 aa, Bacillus sp.
HHNGTNGTMMQYFEWYLPNDGNHWNRLNSDASNLKSKGIKAVWIPPAWKGTSQNDVGYGAYDLYDLGEFNQRGTVRTKYGTRSQLQAAVTSLKNNGIQVYGDVVMNHKGGADATEMVRAVEVNPNNRNQEVTGEYTIEAWTRFDFPGRGNTHSSFKWRWYHFDGVDFDQSRNLNNRIYKFRGHGKAWDWEVDTEFGNYDYLMYVDYDMDHPEVVNELRNWGVWYTNTLGLDGFRIDAVKHIKYSFTRDWINHVRSATGKNMFAVAEFWKNDLGAIENYLQKTNWNHSVFDVPLHYNLYNASKSQGNYDMRNIFNGTVVQRHPSHAVTFVDNHDSQPEEALESFVDTWFKPLAYALTLTREQGYPSVFYGDYYGIPTHGVPAMRSKIDPILEARQKYAYGPQHDYLDHPDVIGWTREGDSSHPKSGLATLITDGPGGSKRMYAGLKNAGETWYDITGNRSDTVKIGSDGWGEFHVNGSSVSIYVQK

SEQ ID NO: 30263 - protein, 485 aa, Bacillus sp.
HHNGTNGTMMQYFEWYLPNDGNHWNRLNSDASNLKSKGIKAVWIPPAWKGASQNDVGYGAYDLYDLGEFNQRGTVRTKYGTRSQLQAAVTSLKNNGIQVYGDVVMNHKGGADATEMVRAVEVNPNNRNQEVTGEYTIEAWTRFDFPGRGNTHSSFKWRWYHFDGVDFDQSRRLNNRIYKFRGHGKAWDWEVDTEFGNYDYLMYADYDMDHPEVVNELRNWGVWYTNTLGLDGFRIDAVKHIKYSFTRDWINHVRSATGKNMFAVAEFWKNDLGAIENYLQKTNWNHSVFDVPLHYNLYNASKSSGNYDMRNIFNGTVVQRHPSHAVTFVDNHDSQPEEALESFVDEWFKPLAYALTLTREQGYPSVFYGDYYGIPTHGVPAMRSKIDPILEARQKYAYGPQHDYLDHPDVIGWTREGDSSHPKSGLATLITDGPGGSKRMYAGLKNAGETWYDITGNRSDTVKIGSDGWGEFHVNKQSVSIYVQK

SEQ ID NO: 30264 - protein, 483 aa, Bacillus sp. (in: firmicutes)
HHDGTNGTIMQYFEWNVPNDGQHWNRLHNNAQNLKNAGITAIWIPPAWKGTSQNDVGYGAYDLYDLGEFNQKGTVRTKYGTKAELERAIRSLKANGIQVYGDVVMNHKGGADFTERVQAVEVNPQNRNQEVSGTYQIEAWTGFNFPGRGNQHSSFKWRWYHFDGTDWDQSRQLANRIYKFRGKAWDWEVDTENGNYDYLMYADVDMDHPEVINELNRWGVWYANTLNLDGFRLDAVKHIKFSFMRDWLGHVRGQTGKNLFAIAEFWKNDLGALENYLSKTNWTMSAFDVPLHYNLYQASNSSGNYDMRNLLNGTLVQRHPSHAVTFVDNHDTQPGEALESFVQGWFKPLAYATILTREQGYPKVFYGDYYGIPSDGVPSYRQQIDPLLKARQQYAYGRQHDYFDHHDIIGWTREGNASHPNSGLATIMSDGPGGSKWMYVGRQKAGEVWHDMTGNRSGTVTINQDGWGHFFVNGGSVSVWVKR

SEQ ID NO: 30265 - protein, 485 aa, Bacillus sp.
HHNGTNGTMMQYFEWYLPNDGNHWNRLNSDASNLKSKGITAVWIPPAWKAVSQNDVGYGAYDLYDLGEFNQKGTVRTKYGTRSQLQAAVTSLKNNGIQVYGDVVMNHKGGADATEMVRAVEVNPNNRNQEVTGEYTIEAWTRFDFPGRGNTHSSFKWRWYHFDGVDFDQSREFTNRIYKFRGHGKAWDWEVDTEFGNYDYLMYADYDYDHPETTNEMRNWGVWYTNTLGLDGFRIDAVKHIKYSFTRDWINHVRSATGKNMFAVAEFWKNDLGAIENYLQKTNWNHSVFDVPLHYNLYNASKSGGNYDMRNIFNGTVVQRHPSHAVTFVDNHDSQPEEALESFVEEWFKPLAYALTLTREQGYPSVFYGDYYGIPTHGVPAMRSKIDPILEARQKYAYGPQHDYLDHPDVIGWTREGDSSHPKSGLATLITDGPGGSKRMYAGLKNAGETWYDITGNRSDTVKIGSDGWGEFHVNDGSVSIYVQK

SEQ ID NO: 30266 - protein, 483 aa, Bacillus sp.
HHNGTNGTMMQYFEWYLPNDGNHWNRLNSDASNLKSKGITAVWIPPAWKATSQNDVGYGAYDLYDLGEFNQKGTVRTKYGTRSQLQAAVTSLKNNGIQVYGDVVMNHKGGADATEMVRAVEVNPNNRNQEVTGEYTIEAWTRFDFPGRGNTHSSFKWRWYHFDGVDWDQSRELSNRIYKFRGKAWDWEVDTEFGNYDYLMYADIDYDHPETTNEMRNWGVWYTNTLGLDGFRIDAVKHIKYSFTRDWINHVRSATGKNMFAVAEFWKNDLGAIENYLQKTNWNHSVFDVPLHYNLYNASKSQGNYDMRNIFNGTVVQRHPSHAVTFVDNHDSQPEEALESFVDTWFKPLAYALTLTREQGYPSVFYGDYYGIPTHGVPAMRSKIDPILEARQKYAYGPQHDYLDHPDVIGWTREGDSSHPKSGLATLITDGPGGSKRMYAGLKNAGETWYDITGNRSDTVKIGSDGWGEFHVNGGSVSIYVQK

SEQ ID NO: 30267 - protein, 485 aa, Bacillus sp.
HHNGTNGTMMQYFEWYLPNDGNHWNRLNSDASNLKSKGITAVWIPPAWKATSQNDVGYGAYDLYDLGEFNQKGTVRTKYGTRSQLQAAVTSLKNNGIQVYGDVVMNHKGGADATEMVPAVEVNPNNRNQEVTGEYTIEAWTRFDFPGRGNTHSSFKWRWYHFDGVDWDQSRELSNRIYKFRGHSKAWDWEVDTEFGNYDYLMYADYDMDHPETTNEMRNWGVWYTNTLGLDGFRIDAVKHIKYSFTRDWINHVRSATGKNMFAVAEFWKNDLGAIENYLQKTNWNHSVFDVPLHYNLYNASKSQGNYDMRNIFNGTVVQRHPSHAVTFVDNHDSQPEEALESFVDTWFKPLAYALTLTREQGYPSVFYGDYYGIPTHGVPAMRSKIDPILEARQKYAYGPQHDYLDHPDVIGWTREGDSSHPKSGLATLITDGPGGSKRMYAGLKNAGETWYDITGNRSDTVKIGSDGWGEFHVNGSSVSIYVQK

SEQ ID NO: 30268 - protein, 483 aa, Synthetic construct
HHNGTNGTMMQYFEWYLPNDGNHWNRLNSDASNLKSKGITAVWIPPAWKGASQNDVGYGAYDLYDLGEFNQKGTVRTKYGTRSQLQAAVTSLKNNGIQVYGDVVMNHKGGADATEMVNAVEVNPNNRNQEVTGEYTIEAWTRFDFPGRGNTHSSFKWRWYHFDGVDWDQSRRLSNRIYKFRGKAWDWPVDTENGNYDYLMYADLDMDHPEVVNELRNWGVWYTNTLGLDGFRIDAVKHIKFSFTRDWINHVRSATGKNMFAVAEYWKNDLGAIENYLQFTNWNHSVFDVPLHYNLYNASKSGGNYDMRKLLNGTVVSKHPSKAVTFVDNHDTQPEEALESFVQPWFKPLAYAFILTRESGYPSVFYGDMYGIPTHGVPAMKHKIEPILKARKQYAYGAQHDYLDHPDIIGWTREGDSSHPKSGLATLITDGPGGSKRMYAGLKNAGETWYDITGNRSDTVKIGSDGWGTFHVNKGSVSIYVQK

SEQ ID NO: 30269 - protein, 483 aa, Bacillus sp.
HHNGTNGTMMQYFEWYLPNDGNHWNRLNSDASNLKSKGIKAVWIPPAWKAASQNDVGYGAYDLYDLGEFNQRGTVRTKYGTRSQLQAAVTSLKNNGIQVYGDVVMNHKGGADATEMVRAVEVNPNNRNQEVTGEYTIEAWTRFDFPGRGNTHSSFKWRWYHFDGVDFDQSRNLSNRIYKFRGKAWDWEVDTEFGNYDYLMYTDYDMDHPEVVNELRNWGVWYTNTLGLDGFRIDAVKHIKYSFTRDWINHVRSATGKNMFAVAEFWKNDLGAIENYLQKTNWNHSVFDVPLHYNLYNASKSGGNYDMRNIFNGTVVQRHPSHAVTFVDNHDSQPEEALESFVEEWFKPLAYALTLTREQGYPSVFYGDYYGIPTHGVPAMRSKIDPILEARQKYAYGPQHDYLDHPDVIGWTREGDSSHPKSGLATLITDGPGGSKRMYAGLKNAGETWYDITGNRSDTVKIGSDGWGEFHVNDGSVSIYVQK

SEQ ID NO: 30270 - protein, 483 aa, Bacillus sp.
HHNGTNGTMMQYFEWYLPNDGNHWNRLNSDASNLKSKGITAVWIPPAWKGASQNDVGYGAYDLYDLGEFNQKGTVRTKYGTRSQLQAAVTSLKNNGIQVYGDVVMNHKGGADATEMVRAVEVNPNNRNQEVTGEYTIEAWTRFDFPGRGNTHSSFKWRWYHFDGVDWDQSERLNNRIYKFRGKAWDWEVETEFGNYDYLMYADYDMDHPEVVNELRNWGVWYTNTLGLDGFRIDAVKHIKYSFTRDWINHVRSATGKNMFAVAEFWKNDLGAIENYLSKTNWNHSVFDVPLHYNLYNASKSGGNYDMRNIFNGTVVQRHPSHAVTFVDNHDSQPEEALESFVEEWFKPLAYALTLTREAGLPSVFYGDYYGIPTHGVPAMRSKIDPILLARQKYAYGPQHDYLDHPDVIGWTREGDSSHPPSGLATLITDGPGGSKRMYAGLKNAGETWYDITGNRSDTVKIGSDGWGEFHVNDGSVSIYVQK

SEQ ID NO: 30271 - protein, 483 aa, Bacillus sp.
HHNGTNGTMMQYFEWYLPNDGNHWNRLNSDASNLKSKGITAVWIPPAWKAVSQNDVGYGAYDLYDLGEFNQKGTVRTKYGTRSQLQAAVTSLKNNGIQVYGDVVMNHKGGADATEMVRAVEVNPNNRNQEVTGEYTIEAWTRFDFPGRGNTHSSFKWRWYHFDGVDWDQSRELSNRIYKFRGKAWDWEVDTEFGNYDYLMYADYDYDHPESTNEMRNWGVWYTNTLGLDGFRIDAVKHIKYSFTRDWINHVRSATGKNMFAVAEFWKNDLGAIENYLQKTNWNHSVFDVPLHYNLYNASKSGGNYDMRNIFNGTVVQRHPSHAVTFVDNHDSQPEEALESFVEEWFKPLAYALTLTREQGYPSVFYGDYYGIPTHGVPAMRSKIDPILEARQKYAYGPQHDYLDHPDVIGWTREGDSSHPKSGLATLITDGPGGSKRMYAGLKNAGETWYDITGNRSDTVKIGSDGWGEFHVNDGSVSIYVQK

SEQ ID NO: 30272 - protein, 483 aa, Bacillus sp.
HHNGTNGTMMQYFEWYLPNDGNHWNRLNSDASNLKSKGITAVWIPPAWKGASQNDVGYGAYDLYDLGEFNQKGTVRTKYGTRSQLQAAVTSLKNNGIQVYGDVVMNHKGGADATEMVPAVEVNPNNRNQEVTGEYTIEAWTRFDFPGRGNTHSSFKWRWYHFDGVDWDQSRELDNRIYKFRSKAWDWEVDTEFGNYDYLMYTDYDMDHPEVVNELRNWGVWYTNTLGLDGFRIDAVKHIKYSFTRDWINHVRSATGKNMFAVAEFWKNDLGAIENYLQKTNWNHSVFDVPLHYNLYNASKSQGNYDMRNIFNGTVVQRHPSHAVTFVDNHDSQPEEALESFVDTWFKPLAYALTLTREQGYPSVFYGDYYGIPTHGVPAMRSKIDPILLARQKYAYGPQHDYLDHPDVIGWTREGDSSHPKSGLATLITDGPGGSKRMYAGLKNAGETWYDITGNRSDTVKIGSDGWGEFHVNGSSVSIYVQK

SEQ ID NO: 30273 - protein, 483 aa, Bacillus sp.
HHNGTNGTMMQYFEWYLPNDGNHWNRLNSDASNLKSKGIKAVWIPPAWKGASQNDVGYGAYDLYDLGEFNQRGTVRTKYGTRSQLQAAVTSLKNNGIQVYGDVVMNHKGGADATEMVRAVEVNPNNRNQEVTGEYTIEAWTRFDFPGRGNTHSSFKWRWYHFDGVDWDQSRELDNRIYKFRGKAWDWEVDTEFGNYDYLMYTDYDMDHPEVVNELRNWGVWYTNTLGLDGFRIDAVKHIKYSFTRDWINHVRSATGKNMFAVAEFWKNDLGAIENYLQKTNWNHSVFDVPLHYNLYNASKSQGNYDMRNIFNGTVVQRHPSHAVTFVDNHDSQPEEALESFVDTWFKPLAYALTLTREQGYPSVFYGDYYGIPTHGVPAMRSKIDPILEARQKYAYGPQHDYLDHPDVIGWTREGDSSHPKSGLATLITDGPGGSKRMYAGLKNAGETWYDITGNRSDTVKIGSDGWGEFHVNGSSVSIYVQK

SEQ ID NO: 30274 - protein, 485 aa, Bacillus sp.
HHNGTNKTMMQYFEWYLPNDGNHWNRLNSDASNLKSKGIKAVWIPPAWKGASQNDVGYGAYDLYDLGEFNQRGTVRTKYGTRSQLQAAVTSLKNNGIQVYGDVVMNHKGGADATEMVRAVEVNPNNRNQEVTGEYTIEAWTRFDFPGRGNTHSSFKWRWYHFDGVDFDQSRRLNNRIYKFRGHGKAWDWEVDTEFGNYDYLMYADYDMDHPEVVNELRNWGVWYTNTLGLDGFRIDAVKHIKYSFTRDWINHVRSATGKNMFAVAEFWKNDLGAIENYLQKTNWNHSVFDVPLHYNLYNASKSGGNYDMRNIFNGTVVQMQPSHAVTFVDNHDSQPEEALESFVEEWFKPLAYALTLTREQGYPSVFYGDYYGIPTHGVPAMRSKIDPILEARQKYAYGPQHDYLDHPDVIGWTREGDSSHPKSGLATLITDGPGGSKRMYAGLKNAGETWYDITGNRSDTVKIGSDGWGEFHVNDGSVSIYVQK

SEQ ID NO: 30275 - protein, 485 aa, Bacillus sp.
HHNGTNGTMMQYFEWYLPNDGNHWNRLNSDASNLKSKGITAVWIPPAWKGASQNDVGYGAYDLYDLGEFNQKGTVRTKYGTRSQLQAAVTSLKNNGIQVYGDVVMNHKGGADATEMVRAVEVNPNNRNQEVTGEYTIEAWTRFDFPGRGNTHSSFKWRWYHFDGVDWDQSERLNNRIYKFRGHGKAWDWEVETEFGNYDYLMYADYDMDHPEVVNELRNWGVWYTNTLGLDGFRIDAVKHIKYSFTRDWINHVRSATGKNMFAVAEFWKNDLGAIENYLSKTNWNHSVFDVPLHYNLYNASKSGGNYDMRNIFNGTVVQRHPSHAVTFVDNHDSQPEEALESFVEEWFKPLAYALTLTREAGLPSVFYGDYYGIPTHGVPAMRSKIDPILLARQKYAYGPQHDYLDHPDVIGWTREGDSSHPPSGLATLITDGPGGSKRMYAGLKNAGETWYDITGNRSDTVKIGSDGWGEFHVNDGSVSIYVQK

SEQ ID NO: 30276 - protein, 483 aa, Bacillus sp. (in: firmicutes)
HHDGTNGTIMQYFEWNVPNDGQHWNRLHNNAQNLKNAGITAIWIPPAWKGTSQNDVGYGAYDLYDLGEFNQKGTVRTKYGTKAELERAIRSLKANGIQVYGDVVMNHKGGADFTERVQAVEVNPQNRNQEVSGTYQIEAWTGFNFPGRGNQHSSFKWRWYHFDGTDWDQSRQLANRIYKFRGKAWDWEVDTENGNYDYLMYADVDMDHPEVINELNRWGVWYANTLNLDGFRLDAVKHIKFSFMRDWLGHVRGQTGKNLFAVAEFWKNDLGALENYLSKTNWTMSAFDVPLHYNLYQASNSSGNYDMRNLLNGTLVQRHPSHAVTFVDNHDTQPGEALESFVQGWFKPLAYATILTREQGYPSVFYGDYYGIPSDGVPSYRQQIDPLLKARQQYAYGRQHDYFDHWDVIGWTREGNASHPNSGLATIMSDGPGGSKWMYVGRQKAGEVWHDMTGNRSGTVTINQDGWGHFFVNGGSVSVWVKR

SEQ ID NO: 30277 - protein, 483 aa, Bacillus sp.
HHNGTNGTMMQYFEWYLPNDGNHWNRLNSDASNLKSKGIKAVWIPPAWKAASQNDVGYGAYDLYDLGEFNQRGTVRTKYGTRSQLQAAVTSLKNNGIQVYGDVVMNHKGGADATEMVRAVEVNPNNRNQEVTGEYTIEAWTRFDFPGRGNTHSSFKWRWYHFDGVDFDQSRRTNNRIYKFRGKAWDWEVDTEFGNYDYLMYVDYDMDHPEVVNELRNWGVWYTNTLGLDGFRIDAVKHIKYSFTRDWINHVRSATGKNMFAVAEFWKNDLGAIENYLQKTNWNHSVFDVPLHYNLYNASKSGGNYDMRNIFNGTVVQRHPSHAVTFVDNHDSQPEEALESFVEEWFKPLAYALTLTREQGYPSVFYGDYYGIPTHGVPAMRSKIDPILEARQKYAYGPQHDYLDHPDVIGWTREGDSSHPKSGLATLITDGPGGSKRMYAGLKNAGETWYDITGNRSDTVKIGSDGWGEFHVNDGSVSIYVQK

SEQ ID NO: 30278 - protein, 483 aa, Bacillus sp.
HHNGTNGTMMQYFEWYLPNDGNHWNRLNSDASNLKSKGIKAVWIPPAWKAASQNDVGYGAYDLYDLGEFNQRGTVRTKYGTRSQLQAAVTSLKNNGIQVYGDVVMNHKGGADATEMVRAVEVNPNNRNQEVTGEYTIEAWTRFDFPGRGNTHSSFKWRWYHFDGVDFDQSRDLTNRIYKFRGKAWDWEVDTEFGNYDYLMYADYDMDHPEVVNELRNWGVWYTNTLGLDGFRIDAVKHIKYSFTRDWINHVRSATGKNMFAVAEFWKNDLGAIENYLQKTNWNHSVFDVPLHYNLYNASKSGGNYDMRNIFNGTVVQRHPSHAVTFVDNHDSQPEEALESFVDEWFKPLAYALTLTREQGYPSVFYGDYYGIPTHGVPAMRSKIDPILEARQKYAYGPQHDYLDHPDVIGWTREGDSSHPKSGLATLITDGPGGSKRMYAGLKNAGETWYDITGNRSDTVKIGSDGWGEFHVNDQSVSIYVQK

SEQ ID NO: 30279 - protein, 485 aa, Bacillus sp.
HHNGTNGTMMQYFEWYLPNDGNHWNRLNSDASNLKSKGIKAVWIPPAWKGASQNDVGYGAYDLYDLGEFNQRGTVRTKYGTRSQLQAAVTSLKNNGIQVYGDVVMNHKGGADATEMVRAVEVNPNNRNQEVTGEYTIEAWTRFDFPGRGNTHSSFKWRWYHFDGVDWDQSRELDNRIYKFRGHGKAWDWEVDTEFGNYDYLMYTDYDMDHPEVVNELRNWGVWYTNTLGLDGFRIDAVKHIKYSFTRDWINHVRSATGKNMFAVAEFWKNDLGAIENYLQKTNWNHSVFDVPLHYNLYNASKSQGNYDMRNIFNGTVVQRHPSHAVTFVDNHDSQPEEALESFVDTWFKPLAYALTLTREQGYPSVFYGDYYGIPTHGVPAMRSKIDPILEARQKYAYGPQHDYLDHPDVIGWTREGDSSHPKSGLATLITDGPGGSKRMYAGLKNAGETWYDITGNRSDTVKIGSDGWGEFHVNGSSVSIYVQK

SEQ ID NO: 30280 - protein, 483 aa, Bacillus sp.
HHNGTNGTMMQYFEWYLPNDGNHWNRLNSDASNLKSKGITAVWIPPAWKAVSQNDVGYGAYDLYDLGEFNQKGTVRTKYGTRSQLQAAVTSLKNNGIQVYGDVVMNHKGGADATEMVRAVEVNPNNRNQEVTGEYTIEAWTRFDFPGRGNTHSSFKWRWYHFDGVDFDQSREFTNRIYKFRGKAWDWEVDTEFGNYDYLMYADIDYDHPESTNEMRNWGVWYTNTLGLDGFRIDAVKHIKYSFTRDWINHVRSATGKNMFAVAEFWKNDLGAIENYLQKTNWNHSVFDVPLHYNLYNASKSGGNYDMRNIFNGTVVQRHPSHAVTFVDNHDSQPEEALESFVEEWFKPLAYALTLTREQGYPSVFYGDYYGIPTHGVPAMRSKIDPILEARQKYAYGPQHDYLDHPDVIGWTREGDSSHPKSGLATLITDGPGGSKRMYAGLKNAGETWYDITGNRSDTVKIGSDGWGEFHVNDGSVSIYVQK

SEQ ID NO: 30281 - protein, 485 aa, Bacillus sp.
HHNGTNGTMMQYFEWYLPNDGNHWNRLNSDASNLKSKGITAVWIPPAWKATSQNDVGYGAYDLYDLGEFNQKGTVRTKYGTRSQLQAAVTSLKNNGIQVYGDVVMNHKGGADATEMVRAVEVNPNNRNQEVTGEYTIEAWTRFDFPGRGNTHSSFKWRWYHFDGVDFDQSRNVNNRIYKFRGHGKAWDWEVDTEFGNYDYLMYADIDYDHPESTNEMRNWGVWYTNTLGLDGFRIDAVKHIKYSFTRDWINHVRSATGKNMFAVAEFWKNDLGAIENYLQKTNWNHSVFDVPLHYNLYNASKSGGNYDMRNIFNGTVVQRHPSHAVTFVDNHDSQPEEALESFVEEWFKPLAYALTLTREQGYPSVFYGDYYGIPTHGVPAMRSKIDPILEARQKYAYGPQHDYLDHPDVIGWTREGDSSHPKSGLATLITDGPGGSKRMYAGLKNAGETWYDITGNRSDTVKIGSDGWGEFHVNDGSVSIYVQK

SEQ ID NO: 30282 - protein, 485 aa, Bacillus sp.
HHNGTNGTMMQYFEWYLPNDGNHWNRLNSDASNLKSKGITAVWIPPAWKGASQNDVGYGAYDLYDLGEFNQKGTVRTKYGTRSQLQAAVTSLKNNGIQVYGDVVMNHKGGADATEMVRAVEVNPNNRNQEVTGEYTIEAYTRFDFPGRGNTHSSFKWRWYHFDGVDFDQSRDLTNRIYKFRGHGKAWDWEVDTEFGNYDYLMYVDYDMDHPEVVNELRNWGVWYTNTLGLDGFRIDAVKHIKYSFTRDWINHVRIATGKNMFAVAEFWKNDLGAIENYLQKTNWNHSVFDVPLHYNLYNASKSGGNYDMRNIFNGTVVQRHPSHAVTFVDNHDSQPEEALESFVDPWFKPLAYALTLTREQGYPSVFYGDYYGIPTHGVPAMRSKIDPILEARQKYAYGPQHDYLDHPDVIGWTREGDSSHPKSGLATLITDGPGGSKRMYAGLKNAGETWYDITGNRSDTVKIGSDGWGEFHVNDQSVSIYVQK

SEQ ID NO: 30283 - protein, 483 aa, Bacillus sp.
HHNGTNGTMMQYFEWYLPNDGNHWNRLNSDASNLKSKGITAVWIPPAWKGTSQNDVGYGAYDLYDLGEFNQKGTVRTKYGTRSQLQAAVTSLKNNGIQVYGDVVMNHKGGADATEMVRAVEVNPNNRNQEVTGEYTIEAWTRFDFPGRGNTHSSFKWRWYHFDGVDWDQSRNLNNRIYKFRGKAWDWEVDTEFGNYDYLMYADIDYDHPESTNEMRNWGVWYTNTLGLDGFRIDAVKHIKYSFTRDWINHVRSATGKNMFAVAEFWKNDLGAIENYLQKTNWNHSVFDVPLHYNLYNASKSQGNYDMRNIFNGTVVQRHPSHAVTFVDNHDSQPEEALESFVDTWFKPLAYALTLTREQGYPSVFYGDYYGIPTHGVPAMRSKIDPILEARQKYAYGPQHDYLDHPDVIGWTREGDSSHPKSGLATLITDGPGGSKRMYAGLKNAGETWYDITGNRSDTVKIGSDGWGEFHVNGSSVSIYVQK

SEQ ID NO: 30284 - protein, 483 aa, Bacillus sp.
HHNGTNGTMMQYFEWYLPNDGNHWNRLNSDASNLKSKGIKAVWIPPAWKGTSQNDVGYGAYDLYDLGEFNQRGTVRTKYGTRSQLQAAVTSLKNNGIQVYGDVVMNHKGGADATEMVRAVEVNPNNRNQEVTGEYTIEAWTRFDFPGRGNTHSSFKWRWYHFDGVDFDQSRNLNNRIYKFRGKAWDWEVDTEFGNYDYLMYVDYDMDHPEVVNELRNWGVWYTNTLGLDGFRIDAVKHIKYSFTRDWINHVRSATGKNMFAVAEFWKNDLGAIENYLQKTNWNHSVFDVPLHYNLYNASKSQGNYDMRNIFNGTVVQRHPSHAVTFVDNHDSQPEEALESFVDTWFKPLAYALTLTREQGYPSVFYGDYYGIPTHGVPAMRSKIDPILEARQKYAYGPQHDYLDHPDVIGWTREGDSSHPKSGLATLITDGPGGSKRMYAGLKNAGETWYDITGNRSDTVKIGSDGWGEFHVNSGSVSIYVQK

SEQ ID NO: 30285 - protein, 485 aa, Bacillus sp.
HHNGTNGTMMQYFEWYLPNDGNHWNRLNSDASNLKSKGITAVWIPPAWKATSQNDVGYGAYDLYDLGEFNQRGTVRTKYGTRSQLQAAVTSLKNNGIQVYGDVVMNHKGGADATEMVRAVEVNPNNRNQEVTGEYTIEAWTRFDFPGRGNTHSSFKWRWYHFDGVDFDMSRELSNRIYKFRGHGKAWDWEVDTEFGNYDYLMYADYDMDHPEVVNELRNWGVWYTNTLGLDGFRIDAVKHIKYSFTRDWINHVRSATGKNMFAVAEFWKNDLGAIENYLQKTNWNHSVFDVPLHYNLYNASKSQGNYDMRNIFNGTVVQRHPSHAVTFVDNHDSQPEEALESFVDTWFKPLAYALTLTREQGYPSVFYGDYYGIPTHGVPAMRSKIDPILEARQKYAYGPQHDYLDHPDVIGWTREGDSSHPKSGLATLITDGPGGSKRMYAGLKNAGETWYDITGNRSDTVKIGSDGWGEFHVNDGSVSIYVQK

SEQ ID NO: 30286 - protein, 485 aa, Bacillus sp.
HHNGTNGTMMQYFEWYLPNDGNHWNRLNSDASNLKSKGITAVWIPPAWKAVSQNDVGYGAYDLYDLGEFNQKGTVRTKYGTRSQLQAAVTSLKNNGIQVYGDVVMNHKGGADATEMVRAVEVNPNNRNQEVTGEYTIEAWTRFDFPGRGNTHSSFKWRWYHFDGVDWDQSRDLENRIYKFRGHGKAWDWEVDTEFGNYDYLMYADYDYDHPESTNEMRNWGVWYTNTLGLDGFRIDAVKHIKYSFTRDWINHVRSATGKNMFAVAEFWKNDLGAIENYLQKTNWNHSVFDVPLHYNLYNASKSGGNYDMRNIFNGTVVQRHPSHAVTFVDNHDSQPEEALESFVEEWFKPLAYALTLTREQGYPSVFYGDYYGIPTHGVPAMRSKIDPILEARQKYAYGPQHDYLDHPDVIGWTREGDSSHPKSGLATLITDGPGGSKRMYAGLKNAGETWYDITGNRSDTVKIGSDGWGEFHVNDGSVSIYVQK

SEQ ID NO: 30287 - protein, 485 aa, Bacillus sp.
HHNGTNGTMMQYFEWYLPNDGNHWNRLNSDASNLKSKGIKAVWIPPAWKGASQNDVGYGAYDLYDLGEFNQRGTVRTKYGTRSQLQAAVTSLKNNGIQVYGDVVMNHKGGADATEMVRAVEVNPNNRNQEVTGEYTIEAWTRFDFPGRGNTHSSFKWRWYHFDGVDFDQSRRLNNRIYKFRGHGKAWDWEVDTEFGNYDYLMYADYDMDHPEVVNELRNWGVWYTNTLGLDGFRIDAVKHIKYSFTRDWINHVRSATGKNMFAVAEFWKNDLGAIENYLQKTNWNHSVFDVPLHYNLYNASKSGGNYDMRNIFNGTVVQRHPSHAVTFVDNHDSQPEEALESFVETWFKPLAYALTLTREQGYPSVFYGDYYGIPTHGVPAMRSKIDPILEARQKYAYGPQHDYLDHPDVIGWTREGDSSHPKSGLATLITDGPGGSKRMYAGLKNAGETWYDITGNRSDTVKIGSDGWGEFHVNDASVSIYVQK

SEQ ID NO: 30288 - protein, 485 aa, Bacillus sp.
HHNGTNGTMMQYFEWYLPNDGNHWNRLNSDASNLKSKGIKAVWIPPAWKAASQNDVGYGAYDLYDLGEFNQRGTVRTKYGTRSQLQAAVTSLKNNGIQVYGDVVMNHKGGADATEMVRAVEVNPNNRNQEVTGEYTIEAWTRFDFPGRGNTHSSFKWRWYHFDGVDFDQSRRTNNRIYKFRGHGKAWDWEVDTEFGNYDYLMYVDYDMDHPEVVNELRNWGVWYTNTLGLDGFRIDAVKHIKYSFTRDWINHVRSATGKNMFAVAEFWKNDLGAIENYLQKTNWNHSVFDVPLHYNLYNASKSGGNYDMRNIFNGTVVQRHPSHAVTFVDNHDSQPEEALESFVEEWFKPLAYALTLTREQGYPSVFYGDYYGIPTHGVPAMRSKIDPILEARQKYAYGPQHDYLDHPDVIGWTREGDSSHPKSGLATLITDGPGGSKRMYAGLKNAGETWYDITGNRSDTVKIGSDGWGEFHVNDGSVSIYVQK

SEQ ID NO: 30289 - protein, 483 aa, Bacillus sp.
HHNGTNGTMMQYFEWYLPNDGNHWNRLNSDASNLKSKGITAVWIPPAWKATSQNDVGYGAYDLYDLGEFNQKGTVRTKYGTRSQLQAAVTSLKNNGIQVYGDVVMNHKGGADATEMVRAVEVNPNNRNQEVTGEYTIEAWTRFDFPGRGNTHSSFKWRWYHFDGVDFDQSRNVNNRIYKFRGKAWDWEVDTEFGNYDYLMYADIDYDHPESTNEMRNWGVWYTNTLGLDGFRIDAVKHIKYSFTRDWINHVRSATGKNMFAVAEFWKNDLGAIENYLQKTNWNHSVFDVPLHYNLYNASKSGGNYDMRNIFNGTVVQRHPSHAVTFVDNHDSQPEEALESFVEEWFKPLAYALTLTREQGYPSVFYGDYYGIPTHGVPAMRSKIDPILEARQKYAYGPQHDYLDHPDVIGWTREGDSSHPKSGLATLITDGPGGSKRMYAGLKNAGETWYDITGNRSDTVKIGSDGWGEFHVNDGSVSIYVQK

SEQ ID NO: 30290 - protein, 483 aa, Bacillus sp.
HHNGTNGTMMQYFEWYLPNDGNHWNRLNSDASNLKSKGIKAVWIPPAWKGASQNDVGYGAYDLYDLGEFNQKGTVRTKYGTRSQLQAAVTSLKNNGIQVYGDVVMNHKGGADATEMVRAVEVNPNNRNQEVTGEYTIEAWTRFDFPGRGNTHSSFKWRWYHFDGVDFDQSRELDNRIYKFRGKAWDWEVDTEFGNYDYLMYTDYDMDHPEVVNELRNWGVWYTNTLGLDGFRIDAVKHIKYSFTRDWINHVRSATGKNMFAVAEFWKNDLGAIENYLQKTNWNHSVFDVPLHYNLYNASKSQGNYDMRNIFNGTVVQRHPSHAVTFVDNHDSQPEEALESFVDTWFKPLAYALTLTREQGYPSVFYGDYYGIPTHGVPAMRSKIDPILEARQKYAYGPQHDYLDHPDVIGWTREGDSSHPKSGLATLITDGPGGSKRMYAGLKNAGETWYDITGNRSDTVKIGSDGWGEFHVNGSSVSIYVQK

SEQ ID NO: 30291 - protein, 483 aa, Bacillus sp.
HHNGTNGTMMQYFEWYLPNDGNHWNRLNSDASNLKSKGIKAVWIPPAWKGASQNDVGYGAYDLYDLGEFNQRGTVRTKYGTRSQLQAAVTSLKNNGIQVYGDVVMNHKGGADATEMVRAVEVNPNNRNQEVTGEYTIEAWTRFDFPGRGNTHSSFKWRWYHFDGVDFDQSRRLNNRIYKFRGKAWDWEVDTEFGNYDYLMYADYDMDHPEVVNELRNWGVWYTNTLGLDGFRIDAVKHIKYSFTRDWINHVRSATGKNMFAVAEFWKNDLGAIENYLQKTNWNHSVFDVPLHYNLYNASKSGGNYDMRNIFNGTVVQRHPSHAVTFVDNHDSQPEEALESFVETWFKPLAYALTLTREQGYPSVFYGDYYGIPTHGVPAMRSKIDPILEARQKYAYGPQHDYLDHPDVIGWTREGDSSHPKSGLATLITDGPGGSKRMYAGLKNAGETWYDITGNRSDTVKIGSDGWGEFHVNDASVSIYVQK

SEQ ID NO: 30292 - protein, 485 aa, Bacillus sp.
HHNGTNKTMMQYFEWYLPNDGNHWNRLNSDASNLKSKGIKAVWIPPAWKGASQNDVGYGAYDLYDLGEFNQRGTVRTKYGTRSQLQAAVTSLKNNGIQVYGDVVMNHKGGADATEMVRAVEVNPNNRNQEVTGEYTIEAWTRFDFPGRGNTHSSFKWRWYHFDGVDFDQSRRLNNRIYKFRGHGKAWDWEVDTEFGNYDYLMYADYDMDHPEVVNELRNWGVWYTNTLGLDGFRIDAVKHIKYSFTRDWINHVRSATGKNMFAVAEFWKNDLGAIENYLQKTNWNHSVFDVPLHYNLYNASKSGGNYDMRNIFNGTVVQAHPNHAVTFVDNHDSQPEEALESFVEEWFKPLAYALTLTREQGYSSVFYGDYYGIPTHGVPAMRSKIDPILEARQKYAYGPQHDYLDHPDVIGWTREGDSSHPKSGLATLITDGPGGSKRMYAGLKNAGETWYDITGNRSDTVKIGSDGWGEFHVNDGSVSIYVQK

SEQ ID NO: 30293 - protein, 485 aa, Bacillus sp.
HHNGTNGTMMQYFEWYLPNDGNHWNRLNSDASNLKSKGITAVWIPPAWKATSQNDVGYGAYDLYDLGEFNQKGTVRTKYGTRSQLQAAVTSLKNNGIQVYGDVVMNHKGGADATEMVRAVEVNPNNRNQEVTGEYTIEAWTRFDFPGRGNTHSSFKWRWYHFDGVDFDQSRNVNNRIYKFRGHGKAWDWEVDTEFGNYDYLMYADIDYDHPETTNEMRNWGVWYTNTLGLDGFRIDAVKHIKYSFTRDWINHVRSATGKNMFAVAEFWKNDLGAIENYLQKTNWNHSVFDVPLHYNLYNASKSGGNYDMRNIFNGTVVQRHPSHAVTFVDNHDSQPEEALESFVEEWFKPLAYALTLTREQGYPSVFYGDYYGIPTHGVPAMRSKIDPILEARQKYAYGPQHDYLDHPDVIGWTREGDSSHPKSGLATLITDGPGGSKRMYAGLKNAGETWYDITGNRSDTVKIGSDGWGEFHVNDGSVSIYVQK

SEQ ID NO: 30294 - protein, 485 aa, Bacillus sp.
HHNGTNGTMMQYFEWYLPNDGNHWNRLNSDASNLKSKGIKAVWIPPAWKAASQNDVGYGAYDLYDLGEFNQRGTVRTKYGTRSQLQAAVTSLKNNGIQVYGDVVMNHKGGADATEMVRAVEVNPNNRNQEVTGEYTIEAWTRFDFPGRGNTHSSFKWRWYHFDGVDFDQSRDLTNRIYKFRGHGKAWDWEVDTEFGNYDYLMYADYDMDHPEVVNELRNWGVWYTNTLGLDGFRIDAVKHIKYSFTRDWINHVRSATGKNMFAVAEFWKNDLGAIENYLQKTNWNHSVFDVPLHYNLYNASKSGGNYDMRNIFNGTVVQRHPSHAVTFVDNHDSQPEEALESFVDEWFKPLAYALTLTREQGYPSVFYGDYYGIPTHGVPAMRSKIDPILEARQKYAYGPQHDYLDHPDVIGWTREGDSSHPKSGLATLITDGPGGSKRMYAGLKNAGETWYDITGNRSDTVKIGSDGWGEFHVNDQSVSIYVQK

SEQ ID NO: 30295 - protein, 483 aa, Bacillus sp.
HHNGTNGTMMQYFEWYLPNDGNHWNRLNSDASNLKSKGIKAVWIPPAWKGASQNDVGYGAYDLYDLGEFNQRGTVRTKYGTRSQLQAAVTSLKNNGIQVYGDVVMNHKGGADATEMVPAVEVNPNNRNQEVTGEYTIEAWTRFDFPGRGNTHSSFKWRWYHFDGVDFDQSRRLNNRIYKFRSKAWDWEVDTEFGNYDYLMYADYDMDHPEVVNELRNWGVWYTNTLGLDGFRIDAVKHIKYSFTRDWINHVRSATGKNMFAVAEFWKNDLGAIENYLQKTNWNHSVFDVPLHYNLYNASKSGGNYDMRNIFNGTVVQANPNHAVTFVDNHDSQPEEALESFVEEWFKPLAYALTLTREQGYPSVFYGDYYGIPTHGVPAMRSKIDPILEARQKYAYGPQHDYLDHPDVIGWTREGDSSHPKSGLATLITDGPGGSKRMYAGLKNAGETWYDITGNRSDTVKIGSDGWGEFHVNDGSVSIYVQK

SEQ ID NO: 30296 - protein, 483 aa, Bacillus sp.
HHNGTNKTMMQYFEWYLPNDGNHWNRLNSDASNLKSKGIKAVWIPPAWKGASQNDVGYGAYDLYDLGEFNQRGTVRTKYGTRSQLQAAVTSLKNNGIQVYGDVVMNHKGGADATEMVRAVEVNPNNRNQEVTGEYTIEAWTRFDFPGRGNTHSSFKWRWYHFDGVDFDQSRRLNNRIYKFRGKAWDWEVDTEFGNYDYLMYADYDMDHPEVVNELRNWGVWYTNTLGLDGFRIDAVKHIKYSFTRDWINHVRSATGKNMFAVAEFWKNDLGAIENYLQKTNWNHSVFDVPLHYNLYNASKSGGNYDMRNIFNGTVVQMQPSHAVTFVDNHDSQPEEALESFVEEWFKPLAYALTLTREQGYPSVFYGDYYGIPTHGVPAMRSKIDPILEARQKYAYGPQHDYLDHPDVIGWTREGDSSHPKSGLATLITDGPGGSKRMYAGLKNAGETWYDITGNRSDTVKIGSDGWGEFHVNDGSVSIYVQK

SEQ ID NO: 30297 - protein, 485 aa, Bacillus sp.
HHNGTNGTMMQYFEWYLPNDGNHWNRLNSDASNLKSKGITAVWIPPAWKAASQNDVGYGAYDLYDLGEFNQKGTVRTKYGTRSQLQAAVTSLKNNGIQVYGDVVMNHKGGADATEMVRAVEVNPNNRNQEVTGEYTIEAWTRFDFPGRGNTHSSFKWRWYHFDGVDWDQSRNLNNRIYKFRGHGKAWDWEVDTEFGNYDYLMYTDYDMDHPEVVNELRNWGVWYTNTLGLDGFRIDAVKHIKYSFTRDWINHVRSATGKNMFAVAEFWKNDLGAIENYLQKTNWNHSVFDVPLHYNLYNASKSGGNYDMRNIFNGTVVQRHPSHAVTFVDNHDSQPEEALESFVETWFKPLAYALTLTREQGYPSVFYGDYYGIPTHGVPAMRSKIDPILEARQKYAYGPQHDYLDHPDVIGWTREGDSSHPKSGLATLITAGPGGSKRMYAGLKNAGETWYDITGNRSDTVKIGSDGWGEFHVNKASVSIYVQK

SEQ ID NO: 30298 - protein, 477 aa, unidentified
LNGTLMQYFEWYMPNDGQHWKRLQNDSAYLAEHGITAVWIPPAYKGTSQADVGYGAYDLYDLGEFHQKGTVRTKYGTKGELQSAIKSLHSRDINVYGDVVINHKGGADATEDVTAVEVDPADRNRVISGEHRIKAWTHFHFPGRGSTYSDFKWHWYHFDGTDWDESRKLNRIYKFQGKAWDWEVSNENGNYDYLMYADIDYDHPDVAAEIKRWGTWYANELQLDGFRLDAVKHIKFSFLRDWVNHVREKTGKEMFTVAEYWQNDLGALENYLNKTNFNHSVFDVPLHYQFHAASTQGGGYDMRKLLNSTVVSKHPLKAVTFVDNHDTQPGQSLESTVQTWFKPLAYAFILTRESGYPQVFYGDMYGTKGDSQREIPALKHKIEPILKARKQYAYGAQHDYFDHHDIVGWTREGDSSVANSGLAALITDGPGGAKRMYVGRQNAGETWHDITGNRSEPVVINSEGWGEFHVNGGSVSI

SEQ ID NO: 30299 - protein, 534 aa, Geobacillus thermodenitrificans
LAFLLTALLFCPTGQPAKAAAPFNGTMMQYFEWYLSCDPQSFSEPPQCEVKVANLGITALWLPPAYKGTSRSDVGYGVYDLYDLGEFNQKGAVRTKYGTKAQYLQAIQAAHAAGMQVYADVVFNHKGGADGTEWVLQISWWVDAVNQEISGTYQIQAWTKFDFPGRGNTYSSFKWRWYHFDGVDWDESRKLSRIYKFRGIGKAWDFHFAYFEKAYYDSTENGDIDDHPEVVTELKSWGKWYVNTTNIDGFRLDAVKHIDFSFFPDWLSDVRSQTGKPLFTVGEYWSYDINKLHNYIMKTNGTMSLFDAPLHFHDRTASKSGDAYDMRTLMTNTLMKDQPTLAVTFVDNHDTEPGQALQSWVDPWFKPLAYAFILTVIDRRRDGYGGDYYGIPQYNPSLKSKIDPLLIARRDYAYGTGHDYLDHSHDIIGWTREGVTEKPGSGLAALITDGPGGSKWMYVGKQHAGGNRTTVGGMETALTNGSSCDRQEGYPCVFYVSVWVPRKTTVSTIAWSITTRPWTDEFVRWTEPRLVAWP

SEQ ID NO: 30300 - protein, 484 aa, Synthetic construct
HHDGTNGTIMQYFEWNVPNDGQHWNRLHNNAQNLKNAGITAIWIPPAWKGTSQNDVGYGAYDLYDLGEFNQKGTVRTKYGTKAELERAIRSLKANGIQVYGDVVMNHKAGADATEWVDAVEVNPSNRNQEVSGTYKIQAWTKFDFPGRGNTYSSFKWRWYHFDGTDWDQSRQLNRIYKFRGTGKAWDWEVDTENGNYDYLMFADLDMDHPEVINELNRWGVWYANTLNLDGFRLDAVKHIKFSFMRDWLGHVRGQTGKNLFAVAEYWKNDLGALENYLSKTNWTMSAFDVPLHYNLYQASNSSGNYDMRNLLNGTLVQRHPSHAVTFVDNHDTQPGEALESFVQGWFKPLAYATILTREQGYPQVFYGDYYGIPSDGVPSYRQQIDPLLKARQQYAYGRQHDYFDHWDVIGWTREGNASHPNSGLATIMSDGPGGSKWMYVGRQKAGEVWHDMTGNRSGTVTINQDGWGHFFVNGGSVSVWVKR

SEQ ID NO: 30301 - protein, 478 aa, Bacillus licheniformis
LNGTLMQYFEWYMPNDGQHWKRLQNDSAYLAEHGITAVWIPPAYKGTSQADVGYGAYDLYDLGEFHQKGTVRTKYGTKGELQSAIKSLHSRDINVYGDVVINHKGGADATEDVTAVEVDPADRNRVISGEHLIKAWTHFHFPGRGSTYSDFKWHWYHFDGTDWDESRKLNRIYKFQGKAWDWEVSNENGNYDYLMYADIDYDHPDVAAEIKRWGTWYANELQLDGFRLDAVKHIKFSFLRDWVNHVREKTGKEMFTVAEYWQNDLGALENYLNKTNFNHSVFDVPLHYQFHAASTQGGGYDMRKLLNGTVVSKHPLKSVTFVDNHDTQPGQSLESTVQTWFKPLAYAFILTRESGYPQVFYGDMYGIPTHGVPALKHKIEPILKARKQYAYGAQHDYFDHHDIVGWTREGDSSVANSGLAALITDGPGGAKRMYVGRQNAGETWHDITGNRSEPVVINSEGWGEFHVNGGSVSIYVQR

SEQ ID NO: 30302 - protein, 481 aa, Bacillus amyloliquefaciens
VNGTLMQYFEWYTPNDGQHWKRLQNDAEHLSDIGITAVWIPPAYKAISQADVGYGAYDLYDLGEFHQKGTVRTKYGTKGELQSAIKSLHSRDINVYGDVVINHKAGADATEDVTAVEVDPADRNRVISGEHLIKAWTHFHFPGRGSTYSDFKWYWYHFDGTDWDESRKLNRIYLFQGKTWDWEVSNEFGNYDYLMYADYDYDYPDVVAEITRWGTWYANELQLDGFRLDAVKHIKFSFLRDWVNHVREKTGKEMFTVAEYWSNDLGALENYLNKTNFNHSVFDVPLHYQFHAASTQGGGYDMRKLLNGTVVSKHPLKSVTFVDNHDTQPGQSLESTVQTWFKPLAYAFILTRESGYPSVFYGDMYGTKGDSQREIPALKHKIEPILKARKQYAYGAQHDYFDHHDIVGWTREGDSSVANSGLAALITDGPGGAKWMYVGRQNAGETWHDITGNRSEPVVINSEGWGEFHVNGGSVSIYVQR

SEQ ID NO: 30303 - protein, 481 aa, Bacillus licheniformis
VNGTLMQYFEWYTPNDGQHWKRLQNDAEHLSDIGITAVWIPPAYKAISQADVGYGAYDLYDLGEFHQKGTVRTKYGTKGELQSAIKSLHSRDINVYGDVVINHKAGADATEDVTAVEVDPADRNRVISGEHLIKAWTHFHFPGRGSTYSDFKWYWYHFDGTDWDESRKLNRIYLFQGKTWDWEVSNEFGNYDYLMYADYDYDYPDVVAEITRWGTWYANELQLDGFRLDAVKHIKFSFLRDWVNHVREKTGKEMFTVAEYWSNDLGALENYLNKTNFNHSVFDVPLHYQFHAASTQGGGYDMRKLLNGTVVSKHPLKSVTFVDNHDTQPGQSLESTVQTWFKPLAYAFILTRESGYPQVFYGDMYGTKGDSQREIPALKHKIEPILKARKQYAYGAQHDYFDHHDIVGWTREGVSSVANSGLAALITDGPGGAKWMYVGRQNAGETWHDITGNRSEPVVINSEGWGEFHVNGGSVSIYVQR

SEQ ID NO: 30304 - protein, 481 aa, Bacillus amyloliquefaciens
VNGTLMQYFEWYTPNDGQHWKRLQNDAEHLSDIGITAVWIPPAYKAISQADVGYGAYDLYDLGEFHQKGTVRTKYGTKGELQSAIKSLHSRDINVYGDVVINHKAGADATEDVTAVEVDPADRNRVISGEHLIKAWTHFHFPGRGSTYSDFKWYWYHFDGTDWDESRKLNRIYLFQGKTWDWEVSNEFGNYDYLMYADYDYDYPDVVAEIKRWGTWYANELQLDGFRLDAVKHIKFSFLRDWVNHVREKTGKEMFTVAEYWSNDLGALENYLNKTNFNHSVFDVPLHYQFHAASTQGGGYDMRKLLNGTVVSKHPLKSVTFVDNHDTQPGQSLESTVQTWFKPLAYAFILTRESGYPSVFYGDMYGTKGDSQREIPALKHKIEPILKARKQYAYGAQHDYFDHHDIVGWTREGVSSVANSGLAALITDGPGGAKWMYVGRQNAGETWHDITGNRSEPVVINSEGWGEFHVNGGSVSIYVQR

SEQ ID NO: 30305 - protein, 481 aa, Bacillus amyloliquefaciens
VNGTLMQYFEWYTPNDGQHWKRLQNDAEHLSDIGITAVWIPPAYKAISQADVGYGAYDLYDLGEFHQKGTVRTKYGTKGELQSAIKSLHSRDINVYGDVVINHKAGADATEDVTAVEVDPADRNRVISGEYLIKAWTHFHFPGRGSTYSDFKWYWYHFDGTDWDESRKLNRIYLFQGKTWDWEVSNEFGNYDYLMYADYDYDYPDVVAEITRWGTWYANELQLDGFRLDAVKHIKFSFLRDWVNHVREKTGKEMFTVAEYWSNDLGALENYLNKTNFNHSVFDVPLHYQFHAASTQGGGYDMRKLLNGTVVSKHPLKSVTFVDNHDTQPGQSLESTVQTWFKPLAYAFILTRESGYPSVFYGDMYGTKGDSQREIPALKHKIEPILKARKQYAYGAQHDYFDHHDIVGWTREGVSSVANSGLAALITDGPGGAKWMYVGRQNAGETWHDITGNRSEPVVINSEGWGEFHVNGGSVSIYVQR

SEQ ID NO: 30306 - protein, 481 aa, Bacillus amyloliquefaciens
VNGTLMQYFEWYTPNDGQHWKRLQNDAEHLSDIGITAVWIPPAYKAISQADVGYGAYDLYDLGEFHQKGTVRTKYGTKGELQSAIKSLHSRDINVYGDVVINHKAGADATEDVTAVEVDPADRNRVISGEHLIKAWTHFHFPGRGSTYSDFKWYWYHFDGTDWDESRKLNRIYLFQGKTWDWPVSNEFGNYDYLMYADFDYDHPDVVAEIKRWGTWYANELQLDGFRLDAVKHIKFSFLRDWVNHVREKTGKEMFTVAEYWSNDLGALENYLNKTNFNHSVFDVPLHYQFHAASTQGGGYDMRKLLNGTVVSKWPLKSVTFVDNHDTQPGQSLESTVQTWFKPLAYAFILTRESGYPSVFYGDMYGTKGDSQREIPALKHKIEPILKARKQYAYGAQHDYFDHHDIVGWTREGDSSVANSGLAALITDGPGGAKWMYVGRQNAGETWHDITGNRSEPVVINSEGWGEFHVNGGSVSIYVQR

SEQ ID NO: 30307 - protein, 481 aa, Bacillus licheniformis
VNGTLMQYFEWYTPNDGQHWKRLQNDAEHLSDIGITAVWIPPAYKAISQADVGYGAYDLYDLGEFWQKGTVRTKYGTKGELQSAIKSLHSRDINVYGDVVINHKAGADATEDVTAVEVDPADRNRVISGEHLIKAWTHFHFPGRGSTYSDFKWYWYHFDGTDWDESRKLNRIYLFQGKTWDWPVSNEFGNYDYLMYADYDYDYPVVDAEIKRWGTWYANELQLDGFRLDAVKHIKFSFLRDWVNHVREKTGKEMFTVAEYWSNDLGALENYLNKTNFNHSVFDVPLHYQFHAASTQGGGYDMRKLLNGTVVSKHPLKSVTFVDNHDTQPGQSLESTVQTWFKPLAYAFILTRESGYPQVFYGDMYGTKGDSQREIPALKHKIEPILKARKQYAYGAQHDYFDHHDIVGWTREGDSSVANSGLAALITDGPGGAKRMYVGRQNAGETWHDITGNRSEPVVINSEGWGEFHVNGGSVSIYVQR

SEQ ID NO: 30308 - protein, 481 aa, Bacillus licheniformis
VNGTLMQYFEWYTPNDGQHWKRLQNDAEHLSDIGITAVWIPPAYKAISQADVGYGAYDLYDLGEFHQKGTVRTKYGTKGELQSAIKSLHSRDINVYGDVVINHKAGADATEDVTAVEVDPADRNRVISGEHLIKAWTHFHFPGRGSTYSDFKWWWWHFDGTDWDESRKLNRIYLFQGKTWDWPVSNEFGNYDYLMYADFDYDHPDVVAEIKRWGTWYANELQLDGFRLDAVKHIKFSFLRDWVNHVREKTGKEMFTVAEYWSNDLGALENYLNKTNFNHSVFDVPLHYQFHAASTQGGGYDMRKLLNGTVVSKWPLKSVTFVDNHDTQPGQSLESTVQTWFKPLAYAFILTRESGYPQVFYGDMYGTKGDSQREIPALKHKIEPILKARKQYAYGAQHDYFDHHDIVGWTREGDSSVANSGLAALITDGPGGAKWMYVGRQNAGETWHDITGNRSEPVVINSEGWGEFHVNGGSVSIYVQR

SEQ ID NO: 30309 - protein, 483 aa, Bacillus sp.
HHDGTNGTIMQYFEWNVPNDGQHWNRLHNNAQNLKNAGITAIWIPPAWKGTSQNDVGYGAYDLYDLGEFNQKGTVRTKYGTELERAIRSLKANGIQVYGDVVMNHKGGADFTERVQAVEVNPQNRNQEVSGTYQIEAWTGFNFPGRGNQHSSFKWRWYHFDGTDWDQSRQLANRIYKFRGDGKAWDWEVDTENGNYDYLMYADVDMDHPEVINELNRWGVWYANTLNLDGFRLDAVKHIKFSFMRDWLGHVRGQTGKNLFAVAEYWKNDLGALENYLSKTNWTMSAFDVPLHYNLYQASNSSGNYDMRNLLNGTLVQRHPSHAVTFVDNHDTQPGEALESFVQGWFKPLAYATILTREQGYPQVFYGDYYGIPSDGVPSYRQQIDPLLKARQQYAYGRQHDYFDHWDVIGWTREGNASHPNSGLATIMSDGPGGSKWMYVGRQKAGEVWHDMTGNRSGTVTINQDGWGHFFVNGGSVSVWVKR

SEQ ID NO: 30310 - protein, 483 aa, Bacillus sp.
HHDGTNGTIMQYFEWNVPNDGQHWNRLHNNAQNLKNAGITAIWIPPAWKGTSQNDVGYGAYDLYDLGEFNQKGTVRTKYGTKLERAIRSLKANGIQVYGDVVMNHKGGADFTERVQAVEVNPQNRNQEVSGTYQIEAWTGFNFPGRGNQHSSFKWRWYHFDGTDWDQSRQLANRIYKFRGDGKAWDWEVDTENGNYDYLMYADVDMDHPEVINELNRWGVWYANTLNLDGFRLDAVKHIKFSFMRDWLGHVRGQTGKNLFAVAEYWKNDLGALENYLSKTNWTMSAFDVPLHYNLYQASNSSGNYDMRNLLNGTLVQRHPSHAVTFVDNHDTQPGEALESFVQGWFKPLAYATILTREQGYPQVFYGDYYGIPSDGVPSYRQQIDPLLKARQQYAYGRQHDYFDHWDVIGWTREGNASHPNSGLATIMSDGPGGSKWMYVGRQKAGEVWHDMTGNRSGTVTINQDGWGHFFVNGGSVSVWVKR

SEQ ID NO: 30311 - protein, 481 aa, Bacillus licheniformis
LNGTLMQYFEWYQPNDGQHWKRLQNDSAYLAEHGITAVWIPPAYKGTSQADVGYGAYDLYDLGEFHQKGTVRTKYGTKGELQSAIKSLHSRDINVYGDVVINHKGGADATEDVTAVEVDPADRNRVISGEHLIKAWTHFHFPGRGSTYSDFKWHWYHFDGTDWDESRKLNRIYKFQGKAWDWEVSNENGNYDYLMYADIDYDHPDVAAEIKRWGTWYANELQLDGFRLDAVKHIKFSFLRDWVNHVREKTGKEMFTVAEYWQNDLGALENYLNKTNFNHSVFDVPLHYQFHAASTQGGGYDMRKLLNGTVVSKHPLKSVTFVDNHDTQPGQSLESTVQTWFKPLAYAFILTRESGYPQVFYGDMYGTKGDSQREIPALKHKIEPILKARKQYAYGAQHDYFDHHDIVGWTREGDSSVANSGLAALITDGPGGAKRMYVGRQNAGETWHDITGNRSEPVVINSEGWGEFHVNGGSVSIYVQR

SEQ ID NO: 30312 - protein, 481 aa, Bacillus sp.
LNGTLMQYFEWYMPNDGQHWKRLQNDSAYLAEHGITAVWIPPAYKGTSQADVGYGAYDLYDLGEFHQKGTVRTKYGTKGELQSAIKSLHSRDINVYGDVVINHKGGADTTEDVTAVEVDPADRNRVISGEYLIKAWTHFHFPGRGSTYSDFKWHWYHFDGTDWDESRKLNRIYKFQGKAWDWEVSNENGNYDYLMYADIDYDHPDVAAEIKRWGTWYANELQLDGFRLDAVKHIKFSFLRDWVNHVREKTGKEMFTVAEYWQNDLGALENYLNKTNFNHSVFDVPLHYQFHAASTQGGGYDMRKLLNGTVVSKHPLKSVTFVDNHDTQPGQSLESTVQTWFKPLAYAFILTRESGYPQVFYGDMYGTKGDSQREIPALKHKIEPILKARKQYAYGAQHDYFDHHDIVGWTREGDSSVANSGLAALITDGPGGAKRMYVGRQNAGETWHDITGNRSEPVVINSEGWGEFHVNGGSVSIYVQR

SEQ ID NO: 30313 - protein, 481 aa, Bacillus licheniformis
LNGTLMQYFEWYPPNDGQHWKRLQNDSAYLAEHGITAVWIPPAYKGTSQADVGYGAYDLYDLGEFHQKGTVRTKYGTKGELQSAIKSLHSRDINVYGDVVINHKGGADATEDVTAVEVDPADRNRVISGEHLIKAWTHFHFPGRGSTYSDFKWHWYHFDGTDWDESRKLNRIYKFQGKAWDWEVSNENGNYDYLMYADIDYDHPDVAAEIKRWGTWYANELQLDGFRLDAVKHIKFSFLRDWVNHVREKTGKEMFTVAEYWQNDLGALENYLNKTNFNHSVFDVPLHYQFHAASTQGGGYDMRKLLNGTVVSKHPLKSVTFVDNHDTQPGQSLESTVQTWFKPLAYAFILTRESGYPQVFYGDMYGTKGDSQREIPALKHKIEPILKARKQYAYGAQHDYFDHHDIVGWTREGDSSVANSGLAALITDGPGGAKRMYVGRQNAGETWHDITGNRSEPVVINSEGWGEFHVNGGSVSIYVQR

SEQ ID NO: 30314 - protein, 481 aa, Bacillus licheniformis
LNGTLMQYFEWYMPNDGQHWKRLQNDSAYLAEHGITAVWIPPAYKGTSQADVGYGAYDLYDLGEFHQKGTVRTKYGTKGELQSAIKSLHSRDINVYGDVVINHKGGADATEDVTAVEVDPADRNRVISGEHLIKAWTHFHFPGRGSTYSDFKWHWYHFDGTDWDESRKLNRIYKFQGKAWDWEVSNENGNYDYLMYADIDYDHPDVAAEIKRWGTWYANELQLDGFRLDAVKHIKFSFLRDWVNHVREKTGKEMFTVAEYWQNDLGALENYLNKTNFNHSVFDVPLHYQFHAASTQGGGYDMRKLLNGTVVSKHPLKSVTFVDNHDTQPGQSLESTVQTWFKPLAYAFILTRESGYPQVFYGDMYGTKGDSQREIPALKHKIEPILKARKQYAYGAQHDYFDHHDIVGWTREGDSSVANSGLAALITDGPGGAKRMYVGRQNAGETWHDITGNRSGPVVINSEGWGEFHVNGGSVSIYVQR

SEQ ID NO: 30315 - protein, 481 aa, Bacillus licheniformis
LNGTLMQYFEWYMPNDGQHWKRLQNDSAYLAEHGITAVWIPPAYKGTSQADVGYGAYDLYDLGEFHQKGTVRTKYGTKGELQSAINSLHSRDINVYGDVVINHKGGADATEDVTAVEVDPADRNRVISGEHLIKAWTHFHFPGRGSTYSDFKWHWYHFDGTDWDESRKLNRIYKFQGKAWDWEVSNENGNYDYLMYADIDYDHPDVAAEIKRWGTWYANELQLDGFRLDAVKHIKFSFLRDWVNHVREKTGKEMFTVAEYWQNDLGALENYLNKTNFNHSVFDVPLHYQFHAASTQGGGYDMRKLLNGTVVSKHPLKSVTFVDNHDTQPGQSLESTVQTWFKPLAYAFILTRESGYPQVFYGDMYGTKGDSQREIPALKHKIEPILKARKQYAYGAQHDYFDHHDIVGWTREGDSSVANSGLAALITDGPGGAKRMYVGRQNAGETWHDITGNRSEPVVINSEGWGEFHVNGGSVSIYVQR

SEQ ID NO: 30316 - protein, 481 aa, Bacillus licheniformis
LNGTLMQYFEWYMPNDGQHWKRLQNDSAYLAEHGITAVWIPPAYKGTSQNDVGYGAYDLYDLGEFHQKGTVRTKYGTKGELQSAIKSLHSRDINVYGDVVINHKGGADATEDVTAVEVDPADRNRVISGEHLIKAWTHFHFPGRGSTYSDFKWHWYHFDGTDWDESRKLNRIYKFQGKAWDWEVSNENGNYDYLMYADIDYDHPDVAAEIKRWGTWYANELQLDGFRLDAVKHIKFSFLRDWVNHVREKTGKEMFTVAEYWQNDLGALENYLNKTNFNHSVFDVPLHYQFHAASTQGGGYDMRKLLNGTVVSKHPLKSVTFVDNHDTQPGQSLESTVQTWFKPLAYAFILTRESGYPQVFYGDMYGTKGDSQREIPALKHKIEPILKARKQYAYGAQHDYFDHHDIVGWTREGDSSVANSGLAALITDGPGGAKRMYVGRQNAGETWHDITGNRSEPVVINSEGWGEFHVNGGSVSIYVQR

SEQ ID NO: 30317 - protein, 481 aa, Bacillus licheniformis
LNGTLMQYFEWYMPNDGQHWKRLQNDSAYLAEHGITAVWIPPAYKGTSQADVGYGAYDLYDLGEFHQKGTVRTKYGTKGELQSAIKSLHSRDINVYGDVVINHKGGADATEDVTAVEVDPADRNRVISGEHLIKAWTHFHFPGRGSTYSDFKWHWYHFDGTDWDESRKLNRIYKFQGKAWDWEVSNENGNYDYLMYADIDYDHPDVAAEIKNWGTWYANELQLDGFRLDAVKHIKFSFLRDWVNHVREKTGKEMFTVAEYWQNDLGALENYLNKTNFNHSVFDVPLHYQFHAASTQGGGYDMRKLLNGTVVSKHPLKSVTFVDNHDTQPGQSLESTVQTWFKPLAYAFILTRESGYPQVFYGDMYGTKGDSQREIPALKHKIEPILKARKQYAYGAQHDYFDHHDIVGWTREGDSSVANSGLAALITDGPGGAKRMYVGRQNAGETWHDITGNRSEPVVINSEGWGEFHVNGGSVSIYVQR

SEQ ID NO: 30318 - protein, 481 aa, Synthetic construct
LNGTLMQYFEWYMPNDGQHWKRLQNDSAYLAEHGITAVWIPPAYKGTSQADVGYGAYDLYDLGEFHQKGTVRTKYGTKGELQSAIKSLHSRDINVYGDVVINHKGGADATEDVTAVEVDPADRNRVISGEYLIKAWTHFHFPGRGSIYSDFKWHWYHFDGTDWDESRKLNRIYKFQGKAWDWEVSDENGNYDYLMYADIDYDHPDVAAEIKRWGTWYANELQLDGFRLDAVKHIKFSFLRDWVNHVREKTGKEMFTVAEYWQNDLGALENYLNKTNFNHSVFDVPLHYQFHAASTQGGGYDMRKLLNGTVVSKHPLKSVTFVDNHDTQPGQSLESTVQTWFKPLAYAFILTRESGYPQVFYGDMYGTKGDSQREIPALKHKIEPILKARKQYAYGAQHDYFDHHDIVGWTREGDSSVANSGLAALITDGPGGAKRMYVGRQNAGETWHDITGNRSEPVVINSEGWGEFHVNGGSVSIYVQR

SEQ ID NO: 30319 - protein, 481 aa, Bacillus licheniformis
LNGTLMQYFEWYGPNDGQHWKRLQNDSAYLAEHGITAVWIPPAYKGTSQADVGYGAYDLYDLGEFHQKGTVRTKYGTKGELQSAIKSLHSRDINVYGDVVINHKGGADATEDVTAVEVDPADRNRVISGEHLIKAWTHFHFPGRGSTYSDFKWHWYHFDGTDWDESRKLNRIYKFQGKAWDWEVSNENGNYDYLMYADIDYDHPDVAAEIKRWGTWYANELQLDGFRLDAVKHIKFSFLRDWVNHVREKTGKEMFTVAEYWQNDLGALENYLNKTNFNHSVFDVPLHYQFHAASTQGGGYDMRKLLNGTVVSKHPLKSVTFVDNHDTQPGQSLESTVQTWFKPLAYAFILTRESGYPQVFYGDMYGTKGDSQREIPALKHKIEPILKARKQYAYGAQHDYFDHHDIVGWTREGDSSVANSGLAALITDGPGGAKRMYVGRQNAGETWHDITGNRSEPVVINSEGWGEFHVNGGSVSIYVQR

SEQ ID NO: 30320 - protein, 481 aa, Bacillus licheniformis
LNGTLMQYFEWYYPNDGQHWKRLQNDSAYLAEHGITAVWIPPAYKGTSQADVGYGAYDLYDLGEFHQKGTVRTKYGTKGELQSAIKSLHSRDINVYGDVVINHKGGADATEDVTAVEVDPADRNRVISGEHLIKAWTHFHFPGRGSTYSDFKWHWYHFDGTDWDESRKLNRIYKFQGKAWDWEVSNENGNYDYLMYADIDYDHPDVAAEIKRWGTWYANELQLDGFRLDAVKHIKFSFLRDWVNHVREKTGKEMFTVAEYWQNDLGALENYLNKTNFNHSVFDVPLHYQFHAASTQGGGYDMRKLLNGTVVSKHPLKSVTFVDNHDTQPGQSLESTVQTWFKPLAYAFILTRESGYPQVFYGDMYGTKGDSQREIPALKHKIEPILKARKQYAYGAQHDYFDHHDIVGWTREGDSSVANSGLAALITDGPGGAKRMYVGRQNAGETWHDITGNRSEPVVINSEGWGEFHVNGGSVSIYVQR

SEQ ID NO: 30321 - protein, 481 aa, Bacillus licheniformis
LNGTLMQYFEWYMPNDGQHWKRLQNDSAYLAEHGITAVWIPPAYKGTSQADVGYGAYDLYDLGEFHQKGTVRTKYGTKGELQSAIKSLHSRGINVYGDVVINHKGGADATEDVTAVEVDPADRNRVISGEHLIKAWTHFHFPGRGSTYSDFKWHWYHFDGTDWDESRKLNRIYKFQGKAWDWEVSNENGNYDYLMYADIDYDHPDVAAEIKRWGTWYANELQLDGFRLDAVKHIKFSFLRDWVNHVREKTGKEMFTVAEYWQNDLGALENYLNKTNFNHSVFDVPLHYQFHAASTQGGGYDMRKLLNGTVVSKHPLKSVTFVDNHDTQPGQSLESTVQTWFKPLAYAFILTRESGYPQVFYGDMYGTKGDSQREIPALKHKIEPILKARKQYAYGAQHDYFDHHDIVGWTREGDSSVANSGLAALITDGPGGAKRMYVGRQNAGETWHDITGNRSEPVVINSEGWGEFHVNGGSVSIYVQR

SEQ ID NO: 30322 - protein, 481 aa, Bacillus licheniformis
LNGTLMQYFEWYDPNDGQHWKRLQNDSAYLAEHGITAVWIPPAYKGTSQADVGYGAYDLYDLGEFHQKGTVRTKYGTKGELQSAIKSLHSRDINVYGDVVINHKGGADATEDVTAVEVDPADRNRVISGEHLIKAWTHFHFPGRGSTYSDFKWHWYHFDGTDWDESRKLNRIYKFQGKAWDWEVSNENGNYDYLMYADIDYDHPDVAAEIKRWGTWYANELQLDGFRLDAVKHIKFSFLRDWVNHVREKTGKEMFTVAEYWQNDLGALENYLNKTNFNHSVFDVPLHYQFHAASTQGGGYDMRKLLNGTVVSKHPLKSVTFVDNHDTQPGQSLESTVQTWFKPLAYAFILTRESGYPQVFYGDMYGTKGDSQREIPALKHKIEPILKARKQYAYGAQHDYFDHHDIVGWTREGDSSVANSGLAALITDGPGGAKRMYVGRQNAGETWHDITGNRSEPVVINSEGWGEFHVNGGSVSIYVQR

SEQ ID NO: 30323 - protein, 481 aa, Bacillus licheniformis
LNGTLMQYFEWYTPNDGQHWKRLQNDSAYLAEHGITAVWIPPAYKGTSQADVGYGAYDLYDLGEFHQKGTVRTKYGTKGELQSAIKSLHSRDINVYGDVVINHKGGADATEDVTAVEVDPADRNRVISGEHLIKAWTHFHFPGRGSTYSDFKWHWYHFDGTDWDESRKLNRIYKFQGKAWDWEVSNENGNYDYLTYADIDYDHPDVAAEIKRWGTWYANELQLDGFRLDAVKHIKFSFLRDWVNHVREKTGKEMFTVAEYWQNDLGALENYLNKTNFNHSVFDVPLHYQFHAASTQGGGYDMRKLLNGTVVSKHPLKSVTFVDNHDTQPGQSLESTVQTWFKPLAYAFILTRESGYPQVFYGDMYGTKGDSQREIPALKHKIEPILKARKQYAYGAQHDYFDHHDIVGWTREGDSSVANSGLAALITDGPGGAKRMYVGRQNAGETWHDITGNRSEPVVINSEGWGEFHVNGGSVSIYVQR

SEQ ID NO: 30324 - protein, 481 aa, Bacillus licheniformis
LNGTLMQYFEWYMPNDGQHWKRLQNDSAYLAEHGITAVWIPPAYKGTSQADVGYGAYDLYDLGEFHQKGTVRTKYGTKGELQSAIKSLHSRDINVYGDVVINHKGGADATEDVTAVEVDPADRNRVISGEHLIKAWTHFHFPGRGSTYSDFKWHWYHFDGTDWDESRKLNRIYKFQGKAWDWEVSNENGNYDYLMYADIDYDHPDVAAEIKRWGTWYANELQLDGFRLDAVKHIKFSFLRDWVNHVREKTGKEMFTVAEYWQNDLGALENYLNKTNFNHSVFDVPLHYQFHAASTQGGGYDMRKLLNGTVVSKHPLKSVTFVDNHDTQPGQSLESTVQTWFKPLAYAFILTRESGYPQVFYGDMYGTKGDSQREIPALKHKIEPILKARKKYAYGAQHDYFDHHDIVGWTREGDSSVANSGLAALITDGPGGAKRMYVGRQNAGETWHDITGNRSEPVVINSEGWGEFHVNGGSVSIYVQR

SEQ ID NO: 30325 - protein, 481 aa, Bacillus licheniformis
LNGTLMQYFEWYMPNDGQHWKRLQNDSAYLAEHGITAVWIPPAYKGTSQADVGYGAYDLYDLGEFHQKGTVRTKYGTKGELQSAIKSLHSRDINVYGDVVINHKGGADATEDVTAVEVDPADRNRVISGEHLIKAWTYFHFPGRGSTYSDFKWHWYHFDGTDWDESRKLNRIYKFQGKAWDWEVSNENGNYDYLMYADIDYDHPDVAAEIKRWGTWYANELQLDGFRLDAVKHIKFSFLRDWVNHVREKTGKEMFTVAEYWQNDLGALENYLNKTNFNHSVFDVPLHYQFHAASTQGGGYDMRKLLNGTVVSKHPLKSVTFVDNHDTQPGQSLESTVQTWFKPLAYAFILTRESGYPQVFYGDMYGTKGDSQREIPALKHKIEPILKARKQYAYGAQHDYFDHHDIVGWTREGDSSVANSGLAALITDGPGGAKRMYVGRQNAGETWHDITGNRSEPVVINSEGWGEFHVNGGSVSIYVQR

SEQ ID NO: 30326 - protein, 481 aa, Synthetic construct
LNGTLMQYFEWYLPNDGQHWKRLQNDSAYLAEHGITAVWIPPAYKGTSQADVGYGAYDLYDLGEFHQKGTVRTKYGTKGELQSAIKSLHSRDINVYGDVVINHKGGADATEDVTAVEVDPADRNRVISGEHLIKAWTHFHFPGRGSTYSDFKWHWYHFDGTDWDESRKLNRIYKFQGKAWDWEVSNENGNYDYLMYADIDYDHPDVAAEIKRWGTWYANELQLDGFRLDAVKHIKFSFLRDWVNHVREKTGKEMFTVAEYWQNDLGALENYLNKTNFNHSVFDVPLHYQFHAASTQGGGYDMRKLLNGTVVSKHPLKSVTFVDNHDTQPGQSLESTVQTWFKPLAYAFILTRESGYPQVFYGDMYGTKGDSQREIPALKHKIEPILKARKQYAYGAQHDYFDHHDIVGWTREGDSSVANSGLAALITDGPGGAKRMYVGRQNAGETWHDITGNRSEPVVINSEGWGEFHVNGGSVSIYVQR

SEQ ID NO: 30327 - protein, 481 aa, Bacillus licheniformis
LNGTLMQYFEWYMPNDGQHWKRLQNDSAYLAEHGITAVWIPPAYKGTSQADVGYGAYDLYDLGEFHQKGTVRTKYGTKGELQSAIKSLHSRDINVYGDVVINHKGGADATEDVTAVEVDPADRNRVISGEHLIKAWTHFHFPGRGSTYSDFKWHWYHFDGTDWDESRKLNRIYKFQGKAWDWEVSNENGNYDYLMYADIDYDHPDVAAEIKRWGTWYANELQLDGFRLDAVKHIKFSFLRDWVNHVREKTGKEMFTVAEYWQNDLGALENYLNKTNFNHSVFDVPLHYQFHAASTQGGGYDMRKLLNGTVVSKHPLKSVTFVDNHDTQPGQSLESTVQTWFKPLAYAFILTRESGYPQVFYGDMYGTKGDSQREIPALKHKIEPILKARKQYAYGAQHDYFDHHDIVGWTREGDSSVANSGLAALITDGPGGAKRMYVGRQNAGETWHDITGNRSEPVVINSEGWGEFHVNGGSVSIYVQR

SEQ ID NO: 30328 - protein, 481 aa, Bacillus subtilis
LNGTLMQYFEWYMPNDGQHWKRLQNDSAYLAEHGITAVWIPPAYKGTSQADVGYGAYDLYDLGEFHQKGTVRTKYGTKGELQSAIKSLHSRDINVYGDVVINHKGGADATEDVTAVEVDPADRNRVISGEHRIKAWTHFHFPGRGSTYSDFKWHWYHFDGTDWDESRKLNRIYKFQGEAWDWEVSNENGNYDYLMYADIDYDHPDVAAEIKRWGTWYANELQLDGFRLDAVKHIKFSFLRDWVNHVREKTGKEMFTVAEYWQNDLGALENYLNKTNFNHSVFDVPLHYQFHAASTQGGGYDMRKLLNGTVVSKHPLKAVTFVDNHDTQPGQSLESTVQTWFKPLAYAFILTRESGYPQVFYGDMYGTKGDPQREIPALKHKIEPILKARKQYAYGAQHDYFDHHDIVGWTREGDSSVANSGLAALITDGPGGAKRMYVGRQNAGETWHDITGNRSEPVVINSEGWGEFHVNGGSVSIYVQR

SEQ ID NO: 30329 - protein, 481 aa, Bacillus licheniformis
LNGTLMQYFEWYFPNDGQHWKRLQNDSAYLAEHGITAVWIPPAYKGTSQADVGYGAYDLYDLGEFHQKGTVRTKYGTKGELQSAIKSLHSRDINVYGDVVINHKGGADATEDVTAVEVDPADRNRVISGEHLIKAWTHFHFPGRGSTYSDFKWHWYHFDGTDWDESRKLNRIYKFQGKAWDWEVSNENGNYDYLMYADIDYDHPDVAAEIKRWGTWYANELQLDGFRLDAVKHIKFSFLRDWVNHVREKTGKEMFTVAEYWQNDLGALENYLNKTNFNHSVFDVPLHYQFHAASTQGGGYDMRKLLNGTVVSKHPLKSVTFVDNHDTQPGQSLESTVQTWFKPLAYAFILTRESGYPQVFYGDMYGTKGDSQREIPALKHKIEPILKARKQYAYGAQHDYFDHHDIVGWTREGDSSVANSGLAALITDGPGGAKRMYVGRQNAGETWHDITGNRSEPVVINSEGWGEFHVNGGSVSIYVQR

SEQ ID NO: 30330 - protein, 481 aa, Bacillus licheniformis
LKGTLMQYFEWYMPNDGQHWKRLQNDSAYLAEHGITAVWIPPAYKGTSQADVGYGAYDLYDLGEFHQKGTVRTKYGTKGELQSAIKSLHSRDINVYGDVVINHKGGADATEDVTAVEVDPADRNRVISGEHRIKAWTHFHFPGRGSTYSDFKWHWYHFDGTDWDESRKLNRIYKFQGKAWDWEVSNENGNYDYLMYADIDYDHPDVAAEIKRWGTWYANELQLDGFRLDAVKHIKFSFLRDWVNHVREKTGKEMFTVAEYWQNDLGALENYLNKTNFNHSVFDVPLHYQFHAASTQGGGYDMRKLLNGTVVSKHPLKAVTFVDNHDTQPGQSLESTVQTWFKPLAYAFILTRESGYPQVFYGDMYGTKGDSQREIPALKHKIEPILKARKQYAYGAQHDYFDHHDIVGWTREGDSSVANSGLAALITDGPGGAKRMYVGRQNAGETWHDITGNRSEPVVINSEGWGEFHVNGGSVSIYVQR

SEQ ID NO: 30331 - protein, 481 aa, Bacillus licheniformis
LNGTLMQYFEWYMPNDGQHWKRLQNDSAYLAEHGITAVWIPPAYKGTSQADVGYGAYDLYDLGEFHQKGTVRTKYGTKGELQSAIKSLHSRDINVYGDVVINHKGGADATEDVTAVEVDPADRNRVISGEHRIKAWTHFHFPGRGSTYSDFKWHWYHFDGTDWDESRKLNRIYKFQGKAWDWEVSNENGNYDYLMYADIDYDHPDVAAEIKRWGTWYANELQLDGFRLDAVKHIKFSFLRDWVNHVREKTGKEMFTVAEYWQNDLGALENYLNKTNFNHSVFDVPLHYQFHAASTQGGGYDMRKLLNSTVVSKHPLKAVTFVDNHDTQPGQSLESTVQTWFKPLAYAFILTRESGYPQVFYGDMYGTKGDSQREIPALKHKIEPILKARKQYAYGAQHDYFDHHDIVGWTREGDSSVANSGLAALITDGPGGAKRMYVGRQNAGETWHDITGNRSEPVVINSEGWGEFHVNGGSVSIYVQR

SEQ ID NO: 30332 - protein, 481 aa, Bacillus licheniformis
LNGTLMQYFEWYMPNDGQHWKRLQNDSAYLAEHGITAVWIPPAYKGTSQADVGYGAYDLYDLGEFHQKGTVRTKYGTKGELQSAIKSLHSRDINVYGDVVINHKGGADATEDVTAVEVDPADRNRVISGEHLIKAWTHFHFPGRGSTYSDFKWHWYHFDGTDWDESRKLNRIYKFQGKAWDWEVSNENGNYDYLMYADIDYDHPDVVAEIKRWGTWYANELQLDGFRLDAVKHIKFSFLRDWVNHVREKTGKEMFTVAEYWQNDLGALENYLNKTNFNHSLFDVPLHYQFHAASTQGGGYDMRKLLNGTVVSKHPLKSVTFVDNHDTQPGQSLESTVQTWFKPLAYAFILTRESGYPQVFYGDMYGTKGDSQREIPALKHKIEPILKARKQYAYGAQHDYFDHHDIVGWTREGDSSVANSGLAALITDGPGGAKRMYVGRQNAGETWHDITGNRSEPVVINSEGWGEFHVNGGSVSIYVQR

SEQ ID NO: 30333 - protein, 481 aa, Bacillus licheniformis
LNGTLMQYFEWYMPNDGQHWKRLQNDSAYLAEHGITAVWIPPAYKGTSQADVGYGAYDLYDLGEFHQKGTVRTKYGTKGELQSAIKSLHSRDINVYGDVVINHKGGADATEDVTAVEVDPADRNRVVSGEHLIKAWTHFHFPGRGSTYSDFKWHWYHFDGTDWDESRKLNRIYKFQGKAWDWEVSNENGNYDYLMYADIDYDHPDVAAEIKRWGTWYANELQLDGFRLDAVKHIKFSFLRDWVNHVREKTGKEMFTVAEYWQNDLGALENYLNKTNFNHSVFDVPLHYQFHAASTQGGGYDMRKLLNGTVVSKHPLKSVTFVDNHDTQPGQSLESTVQTWFKPLAYAFILTRESGYPQVFYGDMYGTKGDSQREIPALKHKIEPILKARKQYAYGAQHDYFDHHDIVGWTREGDSSVANSGLAALITDGPGGAKRMYVGRQNAGETWHDITGNRSEPVVINSEGWGEFHVNGGSVSIYVQR

SEQ ID NO: 30334 - protein, 481 aa, Bacillus licheniformis
LNGTLMQYFEWYMPNDGQHWRRLQNDSAYLAEHGITAVWIPPAYKGISQADVGYGAYDLYDLGEFHQKGTVRTKYGTKGELQSAIKSLHSRDINVYGDVVINHKAGADATEDVTAVEVDPADRNRVISGEHLIKAWTHFHFPGRGSTYSDFKWHWYHFDGTDWDESRKLNRIYKFQGKAWDWEVSNENGNYDYLMYADIDYDHPDVAAEIKRWGTWYANELQLDGFRLDAVKHIKFSFLRDWVNHVREKTGKEMFTVAEYWQNDLGALENYLNKTNFNHSVFDVPLHYQFHAASTQGGGYDMRKLLNGTVVSKHPLKSVTFVDNHDTQPGQSLESTVQTWFKPLAYAFILTRESGYPQVFYGDMYGTKGDSQREIPALKHKIEPILKARKQYAYGAQHDYFDHHDIVGWTREGDSSVANSGLAALITDGPGGAKRMYVGRQNAGETWHDITGNRSEPVVINSEGWGEFHVNGGSVSIYVQR

SEQ ID NO: 30335 - protein, 481 aa, Bacillus licheniformis
LNGTLMQYFEWYMPNDGQHWKRLQNDSAYLAEHGITAVWIPPAYKGTSQADVGYGAYDLYDLGEFHQKGTVRTKYGTKGELQSAIKSLHSRDINVYGDVVINHKGGADATEDVTAVEVDPADRNRVISGEHLIKAWTHFHFPGRGSTYSDFKWHWYHFDGTDWDESRKLNRIYKFQGKAWDWEVSTENGNYDYLMYADIDYDHPDVAAEIKRWGTWYANELQLDGFRLDAVKHIKFSFLRDWVNHVREKTGKEMFTVAEYWQNDLGALENYLNKTNFNHSVFDVPLHYQFHAASTQGGGYDMRKLLNGTVVSKHPLKSVTFVDNHDTQPGQSLESTVQTWFKPLAYAFILTRESGYPQVFYGDMYGTKGDSQREIPALKHKIEPILKARKQYAYGAQHDYFDHHDIVGWTREGDSSVANSGLAALITDGPGGAKRMYVGRQNAGETWHDITGNRSEPVVINSEGWGEFHVNGGSVSIYVQR

SEQ ID NO: 30336 - protein, 481 aa, Bacillus licheniformis
LNGTLMQYFEWYXPNDGQHWKRLQNDSAYLAEHGITAVWIPPAYKGTSQADVGYGAYDLYDLGEFHQKGTVRTKYGTKGELQSAIKSLHSRDINVYGDVVINHKGGADATEDVTAVEVDPADRNRVISGEHLIKAWTHFHFPGRGSTYSDFKWHWYHFDGTDWDESRKLNRIYKFQGKAWDWEVSNENGNYDYLMYADIDYDHPDVAAEIKRWGTWYANELQLDGFRLDAVKHIKFSFLRDWVNHVREKTGKEMFTVAEYWQNDLGALENYLNKTNFNHSVFDVPLHYQFHAASTQGGGYDMRKLLNGTVVSKHPLKSVTFVDNHDTQPGQSLESTVQTWFKPLAYAFILTRESGYPQVFYGDMYGTKGDSQREIPALKHKIEPILKARKQYAYGAQHDYFDHHDIVGWTREGDSSVANSGLAALITDGPGGAKRMYVGRQNAGETWHDITGNRSEPVVINSEGWGEFHVNGGSVSIYVQR

SEQ ID NO: 30337 - protein, 481 aa, Bacillus licheniformis
LNGTLMQYFEWYWPNDGQHWKRLQNDSAYLAEHGITAVWIPPAYKGTSQADVGYGAYDLYDLGEFHQKGTVRTKYGTKGELQSAIKSLHSRDINVYGDVVINHKGGADATEDVTAVEVDPADRNRVISGEHLIKAWTHFHFPGRGSTYSDFKWHWYHFDGTDWDESRKLNRIYKFQGKAWDWEVSNENGNYDYLMYADIDYDHPDVAAEIKRWGTWYANELQLDGFRLDAVKHIKFSFLRDWVNHVREKTGKEMFTVAEYWQNDLGALENYLNKTNFNHSVFDVPLHYQFHAASTQGGGYDMRKLLNGTVVSKHPLKSVTFVDNHDTQPGQSLESTVQTWFKPLAYAFILTRESGYPQVFYGDMYGTKGDSQREIPALKHKIEPILKARKQYAYGAQHDYFDHHDIVGWTREGDSSVANSGLAALITDGPGGAKRMYVGRQNAGETWHDITGNRSEPVVINSEGWGEFHVNGGSVSIYVQR

SEQ ID NO: 30338 - protein, 481 aa, Bacillus licheniformis
LNGTLMQYFEWYMPNDGQHWKRLQNDSAYLAEHGITAVWIPPAYKGTSQADVGYGAYDLYDLGEFHQKGTVRTKYGTKGELQSAIKSLHSRDINVYGDVVINHKGGADATEDVTAVEVDPADRNRVISGEYLIKAWTHFHFPGRGSTYSDFKWYWYHFDGTDWDESRKLNRIYKFQGKYWDWEVSNENGNYDYLMYADIDYDHPDVVAEIKRWGTWYANELQLDGNRLDAVKHIKFSFLRDWVNHVREKTGKEMFTVAEYWQNDLGALENYLNKTNFNHSVFDVPLHYQFYAASTQGGGYDMRKLLNDTVVSKHPLKSVTFVDNHDTQPGQSLESTVQTWFKPLAYAFILTRESGYPQVFYGDMYGTKGDSQREIPALKHKIEPILKARKQYAYGAQHDYFDHHDIVGWTREGDSSVANSGLAALITDGPGGAKRMYVGRQNAGETWYDITGNRSEPVVINSEGWGEFHVNDGSVSIYVQR

SEQ ID NO: 30339 - protein, 481 aa, Bacillus licheniformis
LNGTLMQYFEWYMPNDGQHWKRLQNDSAYLAEHGITAVWIPPAYKGTSQADVGYGAYDLYDLGEFHQKGTVRTKYGTKGELQSAIKSLHSRDINVYGDVVINHKGGADATEDVTAVEVDPADRNRVISGEHTIKAWTHFHFPGRGSTYSDFKWHWYHFDGTDWDESRKLNRIYKFQGKAWDWEVSNENGNYDYLMYADIDYDHPDVAAEIKRWGTWYANELQLDGFRLDAVKHIKFSFLRDWVNHVREKTGKEMFTVAEYWQNDLGALENYLNKTNFNHSVFDVPLHYQFHAASTQGGGYDMRKLLNGTVVSKHPLKSVTFVDNHDTQPGQSLESTVQTWFKPLAYAFILTRESGYPQVFYGDMYGTKGDSQREIPALKHKIEPILKARKQYAYGAQHDYFDHHDIVGWTREGDSSVANSGLAALITDGPGGAKRMYVGRQNAGETWHDITGNRSEPVVINSEGWGEFHVNGGSVSIYVQR

SEQ ID NO: 30340 - protein, 481 aa, Bacillus licheniformis
LNGTLMQYFEWYMPNDGQHWKRLQNDSAYLAEHGITAVWIPPAYKGTSQADVGYGAYDLYDLGEFHQKGTVRTKYGTKGELQSAIKSLHSRDINVYGDVVINHKGGADATEDVTAVEVDPADRNRVISGEXLIKAWTHFHFPGRGSTYSDFKWHWYHFDGTDWDESRKLNRIYKFQGKAWDWEVSNENGNYDYLMYADIDYDHPDVAAESKRWGSWYANELQLDGFRLDAVKHIKFSFLRDWVNHVREKTGKEMFTVAEYWQNDLGALENYLNKTNFNHSVFDVPLHYQFHAASTQGGGYDMRKLLNGTVVSKHPLKSVTFVDNHDIQPGQSLESTVQTWFKPLAYAFILTRESGYPQVFYGDMYGTKGDSQREIPALKHKIEPILKARKQYAYGAQHDYFDHHDIVGWTREGDSSVANSGLAALITDGPGGAKRMYVGRQNAGETWHDITGNRSDPVVINSEGWGEFHVNGGSVSIYVQR

SEQ ID NO: 30341 - protein, 481 aa, Bacillus licheniformis
LNGTLMQYFEWYIPNDGQHWKRLQNDSAYLAEHGITAVWIPPAYKGTSQADVGYGAYDLYDLGEFHQKGTVRTKYGTKGELQSAIKSLHSRDINVYGDVVINHKGGADATEDVTAVEVDPADRNRVISGEHLIKAWTHFHFPGRGSTYSDFKWHWYHFDGTDWDESRKLNRIYKFQGKAWDWEVSNENGNYDYLMYADIDYDHPDVAAEIKRWGTWYANELQLDGFRLDAVKHIKFSFLRDWVNHVREKTGKEMFTVAEYWQNDLGALENYLNKTNFNHSVFDVPLHYQFHAASTQGGGYDMRKLLNGTVVSKHPLKSVTFVDNHDTQPGQSLESTVQTWFKPLAYAFILTRESGYPQVFYGDMYGTKGDSQREIPALKHKIEPILKARKQYAYGAQHDYFDHHDIVGWTREGDSSVANSGLAALITDGPGGAKRMYVGRQNAGETWHDITGNRSEPVVINSEGWGEFHVNGGSVSIYVQR

SEQ ID NO: 30342 - protein, 481 aa, Bacillus licheniformis
LNGTLMQYFEWYMPNDGQHWRRLQNDSAYLAEHGITAVWIPPAYKGISQADVGYGAYDLYDLGEFHQKGTVRTKYGTKGELQSAIKSLHSRDINVYGDVVINHKAGADATEDVTAVEVDPADRNRVISGEHLIKAWTHFHFPGRGSTYSDFKWHWYHFDGTDWDESRKLNRIYKFQGKAWDWEVSNENGNYDYLMYADFDYDHPDVAAEIKRWGTWYANELQLDGFRLDAVKHIKFSFLRDWVNHVREKTGKEMFTVAEYWQNDLGALENYLNKTNFNHSVFDVPLHYQFHAASTQGGGYDMRKLLNGTVVSKHPLKSVTFVDNHDTQPGQSLESTVQTWFKPLAYAFILTRESGYPQVFYGDMYGTKGDSQREIPALKHKIEPILKARKQYAYGAQHDYFDHHDIVGWTREGDSSVANSGLAALITDGPGGAKRMYVGRQNAGETWHDITGNRSEPVVINSEGWGEFHVNGGSVSIYVQR

SEQ ID NO: 30343 - protein, 481 aa, Bacillus licheniformis
LNGTLMQYFEWYHPNDGQHWKRLQNDSAYLAEHGITAVWIPPAYKGTSQADVGYGAYDLYDLGEFHQKGTVRTKYGTKGELQSAIKSLHSRDINVYGDVVINHKGGADATEDVTAVEVDPADRNRVISGEHLIKAWTHFHFPGRGSTYSDFKWHWYHFDGTDWDESRKLNRIYKFQGKAWDWEVSNENGNYDYLMYADIDYDHPDVAAEIKRWGTWYANELQLDGFRLDAVKHIKFSFLRDWVNHVREKTGKEMFTVAEYWQNDLGALENYLNKTNFNHSVFDVPLHYQFHAASTQGGGYDMRKLLNGTVVSKHPLKSVTFVDNHDTQPGQSLESTVQTWFKPLAYAFILTRESGYPQVFYGDMYGTKGDSQREIPALKHKIEPILKARKQYAYGAQHDYFDHHDIVGWTREGDSSVANSGLAALITDGPGGAKRMYVGRQNAGETWHDITGNRSEPVVINSEGWGEFHVNGGSVSIYVQR

SEQ ID NO: 30344 - protein, 481 aa, Bacillus licheniformis
LNGTLMQYFEWYMPNDGQHWKRLQNDSAYLAEHGITAVWIPPAYKGTSQADVGYGAYDLYDLGEFHQKGTVRTKYSTKGELQSAIKSLHSRDINVYGDVVINHKGGADATEDVTAVEVDPADRNRVISGEHRIKAWTHFHFPGRGSTYSDFKWHWYHFDGTDWDESRKLNRIYKFQGKAWDWEVSNENGNYDYLMYADIDYDHPDVAAEIKRWGTWYANELQLDGFRLDAVKHIKFSFLRDWVNHVREKTGKEMFTVAEYWQNDLGALENYLNKTNFNHSVFDVPLHYQFHAASTQGGGYDMRKLLNGTVVSKHPLKAVTFVDNHDTQPGQSLESTVQTWFKPLAYAFILTRESGYPQVFYGDMYGTKGDSQREIPALKHKIEPILKARKQYAYGAQHDYFDHHDIVGWTREGDSSVANSGLAALITDGPGGAKRMYVGRQNAGETWHDITGNRSEPVVINSEGWGEFHVNGGSVSIYVQR

SEQ ID NO: 30345 - protein, 481 aa, Bacillus licheniformis
LNGTLMQYFEWYAPNDGQHWKRLQNDSAYLAEHGITAVWIPPAYKGTSQADVGYGAYDLYDLGEFHQKGTVRTKYGTKGELQSAIKSLHSRDINVYGDVVINHKGGADATEDVTAVEVDPADRNRVISGEHLIKAWTHFHFPGRGSTYSDFKWHWYHFDGTDWDESRKLNRIYKFQGKAWDWEVSNENGNYDYLMYADIDYDHPDVAAEIKRWGTWYANELQLDGFRLDAVKHIKFSFLRDWVNHVREKTGKEMFTVAEYWQNDLGALENYLNKTNFNHSVFDVPLHYQFHAASTQGGGYDMRKLLNGTVVSKHPLKSVTFVDNHDTQPGQSLESTVQTWFKPLAYAFILTRESGYPQVFYGDMYGTKGDSQREIPALKHKIEPILKARKQYAYGAQHDYFDHHDIVGWTREGDSSVANSGLAALITDGPGGAKRMYVGRQNAGETWHDITGNRSEPVVINSEGWGEFHVNGGSVSIYVQR

SEQ ID NO: 30346 - protein, 481 aa, Bacillus licheniformis
LNGTLMQYFEWYMPNDGQHWKRLQNDSAYLAEHGITAVWIPPAYKGTSQADVGYGAYDLYDLGEFHQKGTVRTKYGTKGELQSAIKSLHSRDINVYGDVVINHKGGADATEDVTAVEVDPADRNRVISGEHLIKAWTHFHFPGRGSTYSDFKWHWYHFDGTDWDESRKLNRIYKFQGKAWDWEVSNENGNYDYLMYADIDYDHPDVAAEIKRWGTWYANELQLDGFRLDAVKHIKFSFLRDWVNHVREKTGKEMFTVAEYWQNDLGALENYLNKTNFNHSVFDVPLHYQFHAASTQGGGYDMRNLLNGTVVSKHPLKSVTFVDNHDTQPGQSLESTVQTWFKPLAYAFILTRESGYPQVFYGDMYGTKGDSQREIPALKHKIEPILKARKQYAYGAQHDYFDHHDIVGWTREGDSSVANSGLAALITDGPGGAKRMYVGRQNAGETWHDITGNRSEPVVINSEGWGEFHVNGGSVSIYVQR

SEQ ID NO: 30347 - protein, 481 aa, Bacillus licheniformis
LNGTLMQYFEWYRPNDGQHWKRLQNDSAYLAEHGITAVWIPPAYKGTSQADVGYGAYDLYDLGEFHQKGTVRTKYGTKGELQSAIKSLHSRDINVYGDVVINHKGGADATEDVTAVEVDPADRNRVISGEHLIKAWTHFHFPGRGSTYSDFKWHWYHFDGTDWDESRKLNRIYKFQGKAWDWEVSNENGNYDYLMYADIDYDHPDVAAEIKRWGTWYANELQLDGFRLDAVKHIKFSFLRDWVNHVREKTGKEMFTVAEYWQNDLGALENYLNKTNFNHSVFDVPLHYQFHAASTQGGGYDMRKLLNGTVVSKHPLKSVTFVDNHDTQPGQSLESTVQTWFKPLAYAFILTRESGYPQVFYGDMYGTKGDSQREIPALKHKIEPILKARKQYAYGAQHDYFDHHDIVGWTREGDSSVANSGLAALITDGPGGAKRMYVGRQNAGETWHDITGNRSEPVVINSEGWGEFHVNGGSVSIYVQR

SEQ ID NO: 30348 - protein, 481 aa, Synthetic construct
LNGTLMQYFEWYMPNDGQHWRRLQNDSAYLAEHGITAVWIPPAYKGTSQADVGYGAYDLYDLGEFHQKGTVRTKYGTKGELQSAIKSLHSRDINVYGDVVINHKGGADATEDVTAVEVDPADRNRVISGEHLIKAWTHFHFPGRGSTYSDFKWHWYHFDGTDWDESRKLNRIYKFQGKAWDWEVSNENGNYDYLMYADIDYDHPDVAAEIKRWGTWYANELQLDGFRLDAVKHIKFSFLRDWVNHVREKTGKEMFTVAEYWQNDLGALENYLNKTNFNHSVFDVPLHYQFHAASTQGGGYDMRKLLDGTVVSKHPLKSVTFVDNHDTQPGQSLESTVQTWFKPLAYAFILTRESGYPQVFYGDMYGTKGDSQREIPALKHKIEPILKARKQYAYGAQHDYFDHHDIVGWTREGDSSVANSGLAALITDGPGGAKRMYVGRQNAGETWHDITGNRSEPVVINSEGWGEFHVNGGSVSIYVQR

SEQ ID NO: 30349 - protein, 481 aa, Bacillus licheniformis
LNGTLMQYFEWYMPNDGQHWKRLQNDSAYLAEHGITAVWIPPAYKGTSQADVGYGAYDLYDLGEFHQKGTVRTKYGTKGELQSAIKSLHSRDINVYGDVVINHKGGADATEDVTAVEVDPADRNRVISGEHLIKAWTHFDFPGRGSTYSDFKWHWYHFDGTDWDESRKLNRIYKFQGKAWDWEVSNENGNYDYLMYADIDYDHPDVAAEIKRWGTWYANELQLDGFRLDAVKHIKFSFLRDWVNHVREKTGKEMFTVAEYWQNDLGALENYLNKTNFNHSVFDVPLHYQFHAASTQGGGYDMRKLLNGTVVSKHPLKSVTFVDNHDTQPGQSLESTVQTWFKPLAYAFILTRESGYPQVFYGDMYGTKGDSQREIPALKHKIEPILKARKQYAYGAQHDYFDHHDIVGWTREGDSSVANSGLAALITDGPGGAKRMYVGRQNAGETWHDITGNRSEPVVINSEGWGEFHVNGGSVSIYVQR

SEQ ID NO: 30350 - protein, 481 aa, Bacillus licheniformis
LNGTLMQYFEWYMPNDGQHWKRLQNDSAYLAEHGITAVWIPPAYKGTSQADVGYGAYDLYDLGEFNQKGTVRTKYGTKGELQSAIKSLHSRDINVYGDVVINHKGGADATEDVTAVEVDPADRNRVISGEHLIKAWTHFHFPGRGSTYSDFKWHWYHFDGTDWDESRKLNRIYKFQGKAWDWEVSNENGNYDYLMYADIDYDHPDVAAEIKRWGTWYANELQLDGFRLDAVKHIKFSFLRDWVNHVREKTGKEMFTVAEYWQNDLGALENYLNKTNFNHSVFDVPLHYQFHAASTQGGGYDMRKLLNGTVVSKHPLKSVTFVDNHDTQPGQSLESTVQTWFKPLAYAFILTRESGYPQVFYGDMYGTKGDSQREIPALKHKIEPILKARKQYAYGAQHDYFDHHDIVGWTREGDSSVANSGLAALITDGPGGAKRMYVGRQNAGETWHDITGNRSEPVVINSEGWGEFHVNGGSVSIYVQR

SEQ ID NO: 30351 - protein, 481 aa, Bacillus licheniformis
LNGTLMQYFEWYNPNDGQHWKRLQNDSAYLAEHGITAVWIPPAYKGTSQADVGYGAYDLYDLGEFHQKGTVRTKYGTKGELQSAIKSLHSRDINVYGDVVINHKGGADATEDVTAVEVDPADRNRVISGEHLIKAWTHFHFPGRGSTYSDFKWHWYHFDGTDWDESRKLNRIYKFQGKAWDWEVSNENGNYDYLMYADIDYDHPDVAAEIKRWGTWYANELQLDGFRLDAVKHIKFSFLRDWVNHVREKTGKEMFTVAEYWQNDLGALENYLNKTNFNHSVFDVPLHYQFHAASTQGGGYDMRKLLNGTVVSKHPLKSVTFVDNHDTQPGQSLESTVQTWFKPLAYAFILTRESGYPQVFYGDMYGTKGDSQREIPALKHKIEPILKARKQYAYGAQHDYFDHHDIVGWTREGDSSVANSGLAALITDGPGGAKRMYVGRQNAGETWHDITGNRSEPVVINSEGWGEFHVNGGSVSIYVQR

SEQ ID NO: 30352 - protein, 481 aa, Bacillus licheniformis DSM 13 = ATCC 14580
LNGTLMQYFEWYMPNDGQHWKRLQNDSAYLAEHGITAVWIPPAYKGTSQADVGYGAYDLYDLGEFHQKGTVRTKYGTKGELQSAIKSLHSRDINVYGDVVINHKGGADATEDVTAVEVDPADRNRVISGEHPIKAWTHFHFPGRGSTYSDFKWHWYHFDGTDWDESRKLNRIYKFQGKAWDWEVSNENGNYDYLMYADIDYDHPDVAAEIKRWGTWYANELQLDGFRLDAVKHIKFSFLRDWVNHVREKTGKEMFTVAEYWQNDLGALENYLNKTNFNHSVFDVPLHYQFHAASTQGGGYDMRKLLNGTVVSKHPLKSVTFVDNHDTQPGQSLESTVQTWFKPLAYAFILTRESGYPQVFYGDMYGTKGDSQREIPALKHKIEPILKARKQYAYGAQHDYFDHHDIVGWTREGDSSVANSGLAALITDGPGGAKRMYVGRQNAGETWHDITGNRSEPVVINSEGWGEFHVNGGSVSIYVQR

SEQ ID NO: 30353 - protein, 481 aa, Bacillus licheniformis
LNGTLMQYFEWYMPNDGQHWKRLQNDSAYLAEHGITAVWIPPAYKGTSQADVGYGAYDLYDLGEFHQKGTVRTKYGTKGELQSAIKSLHSRDINVYGDVVINHKGGADATEDVTAVEVDPADRNRVISGEHRIKAWTHFHFPGRGSTYSDFKWHWYHFDGTDWDESRKLNRIYKFQGKAWDWEVSNENGNYDYLMYADIDYDHPDVAAEIKRWGTWYANELQLDGFRLDAVKHIKFSFLRDWVNHVREKTGKEMFTVAEYWQNDLGALENYLNKTNFNHSVFDVPLHYQFHAASTQGGGYDMRKLLNSTVVSMHPLKAVTFVDNHDTQPGQSLESTVQTWFKPLAYAFILTRESGYPQVFYGDMYGTKGDSQREIPALKHKIEPILKARKQYAYGAQHDYFDHHDIVGWTREGDSSVANSGLAALITDGPGGAKRMYVGRQNAGETWHDITGNRSEPVVINSEGWGEFHVNGGSVSIYVQR

SEQ ID NO: 30354 - protein, 481 aa, Bacillus licheniformis
LNGTLMQYFEWYMPNDGQHWKRLQNDSAYLKEHGITAVWIPPAYKGTSQADVGYGAYDLYDLGEFHQKGTVRTKYGTKGELQSAIKSLHSRDINVYGDVVINHKGGADATEDVTAVEVDPADRNRVISGEHLIKAWTHFHFPGRGSTYSDFKWHWYHFDGTDWDESRKLNRIYKFQGKAWDWEVSNENGNYDYLMYADIDYDHPDVAAEIKRWGTWYANELQLDGFRLDAVKHIKFSFLRDWVNHVREKTGKEMFTVAEYWQNDLGALENYLNKTNFNHSVFDVPLHYQFHAASTQGGGYDMRKLLNGTVVSKHPLKSVTFVDNHDTQPGQSLESTVQTWFKPLAYAFILTRESGYPQVFYGDMYGTKGDSQREIPALKHKIEPILKARKQYAYGAQHDYFDHHDIVGWTREGDSSVANSGLAALITDGPGGAKRMYVGRQNAGETWHDITGNRSEPVVINSEGWGEFHVNGGSVSIYVQR

SEQ ID NO: 30355 - protein, 481 aa, Bacillus licheniformis
LNGTLMQYFEWYMPNDGQHWKRLQNDSAYLAEHGITAVWIPPAYKGTSQADVGYGAYDLYDLGEFHQKGTVRTKYGTKGELQSAIKSLHSRDINVYGDVVINHKGGADATEDVTAVEVDPADRNRVISGEHLIKAWTHFHFPGRGSTYSDFKWHWYHFDGTDWDESRKLNRIYKFQGKAWDWEVSNENGNYDYLMYADIDYDHPDVAAEIKRWGTWYANELQLDGFRLDAVKHIKFSFLRDWVNHVREKTGKEMFTVAEYWQNDLGALENYLNKTNFNHSVFDVPLHYQFHAASTQGGGYDMRKLLNGTVVSKHPLKSVTFVDNHDTQPGQSLESTVQTWFKPLAYAFILTRESGYPQVFYGDMYGTKGDSQREIPALKHKIEPILKARKQYAYGAQHDYFDHHDIVGWTREGDSSHANSGLAALITDGPGGAKRMYVGRQNAGETWHDITGNRSEPVVINSEGWGEFHVNGGSVSIYVQR

SEQ ID NO: 30356 - protein, 481 aa, Bacillus licheniformis
LNGTLMQYFEWYMPNDGQHWKRLQNDSAYLAEHGITAVWIPPAYKGTSQADVGYGAYDLYDLGEFHQKGTVRTKYGTKGELQSAIKSLHSRDINVYGDVVINHKGGADATEDVTAVEVDPADRNRVISGEYLIKAWTHFHFPGRGSTYSDFKWHWYHFDGTDWDESRKLNRIYKFQGKAWDWEVSNENGNYDYLMYADIDYDHPDVAAEIKRWGTWYANELQLDGFRLDAVKHIKFSFLRDWVNHVREKTGKEMFTVAEYWQNDLGALENYLNKTNFNHSLFDVPLHYQFHAASTQGGGYDMRKLLNGTVVSKHPLKSVTFVDNHDTQPGQSLESTVQTWFKPLAYAFILTRESGYPQVFYGDMYGTKGDSQREIPALKHKIEPILKARKQYAYGAQHDYFDHHDIVGWTREGDSSVANSGLAALITDGPGGAKRMYVGRQNAGETWHDITGNRSEPVVINSEGWGEFHVNGGSVSIYVQR

SEQ ID NO: 30357 - protein, 481 aa, Synthetic construct
LNGTLMQYFEWYMPNDGQHWKRLQNDSAYLAEHGITAVWIPPAYKGTSQADVGYGAYDLYDLGEFHQKGTVRTKYGTKGELQSAIKSLHSRDINVYGDVVIDHKGGADATEDVTAVEVDPADRNRVISGEYLIKAWTHFHFPGRGSTYSDFKWHWYHFDGTDWDESRKLNRIYKFQGKAWDWEVSNENGNYDYLMYADIDYDHPDVAAEIKRWGTWYANELQLDGFRLDAVKHIKFSFLRDWVNHVREKTGKEMFTVAEYWQNDLGALENYLNKTNFNHSVFDVPLHYQFHAASTQGGGYDMRKLLNGTVVSKHPLKSVTFVDNHDTQPGQSLESTVQTWFKPLAYAFILTRESGYPQVFYGDMYGTKGDSQREIPALKHKIEPILKARKQYAYGAQHDYFDHHDIVGWTREGDSSVANSGLAALITDGPGGAKRMYVGRQNAGETWHDITGNRSEPVVINSEGWGEFHVNGGSVSIYVQR

SEQ ID NO: 30358 - protein, 481 aa, Bacillus licheniformis
LNGTLMQYFEWYEPNDGQHWKRLQNDSAYLAEHGITAVWIPPAYKGTSQADVGYGAYDLYDLGEFHQKGTVRTKYGTKGELQSAIKSLHSRDINVYGDVVINHKGGADATEDVTAVEVDPADRNRVISGEHLIKAWTHFHFPGRGSTYSDFKWHWYHFDGTDWDESRKLNRIYKFQGKAWDWEVSNENGNYDYLMYADIDYDHPDVAAEIKRWGTWYANELQLDGFRLDAVKHIKFSFLRDWVNHVREKTGKEMFTVAEYWQNDLGALENYLNKTNFNHSVFDVPLHYQFHAASTQGGGYDMRKLLNGTVVSKHPLKSVTFVDNHDTQPGQSLESTVQTWFKPLAYAFILTRESGYPQVFYGDMYGTKGDSQREIPALKHKIEPILKARKQYAYGAQHDYFDHHDIVGWTREGDSSVANSGLAALITDGPGGAKRMYVGRQNAGETWHDITGNRSEPVVINSEGWGEFHVNGGSVSIYVQR

SEQ ID NO: 30359 - protein, 482 aa, Bacillus licheniformis
LNGTLMQYFEWYMPNDGQHWKRLQNDSAYLAEHGITAVWIPPAYKGTSQADVGYGAYDLYDLGEFHQKGTVRTKYGTKGELQSAIKSLHSRDINVYGDVVINHKGGADATEDVTAVEVDPADRNRVISGEHLIKAWTHFHFPGRGSTYSDFKWHWYHFDGTDWDESRKLNNRIYKFQGKAWDWEVSNENGNYDYLMYADIDYDHPDVAAEIKRWGTWYANELQLDGFRLDAVKHIKFSFLRDWVNHVREKTGKEMFTVAEYWQNDLGALENYLNKTNFNHSVFDVPLHYQFHAASTQGGGYDMRKLLNGTVVSKHPLKSVTFVDNHDTQPGQSLESTVQTWFKPLAYAFILTRESGYPQVFYGDMYGTKGDSQREIPALKHKIEPILKARKQYAYGAQHDYFDHHDIVGWTREGDSSVANSGLAALITDGPGGAKRMYVGRQNAGETWHDITGNRSEPVVINSEGWGEFHVNGGSVSIYVQR

SEQ ID NO: 30360 - protein, 481 aa, Bacillus licheniformis
LNGTLMQYFEWYVPNDGQHWKRLQNDSAYLAEHGITAVWIPPAYKGTSQADVGYGAYDLYDLGEFHQKGTVRTKYGTKGELQSAIKSLHSRDINVYGDVVINHKGGADATEDVTAVEVDPADRNRVISGEHLIKAWTHFHFPGRGSTYSDFKWHWYHFDGTDWDESRKLNRIYKFQGKAWDWEVSNENGNYDYLMYADIDYDHPDVAAEIKRWGTWYANELQLDGFRLDAVKHIKFSFLRDWVNHVREKTGKEMFTVAEYWQNDLGALENYLNKTNFNHSVFDVPLHYQFHAASTQGGGYDMRKLLNGTVVSKHPLKSVTFVDNHDTQPGQSLESTVQTWFKPLAYAFILTRESGYPQVFYGDMYGTKGDSQREIPALKHKIEPILKARKQYAYGAQHDYFDHHDIVGWTREGDSSVANSGLAALITDGPGGAKRMYVGRQNAGETWHDITGNRSEPVVINSEGWGEFHVNGGSVSIYVQR

SEQ ID NO: 30361 - protein, 481 aa, Bacillus licheniformis
LNGTLMQYFEWYKPNDGQHWKRLQNDSAYLAEHGITAVWIPPAYKGTSQADVGYGAYDLYDLGEFHQKGTVRTKYGTKGELQSAIKSLHSRDINVYGDVVINHKGGADATEDVTAVEVDPADRNRVISGEHLIKAWTHFHFPGRGSTYSDFKWHWYHFDGTDWDESRKLNRIYKFQGKAWDWEVSNENGNYDYLMYADIDYDHPDVAAEIKRWGTWYANELQLDGFRLDAVKHIKFSFLRDWVNHVREKTGKEMFTVAEYWQNDLGALENYLNKTNFNHSVFDVPLHYQFHAASTQGGGYDMRKLLNGTVVSKHPLKSVTFVDNHDTQPGQSLESTVQTWFKPLAYAFILTRESGYPQVFYGDMYGTKGDSQREIPALKHKIEPILKARKQYAYGAQHDYFDHHDIVGWTREGDSSVANSGLAALITDGPGGAKRMYVGRQNAGETWHDITGNRSEPVVINSEGWGEFHVNGGSVSIYVQR

SEQ ID NO: 30362 - protein, 481 aa, Bacillus licheniformis
LNGTLMQYFEWYMPNDGQHWKRLQNDSAYLAEHGITAVWIPPAYKGASQADVGYGAYDLYDLGEFHQKGTVRTKYGTKGELQSAIKSLHSRDINVYGDVVINHKGGADATEDVTAVEVDPADRNRVISGEHLIKAWTHFHFPGRGSTYSDFKWHWYHFDGTDWDESRKLNRIYKFQGKAWDWEVSNENGNYDYLMYADIDYDHPDVAAEIKRWGTWYANELQLDGFRLDAVKHIKFSFLRDWVNHVREKTGKEMFTVAEYWQNDLGALENYLNKTNFNHSVFDVPLHYQFHAASTQGGGYDMRKLLNGTVVSKHPLKSVTFVDNHDTQPGQSLESTVQTWFKPLAYAFILTRESGYPQVFYGDMYGTKGDSQREIPALKHKIEPILKARKQYAYGAQHDYFDHHDIVGWTREGDSSVANSGLAALITDGPGGAKRMYVGRQNAGETWHDITGNRSEPVVINSEGWGEFHVNGGSVSIYVQR

SEQ ID NO: 30363 - protein, 481 aa, Bacillus licheniformis
LNGTLMQYFEWYMPNDGQHWKRLQNDSAYLAEHGITAVWIPPAYKGTSQADVGYGAYDLYDLGEFHQKGTVRTKYGTKGELQSAIKSLHSRDINVYGDVVINHKGGADATEDVTAVEVDPADRNRVISGEHLIKAWTHFHFPGRGSTYSDFKWHWYHFDGTDWDESRKLNRIYKFQGKAWDWEVSNENGNYDYLMYADIDYDHPDVAAEIKRWGTWYANELQLDGFRLDAVKHIKFSFLRDWVNHVREKTGKEMFTVAEYWQNDLGALENYLNKTNFNHSVFDVPLHYQFYAASTQGGGYDMRKLLNGTVVSKHPLKSVTFVDNHDTQPGQSLESTVQTWFKPLAYAFILTRESGYPQVFYGDMYGTKGDSQREIPALKHKIEPILKARKQYAYGAQHDYFDHHDIVGWTREGDSSVANSGLAALITDGPGGAKRMYVGRQNAGETWHDITGNRSEPVVINSEGWGEFHVNGGSVSIYVQR

SEQ ID NO: 30364 - protein, 481 aa, Bacillus licheniformis
LNGTLMQYFEWYMPNDGQHWKRLQNDSAYLAEHGITAVWIPPAYKGTSQADVGYGAYDLYDLGEFHQKGTVRTKYGTKGELQSAIKSLHSRDINVYGDVVINHKGGADATEDVTAVEVDPADRNRVISGEHLIKAWTHFHFPGRGSTYSDFKWHWYHFDGTDWDESRKLNRIYKFQGKAWDWEVSNENGNYDYLMYADIDYDHPDVAAEIKRWGTWYANELQLDGFRLDAVKHIKFSFLRDWVNHVRSKTGKEMFTVAEYWQNDLGALENYLNKTNFNHSVFDVPLHYQFHAASTQGGGYDMRKLLNGTVVSKHPLKSVTFVDNHDTQPGQSLESTVQTWFKPLAYAFILTRESGYPQVFYGDMYGTKGDSQREIPALKHKIEPILKARKQYAYGAQHDYFDHHDIVGWTREGDSSVANSGLAALITDGPGGAKRMYVGRQNAGETWHDITGNRSEPVVINSEGWGEFHVNGGSVSIYVQR

SEQ ID NO: 30365 - protein, 481 aa, Bacillus licheniformis
LNGTLMQYFEWYMPNDGQHWKRLQNDSAYLAEHGITAVWIPPAYKGTSQADVGYGAYDLYDLGEFHQKGTVRTKYGTKGELQSAIKSLHSRDINVYGDVVINHKGGADATEDVTAVEVDPADRNRVISGEHLIKAWTHFHFPGRGSTYSDFKWHWYHFDGTDWDESRKLNRIYKFQGKAWDWEVSNENGNYDYLMYADIDYDHPDVAAEIKRWGTWYANELQLDGFRLDAVKHIKFSFLRDWVNHVREKTGKEMFTVAEYWQNDLGALENYLNKTNFNHSVFDVPLHYQFHAASTQGGGYDMRKLLNGTVVSKHPLKSVTFVDNHDTQPGQSLESTVQTWFKPLAYAFILTRESGYPQVFYGDMYGTKGDSQREIPALKHKIEPILKARKQYAYGRQHDYFDHHDIVGWTREGDSSVANSGLAALITDGPGGAKRMYVGRQNAGETWHDITGNRSEPVVINSEGWGEFHVNGGSVSIYVQR

SEQ ID NO: 30366 - protein, 481 aa, Bacillus licheniformis
LNGTLMQYFEWYSPNDGQHWKRLQNDSAYLAEHGITAVWIPPAYKGTSQADVGYGAYDLYDLGEFHQKGTVRTKYGTKGELQSAIKSLHSRDINVYGDVVINHKGGADATEDVTAVEVDPADRNRVISGEHLIKAWTHFHFPGRGSTYSDFKWHWYHFDGTDWDESRKLNRIYKFQGKAWDWEVSNENGNYDYLMYADIDYDHPDVAAEIKRWGTWYANELQLDGFRLDAVKHIKFSFLRDWVNHVREKTGKEMFTVAEYWQNDLGALENYLNKTNFNHSVFDVPLHYQFHAASTQGGGYDMRKLLNGTVVSKHPLKSVTFVDNHDTQPGQSLESTVQTWFKPLAYAFILTRESGYPQVFYGDMYGTKGDSQREIPALKHKIEPILKARKQYAYGAQHDYFDHHDIVGWTREGDSSVANSGLAALITDGPGGAKRMYVGRQNAGETWHDITGNRSEPVVINSEGWGEFHVNGGSVSIYVQR

SEQ ID NO: 30367 - protein, 481 aa, Bacillus licheniformis
LNGTLMQYFEWYMPNDGQHWKRLQNDSAYLAEHGITAVWIPPAYKGTSQADVGYGAYDLYDLGEFHQKGTVRTKYGTKGELQSAIKSLHSRDINVYGDVVINHKGGADATEDVTAVEVDPADRNRVISGEHLIKAWTHFHFPGRGSTYSDFKWHWYHFDGVDWDESRKLNRIYKFQGKAWDWEVSNENGNYDYLMYADIDYDHPDVAAEIKRWGTWYANELQLDGFRLDAVKHIKFSFLRDWVNHVREKTGKEMFTVAEYWQNDLGALENYLNKTNFNHSVFDVPLHYQFHAASTQGGGYDMRKLLNGTVVSKHPLKSVTFVDNHDTQPGQSLESTVQTWFKPLAYAFILTRESGYPQVFYGDMYGTKGDSQREIPALKHKIEPILKARKQYAYGAQHDYFDHHDIVGWTREGDSSVANSGLAALITDGPGGAKRMYVGRQNAGETWHDITGNRSEPVVINSEGWGEFHVNGGSVSIYVQR

SEQ ID NO: 30368 - protein, 481 aa, Bacillus sp.
LNGTLMQYFEWYMPNDGQHWKRLQNDSAYLAEHGITAVWIPPAYKGTSQADVGYGAYDLYDLGEFHQKGTVRTKYGTKGELQSAIKSLHSRDINVYGDVVINHKGGADATEDVTAVEVDPADRNRVISGEYLIKAWTHFHFPGRGSIYSDFKWHWYHFDGTDWDESRKLNRIYKFQGKAWDWEVSNENGNYDYLMYADIDYDHPDVAAEIKRWGTWYANELQLDGFRLDAVKHIKFSFLRDWVNHVREKTGKEMFTVAEYWQNDLGALENYLNKTNFNHSVFDVPLHYQFHAASTQGGGYDMRKLLNGTVVSKHPLKSVTFVDNHDTQPGQSLESTVQTWFKPLAYAFILTRESGYPQVFYGDMYGTKGDSQREIPALKHKIEPILKARKQYAYGAQHDYFDHHDIVGWTREGDSSVANSGLAALITDGPGGAKRMYVGRQNAGETWHDITGNRSEPVVINSEGWGEFHVNGGSVSIYVQR

SEQ ID NO: 30369 - protein, 481 aa, Bacillus licheniformis
LNGTLMQYFEWYMPNDGQHWKRLQNDSAYLAEHGITAVWIPPAYKGTSQADVGYGAYDLYDLGEFHQKGTVRTKYGTKGELQSAIKSLHSRDINVYGDVVINHKGGADATEDVTAVEVDPADRNRVISGEHLIKAWTHFHFPGRGSTYSDFKWHWYHFDGTDWDESRKLNRIYKFQGKAWDWEVSNENGNYDYLMYADIDYDHPDVAAEIKRWGTWYANELQLDGFRLDAVKHIKFSFLRDWVNHVREKTGKEMFTVAEYWQNDLGALENYLNKTNFNHSVFDVPLHYQFHAASKQGGGYDMRKLLNGTVVSKHPLKSVTFVDNHDTQPGQSLESTVQTWFKPLAYAFILTRESGYPQVFYGDMYGTKGDSQREIPALKHKIEPILKARKQYAYGAQHDYFDHHDIVGWTREGDSSVANSGLAALITDGPGGAKRMYVGRQNAGETWHDITGNRSEPVVINSEGWGEFHVNGGSVSIYVQR

SEQ ID NO: 30370 - protein, 481 aa, Synthetic construct
LNGTLMQYFEWYMPNDGQHWKRLQNDSAYLAEHGITAVWIPPAYKGTSQADVGYGAYDLYDLGEFHQKGTVRTKYGTKGELQSAIKSLHSRDINVYGDVVINHKGGADATEDVTAVEVDPADRNREISGEYLIKAWTHFHFPGRGSIYSDFKWHWYHFDGTDWDESRKLNRIYKFQGKAWDWEVDNENGNYDYLMYADIDYDHPDVAAEIKRWGTWYANELQLDGFRLDAVKHIKFSFLRDWVNHVREKTGKEMFTVAEYWQNDLGALENYLNKTNFNHSVFDVPLHYQFHAASTQGGGYDMRKLLNGTVVSKHPLKSVTFVDNHDTQPGQSLESTVQTWFKPLAYAFILTRESGYPQVFYGDMYGTKGDSQREIPALKHKIEPILKARKQYAYGAQHDYFDHHDIVGWTREGDSSVANSGLAALITDGPGGAKRMYVGRQNAGETWHDITGNRSEPVVINSEGWGEFHVNGGSVSIYVQR

SEQ ID NO: 30371 - protein, 481 aa, Bacillus licheniformis
LNGTLMQYFEWYMPNDGQHWKRLQNDSAYLAEHGITAVWIPPAYKGTSQADVGYGAYDLYDLGEFHQKGTVRTKYGTKGELQSAIKSLHSRDINVYGDVVINHKGGADATEDVTAVEVDPADRNRVISGEHLIKAWTHFHFPGRGSTYSDFKWHWYHFDGTDWDESRKLNRIYKFQGKAWDWEVSNENGNYDYLMYADIDYDHPDVAAEIKRWGTWYANELQLDGFRLDAVKHIKFSFLRDWVNHVREKTGKEMFTVAEYWQNDLGALENYLNKTNFNHSVFDVPLHYQFHAASTQGGGYDMRKLLNGTVVSKHPLKSVTFVDNHDTQPGQSLESTVQTWFKPLAYAFILTRESGYPQVFYGDMYGTKGDSQREIPALKHKIEPILKARKQYAYGAQHDYFDHHDIVGWTREGDSSVANSGLAALITDGPGGAKRMYVGRQNAGETWSDITGNRSEPVVINSEGWGEFHVNGGSVSIYVQR

SEQ ID NO: 30372 - protein, 481 aa, Bacillus licheniformis
LNGTLMQYFEWYMPNDGQHWKRLQNDSAYLAEHGITAVWIPPAYKGTSQADVGYGAYDLYDLGEFHQKGTVRTKYGTKGELQSAIKSLHSRDINVYGDVVINHKGGADATEDVTAVEVDPADRNREISGEALIKAWTHFHFPGRGSTYSDFKWHWYHFDGTDWDESRKLNRIYKFQGKAWDWEVDNENGNYDYLMYADIDYDHPDVAAEIKRWGTWYANELQLDGFRLDAVKHIKFSFLRDWVNHVREKTGKEMFTVAEYWQNDLGALENYLNKTNFNHSVFDVPLHYQFHAASTQGGGYDMRKLLNGTVVSKHPLKSVTFVDNHDTQPGQSLESTVQTWFKPLAYAFILTRESGYPQVFYGDMYGTKGDSQREIPALKHKIEPILKARKQYAYGAQHDYFDHHDIVGWTREGDSSVANSGLAALITDGPGGAKRMYVGRQNAGETWHDITGNRSEPVVINSEGWGEFHVNGGSVSIYVQR

SEQ ID NO: 30373 - protein, 481 aa, Bacillus licheniformis
LNGTLMQYFEWYMPNDGQHWRRLQNDSAYLAEHGITAVWIPPAYKGTSQADVGYGAYDLYDLGEFHQKGTVRTKYGTKGELQSAIKSLHSRDINVYGDVVINHKGGADATEDVTAVEVDPADRNRVISGEHLIKAWTHFHFPGRGSTYSDFKWHWYHFDGTDWDESRKLNRIYKFQGKAWDWEVSNENGNYDYLMYADIDYDHPDVAAEIKRWGTWYANELQLDGFRLDAVKHIKFSFLRDWVNHVREKTGKEMFTVAEYWQNDLGALENYLNKTNFNHSVFDVPLHYQFQAASTQGGGYDMRKLLNGTVVSKHPLKSVTFVDNHDTQPGQSLESTVQTWFKPLAYAFILTRESGYPQVFYGDMYGTKGDSQREIPALKHKIEPILKARKQYAYGAQHDYFDHHDIVGWTREGDSSVANSGLAALITDGPGGAKRMYVGRQNAGETWHDITGNRSEPVVINSEGWGEFHVNGGSVSIYVQR

SEQ ID NO: 30374 - protein, 481 aa, Synthetic construct
LNGTLMQYFEWYMPNDGQHWKRLQNDSAYLAEHGITAVWIPPAYKGTSQADVGYGAYDLYDLGEFHQKGTVRTKYGTKGELQSAIKSLHSRDINVYGDVVINHKGGADATEDVTAVEVDPADRNRVISGEYLIKAWTHFHFPGRGSTYSDFKWHWYHFDGTDWDESRKLNRIYKFQGKAWDWEVDNENGNYDYLMYADIDYDHPDVAAEIKRWGTWYANELQLDGFRLDAVKHIKFSFLRDWVNHVREKTGKEMFTVAEYWQNDLGALENYLNKTNFNHSVFDVPLHYQFHAASTQGGGYDMRKLLNGTVVSKHPLKSVTFVDNHDTQPGQSLESTVQTWFKPLAYAFILTRESGYPQVFYGDMYGTKGDSQREIPALKHKIEPILKARKQYAYGAQHDYFDHHDIVGWTREGDSSVANSGLAALITDGPGGAKRMYVGRQNAGETWHDITGNRSEPVVINSEGWGEFHVNGGSVSIYVQR

SEQ ID NO: 30375 - protein, 399 aa, Bacillus sp.
HHDGTNGTIMQYFEWNVPNDGQHWNRLHNNAQNLKNAGITAIWIPPAWKGTSQNDVGYGAYDLYDLGEFNQKGTVRTKYGTKAELERAIRSLKANGIQVYGDVVMNHKGGADFTERVQAVEVNPQNRNQEVSGTYQIEAWTGFNFPGRGNQHSSFKWRWYHFDGTDWDQSRQLANRIYKFRGDGKAWDWEVDTENGNYDYLMYADVDMDHPEVINELNRWGVWYANTLNLDGFRLDAVKHIKFSFMRDWLGHVRGQTGKNLFAVAEYWKNDLGALENYLSKTNWTMSAFDVPLHYNLYQASNSSGNYDMRNLLNGTLVQRHPSHAVTFVDNHDTQPGEALESFVQGWFKPLAYATILTREQGYPQVFYGDYYGIPSDGVPSYRQQIDPLLKARQQYAYG

SEQ ID NO: 30376 - protein, 480 aa, Bacillus licheniformis
LNGTLMQYFEWYMPNDGQHWKRLQNDSAYLAEHGITAVWIPPAYKGTSQADVGYGAYDLYDLGEFHQKGTVRTKYGTKGELQSAIKSLHSRDINVYGDVVINHKGGADATEDVTAVEVDPADRNRVISGEHLIKAWTHFHFPGRGSTYSDFKWHWYHFDGTDWDESRKLNRIYKFQGKAWDWEVSNENGNYDYLYADIDYDHPDVAAEIKRWGTWYANELQLDGFRLDAVKHIKFSFLRDWVNHVREKTGKEMFTVAEYWQNDLGALENYLNKTNFNHSVFDVPLHYQFHAASTQGGGYDMRKLLNGTVVSKHPLKSVTFVDNHDTQPGQSLESTVQTWFKPLAYAFILTRESGYPQVFYGDMYGTKGDSQREIPALKHKIEPILKARKQYAYGAQHDYFDHHDIVGWTREGDSSVANSGLAALITDGPGGAKRMYVGRQNAGETWHDITGNRSEPVVINSEGWGEFHVNGGSVSIYVQR

SEQ ID NO: 30377 - protein, 480 aa, Bacillus licheniformis
LNGTLMQYFEWYMPNDGQHWKRLQNDSAYLAEHGITAVWIPPAYKGTSQADVGYGAYDLYDLGEFHQKGTVRTKYGTKGELQSAIKSLHSRDINVYGDVVINHKGGADATEDVTAVEVDPADRNRVISGEHLIKATHFHFPGRGSTYSDFKWHWYHFDGTDWDESRKLNRIYKFQGKAWDWEVSNENGNYDYLMYADIDYDHPDVAAEIKRWGTWYANELQLDGFRLDAVKHIKFSFLRDWVNHVREKTGKEMFTVAEYWQNDLGALENYLNKTNFNHSVFDVPLHYQFHAASTQGGGYDMRKLLNGTVVSKHPLKSVTFVDNHDTQPGQSLESTVQTWFKPLAYAFILTRESGYPQVFYGDMYGTKGDSQREIPALKHKIEPILKARKQYAYGAQHDYFDHHDIVGWTREGDSSVANSGLAALITDGPGGAKRMYVGRQNAGETWHDITGNRSEPVVINSEGWGEFHVNGGSVSIYVQR

SEQ ID NO: 30378 - protein, 480 aa, Bacillus licheniformis
LNGTLMQYFEWYMPNDGQHWKRLQNDSAYLAEHGITAVWIPPAYKGTSQADVGYGAYDLYDLGEFHQKGTVRTKYGTKGELQSAIKSLHSRDINVYGDVVINHKGGADATEDVTAVEVDPADRNRVISGEHLIKAWTHFHFPGRGSTYSDFKWHWYHFDGTDWDESRKLNRIYKFQGKAWDWEVNENGNYDYLMYADIDYDHPDVAAEIKRWGTWYANELQLDGFRLDAVKHIKFSFLRDWVNHVREKTGKEMFTVAEYWQNDLGALENYLNKTNFNHSVFDVPLHYQFHAASTQGGGYDMRKLLNGTVVSKHPLKSVTFVDNHDTQPGQSLESTVQTWFKPLAYAFILTRESGYPQVFYGDMYGTKGDSQREIPALKHKIEPILKARKQYAYGAQHDYFDHHDIVGWTREGDSSVANSGLAALITDGPGGAKRMYVGRQNAGETWHDITGNRSEPVVINSEGWGEFHVNGGSVSIYVQR

SEQ ID NO: 30379 - protein, 480 aa, Bacillus sp.
APINETMMQYFEWDLPNDGTLWTKVKNEAANLSSLGITALWLPPAYKGTSQSDVGYGVYDLYDLGEFNQKGTIRTKYGTKTQLERAIRSLKANGIQVYADVVFNHKAGADQTEFVDAVEVDPSNRNQETSGTYQIQAWTKFDFPGRGNTYSSFKWRWYHFDGTDWDESRKLNRIYKFRGKAWDWEVDTENGNYDYLMFADLDMDHPEVVTELKNWGTWYVNTTNIDGFRLDAVKHIKFSFMRDWLTYVRNQTGKNLFAVGEFWSYDVNKLHNYITKTNGSMSLFDAPLHNNFYTASKSSGYFDMRNLLNGTLVQRHPSHAVTLVDNHDTQPGEALESFVQGWFKPLAYAFILTRQEGYPCVFYGDYYGIPSDGVPGLKSKIDPLLIARRDYAYGTQRDYIDHQDIIGWTREGIDTKPNSGLAALITDGPGGSKWMYVGKKHAGKVFYDLTGNRSDTVTINADGWGEFKVNGGSVSIWVAK

SEQ ID NO: 30380 - protein, 480 aa, Bacillus licheniformis
LNGTLMQYFEWYMPNDGHWKRLQNDSAYLAEHGITAVWIPPAYKGTSQADVGYGAYDLYDLGEFHQKGTVRTKYGTKGELQSAIKSLHSRDINVYGDVVINHKGGADATEDVTAVEVDPADRNRVISGEHLIKAWTHFHFPGRGSTYSDFKWHWYHFDGTDWDESRKLNRIYKFQGKAWDWEVSNENGNYDYLMYADIDYDHPDVAAEIKRWGTWYANELQLDGFRLDAVKHIKFSFLRDWVNHVREKTGKEMFTVAEYWQNDLGALENYLNKTNFNHSVFDVPLHYQFHAASTQGGGYDMRKLLNGTVVSKHPLKSVTFVDNHDTQPGQSLESTVQTWFKPLAYAFILTRESGYPQVFYGDMYGTKGDSQREIPALKHKIEPILKARKQYAYGAQHDYFDHHDIVGWTREGDSSVANSGLAALITDGPGGAKRMYVGRQNAGETWHDITGNRSEPVVINSEGWGEFHVNGGSVSIYVQR

SEQ ID NO: 30381 - protein, 496 aa, Geobacillus stearothermophilus
AXXNGTMMQYFEWYLPNDGQHWXRLXNDAXNLSSXGITALWIPPAYKGTSQSDVGYGAYDLYDLGEFNQKGTVRTKYGTKAQLXXAIXALHAXGIQVYGDVVMNHKGGADGTEXVXAVEVNPSDRNQEISGXYXIXAWTKFDFPGRGNTYSXFKWRWYHFDGVDWDESRKLNNRIYKFRGXGKAWDWEVDTENGNYDYLMYADIDMDHPEVVXELKNWGXWYXNTLNLDGFRLDAVKHIKFSFXXDWLSHVRSXTGKXLFTVGEYWXXDIGALENYLXKTNWXMSLFDVPLHYNFYXASKSGGAYDMRXLLXGTLVXXHPXXAVTFVDNHDTQPGQALESWVDXWFKPLAYAFILTREXGYPXVFYGDYYGIPQYNXXEIPSLKSKIDPLLXARRXYAYGTQHDYLDHXDIIGWTREGXTSKPNSGLAALITDGPGGSKWMYVGKQXAGXVWYDLTGNRSDTVTINSDGWGEFXVNGGSVSVWVXRKTTVSTIARP

SEQ ID NO: 30382 - protein, 485 aa, Bacillus sp.
HHNGTNGTMMQYFEWYLPNDGNHWNRLNSDASNLKSKGITAVWIPPAWKAVSQNDVGYGAYDLYDLGEFNQKGTVRTKYGTRSQLQAAVTSLKNNGIQVYGDVVMNHKGGADATEMVRAVEVNPNNRNQEVTGEYTIEAWTRFDFPGRGNTHSSFKWRWYHFDGVDFDQSREFTNRIYKFRGHGKAWDWEVDTEFGNYDYLMYVDYDYDHPESTNEMRNWGVWYTNTLGLDGFRIDAVKHIKYSFTRDWINHVRSATGKNMFAVAEFWKNDLGAIENYLQKTNWNHSVFDVPLHYNLYNASKSGGNYDMRNIFNGTVVQRHPSHAVTFVDNHDSQPEEALESFVEEWFKPLAYALTLTREQGYPSVFYGDYYGIPTHGVPAMRSKIDPILEARQKYAYGPQHDYLDHPDVIGWTREGDSSHPKSGLATLITDGPGGSKRMYAGLKNAGETWYDITGNRSDTVKIGSDGWGEFHVNDGSVSIYVQK

SEQ ID NO: 30383 - protein, 483 aa, Bacillus sp.
HHNGTNGTMMQYFEWYLPNDGNHWNRLNSDASNLKSKGITAVWIPPAWKAVSQNDVGYGAYDLYDLGEFNQKGTVRTKYGTRSQLQAAVTSLKNNGIQVYGDVVMNHKGGADATEMVRAVEVNPNNRNQEVTGEYTIEAYTRFDFPGRGNTHSSFKWRWYHFDGVDFDQSREFTNRIYKFRGKAWDWEVDTEFGNYDYLMYADYDYDHPESTNEMRNWGVWYTNTLGLDGFRIDAVKHIKYSFTRDWINHVRSATGKNMFAVAEFWKNDLGAIENYLQKTNWNHSVFDVPLHYNLYNASKSGGNYDMRNIFNGTVVQRHPSHAVTFVDNHDSQPEEALESFVEEWFKPLAYALTLTREQGYPSVFYGDYYGIPTHGVPAMRSKIDPILEARQKYAYGPQHDYLDHPDVIGWTREGDSSHPKSGLATLITDGPGGSKRMYAGLKNAGETWYDITGNRSDTVKIGSDGWGEFHVNDGSVSIYVQK

SEQ ID NO: 30384 - protein, 485 aa, Bacillus sp.
HHDGTNGTIMQYFEWNVPNDGQHWNRLHNNAQNLKNAGITAIWIPPAWKGTSQNDVGYGAYDLYDLGEFNQKGTVRTKYGTKAELERAIRSLKANGIQVYGDVVMNHKGGADFTERVQAVEVNPQNRNQEVSGDYQIEAWTGFNFPGRGNQHSSFKWRWYHFDGTDWDQSRQLANRIYKFRGDGKAWDWEVDTENGNYDYLMYADVDMDHPEVINELNRWGVWYANTLNLDGFRLDAVKHIKFSFMRDWLGHVRGQTGKNLFAVAEYWKNDLGALENYLSKTNWTMSAFDVPLHYNLYQASNSSGNYDMRNLLNGTLVQRHPSHAVTFVDNHDTQPGEALESFVQGWFKPLAYATILTREQGYPQVFYGDYYGIPSDGVPSYRQQIDPLLKARQQYAYGRQHDYFDHWDVIGWTREGNASHPNSGLATIMSDGPGGSKWMYVGRQKAGEVWHDMTGNRSGTVTINQDGWGHFFVNGGSVSVWVKR

SEQ ID NO: 30385 - protein, 485 aa, Bacillus sp.
HHNGTNGTMMQYFEWYLPNDGNHWNRLNSDASNLKSKGITAVWIPPAWKAASQNDVGYGAYDLYDLGEFNQKGTVRTKYGTRSQLQAAVTSLKNNGIQVYGDVVMNHKGGADATEMVRAVEVNPNNRNQEVTGEYTIEAWTRFDFPGRGNTHSSFKWRWYHFDGVDWDQSRNLNNRIYKFRGHGKAWDWEVDTEFGNYDYLMYTDYDYDHPETTNEMRNWGVWYTNTLGLDGFRIDAVKHIKYSFTRDWINHVRSATGKNMFAVAEFWKNDLGAIENYLQKTNWNHSVFDVPLHYNLYNASKSGGNYDMRNIFNGTVVQRHPSHAVTFVDNHDSQPEEALESFVEEWFKPLAYALTLTREQGYPSVFYGDYYGIPTHGVPAMRSKIDPILEARQKYAYGPQHDYLDHPDVIGWTREGDSSHPKSGLATLITDGPGGSKRMYAGLKNAGETWYDITGNRSDTVKIGSDGWGEFHVNDGSVSIYVQK

SEQ ID NO: 30386 - protein, 485 aa, Bacillus sp.
HHNGTNGTMMQYFEWYLPNDGNHWNRLNSDASNLKSKGITAVWIPPAWKGTSQNDVGYGAYDLYDLGEFNQKGTVRTKYGTRSQLQAAVTSLKNNGIQVYGDVVMNHKGGADATEMVRAVEVNPNNRNQEVTGEYTIEAWTRFDFPGRGNTHSSFKWRWYHFDGVDWDQSRNLNNRIYKFRGHGKAWDWEVDTEFGNYDYLMYVDYDYDHPESTNEMRNWGVWYTNTLGLDGFRIDAVKHIKYSFTRDWINHVRSATGKNMFAVAEFWKNDLGAIENYLQKTNWNHSVFDVPLHYNLYNASKSQGNYDMRNIFNGTVVQRHPSHAVTFVDNHDSQPEEALESFVDTWFKPLAYALTLTREQGYPSVFYGDYYGIPTHGVPAMRSKIDPILEARQKYAYGPQHDYLDHPDVIGWTREGDSSHPKSGLATLITDGPGGSKRMYAGLKNAGETWYDITGNRSDTVKIGSDGWGEFHVNGSSVSIYVQK

SEQ ID NO: 30387 - protein, 485 aa, Bacillus sp.
HHNGTNGTMMQYFEWYLPNDGNHWNRLNSDASNLKSKGITAVWIPPAWKGASQNDVGYGAYDLYDLGEFNQKGTVRTKYGTRSQLQAAVTSLKNNGINVYGDVVMNHKGGADATEMVRAVEVNPNNRNQEVTGEYTIEAYTRFDFPGRGNTHSSFKWRWYHFDGVDWDQSRKLNNRIYKFRGHGKAWDWEVDTEFGNYDYLMYVDYDYDHPETTNEMRNWGVWYTNTLGLDGFRIDAVKHIKYSFTRDWINHVRIATGKNMFAVAEFWKNDLGAIENYLQKTNWNHSVFDVPLHYNLYNASKSGGNYDMRNIFNGTVVQAHPMHAVTFVDNHDSQPEEALESFVDEWFKPLAYALTLTREQGYPSVFYGDYYGIPTHGVPAMRSKIDPILEARQKYAYGPQHDYLDHPDVIGWTREGDSSHPKSGLATLITDGPGGSKRMYAGLKNAGETWYDITGNRSDTVKIGSDGWGEFHVNDGSVSIYVQK

SEQ ID NO: 30388 - protein, 485 aa, Bacillus sp.
HHNGTNGTMMQYFEWYLPNDGNHWNRLNSDASNLKSKGITAVWIPPAWKAVSQNDVGYGAYDLYDLGEFNQKGTVRTKYGTRSQLQAAVTSLKNNGIQVYGDVVMNHKGGADATEMVRAVEVNPNNRNQEVTGEYTIEAWTRFDFPGRGNTHSSFKWRWYHFDGVDWDQSRNLTNRIYKFRGHGKAWDWEVDTEFGNYDYLMYTDYDYDHPETTNEMRNWGVWYTNTLGLDGFRIDAVKHIKYSFTRDWINHVRSATGKNMFAVAEFWKNDLGAIENYLQKTNWNHSVFDVPLHYNLYNASKSGGNYDMRNIFNGTVVQRHPSHAVTFVDNHDSQPEEALESFVEEWFKPLAYALTLTREQGYPSVFYGDYYGIPTHGVPAMRSKIDPILEARQKYAYGPQHDYLDHPDVIGWTREGDSSHPKSGLATLITDGPGGSKRMYAGLKNAGETWYDITGNRSDTVKIGSDGWGEFHVNDGSVSIYVQK

SEQ ID NO: 30389 - protein, 483 aa, Bacillus sp.
HHNGTNGTMMQYFEWYLPNDGNHWNRLNSDASNLKSKGITAVWIPPAWKAVSQNDVGYGAYDLYDLGEFNQKGTVRTKYGTRSQLQAAVTSLKNNGIQVYGDVVMNHKGGADATEMVRAVEVNPNNRNQEVTGEYTIEAWTRFDFPGRGNTHSSFKWRWYHFDGVDFDQSREFTNRIYKFRGKAWDWEVDTEFGNYDYLMYVDYDYDHPETTNEMRNWGVWYTNTLGLDGFRIDAVKHIKYSFTRDWINHVRSATGKNMFAVAEFWKNDLGAIENYLQKTNWNHSVFDVPLHYNLYNASKSGGNYDMRNIFNGTVVQAHPNHAVTFVDNHDSQPEEALESFVEEWFKPLAYALTLTREQGYPSVFYGDYYGIPTHGVPAMRSKIDPILEARQKYAYGPQHDYLDHPDVIGWTREGDSSHPKSGLATLITDGPGGSKRMYAGLKNAGETWYDITGNRSDTVKIGSDGWGEFHVNDGSVSIYVQK

SEQ ID NO: 30390 - protein, 485 aa, Bacillus sp.
HHDGTNGTIMQYFEWNVPNDGQHWNRLHNNAQNLKNAGITAIWIPPAWKGTSQNDVGYGAYDLYDLGEFNQKGTVRTKYGTKAELERAIRSLKANGIQVYGDVVMNHKGGADFTERVQAVEVNPQNRNQEVSGTYQIEAWTGFNFPGRGNQHSSFKWRWYHFDGTDWDQSRQLANRIYKFRGDGKAWDWEVDTENGNYDYLMYADVDMDHPEVINELNRWGVWYANTLNLDGFRLDAVKHIKFSFMRDWLGHVRGQTGKNLFAVAEYWKNDLGALENYLSKTNWTMSAFDVPLHYNLYQASNSSGNYDMRNLLNGTLVQRHPSHAVTFVDNHDSQPGEALESFVQGWFKPLAYATILTREQGYPQVFYGDYYGIPSDGVPSYRQQIDPLLKARQQYAYGRQHDYFDHWDVIGWTREGNASHPNSGLATIMSDGPGGSKWMYVGRQKAGEVWHDMTGNRSGTVTINQDGWGHFFVNGGSVSVWVKR

SEQ ID NO: 30391 - protein, 485 aa, Bacillus sp.
HHDGTNGTIMQYFEWNVPNDGQHWNRLHNNAQNLKNAGITAIWIPPAWKGTSQNDVGYGAYDLYDLGEFNQKGTVRTKYGTKAELERAIRSLKANGIQVYGDVVMNHKGGADFTERVQAVEVNPQNRNQEVSGTYQIEAWTGFNFPGRGNQHSSFKWRWYHFDGTDWDQSRQLANRIYKFRGDGKAWDWEVDTENGNYDYLMYADVDMDHPEVINELNRWGVWYANTLNLDGFRLDAVKHIKFSFMRDWLGHVRGQTGKNLFAVAEYWKNDLGALENYLSKTNWTMSAFDVPLHYNLYQASNSSGNYDMRNLLNGTLVQRHPSHAVTFVDNHDTQPGEALESFVQGWFKPLAYATILTREQGYPQVFYGDYYGIPSDGVPSYRQQIDPLLKARQNYAYGRQHDYFDHWDVIGWTREGNASHPNSGLATIMSDGPGGSKWMYVGRQKAGEVWHDMTGNRSGTVTINQDGWGHFFVNGGSVSVWVKR

SEQ ID NO: 30392 - protein, 483 aa, Bacillus sp.
HHNGTNGTMMQYFEWYLPNDGNHWNRLNSDASNLKSKGITAVWIPPAWKAVSQNDVGYGAYDLYDLGEFNQKGTVRTKYGTRSQLQAAVTSLKNNGIQVYGDVVMNHKGGADATEMVRAVEVNPNNRNQEVTGEYTIEAWTRFDFPGRGNTHSSFKWRWYHFDGVDFDQSREFTNRIYKFRGKAWDWEVDTEFGNYDYLMYADYDYDHPESTNEMRNWGVWYTNTLGLDGFRIDAVKHIKYSFTRDWINHVRIATGKNMFAVAEFWKNDLGAIENYLQKTNWNHSVFDVPLHYNLYNASKSGGNYDMRNIFNGTVVQRHPSHAVTFVDNHDSQPEEALESFVDEWFKPLAYALTLTREQGYPSVFYGDYYGIPTHGVPAMRSKIDPILEARQKYAYGPQHDYLDHPDVIGWTREGDSSHPKSGLATLITDGPGGSKRMYAGLKNAGETWYDITGNRSDTVKIGSDGWGEFHVNDQSVSIYVQK

SEQ ID NO: 30393 - protein, 485 aa, Bacillus sp.
HHNGTNGTMMQYFEWYLPNDGNHWNRLNSDASNLKSKGITAVWIPPAWKAVSQNDVGYGAYDLYDLGEFNQKGTVRTKYGTRSQLQAAVTSLKNNGIQVYGDVVMNHKGGADATEMVRAVEVNPNNRNQEVTGEYTIEAWTRFDFPGRGNTHSSFKWRWYHFDGVDFDQSREFTNRIYKFRGHGKAWDWEVDTEFGNYDYLMYVDYDYDHPETTNEMRNWGVWYTNTLGLDGFRIDAVKHIKYSFTRDWINHVRSATGKNMFAVAEFWKNDLGAIENYLQKTNWNHSVFDVPLHYNLYNASKSGGNYDMRNIFNGTVVQAHPNHAVTFVDNHDSQPEEALESFVEEWFKPLAYALTLTREQGYPSVFYGDYYGIPTHGVPAMRSKIDPILEARQKYAYGPQHDYLDHPDVIGWTREGDSSHPKSGLATLITDGPGGSKRMYAGLKNAGETWYDITGNRSDTVKIGSDGWGEFHVNDGSVSIYVQK

SEQ ID NO: 30394 - protein, 485 aa, Bacillus sp.
HHDGTNGTIMQYFEWNVPNDGQHWNRLHNNAQNLKNAGITAIWIPPAWKGTSQNDVGYGAYDLYDLGEFNQKGTVRTKYGTKAELERAIRSLKANGIQVYGDVVMNHKGGADFTERVQAVEVNPQNRNQEVSGTYQIEAWTGFNFPGRGNQHSSFKWRWYHFDGTDWDQSRQLANRIYKFRGDGKAWDWEVDTENGNYDYLMYADVDMDHPEVINELRRWGVWYANTLNLDGFRLDAVKHIKFSFMRDWLGHVRGQTGKNLFAVAEYWKNDLGALENYLSKTNWTMSAFDVPLHYNLYQASNSSGNYDMRNLLNGTLVQRHPSHAVTFVDNHDTQPGEALESFVQGWFKPLAYATILTREQGYPQVFYGDYYGIPSDGVPSYRQQIDPLLKARQQYAYGRQHDYFDHWDVIGWTREGNASHPNSGLATIMSDGPGGSKWMYVGRQKAGEVWHDMTGNRSGTVTINQDGWGHFFVNGGSVSVWVKR

SEQ ID NO: 30395 - protein, 483 aa, Bacillus sp.
HHNGTNGTMMQYFEWYLPNDGNHWNRLNSDASNLKSKGITAVWIPPAWKGASQNDVGYGAYDLYDLGEFNQKGTVRTKYGTRSQLQAAVTSLKNNGIQVYGDVVMNHKGGADATEMVRAVEVNPNNRNQEVTGEYTIEAWTRFDFPGRGNTHSSFKWRWYHFDGVDWDQSRNLNNRIYKFRGKAWDWEVDTEFGNYDYLMYADIDYDHPETTNEMRNWGVWYTNTLGLDGFRIDAVKHIKYSFTRDWINHVRSATGKNMFAVAEFWKNDLGAIENYLQKTNWNHSVFDVPLHYNLYNASKSQGNYDMRNIFNGTVVQRHPSHAVTFVDNHDSQPEEALESFVDTWFKPLAYALTLTREQGYPSVFYGDYYGIPTHGVPAMRSKIDPILEARQKYAYGPQHDYLDHPDVIGWTREGDSSHPKSGLATLITDGPGGSKRMYAGLKNAGETWYDITGNRSDTVKIGSDGWGEFHVNGSSVSIYVQK

SEQ ID NO: 30396 - protein, 485 aa, Bacillus sp.
HHDGTNGTIMQYFEWNVPNDGQHWNRLHNNAQNLKNAGITAIWIPPAWKGTSQNDVGYGAYDLYDLGEFNQKGTVRTKYGTKAELERAIRSLKANGIQVYGDVVMNHKGGADFTERVQAVEVNPQNRNQEVSGTYQIEAWTGFNFPGRGNQHSSFKWRWYHFDGTDWDQSRQLANRIYKFRGDGKAWDWEVDTENGNYDYLMYADVDMDHPEVINELNRWGVWYANTLNLDGFRLDAVKHIKFSFMRDWLGHVRGQTGKNLFAVAEYWKNDLGALENYLSKTNWTMSAFDVPLHYNLYQASNSSGNYDMANLLNGTLVQRHPSHAVTFVDNHDTQPGEALESFVQGWFKPLAYATILTREQGYPQVFYGDYYGIPSDGVPSYRQQIDPLLKARQQYAYGRQHDYFDHWDVIGWTREGNASHPNSGLATIMSDGPGGSKWMYVGRQKAGEVWHDMTGNRSGTVTINQDGWGHFFVNGGSVSVWVKR

SEQ ID NO: 30397 - protein, 485 aa, Bacillus sp.
HHDGTNGTIMQYFEWNVPNDGQHWNRLHNNAQNLKNAGITAIWIPPAWKGTSQNDVGYGAYDLYDLGEFNQKGTVRTKYGTKAELERAIRSLKANGIQVYGDVVMNHKGGADFTERVQAVEVNPQNRNQEVSGTYQIEAWTGFNFPGRGNQHSSFKWRWYHFDGTDWDQSRQLANRIYKFRGDGKAWDWEVDTENGNYDYLMYADVDMDHPEVINELNRWGVWYANTLNLDGFRLDAVKHIKFSFMRDWLGHVRGQTGKNLFAVAEYWKNDLGALENYLSKTNWTMSAFDVPLHYNLYQASNSSGNYDMRNLLNGTLVQRHPSHAVTFVDNHDTQPGEALESFVQGWFKPLAYALILTREQGYPQVFYGDYYGIPSDGVPSYRQQIDPLLKARQQYAYGRQHDYFDHWDVIGWTREGNASHPNSGLATIMSDGPGGSKWMYVGRQKAGEVWHDMTGNRSGTVTINQDGWGHFFVNGGSVSVWVKR

SEQ ID NO: 30398 - protein, 485 aa, Bacillus sp.
HHDGTNGTIMQYFEWNVPNDGQHWNRLHNNAQNLKNAGITAIWIPPAWKGTSQNDVGYGAYDLYDLGEFNQKGTVRTKYGTKAELERAIRSLKANGIQVYGDVVMNHKGGADFTERVQAVEVNPQNRNQEVSGTYQIEAWTGFNFPGRGNQHSSFKWRWYHFDGTDWDQSRQLANRIYKFRGDGKAWDWEVDTENGNYDYLMYADVDMDHPEVINELNRWGVWYANTLNLDGFRLDAVKHIKFSFMRDWLGHVRGQTGKNLFAVAEYWKNDLGALENYLSKTNWTMSAFDVPLHYNLYQASNSSGNYDMRNLLNGTLVQRHPSHAVTFVDNHDTQPGEALESFVQGWFKPLAYATILTREQGYPQVFYGDYYGIPSDGVPSYRQQIDPLLKARQQYAYGRQHDYFDHWDIIGWTREGNASHPNSGLATIMSDGPGGSKWMYVGRQKAGEVWHDMTGNRSGTVTINQDGWGHFFVNGGSVSVWVKR

SEQ ID NO: 30399 - protein, 485 aa, Bacillus sp.
HHNGTNGTMMQYFEWYLPNDGNHWNRLNSDASNLKSKGITAVWIPPAWKGTSQNDVGYGAYDLYDLGEFNQKGTVRTKYGTRSQLQAAVTSLKNNGIQVYGDVVMNHKGGADATEMVRAVEVNPNNRNQEVTGEYTIEAWTRFDFPGRGNTHSSFKWRWYHFDGVDWDQSRNLNNRIYKFRGHGKAWDWEVDTEFGNYDYLMYVDYDYDHPETTNEMRNWGVWYTNTLGLDGFRIDAVKHIKYSFTRDWINHVRSATGKNMFAVAEFWKNDLGAIENYLQKTNWNHSVFDVPLHYNLYNASKSQGNYDMRNIFNGTVVQRHPSHAVTFVDNHDSQPEEALESFVDTWFKPLAYALTLTREQGYPSVFYGDYYGIPTHGVPAMRSKIDPILEARQKYAYGPQHDYLDHPDVIGWTREGDSSHPKSGLATLITDGPGGSKRMYAGLKNAGETWYDITGNRSDTVKIGSDGWGEFHVNGSSVSIYVQK

SEQ ID NO: 30400 - protein, 485 aa, Bacillus sp.
HHDGTNGTIMQYFEWNVPNDGQHWNRLHNNAQNLKNAGITAIWIPPAWKGTSQNDVGYGAYDLYDLGEFNQKGTVRTKYGTKAELERAIRSLKANGIQVYGDVVMNHKGGADFTERVQAVEVNPQNRNQEVSGTYQIEAWTGFNFPGRGNQHSSFKWRWYHFDGTDWDQSRQLANRIYKFRGDGKAWDWEVDTENGNYDYLMYADVDMDHPEVINELNRWGVWYANTLNLDGFRLDAVKHIKFSFMRDWLGHVRGQTGKELFAVAEYWKNDLGALENYLSKTNWTMSAFDVPLHYNLYQASNSSGNYDMRNLLNGTLVQRHPSHAVTFVDNHDTQPGEALESFVQGWFKPLAYATILTREQGYPQVFYGDYYGIPSDGVPSYRQQIDPLLKARQQYAYGRQHDYFDHWDVIGWTREGNASHPNSGLATIMSDGPGGSKWMYVGRQKAGEVWHDMTGNRSGTVTINQDGWGHFFVNGGSVSVWVKR

SEQ ID NO: 30401 - protein, 485 aa, Bacillus sp.
HHDGTNGTIMQYFEWNVPNDGQHWNRLHNNAQNLKNAGITAIWIPPAWKGTSQNDVGYGAYDLYDLGEFNQKGTVRTKYGTKAELERAIRSLKANGIQVYGDVVMNHKGGADFTERVQAVEVNPQNRNQEVSGTYQIEAWTGFNFPGRGNTHSSFKWRWYHFDGTDWDQSRQLANRIYKFRGDGKAWDWEVDTENGNYDYLMYADVDMDHPEVINELNRWGVWYANTLNLDGFRLDAVKHIKFSFMRDWLGHVRGQTGKNLFAVAEYWKNDLGALENYLSKTNWTMSAFDVPLHYNLYQASNSSGNYDMRNLLNGTLVQRHPSHAVTFVDNHDTQPGEALESFVQGWFKPLAYATILTREQGYPQVFYGDYYGIPSDGVPSYRQQIDPLLKARQQYAYGRQHDYFDHWDVIGWTREGNASHPNSGLATIMSDGPGGSKWMYVGRQKAGEVWHDMTGNRSGTVTINQDGWGHFFVNGGSVSVWVKR

SEQ ID NO: 30402 - protein, 485 aa, Bacillus sp.
HHDGTNGTIMQYFEWNVPNDGQHWNRLHNNAQNLKNAGITAIWIPPAWKGTSQNDVGYGAYDLYDLGEFNQKGTVRTKYGTKAELERAIRSLKANGIQVYGDVVMNHKGGADFTERVQAVEVNPQNRNQEVSGTYQIEAWTGFNFPGRGNQHSSFKWRWYHFDGVDWDQSRQLANRIYKFRGDGKAWDWEVDTENGNYDYLMYADVDMDHPEVINELNRWGVWYANTLNLDGFRLDAVKHIKFSFMRDWLGHVRGQTGKNLFAVAEYWKNDLGALENYLSKTNWTMSAFDVPLHYNLYQASNSSGNYDMRNLLNGTLVQRHPSHAVTFVDNHDTQPGEALESFVQGWFKPLAYATILTREQGYPQVFYGDYYGIPSDGVPSYRQQIDPLLKARQQYAYGRQHDYFDHWDVIGWTREGNASHPNSGLATIMSDGPGGSKWMYVGRQKAGEVWHDMTGNRSGTVTINQDGWGHFFVNGGSVSVWVKR

SEQ ID NO: 30403 - protein, 485 aa, Bacillus sp.
HHDGTNGTIMQYFEWNVPNDGQHWNRLHNNAQNLKNAGITAIWIPPAWKGTSQNDVGYGAYDLYDLGEFNQKGTVRTKYGTKAELERAIRSLKANGIQVYGDVVMNHKGGADFTERVQAVEVNPQNRNQEVSGTYQIEAWTGFNFPGRGNQHSSFKWRWYHFDGTDWDQSRQLANRIYKFRGDGKAWDWEVDTENGNYDYLMYADVDMDHPEVINELNRWGVWYANTLNLDGFRLDAVKHIKFSFMRDWLGHVRGQTGKNLFAVAEYWKNDLGALENYLSKTNWTMSAFDVPLHYNLYQASNSSGNYDMRNLLNGTLVQRHPSHAVTFVDNHDTQPGEALESFVQGWFKPLAYATILTREQGYPQVFYGDYYGIPSDGVPSYRQQIDPLLKARQQYAYGRQHDYFDHWDVIGWTREGNASHPNSGLATIMSDGPGGSKWMYVGRQKAGEVWHDMTGNRPGTVTINQDGWGHFFVNGGSVSVWVKR

SEQ ID NO: 30404 - protein, 483 aa, Bacillus sp.
HHNGTNGTMMQYFEWYLPNDGNHWNRLNSDASNLKSKGITAVWIPPAWKAASQNDVGYGAYDLYDLGEFNQKGTVRTKYGTRSQLQAAVTSLKNNGIQVYGDVVMNHKGGADATEMVRAVEVNPNNRNQEVTGEYTIEAWTRFDFPGRGNTHSSFKWRWYHFDGVDWDQSRNLNNRIYKFRGKAWDWEVDTEFGNYDYLMYTDYDYDHPESTNEMRNWGVWYTNTLGLDGFRIDAVKHIKYSFTRDWINHVRSATGKNMFAVAEFWKNDLGAIENYLQKTNWNHSVFDVPLHYNLYNASKSGGNYDMRNIFNGTVVQRHPSHAVTFVDNHDSQPEEALESFVEEWFKPLAYALTLTREQGYPSVFYGDYYGIPTHGVPAMRSKIDPILEARQKYAYGPQHDYLDHPDVIGWTREGDSSHPKSGLATLITDGPGGSKRMYAGLKNAGETWYDITGNRSDTVKIGSDGWGEFHVNDGSVSIYVQK

SEQ ID NO: 30405 - protein, 485 aa, Bacillus sp.
HHDGTNGTIMQYFEWNVPNDGQHWNRLHNNAQNLKNAGITAIWIPPAWKGTSQNDVGYGAYDLYDLGEFNQKGTVRTKYGTKAELERAIRSLKANGIQVYGDVVMNHKGGADFTERVQAVEVNPQNRNQEVSGTYQIEAWTGFNFPGRGNQHSSFKWRWYHFDGTDWDQSRQLANRIYKFRGDGKAWDWEVDTENGNYDYLMYADVDMDHPEVINELNRWGVWYANTLNLDGFRLDAVKHIKFSFMRDWLGHVRGQTGKNLFAVAEYWKNDLGALENYLSKTNWTMSAFDVPLHYNLYQASNSSGNYDMRNLLNGTLVQRHPSHAVTFVDNHDTQPGEALESFVQGWFKPLAYATILTREQGYPSVFYGDYYGIPSDGVPSYRQQIDPLLKARQQYAYGRQHDYFDHWDVIGWTREGNASHPNSGLATIMSDGPGGSKWMYVGRQKAGEVWHDMTGNRSGTVTINQDGWGHFFVNGGSVSVWVKR

SEQ ID NO: 30406 - protein, 485 aa, Bacillus sp.
HHNGTNGTMMQYFEWYLPNDGNHWNRLNSDASNLKSKGITAVWIPPAWKAVSQNDVGYGAYDLYDLGEFNQKGTVRTKYGTRSQLQAAVTSLKNNGIQVYGDVVMNHKGGADATEMVRAVEVNPNNRNQEVTGEYTIEAWTRFDFPGRGNTHSSFKWRWYHFDGVDFDQSREFTNRIYKFRGHGKAWDWEVDTEFGNYDYLMYVDYDYDHPETTNEMRNWGVWYTNTLGLDGFRIDAVKHIKYSFTRDWINHVRSATGKNMFAVAEFWKNDLGAIENYLQKTNWNHSVFDVPLHYNLYNASKSGGNYDMRNIFNGTVVQRHPSHAVTFVDNHDSQPEEALESFVEEWFKPLAYALTLTREQGYPSVFYGDYYGIPTHGVPAMRSKIDPILEARQKYAYGPQHDYLDHPDVIGWTREGDSSHPKSGLATLITDGPGGSKRMYAGLKNAGETWYDITGNRSDTVKIGSDGWGEFHVNDGSVSIYVQK

SEQ ID NO: 30407 - protein, 483 aa, Bacillus sp.
HHNGTNGTMMQYFEWYLPNDGNHWNRLNSDASNLKSKGITAVWIPPAWKATSQNDVGYGAYDLYDLGEFNQKGTVRTKYGTRSQLQAAVTSLKNNGIQVYGDVVMNHKGGADATEMVPAVEVNPNNRNQEVTGEYTIEAWTRFDFPGRGNTHSSFKWRWYHFDGVDWDQSRELSNRIYKFRSKAWDWEVDTEFGNYDYLMYADYDMDHPETTNEMRNWGVWYTNTLGLDGFRIDAVKHIKYSFTRDWINHVRSATGKNMFAVAEFWKNDLGAIENYLQKTNWNHSVFDVPLHYNLYNASKSQGNYDMRNIFNGTVVQRHPSHAVTFVDNHDSQPEEALESFVDTWFKPLAYALTLTREQGYPSVFYGDYYGIPTHGVPAMRSKIDPILEARQKYAYGPQHDYLDHPDVIGWTREGDSSHPKSGLATLITDGPGGSKRMYAGLKNAGETWYDITGNRSDTVKIGSDGWGEFHVNGSSVSIYVQK

SEQ ID NO: 30408 - protein, 485 aa, Bacillus sp.
HHDGTNGTIMQYFEWNVPNDGQHWNRLHNNAQNLKNAGITAIWIPPAWKGTSQNDVGYGAYDLYDLGEFNQKGTVRTKYGTKAELERAIRSLKANGIQVYGDVVMNHKGGADFTERVQAVEVNPQNRNQEVSGTYQIEAWTGFNFPGRGNQHSSFKWRWYHFDGTDWDQSRQLANRIYKFRGDGKAWDWEVDTENGNYDYLMYADVDMDHPEVINELNRWGVWYANTLNLDGFRLDAVKHIKFSFMRDWLGHVRGQTGKNLFAVAEYWKNDLGALENYLSKTNWTMSAFDVPLHYNLYQASNSSGNYDMRNLLNGTLVQRHPSHAVTFVDNHDTQPGEALESFVQGWFKPLAYATILTREQGYPQVFYGDYYGIPSDGVPAYRQQIDPLLKARQQYAYGRQHDYFDHWDVIGWTREGNASHPNSGLATIMSDGPGGSKWMYVGRQKAGEVWHDMTGNRSGTVTINQDGWGHFFVNGGSVSVWVKR

SEQ ID NO: 30409 - protein, 483 aa, Bacillus sp.
HHNGTNGTMMQYFEWYLPNDGNHWNRLNSDASNLKSKGITAVWIPPAWKAASQNDVGYGAYDLYDLGEFNQKGTVRTKYGTRSQLQAAVTSLKNNGIQVYGDVVMNHKGGADATEMVRAVEVNPNNRNQEVTGEYTIEAWTRFDFPGRGNTHSSFKWRWYHFDGVDWDQSRNLNNRIYKFRGKAWDWEVDTEFGNYDYLMYTDYDYDHPETTNEMRNWGVWYTNTLGLDGFRIDAVKHIKYSFTRDWINHVRSATGKNMFAVAEFWKNDLGAIENYLQKTNWNHSVFDVPLHYNLYNASKSGGNYDMRNIFNGTVVQRHPSHAVTFVDNHDSQPEEALESFVEEWFKPLAYALTLTREQGYPSVFYGDYYGIPTHGVPAMRSKIDPILEARQKYAYGPQHDYLDHPDVIGWTREGDSSHPKSGLATLITDGPGGSKRMYAGLKNAGETWYDITGNRSDTVKIGSDGWGEFHVNDGSVSIYVQK

SEQ ID NO: 30410 - protein, 483 aa, Bacillus sp.
HHNGTNGTMMQYFEWYLPNDGNHWNRLNSDASNLKSKGITAVWIPPAWKAVSQNDVGYGAYDLYDLGEFNQKGTVRTKYGTRSQLQAAVTSLKNNGIQVYGDVVMNHKGGADATEMVRAVEVNPNNRNQEVTGEYTIEAWTRFDFPGRGNTHSSFKWRWYHFDGVDWDQSRNLTNRIYKFRGKAWDWEVDTEFGNYDYLMYTDYDYDHPETTNEMRNWGVWYTNTLGLDGFRIDAVKHIKYSFTRDWINHVRSATGKNMFAVAEFWKNDLGAIENYLQKTNWNHSVFDVPLHYNLYNASKSGGNYDMRNIFNGTVVQRHPSHAVTFVDNHDSQPEEALESFVEEWFKPLAYALTLTREQGYPSVFYGDYYGIPTHGVPAMRSKIDPILEARQKYAYGPQHDYLDHPDVIGWTREGDSSHPKSGLATLITDGPGGSKRMYAGLKNAGETWYDITGNRSDTVKIGSDGWGEFHVNDGSVSIYVQK

SEQ ID NO: 30411 - protein, 485 aa, Bacillus sp.
HHDGTNGTIMQYFEWNVPNDGQHWNRLHNNAQNLKNAGITAIWIPPAWKGTSQNDVGYGAYDLYDLGEFNQKGTVRTKYGTKAELERAIRALKANGIQVYGDVVMNHKGGADFTERVQAVEVNPQNRNQEVSGTYQIEAWTGFNFPGRGNQHSSFKWRWYHFDGTDWDQSRQLANRIYKFRGDGKAWDWEVDTENGNYDYLMYADVDMDHPEVINELNRWGVWYANTLNLDGFRLDAVKHIKFSFMRDWLGHVRGQTGKNLFAVAEYWKNDLGALENYLSKTNWTMSAFDVPLHYNLYQASNSSGNYDMRNLLNGTLVQRHPSHAVTFVDNHDTQPGEALESFVQGWFKPLAYATILTREQGYPQVFYGDYYGIPSDGVPSYRQQIDPLLKARQQYAYGRQHDYFDHWDVIGWTREGNASHPNSGLATIMSDGPGGSKWMYVGRQKAGEVWHDMTGNRSGTVTINQDGWGHFFVNGGSVSVWVKR

SEQ ID NO: 30412 - protein, 485 aa, Bacillus sp.
HHDGTNGTIMQYFEWNVPNDGQHWNRLHNNAQNLKNAGITAIWIPPAWKGTSQNDVGYGAYDLYDLGEFNQKGTVRTKYGTKAELERAIRSLKANGIQVYGDVVMNHKGGADFTERVQAVEVNPQNRNQEVSGTYQIEAWTGFNFPGRGNQHSSFKWRWYHFDGTDWDQSRQLANRIYKFRGDGKAWDWEVDTENGNYDYLMYADVDMDHPEVINELNRWGVWYANTLNLDGFRLDAVKHIKFSFMRDWLGHVRGQTGKNLFAVAEYWKNDLGALENYLSKTNWTMSVFDVPLHYNLYQASNSSGNYDMRNLLNGTLVQRHPSHAVTFVDNHDTQPGEALESFVQGWFKPLAYATILTREQGYPQVFYGDYYGIPSDGVPSYRQQIDPLLKARQQYAYGRQHDYFDHWDVIGWTREGNASHPNSGLATIMSDGPGGSKWMYVGRQKAGEVWHDMTGNRSGTVTINQDGWGHFFVNGGSVSVWVKR

SEQ ID NO: 30413 - protein, 485 aa, Bacillus sp.
HHDGTNGTMMQYFEWNVPNDGQHWNRLHNNAQNLKNAGITAIWIPPAWKGTSQNDVGYGAYDLYDLGEFNQKGTVRTKYGTKAELERAIRSLKANGIQVYGDVVMNHKGGADFTERVQAVEVNPQNRNQEVSGTYQIEAWTGFNFPGRGNQHSSFKWRWYHFDGTDWDQSRQLANRIYKFRGDGKAWDWEVDTENGNYDYLMYADVDMDHPEVINELNRWGVWYANTLNLDGFRLDAVKHIKFSFMRDWLGHVRGQTGKNLFAVAEYWKNDLGALENYLSKTNWTMSAFDVPLHYNLYQASNSSGNYDMRNLLNGTLVQRHPSHAVTFVDNHDTQPGEALESFVQGWFKPLAYATILTREQGYPQVFYGDYYGIPSDGVPSYRQQIDPLLKARQQYAYGRQHDYFDHWDVIGWTREGNASHPNSGLATIMSDGPGGSKWMYVGRQKAGEVWHDMTGNRSGTVTINQDGWGHFFVNGGSVSVWVKR

SEQ ID NO: 30414 - protein, 483 aa, Bacillus sp.
HHNGTNGTMMQYFEWYLPNDGNHWNRLNSDASNLKSKGITAVWIPPAWKAVSQNDVGYGAYDLYDLGEFNQKGTVRTKYGTRSQLQAAVTSLKNNGIQVYGDVVMNHKGGADATEMVRAVEVNPNNRNQEVTGEYTIEAWTRFDFPGRGNTHSSFKWRWYHFDGVDFDQSREFTNRIYKFRGKAWDWEVDTEFGNYDYLMYVDYDYDHPETTNEMRNWGVWYTNTLGLDGFRIDAVKHIKYSFTRDWINHVRSATGKNMFAVAEFWKNDLGAIENYLQKTNWNHSVFDVPLHYNLYNASKSGGNYDMRNIFNGTVVQRHPSHAVTFVDNHDSQPEEALESFVEEWFKPLAYALTLTREQGYPSVFYGDYYGIPTHGVPAMRSKIDPILEARQKYAYGPQHDYLDHPDVIGWTREGDSSHPKSGLATLITDGPGGSKRMYAGLKNAGETWYDITGNRSDTVKIGSDGWGEFHVNDGSVSIYVQK

SEQ ID NO: 30415 - protein, 485 aa, Bacillus sp.
HHDGTNGTIMQYFEWNVPNDGQHWNRLHNNAQNLKNAGITAIWIPPAWKGTSQNDVGYGAYDLYDLGEFNQKGTVRTKYGTKAELERAIRSLKANGIQVYGDVVMNHKGGADFTERVQAVEVNPQNRNQEVSGTYQIEAWTGFNFPGRGNQHSSFKWRWYHFDGTDWDQSRQFANRIYKFRGDGKAWDWEVDTENGNYDYLMYADVDMDHPEVINELNRWGVWYANTLNLDGFRLDAVKHIKFSFMRDWLGHVRGQTGKNLFAVAEYWKNDLGALENYLSKTNWTMSAFDVPLHYNLYQASNSSGNYDMRNLLNGTLVQRHPSHAVTFVDNHDTQPGEALESFVQGWFKPLAYATILTREQGYPQVFYGDYYGIPSDGVPSYRQQIDPLLKARQQYAYGRQHDYFDHWDVIGWTREGNASHPNSGLATIMSDGPGGSKWMYVGRQKAGEVWHDMTGNRSGTVTINQDGWGHFFVNGGSVSVWVKR

SEQ ID NO: 30416 - protein, 485 aa, Bacillus sp.
HHDGTNGTIMQYFEWNVPNDGQHWNRLHNNAQNLKNAGITAIWIPPAWKGTSQNDVGYGAYDLYDLGEFNQKGTVRTKYGTKAELERAIRSLKANGIQVYGDVVMNHKGGADFTERVQAVEVNPQNRNQEVSGTYQIEAWTGFNFPGRGNQHSSFKWRWYHFDGTDWDQSRQLANRIYKFRGDGKAWDWEVDSENGNYDYLMYADVDMDHPEVINELNRWGVWYANTLNLDGFRLDAVKHIKFSFMRDWLGHVRGQTGKNLFAVAEYWKNDLGALENYLSKTNWTMSAFDVPLHYNLYQASNSSGNYDMRNLLNGTLVQRHPSHAVTFVDNHDTQPGEALESFVQGWFKPLAYATILTREQGYPQVFYGDYYGIPSDGVPSYRQQIDPLLKARQQYAYGRQHDYFDHWDVIGWTREGNASHPNSGLATIMSDGPGGSKWMYVGRQKAGEVWHDMTGNRSGTVTINQDGWGHFFVNGGSVSVWVKR

SEQ ID NO: 30417 - protein, 483 aa, Bacillus sp.
HHNGTNGTMMQYFEWYLPNDGNHWNRLNSDASNLKSKGITAVWIPPAWKGTSQNDVGYGAYDLYDLGEFNQKGTVRTKYGTRSQLQAAVTSLKNNGIQVYGDVVMNHKGGADATEMVRAVEVNPNNRNQEVTGEYTIEAWTRFDFPGRGNTHSSFKWRWYHFDGVDWDQSRNLNNRIYKFRGKAWDWEVDTEFGNYDYLMYVDYDYDHPESTNEMRNWGVWYTNTLGLDGFRIDAVKHIKYSFTRDWINHVRSATGKNMFAVAEFWKNDLGAIENYLQKTNWNHSVFDVPLHYNLYNASKSQGNYDMRNIFNGTVVQRHPSHAVTFVDNHDSQPEEALESFVDTWFKPLAYALTLTREQGYPSVFYGDYYGIPTHGVPAMRSKIDPILEARQKYAYGPQHDYLDHPDVIGWTREGDSSHPKSGLATLITDGPGGSKRMYAGLKNAGETWYDITGNRSDTVKIGSDGWGEFHVNGSSVSIYVQK

SEQ ID NO: 30418 - protein, 483 aa, Bacillus sp.
HHNSTNGTMMQYFEWYLPNDGNHWNRLNSDASNLKSKGIKAVWIPPAWKGASQNDVGYGAYDLYDLGEFNQRGTVRTKYGTRSQLQAAVTSLKNNGINVYGDVVMNHKGGADATEMVRAVEVNPNNRNQEVTGEYTIEAWTRFDFPGRGNTHSSFKWRWYHFDGVDFDQSRRLNNRIYKFRGKAWDWEVDTEFGNYDYLMYADYDMDHPEVVNELKNWGVWYTTTLGLDGFRIDAVKHIKYSFTRDWINHVRSATGKNMFAVAEFWKNDLGAIENYLQKTNWNHSVFDVPLHYNLYNASKSGGNYDMRNIFNGTVVQAHPMHAVTFVDNHDSQPEEALESFVEEWFKPLAYALTLTREQGYPSVFYGDYYGIPTHGVPAMRSKIDPILEARQKYAYGPQHDYLDHPDVIGWTREGDSSHPKSGLATLITDGPGGSKRMYAGLKNAGETWYDITGNRSDTVKIGSDGWGEFHVNDGSVSIYVQK

SEQ ID NO: 30419 - protein, 485 aa, Bacillus sp.
HHDGTNGTIMQYFEWNVPNDGQHWNRLHNNAQNLKNAGITAIWIPPAWKGTSQNDVGYGAYDLYDLGEFNQKGTVRTKYGTKAELERAIRSLKANGIQVYGDVVMNHKGGADFTERVQAVEVNPQNRNQEISGTYQIEAWTGFNFPGRGNQHSSFKWRWYHFDGTDWDQSRQLANRIYKFRGDGKAWDWEVDTENGNYDYLMYADVDMDHPEVINELNRWGVWYANTLNLDGFRLDAVKHIKFSFMRDWLGHVRGQTGKNLFAVAEYWKNDLGALENYLSKTNWTMSAFDVPLHYNLYQASNSSGNYDMRNLLNGTLVQRHPSHAVTFVDNHDTQPGEALESFVQGWFKPLAYATILTREQGYPQVFYGDYYGIPSDGVPSYRQQIDPLLKARQQYAYGRQHDYFDHWDVIGWTREGNASHPNSGLATIMSDGPGGSKWMYVGRQKAGEVWHDMTGNRSGTVTINQDGWGHFFVNGGSVSVWVKR

SEQ ID NO: 30420 - protein, 485 aa, Bacillus sp.
HHDGTNGTIMQYFEWNVPNDGQHWNRLHNNAQNLKNAGITAIWIPPAWKGTSQNDVGYGAYDLYDLGEFNQKGTVRTKYGTKAELERAIRSLKANGIQVYGDVVMNHKGGADFTENVQAVEVNPQNRNQEVSGTYQIEAWTGFNFPGRGNQHSSFKWRWYHFDGTDWDQSRQLANRIYKFRGDGKAWDWEVDTENGNYDYLMYADVDMDHPEVINELNRWGVWYANTLNLDGFRLDAVKHIKFSFMRDWLGHVRGQTGKNLFAVAEYWKNDLGALENYLSKTNWTMSAFDVPLHYNLYQASNSSGNYDMRNLLNGTLVQRHPSHAVTFVDNHDTQPGEALESFVQGWFKPLAYATILTREQGYPQVFYGDYYGIPSDGVPSYRQQIDPLLKARQQYAYGRQHDYFDHWDVIGWTREGNASHPNSGLATIMSDGPGGSKWMYVGRQKAGEVWHDMTGNRSGTVTINQDGWGHFFVNGGSVSVWVKR

SEQ ID NO: 30421 - protein, 485 aa, Bacillus sp.
HHDGTNGTIMQYFEWNVPNDGQHWNRLHNNAQNLKNAGITAIWIPPAWKGTSQNDVGYGAYDLYDLGEFNQKGTVRTKYGTKAELERAIRSLKANGIQVYGDVVMNHKGGADFTERVQAVEVNPQNRNQEVSGTYQIEAWTGFNFPGRGNQHSSFKWRWYHFDGTDWDQSRQLANRIYKFRGDGKAWDWEVDTENGNYDYLMYADVDMDHPEVINELNRWGVWYANTLNLDGFRLDAVKHIKFSFMRDWLGHVRGQTGKNLFAVAEYWKNDLGALENYLSKTNWTMSAFDVPLHYNLYQASNSSGNYDMRNLLNGTLVQRHPSHAVTFVDNHDTQPGEALESFVQGWFKPLAYATILTREQGYPQVFYGDYYGIPSDGVPSYRQQIDPLLKARQQYAYGRQHDYFDHWDVIGWTREGNATHPNSGLATIMSDGPGGSKWMYVGRQKAGEVWHDMTGNRSGTVTINQDGWGHFFVNGGSVSVWVKR

SEQ ID NO: 30422 - protein, 483 aa, Bacillus sp. (in: firmicutes)
HHDGTNGTIMQYFEWNVPNDGQHWNRLHNNAQNLKNAGITAIWIPPAWKGTSQNDVGYGAYDLYDLGEFNQKGTVRTKYGTKAELERAIRSLKANGIQVYGDVVMNHKGGADFTERVQAVEVNPQNRNQEVSGTYQIEAWTGFNFPGRGNQHSSFKWRWYHFDGTDWDQSRQLANRIYKFRGKAWDWEVDTENGNYDYLMYADVDMDHPEVINELNRWGVWYANTLNLDGFRLDAVKHIKFSFMRDWLGHVRGQTGKNLFAIAEFWKNDLGALENYLSKTNWTMSAFDVPLHYNLYQASNSSGNYDMRNLLNGTLVQRHPSHAVTFVDNHDTQPGEALESFVQGWFKPLAYATILTREQGYPSVFYGDYYGIPSDGVPSYRQQIDPLLKARQQYAYGRQHDYFDHWDVIGWTREGNASHPNSGLATIMSDGPGGSKWMYVGRQKAGEVWHDMTGNRSGTVTINQDGWGHFFVNGGSVSVWVKR

SEQ ID NO: 30423 - protein, 485 aa, Bacillus sp.
HHDGTNGTIMQYFEWNVPNDGQHWNRLHNNAQNLKNAGITAIWIPPAWKGTSQNDVGYGAYDLYDLGEFNQKGTVRTKYGTKSELERAIRSLKANGIQVYGDVVMNHKGGADFTERVQAVEVNPQNRNQEVSGTYQIEAWTGFNFPGRGNQHSSFKWRWYHFDGTDWDQSRQLANRIYKFRGDGKAWDWEVDTENGNYDYLMYADVDMDHPEVINELNRWGVWYANTLNLDGFRLDAVKHIKFSFMRDWLGHVRGQTGKNLFAVAEYWKNDLGALENYLSKTNWTMSAFDVPLHYNLYQASNSSGNYDMRNLLNGTLVQRHPSHAVTFVDNHDTQPGEALESFVQGWFKPLAYATILTREQGYPQVFYGDYYGIPSDGVPSYRQQIDPLLKARQQYAYGRQHDYFDHWDVIGWTREGNASHPNSGLATIMSDGPGGSKWMYVGRQKAGEVWHDMTGNRSGTVTINQDGWGHFFVNGGSVSVWVKR

SEQ ID NO: 30424 - protein, 484 aa, Bacillus sp. (in: firmicutes)
HHDGTNGTMMQYFEWNVPNDGQHWNRLHNNAQNLKNAGITAIWIPPAWKGTSQNDVGYGAYDLYDLGEFNQKGTVRTKYGTKAELERAIRSLKANGIQVYGDVVMNHKGGADFTERVQAVEVNPQNRNQEVSGTYQIEAWTGFNFPGRGNQHSSFKWRWYHFDGTDWDQSRQLANRIYKFRGKKAWDWEVDTEFGNYDYLMYADVDMDHPEVINELNRWGVWYANTLNLDGFRLDAVKHIKFSFMRDWLGHVRGQTGKNLFAVAEYWKNDLGALENYLSKTNWTMSAFDVPLHYNLYQASNSSGNYDMRNLLNGTLVQRHPSHAVTFVDNHDTQPGEALESFVQGWFKPLAYATILTREQGYPSVFYGDYYGIPSDGVPSYRQQIDPLLKARQQYAYGRQHDYFDHWDVIGWTREGNASHPNSGLATIMSDGPGGSKWMYVGRQKAGEVWHDMTGNRSGTVTINQDGWGHFFVNGGSVSVWVKR

SEQ ID NO: 30425 - protein, 483 aa, Bacillus sp. (in: firmicutes)
HHDGTNGTIMQYFEWNVPNDGQHWNRLHNNAQNLKNAGITAIWIPPAWKGTSQNDVGYGAYDLYDLGEFNQKGTVRTKYGTKAELERAIRSLKANGIQVYGDVVMNHKGGADFTERVQAVEVNPQNRNQEVSGTYQIEAWTGFNFPGRGNQHSSFKWRWYHFDGTDWDQSRQLANRIYKFRGKAWDWEVDTENGNYDYLMYADVDMDHPEVINELNRWGVWYANTLNLDGFRLDAVKHIKFSFMRDWLGHVRGQTGKNLFATAEFWKNDLGALENYLSKTNWTMSAFDVPLHYNLYQASNSSGNYDMRNLLNGTLVQRHPSHAVTFVDNHDTQPGEALESFVQGWFKPLAYATILTREQGYPSVFYGDYYGIPSDGVPSYRQQIDPLLKARQQYAYGRQHDYFDHWDVIGWTREGNASHPNSGLATIMSDGPGGSKWMYVGRQKAGEVWHDMTGNRSGTVTINQDGWGHFFVNGGSVSVWVKR

SEQ ID NO: 30426 - protein, 485 aa, Bacillus sp.
HHDGTNGTIMQYFEWNVPNDGQHWNRLHNNAQNLKNAGITAIWIPPAWKGTSQNDVGYGAYDLYDLGEFNQKGTVRTKYGTKAELERAIRSLKANGIQVYGDVVMNHKGGADFTERVQAVEVNPQNRNQEVSGTYQIEAWTGFNFPGRGNQHSSFKWRWYHFDGTDWDQSRQLANRIYKFRGDGKAWDWEVDTENGNYDYLMYADVDMDHPEVVNELNRWGVWYANTLNLDGFRLDAVKHIKFSFMRDWLGHVRGQTGKNLFAVAEYWKNDLGALENYLSKTNWTMSAFDVPLHYNLYQASNSSGNYDMRNLLNGTLVQRHPSHAVTFVDNHDTQPGEALESFVQGWFKPLAYATILTREQGYPQVFYGDYYGIPSDGVPSYRQQIDPLLKARQQYAYGRQHDYFDHWDVIGWTREGNASHPNSGLATIMSDGPGGSKWMYVGRQKAGEVWHDMTGNRSGTVTINQDGWGHFFVNGGSVSVWVKR

SEQ ID NO: 30427 - protein, 485 aa, Bacillus sp.
HHDGTNGTIMQYFEWNVPNDGQHWNRLRNNAQNLKNAGITAIWIPPAWKGTSQNDVGYGAYDLYDLGEFNQKGTVRTKYGTKAELERAIRSLKANGIQVYGDVVMNHKGGADFTERVQAVEVNPQNRNQEVSGTYQIEAWTGFNFPGRGNQHSSFKWRWYHFDGTDWDQSRQLANRIYKFRGDGKAWDWEVDTENGNYDYLMYADVDMDHPEVINELNRWGVWYANTLNLDGFRLDAVKHIKFSFMRDWLGHVRGQTGKNLFAVAEYWKNDLGALENYLSKTNWTMSAFDVPLHYNLYQASNSSGNYDMRNLLNGTLVQRHPSHAVTFVDNHDTQPGEALESFVQGWFKPLAYATILTREQGYPQVFYGDYYGIPSDGVPSYRQQIDPLLKARQQYAYGRQHDYFDHWDVIGWTREGNASHPNSGLATIMSDGPGGSKWMYVGRQKAGEVWHDMTGNRSGTVTINQDGWGHFFVNGGSVSVWVKR

SEQ ID NO: 30428 - protein, 485 aa, Bacillus sp.
HHDGTNGTIMQYFEWNVPNDGQHWNRLHNNAQNLKNRGITAIWIPPAWKGTSQNDVGYGAYDLYDLGEFNQKGTVRTKYGTKAELERAIRSLKANGIQVYGDVVMNHKGGADFTERVQAVEVNPQNRNQEVSGTYQIEAWTGFNFPGRGNQHSSFKWRWYHFDGTDWDQSRQLANRIYKFRGDGKAWDWEVDTENGNYDYLMYADVDMDHPEVINELNRWGVWYANTLNLDGFRLDAVKHIKFSFMRDWLGHVRGQTGKNLFAVAEYWKNDLGALENYLSKTNWTMSAFDVPLHYNLYQASNSSGNYDMRNLLNGTLVQRHPSHAVTFVDNHDTQPGEALESFVQGWFKPLAYATILTREQGYPQVFYGDYYGIPSDGVPSYRQQIDPLLKARQQYAYGRQHDYFDHWDVIGWTREGNASHPNSGLATIMSDGPGGSKWMYVGRQKAGEVWHDMTGNRSGTVTINQDGWGHFFVNGGSVSVWVKR

SEQ ID NO: 30429 - protein, 485 aa, Bacillus sp.
HHNGTNGTMMQYFEWYLPNDGNHWNRLNSDASNLKSKGITAVWIPPGWKGASQNDVGYGAYDLYDLEEFNQKGTVRTKYGTRSQLQAAVTSLKNNGIQVYGDVVMNHKGGTHATEMVRAVEVNPNNRNQEVTGEYTIEAWTRFDFPGRGNTHSSFKWRWYHFDGVDWDQSRRLNNRIYKFRGHGKAWDWEVDTEFGNYDYLMYADYDMDHPEVVNELRNWGVWYTNTLGLDGFRIDAVKHIKYSLTRDWINHVRSATGKNMFAVAEFWKNDLGAIENYLQKTNWNHSVFDVPLHYNLYNASKSGGNYDMRNIFNGTVVQRHPSHAVTFVDNHDSQPEEALESFVEPWFKPLAYALTLTREQGYPSVFYGDYYGIPTHGVPAMRSKIDPILEARQKYAYGPQHDYLDHPDVIGWTREGDSSHPKSGLATLITDGPGGSKRMYAGLKNAGETWYDITGNRSDTVKIGSDGWGEFHVNGTSVSIYVQK

SEQ ID NO: 30430 - protein, 485 aa, Bacillus sp.
HHNGTNGTMMQYFEWYLPNDGNHWNRLNSDASNLKSKGITAVWIPPAWKAVSQNDVGYGAYDLYDLGEFNQKGTVRTKYGTRSQLQAAVTSLKNNGIQVYGDVVMNHKGGADATEMVRAVEVNPNNRNQEVTGEYTIEAYTRFDFPGRGNTHSSFKWRWYHFDGVDFDQSREFTNRIYKFRGHGKAWDWEVDTEFGNYDYLMYADYDYDHPESTNEMRNWGVWYTNTLGLDGFRIDAVKHIKYSFTRDWINHVRSATGKNMFAVAEFWKNDLGAIENYLQKTNWNHSVFDVPLHYNLYNASKSGGNYDMRNIFNGTVVQRHPSHAVTFVDNHDSQPEEALESFVEEWFKPLAYALTLTREQGYPSVFYGDYYGIPTHGVPAMRSKIDPILEARQKYAYGPQHDYLDHPDVIGWTREGDSSHPKSGLATLITDGPGGSKRMYAGLKNAGETWYDITGNRSDTVKIGSDGWGEFHVNDGSVSIYVQK

SEQ ID NO: 30431 - protein, 483 aa, Bacillus sp.
HHNGTNGTMMQYFEWYLPNDGNHWNRLNSDASNLKSKGITAVWIPPAWKGTSQNDVGYGAYDLYDLGEFNQKGTVRTKYGTRSQLQAAVTSLKNNGIQVYGDVVMNHKGGADATEMVRAVEVNPNNRNQEVTGEYTIEAWTRFDFPGRGNTHSSFKWRWYHFDGVDWDQSRNLNNRIYKFRGKAWDWEVDTEFGNYDYLMYVDYDYDHPETTNEMRNWGVWYTNTLGLDGFRIDAVKHIKYSFTRDWINHVRSATGKNMFAVAEFWKNDLGAIENYLQKTNWNHSVFDVPLHYNLYNASKSQGNYDMRNIFNGTVVQRHPSHAVTFVDNHDSQPEEALESFVDTWFKPLAYALTLTREQGYPSVFYGDYYGIPTHGVPAMRSKIDPILEARQKYAYGPQHDYLDHPDVIGWTREGDSSHPKSGLATLITDGPGGSKRMYAGLKNAGETWYDITGNRSDTVKIGSDGWGEFHVNGSSVSIYVQK

SEQ ID NO: 30432 - protein, 485 aa, Bacillus sp.
HHDGTNGTIMQYFEWNVPNDGQHWNRLHNNAQNLKNAGITAIWIPPAWKGTSQNDVGYGAYDLYDLGEFNQKGTVRTKYGTKAELERAIRSLKANGIQVYGDVVMNHKGGADFTERVQAVEVNPQNRNQEVSGTYQIEAWTGFNFPGRGNQHSSFKWRWYHFDGTDWDQSRQLANRIYKFRGDGKAWDWEVDTENGNYDYLMYADVDMDHPEVINELNRWGVWYANTLNLDGFRLDAVKHIKFSFMRDWLGHVRGQTGKNLFAVAEYWKNDLGALENYLSKTNWTMSAFDVPLHYNLYQASNSSGNYDMRNLLNGTLVQRHPSHAVTFVDNHDTQPGEALESFVQGWFKPLAYATILTREQGYPQVFYGDYYGIPTDGVPSYRQQIDPLLKARQQYAYGRQHDYFDHWDVIGWTREGNASHPNSGLATIMSDGPGGSKWMYVGRQKAGEVWHDMTGNRSGTVTINQDGWGHFFVNGGSVSVWVKR

SEQ ID NO: 30433 - protein, 485 aa, Bacillus sp.
HHNSTNGTMMQYFEWYLPNDGNHWNRLNSDASNLKSKGIKAVWIPPAWKGASQNDVGYGAYDLYDLGEFNQRGTVRTKYGTRSQLQAAVTSLKNNGINVYGDVVMNHKGGADATEMVRAVEVNPNNRNQEVTGEYTIEAWTRFDFPGRGNTHSSFKWRWYHFDGVDFDQSRRLNNRIYKFRGHGKAWDWEVDTEFGNYDYLMYADYDMDHPEVVNELKNWGVWYTTTLGLDGFRIDAVKHIKYSFTRDWINHVRSATGKNMFAVAEFWKNDLGAIENYLQKTNWNHSVFDVPLHYNLYNASKSGGNYDMRNIFNGTVVQAHPMHAVTFVDNHDSQPEEALESFVEEWFKPLAYALTLTREQGYPSVFYGDYYGIPTHGVPAMRSKIDPILEARQKYAYGPQHDYLDHPDVIGWTREGDSSHPKSGLATLITDGPGGSKRMYAGLKNAGETWYDITGNRSDTVKIGSDGWGEFHVNDGSVSIYVQK

SEQ ID NO: 30434 - protein, 485 aa, Bacillus sp.
HHNGTNGTMMQYFEWYLPNDGNHWNRLNSDASNLKSKGITAVWIPPAWKAVSQNDVGYGAYDLYDLGEFNQKGTVRTKYGTRSQLQAAVTSLKNNGIQVYGDVVMNHKGGADATEMVRAVEVNPNNRNQEVTGEYTIEAWTRFDFPGRGNTHSSFKWRWYHFDGVDFDQSREFTNRIYKFRGHGKAWDWEVDTEFGNYDYLMYADYDYDHPESTNEMRNWGVWYTNTLGLDGFRIDAVKHIKYSFTRDWINHVRSATGKNMFAVAEFWKNDLGAIENYLQKTNWNHSVFDVPLHYNLYNASKSGGNYDMRNIFNGTVVQRHPSHAVTFVDNHDSQPEEALESFVDEWFKPLAYALTLTREQGYPSVFYGDYYGIPTHGVPAMRSKIDPILEARQKYAYGPQHDYLDHPDVIGWTREGDSSHPKSGLATLITDGPGGSKRMYAGLKNAGETWYDITGNRSDTVKIGSDGWGEFHVNKSSVSIYVQK

SEQ ID NO: 30435 - protein, 483 aa, Bacillus sp.
HHNGTNGTMMQYFEWYLPNDGNHWNRLNSDASNLKSKGITAVWIPPAWKAASQNDVGYGAYDLYDLGEFNQKGTVRTKYGTRSQLQAAVTSLKNNGIQVYGDVVMNHKGGADATEMVRAVEVNPNNRNQEVTGEYTIEAWTRFDFPGRGNTHSSFKWRWYHFDGVDWDQSRDLQNRIYKFRGKAWDWEVDTEFGNYDYLMYADYDYDHPESTNEMRNWGVWYTNTLGLDGFRIDAVKHIKYSFTRDWINHVRSATGKNMFAVAEFWKNDLGAIENYLQKTNWNHSVFDVPLHYNLYNASKSGGNYDMRNIFNGTVVQRHPSHAVTFVDNHDSQPEEALESFVETWFKPLAYALTLTREQGYPSVFYGDYYGIPTHGVPAMRSKIDPILEARQKYAYGPQHDYLDHPDVIGWTREGDSSHPKSGLATLITDGPGGSKRMYAGLKNAGETWYDITGNRSDTVKIGSDGWGEFHVNKASVSIYVQK

SEQ ID NO: 30436 - protein, 483 aa, Bacillus sp.
HHNGTNGTMMQYFEWYLPNDGNHWNRLNSDASNLKSKGITAVWIPPAWKAVSQNDVGYGAYDLYDLGEFNQKGTVRTKYGTRSQLQAAVTSLKNNGIQVYGDVVMNHKGGADATEMVRAVEVNPNNRNQEVTGEYTIEAWTRFDFPGRGNTHSSFKWRWYHFDGVDWDQSRNLTNRIYKFRGKAWDWEVDTEFGNYDYLMYTDYDYDHPESTNEMRNWGVWYTNTLGLDGFRIDAVKHIKYSFTRDWINHVRSATGKNMFAVAEFWKNDLGAIENYLQKTNWNHSVFDVPLHYNLYNASKSGGNYDMRNIFNGTVVQRHPSHAVTFVDNHDSQPEEALESFVEEWFKPLAYALTLTREQGYPSVFYGDYYGIPTHGVPAMRSKIDPILEARQKYAYGPQHDYLDHPDVIGWTREGDSSHPKSGLATLITDGPGGSKRMYAGLKNAGETWYDITGNRSDTVKIGSDGWGEFHVNDGSVSIYVQK

SEQ ID NO: 30437 - protein, 485 aa, Bacillus sp.
HHNGTNGTMMQYFEWYLPNDGNHWNRLNSDASNLKSKGITAVWIPPAWKATSQNDVGYGAYDLYDLGEFNQKGTVRTKYGTRSQLQAAVTSLKNNGIQVYGDVVMNHKGGADATEMVRAVEVNPNNRNQEVTGEYTIEAWTRFDFPGRGNTHSSFKWRWYHFDGVDWDQSRELSNRIYKFRGHGKAWDWEVDTEFGNYDYLMYADYDYDHPETTNEMRNWGVWYTNTLGLDGFRIDAVKHIKYSFTRDWINHVRSATGKNMFAVAEFWKNDLGAIENYLQKTNWNHSVFDVPLHYNLYNASKSQGNYDMRNIFNGTVVQRHPSHAVTFVDNHDSQPEEALESFVDTWFKPLAYALTLTREQGYPSVFYGDYYGIPTHGVPAMRSKIDPILEARQKYAYGPQHDYLDHPDVIGWTREGDSSHPKSGLATLITDGPGGSKRMYAGLKNAGETWYDITGNRSDTVKIGSDGWGEFHVNGSSVSIYVQK

SEQ ID NO: 30438 - protein, 485 aa, Bacillus sp.
HHNGTNGTMMQYFEWYLPNDGNHWNRLNSDASNLKSKGITAVWIPPAWKAASQNDVGYGAYDLYDLGEFNQKGTVRTKYGTRSQLQAAVTSLKNNGIQVYGDVVMNHKGGADATEMVRAVEVNPNNRNQEVTGEYTIEAWTRFDFPGRGNTHSSFKWRWYHFDGVDWDQSRNLNNRIYKFRGHGKAWDWEVDTEFGNYDYLMYTDYDYDHPESTNEMRNWGVWYTNTLGLDGFRIDAVKHIKYSFTRDWINHVRSATGKNMFAVAEFWKNDLGAIENYLQKTNWNHSVFDVPLHYNLYNASKSGGNYDMRNIFNGTVVQRHPSHAVTFVDNHDSQPEEALESFVEEWFKPLAYALTLTREQGYPSVFYGDYYGIPTHGVPAMRSKIDPILEARQKYAYGPQHDYLDHPDVIGWTREGDSSHPKSGLATLITDGPGGSKRMYAGLKNAGETWYDITGNRSDTVKIGSDGWGEFHVNDGSVSIYVQK

SEQ ID NO: 30439 - protein, 485 aa, Bacillus sp.
HHDGTNGTIMQYFEWNVPNDGNHWNRLHNNAQNLKNAGITAIWIPPAWKGTSQNDVGYGAYDLYDLGEFNQKGTVRTKYGTKAELERAIRSLKANGIQVYGDVVMNHKGGADFTERVQAVEVNPQNRNQEVSGTYQIEAWTGFNFPGRGNQHSSFKWRWYHFDGTDWDQSRQLANRIYKFRGDGKAWDWEVDTENGNYDYLMYADVDMDHPEVINELNRWGVWYANTLNLDGFRLDAVKHIKFSFMRDWLGHVRGQTGKNLFAVAEYWKNDLGALENYLSKTNWTMSAFDVPLHYNLYQASNSSGNYDMRNLLNGTLVQRHPSHAVTFVDNHDTQPGEALESFVQGWFKPLAYATILTREQGYPQVFYGDYYGIPSDGVPSYRQQIDPLLKARQQYAYGRQHDYFDHWDVIGWTREGNASHPNSGLATIMSDGPGGSKWMYVGRQKAGEVWHDMTGNRSGTVTINQDGWGHFFVNGGSVSVWVKR

SEQ ID NO: 30440 - protein, 483 aa, Bacillus sp.
HHNGTNGTMMQYFEWYLPNDGNHWNRLNSDASNLKSKGITAVWIPPGWKGASQNDVGYGAYDLYDLEEFNQKGTVRTKYGTRSQLQAAVTSLKNNGIQVYGDVVMNHKGGTHATEMVRAVEVNPNNRNQEVTGEYTIEAWTRFDFPGRGNTHSSFKWRWYHFDGVDWDQSRRLNNRIYKFRGKAWDWEVDTEFGNYDYLMYADYDMDHPEVVNELRNWGVWYTNTLGLDGFRIDAVKHIKYSLTRDWINHVRSATGKNMFAVAEFWKNDLGAIENYLQKTNWNHSVFDVPLHYNLYNASKSGGNYDMRNIFNGTVVQRHPSHAVTFVDNHDSQPEEALESFVEPWFKPLAYALTLTREQGYPSVFYGDYYGIPTHGVPAMRSKIDPILEARQKYAYGPQHDYLDHPDVIGWTREGDSSHPKSGLATLITDGPGGSKRMYAGLKNAGETWYDITGNRSDTVKIGSDGWGEFHVNGTSVSIYVQK

SEQ ID NO: 30441 - protein, 485 aa, Bacillus sp.
HHNGTNGTMMQYFEWYLPNDGNHWNRLNSDASNLKSKGITAVWIPPAWKAASQNDVGYGAYDLYDLGEFNQKGTVRTKYGTRSQLQAAVTSLKNNGIQVYGDVVMNHKGGADATEMVRAVEVNPNNRNQEVTGEYTIEAWTRFDFPGRGNTHSSFKWRWYHFDGVDWDQSRDLQNRIYKFRGHGKAWDWEVDTEFGNYDYLMYADYDYDHPESTNEMRNWGVWYTNTLGLDGFRIDAVKHIKYSFTRDWINHVRSATGKNMFAVAEFWKNDLGAIENYLQKTNWNHSVFDVPLHYNLYNASKSGGNYDMRNIFNGTVVQRHPSHAVTFVDNHDSQPEEALESFVETWFKPLAYALTLTREQGYPSVFYGDYYGIPTHGVPAMRSKIDPILEARQKYAYGPQHDYLDHPDVIGWTREGDSSHPKSGLATLITDGPGGSKRMYAGLKNAGETWYDITGNRSDTVKIGSDGWGEFHVNKASVSIYVQK

SEQ ID NO: 30442 - protein, 485 aa, Bacillus sp.
HHNGTNGTMMQYFEWYLPNDGNHWNRLNSDASNLKSKGITAVWIPPAWKAVSQNDVGYGAYDLYDLGEFNQKGTVRTKYGTRSQLQAAVTSLKNNGIQVYGDVVMNHKGGADATEMVRAVEVNPNNRNQEVTGEYTIEAWTRFDFPGRGNTHSSFKWRWYHFDGVDWDQSRNLTNRIYKFRGHGKAWDWEVDTEFGNYDYLMYTDYDYDHPESTNEMRNWGVWYTNTLGLDGFRIDAVKHIKYSFTRDWINHVRSATGKNMFAVAEFWKNDLGAIENYLQKTNWNHSVFDVPLHYNLYNASKSGGNYDMRNIFNGTVVQRHPSHAVTFVDNHDSQPEEALESFVEEWFKPLAYALTLTREQGYPSVFYGDYYGIPTHGVPAMRSKIDPILEARQKYAYGPQHDYLDHPDVIGWTREGDSSHPKSGLATLITDGPGGSKRMYAGLKNAGETWYDITGNRSDTVKIGSDGWGEFHVNDGSVSIYVQK

SEQ ID NO: 30443 - protein, 485 aa, Bacillus sp.
HHNGTNGTMMQYFEWYLPNDGNHWNRLNSDASNLKSKGITAVWIPPAWKAVSQNDVGYGAYDLYDLGEFNQKGTVRTKYGTRSQLQAAVTSLKNNGIQVYGDVVMNHKGGADATEMVRAVEVNPNNRNQEVTGEYTIEAWTRFDFPGRGNTHSSFKWRWYHFDGVDFDQSREFTNRIYKFRGHGKAWDWEVDTEFGNYDYLMYADYDYDHPESTNEMRNWGVWYTNTLGLDGFRIDAVKHIKYSFTRDWINHVRIATGKNMFAVAEFWKNDLGAIENYLQKTNWNHSVFDVPLHYNLYNASKSGGNYDMRNIFNGTVVQRHPSHAVTFVDNHDSQPEEALESFVDEWFKPLAYALTLTREQGYPSVFYGDYYGIPTHGVPAMRSKIDPILEARQKYAYGPQHDYLDHPDVIGWTREGDSSHPKSGLATLITDGPGGSKRMYAGLKNAGETWYDITGNRSDTVKIGSDGWGEFHVNDQSVSIYVQK

SEQ ID NO: 30444 - protein, 483 aa, Bacillus sp. (in: firmicutes)
HHDGTNGTMMQYFEWNVPNDGQHWNRLHNNAQNLKNAGITAIWIPPAWKGTSQNDVGYGAYDLYDLGEFNQKGTVRTKYGTKAELERAIRSLKANGIQVYGDVVMNHKGGADFTERVQAVEVNPQNRNQEVSGTYQIEAWTGFNFPGRGNQHSSFKWRWYHFDGTDWDQSRQLANRIYKFRGKAWDWEVDTEFGNYDYLMYADVDMDHPEVINELNRWGVWYANTLNLDGFRLDAVKHIKFSFMRDWLGHVRGQTGKNLFAVAEYWKNDLGALENYLSKTNWTMSAFDVPLHYNLYQASNSSGNYDMRNLLNGTLVQRHPSHAVTFVDNHDTQPGEALESFVQGWFKPLAYATILTREQGYPSVFYGDYYGIPSDGVPSYRQQIDPLLKARQQYAYGRQHDYFDHWDVIGWTREGNASHPNSGLATIMSDGPGGSKWMYVGRQKAGEVWHDMTGNRSGTVTINQDGWGHFFVNGGSVSVWVKR

SEQ ID NO: 30445 - protein, 485 aa, Bacillus sp.
HHDGTNGTIMQYFEWNLPNDGQHWNRLHNNAQNLKNAGITAIWIPPAWKGTSQNDVGYGAYDLYDLGEFNQKGTVRTKYGTKAELERAIRSLKANGIQVYGDVVMNHKGGADFTERVQAVEVNPQNRNQEVSGTYQIEAWTGFNFPGRGNQHSSFKWRWYHFDGTDWDQSRQLANRIYKFRGDGKAWDWEVDTENGNYDYLMYADVDMDHPEVINELNRWGVWYANTLNLDGFRLDAVKHIKFSFMRDWLGHVRGQTGKNLFAVAEYWKNDLGALENYLSKTNWTMSAFDVPLHYNLYQASNSSGNYDMRNLLNGTLVQRHPSHAVTFVDNHDTQPGEALESFVQGWFKPLAYATILTREQGYPQVFYGDYYGIPSDGVPSYRQQIDPLLKARQQYAYGRQHDYFDHWDVIGWTREGNASHPNSGLATIMSDGPGGSKWMYVGRQKAGEVWHDMTGNRSGTVTINQDGWGHFFVNGGSVSVWVKR

SEQ ID NO: 30446 - protein, 485 aa, Bacillus sp.
HHDGTNGTIMQYFEWNVPNDGQHWNRLHNNAQNLKNAGITAIWIPPAWKGTSQNDVGYGAYDLYDLGEFNQKGTVRTKYGTKAELERAIRSLKANGIQVYGDVVMNHKGGADFTERVQAVEVNPQNRNQEVSGTYQIEAWTGFNFPGRGNQHSSFKWRWYHFDGTDWDQSRQLANRIYKFRGDGKAWDWEVDTENGNYDYLMYADVDMDHPEVINELNRWGVWYANTLNLDGFRLDAVKHIKFSFMRDWLGHVRGQTGKNLFAVAEYWKNDLGALENYLSKTNWTMSAFDVPLHYNLYQASNSGGNYDMRNLLNGTLVQRHPSHAVTFVDNHDTQPGEALESFVQGWFKPLAYATILTREQGYPQVFYGDYYGIPSDGVPSYRQQIDPLLKARQQYAYGRQHDYFDHWDVIGWTREGNASHPNSGLATIMSDGPGGSKWMYVGRQKAGEVWHDMTGNRSGTVTINQDGWGHFFVNGGSVSVWVKR

SEQ ID NO: 30447 - protein, 485 aa, Bacillus sp.
HHDGTNGTIMQYFEWNVPNDGQHWNRLHNNAQNLKNAGITAIWIPPAWKGTSQNDVGYGAYDLYDLGEFNQKGTVRTKYGTKAELERAIRSLKANGIQVYGDVVMNHKGGADFTERVQAVEVNPQNRNQEVSGTYQIEAWTGFNFPGRGNQHSSFKWRWYHFDGTDWDQSRQLANRIYKFRGDGKAWDWEVDTENGNYDYLMYADVDMDHPEVINELNRWGVWYANTLNLDGFRLDAVKHIKFSFMRDWLGHVRGQTGKNLFAVAEYWKNDLGALENYLSKTNWTMSAFDVPLHYNLYQASNSSGNYDMRNLLNGTLVQRHPSHAVTFVDNHDTQPGEALESFVQGWFKPLAYATILTREQGYPQVFYGDYYGIPSDGVPSYRAQIDPLLKARQQYAYGRQHDYFDHWDVIGWTREGNASHPNSGLATIMSDGPGGSKWMYVGRQKAGEVWHDMTGNRSGTVTINQDGWGHFFVNGGSVSVWVKR

SEQ ID NO: 30448 - protein, 485 aa, Bacillus sp.
HHNGTNGTMMQYFEWYLPNDGNHWNRLNSDASNLKSKGITAVWIPPAWKGASQNDVGYGAYDLYDLGEFNQKGTVRTKYGTRSQLQAAVTSLKNNGIQVYGDVVMNHKGGADATEMVRAVEVNPNNRNQEVTGEYTIEAWTRFDFPGRGNTHSSFKWRWYHFDGVDWDQSRNLNNRIYKFRGHGKAWDWEVDTEFGNYDYLMYADIDYDHPETTNEMRNWGVWYTNTLGLDGFRIDAVKHIKYSFTRDWINHVRSATGKNMFAVAEFWKNDLGAIENYLQKTNWNHSVFDVPLHYNLYNASKSQGNYDMRNIFNGTVVQRHPSHAVTFVDNHDSQPEEALESFVDTWFKPLAYALTLTREQGYPSVFYGDYYGIPTHGVPAMRSKIDPILEARQKYAYGPQHDYLDHPDVIGWTREGDSSHPKSGLATLITDGPGGSKRMYAGLKNAGETWYDITGNRSDTVKIGSDGWGEFHVNGSSVSIYVQK

SEQ ID NO: 30449 - protein, 483 aa, Bacillus sp.
HHNGTNGTMMQYFEWYLPNDGNHWNRLNSDASNLKSKGITAVWIPPAWKGASQNDVGYGAYDLYDLGEFNQKGTVRTKYGTRSQLQAAVTSLKNNGIQVYGDVVMNHKGGADATEMVRAVEVNPNNRNQEVTGEYTIEAWTRFDFPGRGNTHSSFKWRWYHFDGVDWDQSRKLNNRIYKFRGKAWDWEVDTEFGNYDYLMYVDYDYDHPETTNEMRNWGVWYTNTLGLDGFRIDAVKHIKYSFTRDWINHVRIATGKNMFAVAEFWKNDLGAIENYLQKTNWNHSVFDVPLHYNLYNASKSGGNYDMRNIFNGTVVQRHPSHAVTFVDNHDSQPEEALESFVDEWFKPLAYALTLTREQGYPSVFYGDYYGIPTHGVPAMRSKIDPILEARQKYAYGPQHDYLDHPDVIGWTREGDSSHPKSGLATLITDGPGGSKRMYAGLKNAGETWYDITGNRSDTVKIGSDGWGEFHVNDQSVSIYVQK

SEQ ID NO: 30450 - protein, 485 aa, Bacillus sp.
HHDGTNGTIMQYFEWNVPNDGQHWNRLHNNAQNLKNAGITAIWIPPAWKGTSQNDVGYGAYDLYDLGEFNQKGTVRTKYGTKAELERAIRSLKANGIQVYGDVVMNHKGGADFTERVQAVEVNPQNRNQEVSGTYQIEAWTGFNFPGRGNQHSSFKWRWYHFDGTDWDQSRQLANRIYKFRGDGKAWDWEVDTENGNYDYLMYADVDMDHPEVINELNRWGEWYANTLNLDGFRLDAVKHIKFSFMRDWLGHVRGQTGKNLFAVAEYWKNDLGALENYLSKTNWTMSAFDVPLHYNLYQASNSSGNYDMRNLLNGTLVQRHPSHAVTFVDNHDTQPGEALESFVQGWFKPLAYATILTREQGYPQVFYGDYYGIPSDGVPSYRQQIDPLLKARQQYAYGRQHDYFDHWDVIGWTREGNASHPNSGLATIMSDGPGGSKWMYVGRQKAGEVWHDMTGNRSGTVTINQDGWGHFFVNGGSVSVWVKR

SEQ ID NO: 30451 - protein, 483 aa, Bacillus sp.
HHNGTNGTMMQYFEWYLPNDGNHWNRLNSDASNLKSKGITAVWIPPAWKAVSQNDVGYGAYDLYDLGEFNQKGTVRTKYGTRSQLQAAVTSLKNNGIQVYGDVVMNHKGGADATEMVRAVEVNPNNRNQEVTGEYTIEAWTRFDFPGRGNTHSSFKWRWYHFDGVDFDQSREFTNRIYKFRGKAWDWEVDTEFGNYDYLMYADYDYDHPESTNEMRNWGVWYTNTLGLDGFRIDAVKHIKYSFTRDWINHVRSATGKNMFAVAEFWKNDLGAIENYLQKTNWNHSVFDVPLHYNLYNASKSGGNYDMRNIFNGTVVQRHPSHAVTFVDNHDSQPEEALESFVDEWFKPLAYALTLTREQGYPSVFYGDYYGIPTHGVPAMRSKIDPILEARQKYAYGPQHDYLDHPDVIGWTREGDSSHPKSGLATLITDGPGGSKRMYAGLKNAGETWYDITGNRSDTVKIGSDGWGEFHVNKSSVSIYVQK

SEQ ID NO: 30452 - protein, 485 aa, Bacillus sp.
HHNGTNGTMMQYFEWYLPNDGNHWNRLNSDASNLKSKGITAVWIPPAWKGASQNDVGYGAYDLYDLGEFNQKGTVRTKYGTRSQLQAAVTSLKNNGIQVYGDVVMNHKGGADATEMVRAVEVNPNNRNQEVTGEYTIEAWTRFDFPGRGNTHSSFKWRWYHFDGVDWDQSRKLNNRIYKFRGHGKAWDWEVDTEFGNYDYLMYVDYDYDHPETTNEMRNWGVWYTNTLGLDGFRIDAVKHIKYSFTRDWINHVRIATGKNMFAVAEFWKNDLGAIENYLQKTNWNHSVFDVPLHYNLYNASKSGGNYDMRNIFNGTVVQRHPSHAVTFVDNHDSQPEEALESFVDEWFKPLAYALTLTREQGYPSVFYGDYYGIPTHGVPAMRSKIDPILEARQKYAYGPQHDYLDHPDVIGWTREGDSSHPKSGLATLITDGPGGSKRMYAGLKNAGETWYDITGNRSDTVKIGSDGWGEFHVNDQSVSIYVQK

SEQ ID NO: 30453 - protein, 483 aa, Bacillus sp.
HHNGTNGTMMQYFEWYLPNDGNHWNRLNSDASNLKSKGITAVWIPPAWKAVSQNDVGYGAYDLYDLGEFNQKGTVRTKYGTRSQLQAAVTSLKNNGIQVYGDVVMNHKGGADATEMVRAVEVNPNNRNQEVTGEYTIEAWTRFDFPGRGNTHSSFKWRWYHFDGVDFDQSREFTNRIYKFRGKAWDWEVDTEFGNYDYLMYVDYDYDHPESTNEMRNWGVWYTNTLGLDGFRIDAVKHIKYSFTRDWINHVRSATGKNMFAVAEFWKNDLGAIENYLQKTNWNHSVFDVPLHYNLYNASKSGGNYDMRNIFNGTVVQRHPSHAVTFVDNHDSQPEEALESFVEEWFKPLAYALTLTREQGYPSVFYGDYYGIPTHGVPAMRSKIDPILEARQKYAYGPQHDYLDHPDVIGWTREGDSSHPKSGLATLITDGPGGSKRMYAGLKNAGETWYDITGNRSDTVKIGSDGWGEFHVNDGSVSIYVQK

SEQ ID NO: 30454 - protein, 485 aa, Bacillus sp.
HHDGTNGTIMQYFEWNVPNDGQHWNRLHNNAQNLKNAGITAIWIPPAWKGTSQNDVGYGAYDLYDLGEFNQKGTVRTKYGTKAELERAIRSLKANGVQVYGDVVMNHKGGADFTERVQAVEVNPQNRNQEVSGTYQIEAWTGFNFPGRGNQHSSFKWRWYHFDGTDWDQSRQLANRIYKFRGDGKAWDWEVDTENGNYDYLMYADVDMDHPEVINELNRWGVWYANTLNLDGFRLDAVKHIKFSFMRDWLGHVRGQTGKNLFAVAEYWKNDLGALENYLSKTNWTMSAFDVPLHYNLYQASNSSGNYDMRNLLNGTLVQRHPSHAVTFVDNHDTQPGEALESFVQGWFKPLAYATILTREQGYPQVFYGDYYGIPSDGVPSYRQQIDPLLKARQQYAYGRQHDYFDHWDVIGWTREGNASHPNSGLATIMSDGPGGSKWMYVGRQKAGEVWHDMTGNRSGTVTINQDGWGHFFVNGGSVSVWVKR

SEQ ID NO: 30455 - protein, 483 aa, Synthetic construct
LNGTLMQYFEWYMPNDGQHWKRLQNDSAYLAEHGITAVWIPPAYKGTSQADVGYGAYDLYDLGEFHQKGTVRTKYGTKGELQSAIKSLHSRDINVYGDVVINHKAGADYTENVTAVEVNPSNRNQETSGEYNIQAWTGFNFPGRGTTYSNFKWQWFHFDGTDWDQSRSLSRIFKFRGTGKAWDWEVSSENGNYDYLMYADIDYDHPDVAAEIKRWGTWYANELQLDGFRLDAVKHIKFSFLRDWVNHVREKTGKEMFTVAEYWSYDLGALENYLNKTNFNHSVFDVPLHYQFHAASTQGGGYDMRKLLNGTVVSKHPLKSVTFVDNHDTQPGQSLESTVQTWFKPLAYAFILTRESGYPQVFYGDMYGTKGDSQREIPALKHKIEPILKARKQYAYGAQHDYFDHHDIVGWTREGDSSVANSGLAALITDGPGGAKRMYVGRQNAGETWHDITGNRSEPVVINSAGWGEFHVNGGSVSIYVQR

SEQ ID NO: 30456 - protein, 477 aa, Bacillus sp. (in: firmicutes)
HHDGTNGTIMQYFEWNVPNDGQHWNRLHNNAQNLKNAGITAIWIPPAWKGTSQNDVGYGAYDLYDLGEFNQKGTVRTKYGTKAELERAIRSLKANGIQVYGDVVMNHKGGADFTERVQAVEVNPQNRNQEVSGTYQIEAWTGFNFPGRGNQHSSFKWRWYHFDGTDWDNRIYKFRGKAWDWEVDTENGNYDYLMYADVDMDHPEVINELNRWGVWYANTLNLDGFRLDAVKHIKFSFMRDWLGHVRGQTGKNLFAVAEYWKNDLGALENYLSKTNWTMSAFDVPLHYNLYQASNSSGNYDMRNLLNGTLVQRHPSHAVTFVDNHDTQPGEALESFVQGWFKPLAYATILTREQGYPQVFYGDYYGIPSDGVPSYRQQIDPLLKARQQYAYGRQHDYFDHWDVIGWTREGNASHPNSGLATIMSDGPGGSKWMYVGRQKAGEVWHDMTGNRSGTVTINQDGWGHFFVNGGSVSVWVKR

SEQ ID NO: 30457 - protein, 482 aa, Bacillus sp. (in: firmicutes)
HHDGTNGTIMQYFEWNVPNDGQHWNRLHNNAQNLKNAGITAIWIPPAWKGTSQNDVGYGAYDLYDLGEFNQKGTVRTKYGTKAELERAIRSLKANGIQVYGDVVMNHKGGADFTERVQAVEVNPQNRNQEVSGTYQIEAWTGFNFPGRGNQHSSFKWRWYHFDGTDWDQSRQLNRIYKFRGKAWDWEVDTENGNYDYLMYADVDMDHPEVINELNRWGVWYANTLNLDGFRLDAVKHIKFSFMRDWLGHVRGQTGKNLFAVAEYWKNDLGALENYLSKTNWTMSAFDVPLHYNLYQASNSSGNYDMRNLLNGTLVQRHPSHAVTFVDNHDTQPGEALESFVQGWFKPLAYATILTREQGYPQVFYGDYYGIPSDGVPSYRQQIDPLLKARQQYAYGRQHDYFDHWDVIGWTREGNASHPNSGLATIMSDGPGGSKWMYVGRQKAGEVWHDMTGNRSGTVTINQDGWGHFFVNGGSVSVWVKR

SEQ ID NO: 30458 - protein, 482 aa, Bacillus sp.
HHNGTNGTMMQYFEWYLPNDGNHWNRLNSDASNLKSKGITAVWIPPAWKGASQNDVGYGAYDLYDLGEFNQKGTVRTKYGTRSQLQAAVTSLKNNGINVYGDVVMNHKGGADATEMVRAVEVNPNNRNQEVTGEYTIEAYTRFDFPGRGNTHSSFKWRWYHFDGVDWDQSRKLNNRIYKFRGKAWDWEVDTEFGNYDYLMYVDYDYDHPETTNEMRNWGVWYTNTLGLDGFRIDAVKHIKYSFTRDWINHVRIATGKNMFAVAEFWKNDLGAIENYLQKTNWNHSVFDVPLHYNLYNASKSGGNYDMRNIFNGTVVQAHPMHAVTFVDNHDSQPEEALESFVDEWFKPLAYALTLTREQGYPSVFYGDYYGIPTHGVPAMRSKIDPILEARQKYAYGPQHDYLDHPDVIGWTREGDSSHPKSGLATLITDGPGGSKRMYAGLKNAGETWYDITGNRSDTVKIGSDGWGEFHNDGSVSIYVQK

SEQ ID NO: 30459 - protein, 481 aa, Bacillus licheniformis
VNGTLMQYFEWYTPNDGQHWKRLQNDAEHLSDIGITAVWIPPAYKAISQADVGYGAYDLYDLGEFHQKGTVRTKYGTKGELQSAIKSLHSRDINVYGDVVINHKAGADATEDVTAVEVDPADRNRVISGEHLIKAWTHFHFPGRGSTYSDFKWYWYHFDGTDWDESRKLNRIYLFQGKTWDWEVSNEFGNYDYLMYADYDYDYPDVVAEITRWGTWYANELQLDGFRLDAVKHIKFSFLRDWVNHVREKTGKEMFTVAEYWSNDLGALENYLNKTNFNHSVFDVPLHYQFHAASTQGGGYDMRKLLNGTVVSKHPLKSVTFVDNHDTQPGQSLESTVQTWFKPLAYAFILTRESGYPSVFYGDMYGTKGDSQREIPALKHKIEPILKARKQYAYGAQHDYFDHHDIVGWTREGVSSVANSGLAALITDGPGGAKWMYVGRQNAGETWHDITGNRSEPVVINSEGWGEFHVNGGSVSIYVQR

SEQ ID NO: 30460 - protein, 481 aa, Bacillus amyloliquefaciens
VNGTLMQYFEWYTPNDGQHWKRLQNDAEHLSDIGITAVWIPPAYKAISQADVGYGAYDLYDLGEFHQKGTVRTKYGTKGELQSAIKSLHSRDINVYGDVVINHKAGADATEDVTAVEVDPADRNRVISGEHLIKAWTHFHFPGRGSTYSDFKWYWYHFDGTDWDESRKLNRIYLFQGKTWDWEVSNEFGNYDYLMYADYDYDYPDVVAEITRWGTWYANELQLDGFRLDAVKHIKFSFLRDWVNHVREKTGKEMFTVAEYWSNDLGALENYLNKTNFNHSVFDVPLHYQFHAASTQGGGYDMRKLLNGTVVSKHPWKSVTFVDNHDTQPGQSLESTVQTWFKPLAYAFILTRESGYPSVFYGDMYGTKGDSQREIPALKHKIEPILKARKQYAYGAQHDYFDHHDIVGWTREGVSSVANSGLAALITDGPGGAKWMYVGRQNAGETWHDITGNRSEPVVINSEGWGEFHVNGGSVSIYVQR

SEQ ID NO: 30461 - protein, 481 aa, Bacillus amyloliquefaciens
VNGTLMQYFEWYTPNDGQHWKRLQNDAEHLSDIGITAVWIPPAYKAISQADVGYGAYDLYDLGEFWQKGTVRTKYGTKGELQSAIKSLHSRDINVYGDVVINHKAGADATEDVTAVEVDPADRNRVISGEHLIKAWTHFHFPGRGSTYSDFKWYWYHFDGTDWDESRKLNRIYLFQGKTWDWEVSNEFGNYDYLMYADYDYDYPDVVAEITRWGTWYANELQLDGFRLDAVKHIKFSFLRDWVNHVREKTGKEMFTVAEYWSNDLGALENYLNKTNFNHSVFDVPLHYQFHAASTQGGGYDMRKLLNGTVVSKHPLKSVTFVDNHDTQPGQSLESTVQTWFKPLAYAFILTRESGYPSVFYGDMYGTKGDSQREIPALKHKIEPILKARKQYAYGAQHDYFDHHDIVGWTREGVSSVANSGLAALITDGPGGAKWMYVGRQNAGETWHDITGNRSEPVVINSEGWGEFHVNGGSVSIYVQR

SEQ ID NO: 30462 - protein, 481 aa, Bacillus amyloliquefaciens
VNGTLMQYFEWYTPNDGQHWKRLQNDAEHLSDIGITAVWIPPAYKAISQADVGYGAYDLYDLGEFHQKGTVRTKYGTKGELQSAIKSLHSRDINVYGDVVINHKAGADATEDVTAVEVDPADRNRVISGEHLIKAWTHFHFPGRGSTYSDFKWWWYHFDGTDWDESRKLNRIYLFQGKTWDWEVSNEFGNYDYLMYADYDYDYPDVVAEITRWGTWYANELQLDGFRLDAVKHIKFSFLRDWVNHVREKTGKEMFTVAEYWSNDLGALENYLNKTNFNHSVFDVPLHYQFHAASTQGGGYDMRKLLNGTVVSKHPLKSVTFVDNHDTQPGQSLESTVQTWFKPLAYAFILTRESGYPSVFYGDMYGTKGDSQREIPALKHKIEPILKARKQYAYGAQHDYFDHHDIVGWTREGVSSVANSGLAALITDGPGGAKWMYVGRQNAGETWHDITGNRSEPVVINSEGWGEFHVNGGSVSIYVQR

SEQ ID NO: 30463 - protein, 481 aa, Bacillus amyloliquefaciens
VNGTLMQYFEWYTPNDGQHWKRLQNDAEHLSDIGITAVWIPPAYKAISQADVGYGAYDLYDLGEFHQKGTVRTKYGTKGELQSAIKSLHSRDINVYGDVVINHKAGADATEDVTAVEVDPADRNRVISGEHLIKAWTHFWFPGRGSTYSDFKWYWYHFDGTDWDESRKLNRIYLFQGKTWDWEVSNEFGNYDYLMYADYDYDYPDVVAEITRWGTWYANELQLDGFRLDAVKHIKFSFLRDWVNHVREKTGKEMFTVAEYWSNDLGALENYLNKTNFNHSVFDVPLHYQFHAASTQGGGYDMRKLLNGTVVSKHPLKSVTFVDNHDTQPGQSLESTVQTWFKPLAYAFILTRESGYPSVFYGDMYGTKGDSQREIPALKHKIEPILKARKQYAYGAQHDYFDHHDIVGWTREGVSSVANSGLAALITDGPGGAKWMYVGRQNAGETWHDITGNRSEPVVINSEGWGEFHVNGGSVSIYVQR

SEQ ID NO: 30464 - protein, 483 aa, Bacillus sp.
HHDGTNGTIMQYFEWNVPNDGQHWNRLHNNAQNLKNAGITAIWIPPAWKGTSQNDVGYGAYDLYDLGEFNQKGTVRTKYGAELERAIRSLKANGIQVYGDVVMNHKGGADFTERVQAVEVNPQNRNQEVSGTYQIEAWTGFNFPGRGNQHSSFKWRWYHFDGTDWDQSRQLANRIYKFRGDGKAWDWEVDTENGNYDYLMYADVDMDHPEVINELNRWGVWYANTLNLDGFRLDAVKHIKFSFMRDWLGHVRGQTGKNLFAVAEYWKNDLGALENYLSKTNWTMSAFDVPLHYNLYQASNSSGNYDMRNLLNGTLVQRHPSHAVTFVDNHDTQPGEALESFVQGWFKPLAYATILTREQGYPQVFYGDYYGIPSDGVPSYRQQIDPLLKARQQYAYGRQHDYFDHWDVIGWTREGNASHPNSGLATIMSDGPGGSKWMYVGRQKAGEVWHDMTGNRSGTVTINQDGWGHFFVNGGSVSVWVKR

SEQ ID NO: 30465 - protein, 483 aa, Bacillus sp.
HHDGTNGTIMQYFEWNVPNDGQHWNRLHNNAQNLKNAGITAIWIPPAWKGTSQNDVGYGAYDLYDLGEFNQKGTVRTKYGKELERAIRSLKANGIQVYGDVVMNHKGGADFTERVQAVEVNPQNRNQEVSGTYQIEAWTGFNFPGRGNQHSSFKWRWYHFDGTDWDQSRQLANRIYKFRGDGKAWDWEVDTENGNYDYLMYADVDMDHPEVINELNRWGVWYANTLNLDGFRLDAVKHIKFSFMRDWLGHVRGQTGKNLFAVAEYWKNDLGALENYLSKTNWTMSAFDVPLHYNLYQASNSSGNYDMRNLLNGTLVQRHPSHAVTFVDNHDTQPGEALESFVQGWFKPLAYATILTREQGYPQVFYGDYYGIPSDGVPSYRQQIDPLLKARQQYAYGRQHDYFDHWDVIGWTREGNASHPNSGLATIMSDGPGGSKWMYVGRQKAGEVWHDMTGNRSGTVTINQDGWGHFFVNGGSVSVWVKR

SEQ ID NO: 30466 - protein, 483 aa, Bacillus sp.
HHDGTNGTIMQYFEWNVPNDGQHWNRLHNNAQNLKNAGITAIWIPPAWKGTSQNDVGYGAYDLYDLGEFNQKGTVRTKYGKALERAIRSLKANGIQVYGDVVMNHKGGADFTERVQAVEVNPQNRNQEVSGTYQIEAWTGFNFPGRGNQHSSFKWRWYHFDGTDWDQSRQLANRIYKFRGDGKAWDWEVDTENGNYDYLMYADVDMDHPEVINELNRWGVWYANTLNLDGFRLDAVKHIKFSFMRDWLGHVRGQTGKNLFAVAEYWKNDLGALENYLSKTNWTMSAFDVPLHYNLYQASNSSGNYDMRNLLNGTLVQRHPSHAVTFVDNHDTQPGEALESFVQGWFKPLAYATILTREQGYPQVFYGDYYGIPSDGVPSYRQQIDPLLKARQQYAYGRQHDYFDHWDVIGWTREGNASHPNSGLATIMSDGPGGSKWMYVGRQKAGEVWHDMTGNRSGTVTINQDGWGHFFVNGGSVSVWVKR

SEQ ID NO: 30467 - protein, 481 aa, Bacillus licheniformis
LNGTLMQYFEWYMPNDGQHWKRLQNDSAYLAEHGITAVWIPPAYKGTSQADVGYGAYDLYDLGEFHQKGTVRTKYGTKGELQSAIKSLHSRDINVYGDVVINHKGGADATEDVTAVEVDPADRNRVISGEHLIKAWTHFHFPGRGSTYSDFKWHWYHFDGTDWDESRKLNRIYKFQGKAWDWEVSNEFGNYDYLMYADIDYDHPDVAAEIKRWGTWYANELQLDGFRLDAVKHIKFSFLRDWVNHVREKTGKEMFTVAEYWQNDLGALENYLNKTNFNHSVFDVPLHYQFHAASTQGGGYDMRKLLNGTVVSKHPLKSVTFVDNHDTQPGQSLESTVQTWFKPLAYAFILTRESGYPQVFYGDMYGTKGDSQREIPALKHKIEPILKARKQYAYGAQHDYFDHHDIVGWTREGDSSVANSGLAALITDGPGGAKRMYVGRQNAGETWHDITGNRSEPVVINSEGWGEFHVNGGSVSIYVQR

SEQ ID NO: 30468 - protein, 481 aa, Bacillus licheniformis
LNGTLMQYFEWYMPNDGQHWKRLQNDSAYLAEHGITAVWIPPAYKGTSQADVGYGAYDLYDLGEFHQKGTVRTKYGTKGELQSAIKSLHSRDINVYGDVVINHKGGADATEDVTAVEVDPADRNRVISGEHLIKAWTHFHFPGRGSTYSDFKWHWYHFDGTDWDESRKLNRIYKFQGKAWDWEVSNENGNYDYLMYADIDYDHPDVAAEIKRWGTWYANELQLDGFRLDAVKHIKFSFLRDWVNHVREKTGKEMFTVAEYWQNDLGALENYLNKTNFNHSVFDVPLHYQFHAASTQGGGYDMRKLLNGTVVSKHPLKSVTFVDNHDTQPGQSLESTVQTWFKPLAYAFILTRESGYPQVFYGDMYGTKGDSQREIPALKHKIEPILKARKQYAYGAQHDYFDHHDIVGWTREGDSSVANSGLAALITDGPGGAKRMYVGRQKAGETWHDITGNRSEPVVINSEGWGEFHVNGGSVSIYVQR

SEQ ID NO: 30469 - protein, 481 aa, Synthetic construct
LNGTLMQYFEWYMPNDGQHWRRLQNDSAYLAEHGITAVWIPPAYKGTSQADVGYGAYDLYDLGEFHQKGTVRTKYGTKGELQSAIKSLHSRDINVYGDVVINHKGGADATEDVTAVEVDPADRNRVISGEHLIKAWTHFHFPGRGSTYSDFKWHWYHFDGTDWDESRKLNRIYKFQGKAWDWEVSNENGNYDYLMYADIDYDHPDVAAEIKRWGTWYANELQLDGFRLDAVKHIKFSFLRDWVNHVREKTGKEMFTVAEYWQNDLGALENYLNKTNFNHSVFDVPLHYQFHAASTQGGGYDMRKLLPGTVVSKHPLKSVTFVDNHDTQPGQSLESTVQTWFKPLAYAFILTRESGYPQVFYGDMYGTKGDSQREIPALKHKIEPILKARKQYAYGAQHDYFDHHDIVGWTREGDSSVANSGLAALITDGPGGAKRMYVGRQNAGETWHDITGNRSEPVVINSEGWGEFHVNGGSVSIYVQR

SEQ ID NO: 30470 - protein, 481 aa, Synthetic construct
LNGTLMQYFEWYMPNDGQHWKRLQNDSAYLAEHGITAVWIPPAYKGTSQADVGYGAYDLYDLGEFHQKGTVRTKYGTKGELQSAIKSLHSRDINVYGDVVIDHKGGADATEDVTAVEVDPADRNRVISGEYLIKAWTHFHFPGRGSIYSDFKWHWYHFDGTDWDESRKLNRIYKFQGKAWDWEVSNENGNYDYLMYADIDYDHPDVAAEIKRWGTWYANELQLDGFRLDAVKHIKFSFLRDWVNHVREKTGKEMFTVAEYWQNDLGALENYLNKTNFNHSVFDVPLHYQFHAASTQGGGYDMRKLLNGTVVSKHPLKSVTFVDNHDTQPGQSLESTVQTWFKPLAYAFILTRESGYPQVFYGDMYGTKGDSQREIPALKHKIEPILKARKQYAYGAQHDYFDHHDIVGWTREGDSSVANSGLAALITDGPGGAKRMYVGRQNAGETWHDITGNRSEPVVINSEGWGEFHVNGGSVSIYVQR

SEQ ID NO: 30471 - protein, 481 aa, Bacillus licheniformis
LNGTLMQYFEWYMPNDGQHWKRLQNDSAYLAEHGITAVWIPPAYKGTSQADVGYGAYDLYDLGEFHQKGTVRTKYGTKGELQSAIKSLHSRDINVYGDVVINHKGGADATEDVTAVEVDPADRNRVISGEHLIKACTHFHFPGRGSTYSDFKWHWYHFDGTDWDESRKLNRIYKFQGKAWDWEVSNENGNYDYLMYADIDYDHPDVAAEIKRWGTWYANELQLDGFRLDAVKHIKFSFLRDWVNHVREKTGKEMFTVAEYWQNDLGALENYLNKTNFNHSVFDVPLHYQFHAASTQGGGYDMRKLLNGTVVSKHPLKSVTFVDNHDTQPGQSLESTVQTWFKPLAYAFILTRESGYPQVFYGDMYGTKGDSQREIPALKHKIEPILKARKQYAYGAQHDYFDHHDIVGWTREGDSSVANSGLAALITDGPGGAKRMYVGRQNAGETWHDITGNRSEPVVINSEGWGEFHVNGGSVSIYVQR

SEQ ID NO: 30472 - protein, 481 aa, Bacillus licheniformis
LNGTLMQYFEWYMPNDGQHWKRLQNDSAYLAEHGITAVWIPPAYKGTSQDDVGYGAYDLYDLGEFHQKGTVRTKYGTKGELQSAINSLHSRGINVYGDVVINHKGGADATEDVTAVEVDPADRNRVTSGEQRIKAWTHFQFPGRGSTYSDFKWHWYHFDGTDWDESRKLNRIYKFQGKAWDWEVSNENGNYDYLMYADIDYDHPDVTAEIKRWGTWYANELQLDGFRLDAVKHIKFSFLRDWVNHVREKTGKEMFTVAEYWQNDLGALENYLNKTNFNHSVFDVPLHYQFHAASTQGGGYDMRKLLNGTVVSKHPVKAVTFVDNHDTQPGQSLESTVQTWFKPLAYAFILTREAGYPQIFYGDMYGTKGASQREIPALKHKIEPILKARIQYAYGAQHDYFDHHDIVGWTREGDSSVANSGLAALITDGPGGTKRMYVGRQNAGETWHDITGNRSDSVVINAEGWGEFHVNGGSVSIYVQR

SEQ ID NO: 30473 - protein, 481 aa, Bacillus licheniformis
VNGTLMQYFEWYTPNDGQHWKKLQNDAEHLSDIGITAVWIPPAYKGTSQADIGYGAYDLYDLGEFHQKGTVRTKYGTKGELQSAIKSLHSRDINVYGDVVINHKGGADATEDVTAVEVDPADRNRVISGEILIKAWTHFHFPGRGSTYSDFKWYWYHFDGTDWDESRKLNRIYKFQGKTWDWEVDNEFGNYDYLMYADIDYDYPYVVSEIKRWGTWYANELQLDGFRLDAVKHIKFSFLRDWVNHVREKTGKEMFTVAEYWSYDLGALENYLNKTNFNHSVFDVPLHYQFHAASTQGGGYDMRKLLNGTVVSKHPLKSVTFVDNHDTQPGQSLESTVQTWFKPLAYAFILTRESGYPQVFYGDMYGTKGDSQREIPALKHKIEPILKARKQYAYGAQHDYFDHHDIVGWTREGDSSVANSGLAALITDGPGGAKRMYVGRQNAGETWHDITGNRSEPVVINSEGWGEFHVNGGSVSIYVQR

SEQ ID NO: 30474 - protein, 481 aa, Bacillus licheniformis
LNGTLMQYFEWYMPNDGQHWKRLQNDSAYLAEHGITAVWIPPAYKGTSQADVGYGAYDLYDLGEFHQKGTVRTKYGTKGELQSAIKSLHSRDINVYGDVVINHKGGADATEDVTAVEVDPADRNRVISGEHLIKAWTHFHFPGRGSTYSDFKWHWYHFDGTDWDESRKLNRIYKFQGKAWDWEVSNENGNYDYLMYADIDYDHPDVAAEIRRWGTWYANELQLDGFRLDAVKHIKFSFLRDWVNHVREKTGKEMFTVAEYWQNDLGALENYLNKTNFNHSVFDVPLHYQFHAASTQGGGYDMRKLLNGTVVSKHPLKSVTFVDNHDTQPGQSLESTVQTWFKPLAYAFILTRESGYPQVFYGDMYGTKGDSQREIPALKHKIEPILKARKQYAYGAQHDYFDHHDIVGWTREGDSSVANSGLAALITDGPGGAKRMYVGRQNAGETWHDITGNRSEPVVINSEGWGEFHVNGGSVSIYVQR

SEQ ID NO: 30475 - protein, 481 aa, Bacillus licheniformis
LNGTLMQYFEWYMPNDGQHWKRLQNDSAYLAEHGITAVWIPPAYKGTSQADVGYGAYDLYDLGEFHQKGTVRTKYGTKGELQSAIKSLHSRDINVYGDVVINHKGGADATEDVTAVEVDPADRNRVISGEHLIKAWTHFHFPGRGSTYSDFKWHWYHFDGTDWDESRKLNRIYKFQGKAWDWEVSNENGNYDYLRYADIDYDHPDVAAEIKRWGTWYANELQLDGFRLDAVKHIKFSFLRDWVNHVREKTGKEMFTVAEYWQNDLGALENYLNKTNFNHSVFDVPLHYQFHAASTQGGGYDMRKLLNGTVVSKHPLKSVTFVDNHDTQPGQSLESTVQTWFKPLAYAFILTRESGYPQVFYGDMYGTKGDSQREIPALKHKIEPILKARKQYAYGAQHDYFDHHDIVGWTREGDSSVANSGLAALITDGPGGAKRMYVGRQNAGETWHDITGNRSEPVVINSEGWGEFHVNGGSVSIYVQR

SEQ ID NO: 30476 - protein, 481 aa, Bacillus licheniformis
LNGTLMQYFEWYMPNDGQHWRRLQNDSAYLAEHGITAVWIPPAYKAISQADVGYGAYDLYDLGEFHQKGTVRTKYGTKGELQSAIKSLHSRDINVYGDVVINHKAGADATEDVTAVEVDPADRNRVISGEHLIKAWTHFHFPGRGSTYSDFKWHWYHFDGTDWDESRKLNRIYKFQGKAWDWEVSNENGNYDYLMYADIDYDHPDVAAEIKRWGTWYANELQLDGFRLDAVKHIKFSFLRDWVNHVREKTGKEMFTVAEYWQNDLGALENYLNKTNFNHSVFDVPLHYQFHAASTQGGGYDMRKLLNGTVVSKHPLKSVTFVDNHDTQPGQSLESTVQTWFKPLAYAFILTRESGYPQVFYGDMYGTKGDSQREIPALKHKIEPILKARKQYAYGAQHDYFDHHDIVGWTREGDSSVANSGLAALITDGPGGAKRMYVGRQNAGETWHDITGNRSEPVVINSEGWGEFHVNGGSVSIYVQR

SEQ ID NO: 30477 - protein, 481 aa, Synthetic construct
LNGTLMQYFEWYMPNDGQHWRRLQNDSAYLAEHGITAVWIPPAYKGTSQADVGYGAYDLYDLGEFHQKGTVRTKYGTKGELQSAIKSLHSRDINVYGDVVINHKGGADATEDVTAVEVDPADRNRVISGEHLIKAWTHFHFPGRGSTYSDFKWHWYHFDGTDWDESRKLNRIYKFQGKAWDWEVSNENGNYDYLMYADIDYDHPDVAAEIKRWGTWYANELQLDGFRLDAVKHIKFSFLRDWVNHVREKTGKEMFTVAEYWQNDLGALENYLNKTNFNHSVFDVPLHYQFHAASTQGGGYDMRKLLSGTVVSKHPLKSVTFVDNHDTQPGQSLESTVQTWFKPLAYAFILTRESGYPQVFYGDMYGTKGDSQREIPALKHKIEPILKARKQYAYGAQHDYFDHHDIVGWTREGDSSVANSGLAALITDGPGGAKRMYVGRQNAGETWHDITGNRSEPVVINSEGWGEFHVNGGSVSIYVQR

SEQ ID NO: 30478 - protein, 481 aa, Bacillus licheniformis
LNGTLMQYFEWYMPNDGQHWKRLQNDSAYLAEHGITAVWIPPAYKGTSQADVGYGAYDLYDLGEFHQKGTVRTKYGTKGELQSAIKSLHSRDINVYGDVVINHKGGADATEDVTAVEVDPADRNRVISGEHLIKAWTHFHFPGRGSTYSDFKWHWYHFDGTDWDESRKLNRIYKFQGKAWDWEVSNENGNYDYLMYADIDYDHPDVAAEIKRWGTWYANELQLDGFRLDAVKHIKFSFLRDWVNHVREKTGKEMFTVAEYWKNDLGALENYLNKTNFNHSVFDVPLHYQFHAASTQGGGYDMRKLLNGTVVSKHPLKSVTFVDNHDTQPGQSLESTVQTWFKPLAYAFILTRESGYPQVFYGDMYGTKGDSQREIPALKHKIEPILKARKQYAYGAQHDYFDHHDIVGWTREGDSSVANSGLAALITDGPGGAKRMYVGRQNAGETWHDITGNRSEPVVINSEGWGEFHVNGGSVSIYVQR

SEQ ID NO: 30479 - protein, 481 aa, Bacillus licheniformis
LNGTLMQYFEWYMPNDGQHWKRLQNDSAYLAEHGITAVWIPPAYKGTSQADVGYGAYDLYDLGEFHQKGTVRTKYGTKGELQSAIKSLHSRDINVYGDVVINHKGGADATEDVTAVEVDPADRNRVISGEHLIKAWTHFHFPGRGSTYSDFKWHWYHFDGTDWDESRKLNRIYKFQGKAWDWEVSNENGNYDYLMYADIDYDHPDVAAEIKRWGTWYANELQLDGFRLDAVKHIKFSFLRDWVNHVREKTGKEMFTVAEYWQNDLGALENYLNKTNFNHSVFDVPLHYQFHAASTQGGGYDMRKLLNGTVVSKRPLKSVTFVDNHDTQPGQSLESTVQTWFKPLAYAFILTRESGYPQVFYGDMYGTKGDSQREIPALKHKIEPILKARKQYAYGAQHDYFDHHDIVGWTREGDSSVANSGLAALITDGPGGAKRMYVGRQNAGETWHDITGNRSEPVVINSEGWGEFHVNGGSVSIYVQR

SEQ ID NO: 30480 - protein, 481 aa, Bacillus licheniformis
LNGTLMQYFEWYMPNDGQHWKRLQNDSAYLAEHGITAVWIPPAYKGTSQADVGYGAYDLYDLGEFHQKGTVRTKYGTKGELQSAIKSLHSRDINVYGDVVINHKGGADATEDVTAVEVDPADRNRVISGEHLIKAWTHFHFPGRGSTYSDFKWHWYHFDGTDWDESRKLNRIYKFQGKAWDWEVSNENGNYDYLMYADIDYDHPDVAAEIKRWGTWYANELQLDGFRLDAVKHIKFSFLRDWVNHVREKTGKEMFTVAEYWQNDLGALENYLNKTNFNHSVFDVPLHYQFHAASTQGGGYDMRKLLNGTVVSKHPLKSVTFVDNHDTQPGQSLESTVETWFKPLAYAFILTRESGYPQVFYGDMYGTKGDSQREIPALKHKIEPILKARKQYAYGAQHDYFDHHDIVGWTREGDSSVANSGLAALITDGPGGAKRMYVGRQNAGETWHDITGNRSEPVVINSEGWGEFHVNGGSVSIYVQR

SEQ ID NO: 30481 - protein, 481 aa, Bacillus licheniformis
LNGTLMQYFEWYMPNDGQHWKRLQNDSAYLAEHGITAVWIPPAYKGTSQADVGYGAYDLYDLGEFHQKGTVRTKYSTKGELQSAIKSLHSRDINVYGDVVINHKGGADATEDVTAVEVDPADRNRVISGEHLIKAWTHFHFPGRGSTYSDFKWHWYHFDGTDWDESRKLNRIYKFQGKAWDWEVSNENGNYDYLMYADIDYDHPDVAAEIKRWGTWYANELQLDGFRLDAVKHIKFSFLRDWVNHVREKTGKEMFTVAEYWQNDLGALENYLNKTNFNHSVFDVPLHYQFHAASTQGGGYDMRKLLNGTVVSKHPLKSVTFVDNHDTQPGQSLESTVQTWFKPLAYAFILTRESGYPQVFYGDMYGTKGDSQREIPALKHKIEPILKARKQYAYGAQHDYFDHHDIVGWTREGDSSVANSGLAALITDGPGGAKRMYVGRQNAGETWHDITGNRSEPVVINSEGWGEFHVNGGSVSIYVQR

SEQ ID NO: 30482 - protein, 481 aa, Bacillus licheniformis
LNGTLMQYFEWYMPNDGQHWKRLQNDSAYLAEHGITAVWIPPAYKGTSQADVGYGAYDLYDLGEFHQKGTVRTKYGTKGELQSAIKSLHSRDINVYGDVVINHKGGADATEDVTAVEVDPADRNRVISGEHLIKAWTHFHFPGRGSTYSDFKWHWYHFDGTDWDESRKLNRIYKFQGKAWDWEVSNENGNYDYLMYADIDYDHPDVAAEIKRWGTWYANTLQLDGFRLDAVKHIKFSFLRDWVNHVREKTGKEMFTVAEYWQNDLGALENYLNKTNFNHSVFDVPLHYQFHAASTQGGGYDMRKLLNGTVVSKHPLKSVTFVDNHDTQPGQSLESTVQTWFKPLAYAFILTRESGYPQVFYGDMYGTKGDSQREIPALKHKIEPILKARKQYAYGAQHDYFDHHDIVGWTREGDSSVANSGLAALITDGPGGAKRMYVGRQNAGETWHDITGNRSEPVVINSEGWGEFHVNGGSVSIYVQR

SEQ ID NO: 30483 - protein, 481 aa, Bacillus licheniformis
LNGTLMQYFEWYMPNDGQHWKRLQNDSAYLAEHGITAVWIPPAYKGTSQADVGYGAYDLYDLGEFHQKGTVRTKYGTKGELQSAIKSLHSNDINVYGDVVINHKGGADATEDVTAVEVDPADRNRVISGEHLIKAWTHFHFPGRGSTYSDFKWHWYHFDGTDWDESRKLNRIYKFQGKAWDWEVSNENGNYDYLMYADIDYDHPDVAAEIKRWGTWYANELQLDGFRLDAVKHIKFSFLRDWVNHVREKTGKEMFTVAEYWQNDLGALENYLNKTNFNHSVFDVPLHYQFHAASTQGGGYDMRKLLNGTVVSKHPLKSVTFVDNHDTQPGQSLESTVQTWFKPLAYAFILTRESGYPQVFYGDMYGTKGDSQREIPALKHKIEPILKARKQYAYGAQHDYFDHHDIVGWTREGDSSVANSGLAALITDGPGGAKRMYVGRQNAGETWHDITGNRSEPVVINSEGWGEFHVNGGSVSIYVQR

SEQ ID NO: 30484 - protein, 481 aa, Synthetic construct
LNGTLMQYFEWYMPNDGQHWRRLQNDSAYLAEHGITAVWIPPAYKGTSQADVGYGAYDLYDLGEFHQKGTVRTKYGTKGELQSAIKSLHSRDINVYGDVVINHKGGADATEDVTAVEVDPADRNRVISGEHLIKAWTHFHFPGRGSTYSDFKWHWYHFDGTDWDESRKLNRIYKFQGKAWDWEVSNENGNYDYLMYADIDYDHPDVAAEIKRWGTWYANELQLDGFRLDAVKHIKFSFLRDWVNHVREKTGKEMFTVAEYWQNDLGALENYLNKTNFNHSVFDVPLHYQFHAASTQGGGYDMRKLLAGTVVSKHPLKSVTFVDNHDTQPGQSLESTVQTWFKPLAYAFILTRESGYPQVFYGDMYGTKGDSQREIPALKHKIEPILKARKQYAYGAQHDYFDHHDIVGWTREGDSSVANSGLAALITDGPGGAKRMYVGRQNAGETWHDITGNRSEPVVINSEGWGEFHVNGGSVSIYVQR

SEQ ID NO: 30485 - protein, 481 aa, Bacillus licheniformis
LNGTLMQYFEWYMPNDGQHWKRLQNDSAYLAEHGITAVWIPPAYKGTSQADVGYGAYDLYDLGEFHQKGTVRTKYGTKGELQSAIKSLHSRDINVYGDVVINHKGGADATEDVTAVEVDPADRNRVISGEHLIKAWTHFHFPGRGSTHSDFKWHWYHFDGTDWDESRKLNRIYKFQGKAWDWEVSNENGNYDYLMYADIDYDHPDVAAEIKRWGTWYANELQLDGFRLDAVKHIKFSFLRDWVNHVREKTGKEMFTVAEYWQNDLGALENYLNKTNFNHSVFDVPLHYQFHAASTQGGGYDMRKLLNGTVVSKHPLKSVTFVDNHDTQPGQSLESTVQTWFKPLAYAFILTRESGYPQVFYGDMYGTKGDSQREIPALKHKIEPILKARKQYAYGAQHDYFDHHDIVGWTREGDSSVANSGLAALITDGPGGAKRMYVGRQNAGETWHDITGNRSEPVVINSEGWGEFHVNGGSVSIYVQR

SEQ ID NO: 30486 - protein, 481 aa, Synthetic construct
LNGTLMQYFEWYMPNDGQHWRRLQNDSAYLAEHGITAVWIPPAYKGTSQADVGYGAYDLYDLGEFHQKGTVRTKYGTKGELQSAIKSLHSRDINVYGDVVINHKGGADATEDVTAVEVDPADRNRVISGEHLIKAWTHFHFPGRGSTYSDFKWHWYHFDGTDWDESRKLNRIYKFQGKAWDWEVSNENGNYDYLMYADIDYDHPDVAAEIKRWGTWYANELQLDGFRLDAVKHIKFSFLRDWVNHVREKTGKEMFTVAEYWQNDLGALENYLNKTNFNHSVFDVPLHYQFHAASTQGGGYDMRKLLVGTVVSKHPLKSVTFVDNHDTQPGQSLESTVQTWFKPLAYAFILTRESGYPQVFYGDMYGTKGDSQREIPALKHKIEPILKARKQYAYGAQHDYFDHHDIVGWTREGDSSVANSGLAALITDGPGGAKRMYVGRQNAGETWHDITGNRSEPVVINSEGWGEFHVNGGSVSIYVQR

SEQ ID NO: 30487 - protein, 481 aa, Bacillus licheniformis
LNGTLMQYFEWYMPNDGQHWKRLQNDSAYLAEHGITAVWIPPAYKGTSQADVGYGAYDLYDLGEFHQKGTVRTKYGTKGELQSAIKSLHSRDINVYGDVVINHKGGADATEDVTAVEVDPADRNRVISGEHLIKAWTHFHFPGRGSTYSDFKWHWYHFDGTDWDESRKLNRIYKFQGKAWDWEVSNENGNYDYLXYADIDYDHPDVAAEIKRWGTWYANELQLDGFRLDAVKHIKFSFLRDWVNHVREKTGKEMFTVAEYWQNDLGALENYLNKTNFNHSVFDVPLHYQFHAASTQGGGYDMRKLLNGTVVSKHPLKSVTFVDNHDTQPGQSLESTVQTWFKPLAYAFILTRESGYPQVFYGDMYGTKGDSQREIPALKHKIEPILKARKQYAYGAQHDYFDHHDIVGWTREGDSSVANSGLAALITDGPGGAKRMYVGRQNAGETWHDITGNRSEPVVINSEGWGEFHVNGGSVSIYVQR

SEQ ID NO: 30488 - protein, 481 aa, Bacillus licheniformis
LNGTLMQYFEWYMPNDGQHWKRLQNDSAYLAEHGITAVWIPPAYKGTSQADVGYGAYDLYDLGEFHQKGTVRTKYGTKGELQSAIKSLHSRDINVYGDVVINHKGGADATEDVTAVEVDPADRNRVISGEHLIKAWTHFHFPGRGSTYSDFKWHWYHFDGTDWDESRKLNRIYKFQGKAWDWEVSNENGNYDYLMYADIDYDHPDVAAEIKRWGTWYANELQLDGFRLDAVKHIKFSFLRDWVNHVREKTGKEMFTVAEYWQNDLGALENYLNKTNFNHSVFDVPLHYQFHAASTQGGGYDMRKLLNGTVVSKHPLKSVTFVDNHDTQPEQSLESTVQTWFKPLAYAFILTRESGYPQVFYGDMYGTKGDSQREIPALKHKIEPILKARKQYAYGAQHDYFDHHDIVGWTREGDSSVANSGLAALITDGPGGAKRMYVGRQNAGETWHDITGNRSEPVVINSEGWGEFHVNGGSVSIYVQR

SEQ ID NO: 30489 - protein, 481 aa, Synthetic construct
LNGTLMQYFEWYMPNDGQHWKRLQNDSAYLAEHGITAVWIPPAYKGTSQADVGYGAYDLYDLGEFHQKGTVRTKYGTKGELQSAIKSLHSRDINVYGDVVINHKGGADATEDVTAVEVDPADRNRVISGEYLIKAWTHFHFPGRGSIYSDFKWHWYHFDGTDWDESRKLNRIYKFQGKAWDWEVDNENGNYDYLMYADIDYDHPDVAAEIKRWGTWYANELQLDGFRLDAVKHIKFSFLRDWVNHVREKTGKEMFTVAEYWQNDLGALENYLNKTNFNHSVFDVPLHYQFHAASTQGGGYDMRKLLNGTVVSKHPLKSVTFVDNHDTQPGQSLESTVQTWFKPLAYAFILTRESGYPQVFYGDMYGTKGDSQREIPALKHKIEPILKARKQYAYGAQHDYFDHHDIVGWTREGDSSVANSGLAALITDGPGGAKRMYVGRQNAGETWHDITGNRSEPVVINSEGWGEFHVNGGSVSIYVQR

SEQ ID NO: 30490 - protein, 481 aa, Bacillus licheniformis
LNGTLMQYFEWYMPNDGQHWKRLQNDSAYLAEHGITAVWIPPAYKGTSQADVGYGAYDLYDLGEFHQKGTVRTKYGTKGELQSAIKSLHSRDINVYGDVVINHKGGADATEDVTAVEVDPADRNRVISGEHLIKAWTHFHFPGRGSTYSDFKWHWYHFDGTDWDESRKLNRIYKFQGKAWDWEVSNENGNYDYLMYADIDYDHPDVAAEIKRWGTWYANELQLDGFRLDAVKHIKFSFLRDWVNHVREKTGKEMFTVAEYWQNDLGALENYLNKTNFNHSVFDVPLHYQFHAASTQGGGYDMRKLLNGTVVSKHPLKSVTFVDNHDTQPGQSLESTVQTWFKPLAYAFILTRESGYPQVFYGDMYGTKGDSQREIPALKHKIEPILKARKQYAYGAQHDYFDHHDIVGWTREGDSSVANSGLAALITDGPGGAKRMYVGRQNAGETWHDITGNRSEPVVINSEGWGEFSVNGGSVSIYVQR

SEQ ID NO: 30491 - protein, 481 aa, Bacillus licheniformis
LNGTLMQYFEWYMPNDGQHWKRLQNDSAYLAEHGITAVWIPPAYKGTSQADVGYGAYDLYDLGEFHQKGTVRTKYGTKGELQSAIKSLHSRDINVYGDVVINHKGGADATEDVTAVEVDPADRNRVISGEHLIKAWTHFHFPGRGSTYSDFKWHWYHFDGTDWDESRKLNRIYKFQGKAWDWEVSNENGNYDYLFYADIDYDHPDVAAEIKRWGTWYANELQLDGFRLDAVKHIKFSFLRDWVNHVREKTGKEMFTVAEYWQNDLGALENYLNKTNFNHSVFDVPLHYQFHAASTQGGGYDMRKLLNGTVVSKHPLKSVTFVDNHDTQPGQSLESTVQTWFKPLAYAFILTRESGYPQVFYGDMYGTKGDSQREIPALKHKIEPILKARKQYAYGAQHDYFDHHDIVGWTREGDSSVANSGLAALITDGPGGAKRMYVGRQNAGETWHDITGNRSEPVVINSEGWGEFHVNGGSVSIYVQR

SEQ ID NO: 30492 - protein, 481 aa, Bacillus licheniformis
LNGTLMQYFEWYMPNDGQHWKRLQNDSAYLAEHGITAVWIPPAYKGTSQADVGYGAYDLYDLGEFHQKGTVRTKYGTKGELQSAIKSLHSRDINVYGDVVINHKGGADATEDVTAVEVDPADRNRVISGEHLIKAWTHFHFPGRGSTYSDFKWRWYHFDGTDWDESRKLNRIYKFQGKAWDWEVSNENGNYDYLMYADIDYDHPDVAAEIKRWGTWYANELQLDGFRLDAVKHIKFSFLRDWVNHVREKTGKEMFTVAEYWQNDLGALENYLNKTNFNHSVFDVPLHYQFHAASTQGGGYDMRKLLNGTVVSKHPLKSVTFVDNHDTQPGQSLESTVQTWFKPLAYAFILTRESGYPQVFYGDMYGTKGDSQREIPALKHKIEPILKARKQYAYGAQHDYFDHHDIVGWTREGDSSVANSGLAALITDGPGGAKRMYVGRQNAGETWHDITGNRSEPVVINSEGWGEFHVNGGSVSIYVQR

SEQ ID NO: 30493 - protein, 481 aa, Synthetic construct
LNGTLMQYFEWYMPNDGQHWRRLQNDSAYLAEHGITAVWIPPAYKGTSQADVGYGAYDLYDLGEFHQKGTVRTKYGTKGELQSAIKSLHSRDINVYGDVVINHKGGADATEDVTAVEVDPADRNRVISGEHLIKAWTHFHFPGRGSTYSDFKWHWYHFDGTDWDESRKLNRIYKFQGKAWDWEVSNENGNYDYLMYADIDYDHPDVAAEIKRWGTWYANELQLDGFRLDAVKHIKFSFLRDWVNHVREKTGKEMFTVAEYWQNDLGALENYLNKTNFNHSVFDVPLHYQFHAASTQGGGYDMRKLLYGTVVSKHPLKSVTFVDNHDTQPGQSLESTVQTWFKPLAYAFILTRESGYPQVFYGDMYGTKGDSQREIPALKHKIEPILKARKQYAYGAQHDYFDHHDIVGWTREGDSSVANSGLAALITDGPGGAKRMYVGRQNAGETWHDITGNRSEPVVINSEGWGEFHVNGGSVSIYVQR

SEQ ID NO: 30494 - protein, 481 aa, Bacillus licheniformis
LNGTLMQYFEWYMPNDGQHWKRLQNDSAYLAEHGITAVWIPPAYKGTSQADVGYGAYDLYDLGEFHQKGTVRTKYGTKGELQSAIKSLHSRDINVYGDVVINHKGGADATEDVTAVEVDPADRNRVISGEHLIKAWTHFHFPGRGSTYSDFKWHWYHFDGTDWDESRKLNRIYKFQGKAWDWEVSNENGNYDYLMYADIDYDHPDVAAEIKRWGTWYANELQLDGFRLDAVKHIKFSFLRDWVNHVREKTGKEMFTVAEYWQNDLGALENYLNKTNFNHSVFDVPLHYQFHAASTQGGGYDMRKLLNGTVVSKHPLKSVTFVDNHDTQPGQSLESTVQTWFKPLAYAFILTRESGYPQVFYGDMYGTKGDSQREIPALKHKIEPILKARKQYAYGAQHDYFDHHDIVGWTREGNSSVANSGLAALITDGPGGAKRMYVGRQNAGETWHDITGNRSEPVVINSEGWGEFHVNGGSVSIYVQR

SEQ ID NO: 30495 - protein, 481 aa, Bacillus licheniformis
LNGTLMQYFEWYMPNDGQHWKRLQNDSAYLAEHGITAVWIPPAYKGTSQADVGYGAYDLYDLGEFHQKGTVRTKYGTKGELQSAIKSLHSRDINVYGDVVINHKGGADATEDVRAVEVDPADRNRVISGEHLIKAWTHFHFPGRGSTYSDFKWHWYHFDGTDWDESRKLNRIYKFQGKAWDWEVSNENGNYDYLMYADIDYDHPDVAAEIKRWGTWYANELQLDGFRLDAVKHIKFSFLRDWVNHVREKTGKEMFTVAEYWQNDLGALENYLNKTNFNHSVFDVPLHYQFHAASTQGGGYDMRKLLNGTVVSKHPLKSVTFVDNHDTQPGQSLESTVQTWFKPLAYAFILTRESGYPQVFYGDMYGTKGDSQREIPALKHKIEPILKARKQYAYGAQHDYFDHHDIVGWTREGDSSVANSGLAALITDGPGGAKRMYVGRQNAGETWHDITGNRSEPVVINSEGWGEFHVNGGSVSIYVQR

SEQ ID NO: 30496 - protein, 481 aa, Bacillus licheniformis
LNGTLMQYFEWYMPNDGQHWKRLQNDSAYLAEHGITAVWIPPAYKGTSQADVGYGAYDLYDLGEFHQKGTVRTKYGTKGELQSAIKSLHSRDINVYGDVVINHKGGADATEDVTAVEVDPADRNRVISGEHLIKAWTHFHFPGRGSTYSDFKWHWYHFDGTDWDESRKLNRIYKFQGKAWDWEVSNENGNYDYLMYADIDYDHPDVAAEIKRWGTWYANELQLDGFRLDAVKHIKFSFLRDWVNHVREKTGKEMFTVAEYWQNDLGALENYLNKTNFNHSVFDVPLHYQFHAASTQGGGYDMQKLLNGTVVSKHPLKSVTFVDNHDTQPGQSLESTVQTWFKPLAYAFILTRESGYPQVFYGDMYGTKGDSQREIPALKHKIEPILKARKQYAYGAQHDYFDHHDIVGWTREGDSSVANSGLAALITDGPGGAKRMYVGRQNAGETWHDITGNRSEPVVINSEGWGEFHVNGGSVSIYVQR

SEQ ID NO: 30497 - protein, 481 aa, Bacillus sp.
LNGTLMQYFEWYMPNDGQHWKRLQNDSAYLAEHGITAVWIPPAYKGTSQADVGYGAYDLYDLGEFHQKGTVRTKYGTKGELQSAIKSLHSRDINVYGDVVINHKGGADTTEDVTAVEVDPADRNRVISGEYLIKAWTHFHFPGRGSIYSDFKWHWYHFDGTDWDESRKLNRIYKFQGKAWDWEVSNENGNYDYLMYADIDYDHPDVAAEIKRWGTWYANELQLDGFRLDAVKHIKFSFLRDWVNHVREKTGKEMFTVAEYWQNDLGALENYLNKTNFNHSVFDVPLHYQFHAASTQGGGYDMRKLLNGTVVSKHPLKSVTFVDNHDTQPGQSLESTVQTWFKPLAYAFILTRESGYPQVFYGDMYGTKGDSQREIPALKHKIEPILKARKQYAYGAQHDYFDHHDIVGWTREGDSSVANSGLAALITDGPGGAKRMYVGRQNAGETWHDITGNRSEPVVINSEGWGEFHVNGGSVSIYVQR

SEQ ID NO: 30498 - protein, 481 aa, Bacillus licheniformis
LNGTLMQYFEWYTPNDGQHWKRLQNDSAYLAEHGITAVWIPPAYKGTSQADVGYGAYDLYDLGEFHQKGTVRTKYGTKGELQSAIKSLHSRDINVYGDVVINHKGGADATELVRAVEVNPANRNQEISGEYLIEAYTYFDFPGRGSTHSNFKWRWYHFDGTDWDESRKLNRIYKFRGKAWDWEVSNENGNYDYLTYADIDYDHPDVAAEIKRWGTWYANELQLDGFRLDAVKHIKFSFLRDWVNHVREKTGKEMFTVAEYWQNDLGALENYLNKTNFNHSVFDVPLHYQFHAASTQGGGYDMRKLLNGTVVSKHPLKSVTFVDNHDTQPGQSLESTVQTWFKPLAYAFILTRESGYPQVFYGDMYGTKGDSQREIPALKHKIEPILKARKQYAYGAQHDYFDHHDIVGWTREGDSSVANSGLAALITDGPGGAKRMYVGRQNAGETWHDITGNRSEPVVINSEGWGEFHVNGGSVSIYVQR

SEQ ID NO: 30499 - protein, 481 aa, Bacillus licheniformis
LNGTLMQYFEWYMPNDGQHWKRLQNDSAYLAEHGITAVWIPPAYKGTSQADVGYGAYDLYDLGEFHQKGTVRTKYGTKGELQSAIKSLHSRDINVYGDVVINHKGGADATEDVTAVEVDPADRNRVISGEHLIKAWTHFHFPGRGSTYSDFKWHWYHFDGTDWDESRKLNRIYKFQGKAWDWEVSNENGNYDYLMYADIDYDHPDVAAEIKRWGTWYANELQLDGFRLDAVKHIKFSFLRDWVNHVREKTGKEMFTVAEYWQNDLGALENYLNKTNFNHSVFDVPLHYQFHAASTQGGGYDMRKLLNGTVVSKHPLKSVTFVDNHDTQPGQSLESTVQTWFKPLAYAFILTRESGYPQVFYGDMYGTKGDSQREIPALKHKIEPILKARKQYAYGAQHDYFDHHDIVGWTREGDSSVANSGLAALITDGPGGAKRMYVGRQNAGQTWHDITGNRSEPVVINSEGWGEFHVNGGSVSIYVQR

SEQ ID NO: 30500 - protein, 481 aa, Bacillus licheniformis
LNGTLMQYFEWYMPNDGQHWKRLQNDSAYLAEHGITAVWIPPAYKGTSQADVGYGAYDLYDLGEFHQKGTVRTKYGTKGELQSAIKSLHSRDINVYGDVVINHKGGADATEDVTAVEVDPADRNRVISGEHLIKAWTHFHFPGRGSTYSDFKWHWYHFDGTDWDESRKLNRIYKFQGKAWDWEVSNENGNYDYLTYADIDYDHPDVAAEIKRWGTWYANELQLDGFRLDAVKHIKFSFLRDWVNHVREKTGKEMFTVAEYWQNDLGALENYLNKTNFNHSVFDVPLHYQFHAASTQGGGYDMRKLLNGTVVSKHPLKSVTFVDNHDTQPGQSLESTVQTWFKPLAYAFILTRESGYPQVFYGDMYGTKGDSQREIPALKHKIEPILKARKQYAYGAQHDYFDHHDIVGWTREGDSSVANSGLAALITDGPGGAKRMYVGRQNAGETWHDITGNRSEPVVINSEGWGEFHVNGGSVSIYVQR

SEQ ID NO: 30501 - protein, 481 aa, Bacillus licheniformis
LNGTLMQYFEWYMPNDGQHWKRLQNDSAYLAEHGITAVWIPPAYKGTSQADVGYGAYDLYDLGEFHQKGTVRTKYGTKGELQSAIKSLHSRDINVYGDVVINHKGGADATEDVTAVEVDPADRNRVISGEHLIKAWTHFHFPGRGSTYSDFKWHWYHFDGTDWDESRKLNRIYKFQGKAWDWEVSNENGNYDYLMYADIDYDHPDVAAEIKRWGTWYANELQLDGFRLDAVKHIKFSFLRDWVNHVREKTGKEMFTVAEYWQNDLGALENYLNKTNFNHSVFDVPLHYQFHAASTQGGGYDMRKLLNGTVVSKHPLKSVTFVDNHDTQPGQSLESTVQTWFKPLAYAFILTRESGYPQVFYGDYYGTKGDSQREIPALKHKIEPILKARKQYAYGAQHDYFDHHDIVGWTREGDSSVANSGLAALITDGPGGAKRMYVGRQNAGETWHDITGNRSEPVVINSEGWGEFHVNGGSVSIYVQR

SEQ ID NO: 30502 - protein, 481 aa, Synthetic construct
LNGTLMQYFEWYMPNDGQHWKRLQNDSAYLAEHGITAVWIPPAYKGTSQADVGYGAYDLYDLGEFHQKGTVRTKYGTKGELQSAIKSLHSRDINVYGDVVINHKGGADATEDVTAVEVDPADRNRVISGEHLIKAWTHFHFPGRGSTYSDFKWHWYHFDGTDWDESRKLNRIYKFQGKAWDWEVSNENGNYDYLAYADIDYDHPDVAAEIKRWGTWYANELQLDGFRLDAVKHIKFSFLRDWVNHVREKTGKEMFTVAEYWQNDLGALENYLNKTNFNHSVFDVPLHYQFHAASTQGGGYDMRKLLNGTVVSKHPLKSVTFVDNHDTQPGQSLESTVQTWFKPLAYAFILTRESGYPQVFYGDMYGTKGDSQREIPALKHKIEPILKARKQYAYGAQHDYFDHHDIVGWTREGDSSVANSGLAALITDGPGGAKRMYVGRQNAGETWHDITGNRSEPVVINSEGWGEFHVNGGSVSIYVQR

SEQ ID NO: 30503 - protein, 481 aa, Synthetic construct
LNGTLMQYFEWYMPNDGQHWKRLQNDSAYLAEHGITAVWIPPAYKGTSQADVGYGAYDLYDLGEFHQKGTVRTKYGTKGELQSAIKSLHSRDINVYGDVVIDHKGGADATEDVTAVEVDPADRNRVISGEHLIKAWTHFHFPGRGSTYSDFKWHWYHFDGTDWDESRKLNRIYKFQGKAWDWEVSNENGNYDYLMYADIDYDHPDVAAEIKRWGTWYANELQLDGFRLDAVKHIKFSFLRDWVNHVREKTGKEMFTVAEYWQNDLGALENYLNKTNFNHSVFDVPLHYQFHAASTQGGGYDMRKLLNGTVVSKHPLKSVTFVDNHDTQPGQSLESTVQTWFKPLAYAFILTRESGYPQVFYGDMYGTKGDSQREIPALKHKIEPILKARKQYAYGAQHDYFDHHDIVGWTREGDSSVANSGLAALITDGPGGAKRMYVGRQNAGETWHDITGNRSEPVVINSEGWGEFHVNGGSVSIYVQR

SEQ ID NO: 30504 - protein, 481 aa, Synthetic construct
LNGTLMQYFEWYMPNDGQHWRRLQNDSAYLAEHGITAVWIPPAYKGTSQADVGYGAYDLYDLGEFHQKGTVRTKYGTKGELQSAIKSLHSRDINVYGDVVINHKGGADATEDVTAVEVDPADRNRVISGEHLIKAWTHFHFPGRGSTYSDFKWHWYHFDGTDWDESRKLNRIYKFQGKAWDWEVSNENGNYDYLMYADIDYDHPDVAAEIKRWGTWYANELQLDGFRLDAVKHIKFSFLRDWVNHVREKTGKEMFTVAEYWQNDLGALENYLNKTNFNHSVFDVPLHYQFHAASTQGGGYDMRKLLKGTVVSKHPLKSVTFVDNHDTQPGQSLESTVQTWFKPLAYAFILTRESGYPQVFYGDMYGTKGDSQREIPALKHKIEPILKARKQYAYGAQHDYFDHHDIVGWTREGDSSVANSGLAALITDGPGGAKRMYVGRQNAGETWHDITGNRSEPVVINSEGWGEFHVNGGSVSIYVQR

SEQ ID NO: 30505 - protein, 481 aa, Bacillus licheniformis
LNGTLMQYFEWYMPNDGQHWRRLQNDSAYLAEHGITAVWIPPAYKGTSQADVGYGAYDLYDLGEFHQKGTVRTKYGTKGELQSAIKSLHSRDINVYGDVVINHKGGADATEDVTAVEVDPADRNRVISGEHRIKAWTHFHFPGRGSTYSDFKWHWYHFDGTDWDESRKLNRIYKFQGKAWDWEVSNENGNYDYLMYADIDYDHPDVAAEIKRWGTWYANELQLDGFRLDAVKHIKFSFLRDWVNHVREKTGKEMFTVAEYWQNDLGALENYLNKTNFNHSVFDVPLHYQFHAASTQGGGYDMRKLLNSTVVSKHPLKAVTFVDNHDTQPGQSLESTVQTWFKPLAYAFILTRESGYPQVFYGDMYGTKGDSQREIPALKHKIEPILKARKQYAYGAQHDYFDHHDIVGWTREGDSSVANSGLAALITDGPGGAKRMYVGRQNAGETWHDITGNRSEPVVINSEGWGEFHVNGGSVSIYVQR

SEQ ID NO: 30506 - protein, 481 aa, Bacillus licheniformis
LNGTLMQYFEWYSPNDGQHWKRLQNDSAYLAEHGITAVWIPPAYKGTSQADVGYGAYDLYDLGEFHQKGTVRTKYGTKGELQSAIKSLHSRDINVYGDVVINHKGGADATEDVTAVEVDPADRNRVISGEHLIKAWTHFHFPGRGSTYSDFKWHWYHFDGTDWDESRKLNRIYKFQGKAWDWEVSNENGNYDYLTYADIDYDHPDVAAEIKRWGTWYANELQLDGFRLDAVKHIKFSFLRDWVNHVREKTGKEMFTVAEYWQNDLGALENYLNKTNFNHSVFDVPLHYQFHAASTQGGGYDMRKLLNGTVVSKHPLKSVTFVDNHDTQPGQSLESTVQTWFKPLAYAFILTRESGYPQVFYGDMYGTKGDSQREIPALKHKIEPILKARKQYAYGAQHDYFDHHDIVGWTREGDSSVANSGLAALITDGPGGAKRMYVGRQNAGETWHDITGNRSEPVVINSEGWGEFHVNGGSVSIYVQR

SEQ ID NO: 30507 - protein, 481 aa, Bacillus licheniformis
LNGTLMQYFEWYMPNDGQHWRRLQNDSAYLAEHGITAVWIPPAYKGTSQADVGYGAYDLYDLGEFHQKGTVRTKYGTKGELQSAIKSLHSRDINVYGDVVINHKGGADATEDVTAVEVDPADRNRVISGEHLIKAWTHFHFPGRGSTYSDFKWHWYHFDGTDWDESRKLNRIYKFQGKAWDWEVSNENGNYDYLMYADIDYDHPDVAAEIKRWGTWYANELQLDGFRLDAVKHIKFSFLRDWVNHVREKTGKEMFTVAEYWQNDLGALENYLNKTNFNHSVFDVPLHYQFHAASTQGGGYDMRKLLNGTVVSKHPLKSVTFVDNHDTQPGQSLESTVQTWFKPLAYAFILTRESGYPQVFYGDMYGTKGDSQREIPALKHKIEPILKARKQYAYGAQHDYFDHHDIVGWTREGDSSVANSGLAALITDGPGGAKRMYVGRQNAGETWHDITGNRSEPVVINSEGWGEFHVNGGSVSIYVQR

SEQ ID NO: 30508 - protein, 481 aa, Synthetic construct
LNGTLMQYFEWYMPNDGQHWKRLQNDSAYLAEHGITAVWIPPAYKGTSQADVGYGAYDLYDLGEFHQKGTVRTKYGTKGELQSAIKSLHSRDINVYGDVVINHKGGADATEDVTAVEVDPADRNRVISGEHLIKAWTHFHFPGRGSTYSDFKWHWYHFDGTDWDESRKLNRIYKFQGKAWDWEVDNENGNYDYLMYADIDYDHPDVAAEIKRWGTWYANELQLDGFRLDAVKHIKFSFLRDWVNHVREKTGKEMFTVAEYWQNDLGALENYLNKTNFNHSVFDVPLHYQFHAASTQGGGYDMRKLLNGTVVSKHPLKSVTFVDNHDTQPGQSLESTVQTWFKPLAYAFILTRESGYPQVFYGDMYGTKGDSQREIPALKHKIEPILKARKQYAYGAQHDYFDHHDIVGWTREGDSSVANSGLAALITDGPGGAKRMYVGRQNAGETWHDITGNRSEPVVINSEGWGEFHVNGGSVSIYVQR

SEQ ID NO: 30509 - protein, 481 aa, Synthetic construct
LNGTLMQYFEWYMPNDGQHWRRLQNDSAYLAEHGITAVWIPPAYKGTSQADVGYGAYDLYDLGEFHQKGTVRTKYGTKGELQSAIKSLHSRDINVYGDVVINHKGGADATEDVTAVEVDPADRNRVISGEHLIKAWTHFHFPGRGSTYSDFKWHWYHFDGTDWDESRKLNRIYKFQGKAWDWEVSNENGNYDYLMYADIDYDHPDVAAEIKRWGTWYANELQLDGFRLDAVKHIKFSFLRDWVNHVREKTGKEMFTVAEYWQNDLGALENYLNKTNFNHSVFDVPLHYQFHAASTQGGGYDMRKLLEGTVVSKHPLKSVTFVDNHDTQPGQSLESTVQTWFKPLAYAFILTRESGYPQVFYGDMYGTKGDSQREIPALKHKIEPILKARKQYAYGAQHDYFDHHDIVGWTREGDSSVANSGLAALITDGPGGAKRMYVGRQNAGETWHDITGNRSEPVVINSEGWGEFHVNGGSVSIYVQR

SEQ ID NO: 30510 - protein, 481 aa, Bacillus sp.
LNGTLMQYFEWYMPNDGQHWKRLQNDSAYLAEHGITAVWIPPAYKGTSQADVGYGAYDLYDLGEFHQKGTVRTKYGTKGELQSAIKSLHSRDINVYGDVVINHKGGADATEDVTAVEVDPADRNRVISGEHLIKAWTHFHFPGRGSIYSDFKWHWYHFDGTDWDESRKLNRIYKFQGKAWDWEVSNENGNYDYLMYADIDYDHPDVAAEIKRWGTWYANELQLDGFRLDAVKHIKFSFLRDWVNHVREKTGKEMFTVAEYWQNDLGALENYLNKTNFNHSVFDVPLHYQFHAASTQGGGYDMRKLLNGTVVSKHPLKSVTFVDNHDTQPGQSLESTVQTWFKPLAYAFILTRESGYPQVFYGDMYGTKGDSQREIPALKHKIEPILKARKQYAYGAQHDYFDHHDIVGWTREGDSSVANSGLAALITDGPGGAKRMYVGRQNAGETWHDITGNRSEPVVINSEGWGEFHVNGGSVSIYVQR

SEQ ID NO: 30511 - protein, 481 aa, Bacillus licheniformis
LNGTLMQYFEWYMPNDGQHWKRLQNDSAYLAEHGITAVWIPPAYKGTSQADVGYGAYDLYDLGEFHQKGTVRTKYGTKGELQSAIKSLHSRDINVYGDVVINHKGGADATEDVTAVEVDPADRNRVISGEHLIKAWTHFHFPGRGSTYSDFKWHWYHFDGTDWDESRKLNRIYKFQGKAWDWEVSNENGNYDYLMYADIDYDHPDVAAEIKRWGTWYANELQLDGFRLDAVKHIKFSFLRDWVNHVREKTGKEMFTVAEYWQNDLGALENYLNKTNFNHSVFDVPLHYQFHAASTQGGGYDMRKLLNGTVVSKHPLKSVTFVDNHDTQPGQSLESTVQTWFKPLAYAFILTRESGYPQVFYGDMYGTKGDSQREIPALKHKIEPILKARKQYAYGAQHDYFDHHDIVGWTREGDSSVANSGLAALITDGPGGAKRAYVGRQNAGETWHDITGNRSEPVVINSEGWGEFHVNGGSVSIYVQR

SEQ ID NO: 30512 - protein, 481 aa, Bacillus licheniformis
LNGTLMQYFEWYMPNDGQHWKRLQNDSAYLAEHGITAVWIPPAYKGTSQADVGYGAYDLYDLGEFHQKGTVRTKYGTKGELQSAIKSLHSRDINVYGDVVINHKGGADATEDVTAVEVDPADRNRVISGEHLIKAWTHFHFPGRGSTYSDFKWHWYHFDGTDWDESRKLNRIYKFQGKAWDWEVSNENGNYDYLMYADIDYDHPDVAAEIKRWGTWYANELQLDGFRLDAVKHIKYSFLRDWVNHVREKTGKEMFTVAEYWQNDLGALENYLNKTNFNHSVFDVPLHYQFHAASTQGGGYDMRKLLNGTVVSKHPLKSVTFVDNHDTQPGQSLESTVQTWFKPLAYAFILTRESGYPQVFYGDMYGTKGDSQREIPALKHKIEPILKARKQYAYGAQHDYFDHHDIVGWTREGDSSVANSGLAALITDGPGGAKRMYVGRQNAGETWHDITGNRSEPVVINSEGWGEFHVNGGSVSIYVQR

SEQ ID NO: 30513 - protein, 481 aa, Bacillus licheniformis
LNGTLMQYFEWYMPNDGQHWKRLQNDSAYLAEHGITAVWIPPAYKGTSQADVGYGAYDLYDLGEFHQKGTVRTKYGTKGELQSAIKSLHSRDINVYGDVVINHKGGADATEDVTAVEVDPADRNRVISGEHLIKAWTHFHFPGRGSTYSDFKWHWYHFDGTDWDESRKLNRIYKFQGKAWDWEVSNENGNYDYLMYADIDYDHPDVAAEIKRWGTWYANELQLDGFRLDAVKHIKFSFLRDWVNHVREKTGKEMFTVAEYWQNDLGALENYLNKTNFNHSVFDVPLHYQFHAASTQGGGYDMRKLLNGTVVSKHPLKSVTFVDNHDTQPGQSLESTVQTWFKPLAYAFILTRESGYPQVFYGDAYGTKGDSQREIPALKHKIEPILKARKQYAYGAQHDYFDHHDIVGWTREGDSSVANSGLAALITDGPGGAKRMYVGRQNAGETWHDITGNRSEPVVINSEGWGEFHVNGGSVSIYVQR

SEQ ID NO: 30514 - protein, 481 aa, Bacillus licheniformis
LNGTLMQYFEWYMPNDGQHWKRLQNDSAYLAEHGITAVWIPPAYKGTSQADVGYGAYDLYDLGEFHQKGTVRTKYGTKGELQSAIKSLHSRDINVYGDVVINHKGGADATEDVTAVEVDPADRNRVISGEHLIKAYTHFHFPGRGSTYSDFKWHWYHFDGTDWDESRKLNRIYKFQGKAWDWEVSNENGNYDYLMYADIDYDHPDVAAEIKRWGTWYANELQLDGFRLDAVKHIKFSFLRDWVNHVREKTGKEMFTVAEYWQNDLGALENYLNKTNFNHSVFDVPLHYQFHAASTQGGGYDMRKLLNGTVVSKHPLKSVTFVDNHDTQPGQSLESTVQTWFKPLAYAFILTRESGYPQVFYGDMYGTKGDSQREIPALKHKIEPILKARKQYAYGAQHDYFDHHDIVGWTREGDSSVANSGLAALITDGPGGAKRMYVGRQNAGETWHDITGNRSEPVVINSEGWGEFHVNGGSVSIYVQR

SEQ ID NO: 30515 - protein, 481 aa, Synthetic construct
LNGTLMQYFEWYMPNDGQHWRRLQNDSAYLAEHGITAVWIPPAYKGTSQADVGYGAYDLYDLGEFHQKGTVRTKYGTKGELQSAIKSLHSRDINVYGDVVINHKGGADATEDVTAVEVDPADRNRVISGEHLIKAWTHFHFPGRGSTYSDFKWHWYHFDGTDWDESRKLNRIYKFQGKAWDWEVSNENGNYDYLMYADIDYDHPDVAAEIKRWGTWYANELQLDGFRLDAVKHIKFSFLRDWVNHVREKTGKEMFTVAEYWQNDLGALENYLNKTNFNHSVFDVPLHYQFHAASTQGGGYDMRKLLGGTVVSKHPLKSVTFVDNHDTQPGQSLESTVQTWFKPLAYAFILTRESGYPQVFYGDMYGTKGDSQREIPALKHKIEPILKARKQYAYGAQHDYFDHHDIVGWTREGDSSVANSGLAALITDGPGGAKRMYVGRQNAGETWHDITGNRSEPVVINSEGWGEFHVNGGSVSIYVQR

SEQ ID NO: 30516 - protein, 481 aa, Bacillus sp.
LNGTLMQYFEWYMPNDGQHWKRLQNDSAYLAEHGITAVWIPPAYKGTSQADVGYGAYDLYDLGEFHQKGTVRTKYGTKGELQSAIKSLHSRDINVYGDVVINHKGGADTTEDVTAVEVDPADRNRVISGEHLIKAWTHFHFPGRGSTYSDFKWHWYHFDGTDWDESRKLNRIYKFQGKAWDWEVSNENGNYDYLMYADIDYDHPDVAAEIKRWGTWYANELQLDGFRLDAVKHIKFSFLRDWVNHVREKTGKEMFTVAEYWQNDLGALENYLNKTNFNHSVFDVPLHYQFHAASTQGGGYDMRKLLNGTVVSKHPLKSVTFVDNHDTQPGQSLESTVQTWFKPLAYAFILTRESGYPQVFYGDMYGTKGDSQREIPALKHKIEPILKARKQYAYGAQHDYFDHHDIVGWTREGDSSVANSGLAALITDGPGGAKRMYVGRQNAGETWHDITGNRSEPVVINSEGWGEFHVNGGSVSIYVQR

SEQ ID NO: 30517 - protein, 481 aa, Bacillus licheniformis
LNGTLMQYFEWYTPNDGQHWKRLQNDSAYLAEHGITAVWIPPAYKGTSQADVGYGAYDLYDLGEFHQKGTVRTKYGTKGELQSAIKSLHSRDINVYGDVVINHKGGADATEDVTAVEVDPADRNRVISGEHLIKAYTHFHFPGRGSTYSDFKWHWYHFDGTDWDESRKLNRIYKFQGKAWDWEVSNENGNYDYLTYADIDYDHPDVAAEIKRWGTWYANELQLDGFRLDAVKHIKFSFLRDWVNHVREKTGKEMFTVAEYWQNDLGALENYLNKTNFNHSVFDVPLHYQFHAASTQGGGYDMRKLLNGTVVSKHPLKSVTFVDNHDTQPGQSLESTVQTWFKPLAYAFILTRESGYPQVFYGDMYGTKGDSQREIPALKHKIEPILKARKQYAYGAQHDYFDHHDIVGWTREGDSSVANSGLAALITDGPGGAKRMYVGRQNAGETWHDITGNRSEPVVINSEGWGEFHVNGGSVSIYVQR

SEQ ID NO: 30518 - protein, 481 aa, Bacillus licheniformis
LNGTLMQYFEWYMPNDGQHWKRLQNDSAYLAEHGITAVWIPPAYKGTSQADVGYGAYDLYDLGEFHQKGTVRTKYGTKGELQSAIKSLHSRDINVYGDVVINHKGGADATEDVTAVEVDPADRNRVISGEHLIKAWTHFHFPGRGSTYSDFKWHWYHFDGTDWDESRKLNRIYKFQGKAWDWEVSNENGNYDYLMYADIDYDHPDVAAEIKRWGTWYANELQLDGFRLDAVKHIKFSFLRDWVNHVREKTGKEMFTVAEYWQNDLGALENYLNKTNFNHSVFDVPLHYQFHAASTQGGGYDMRKLLNGTVVSKHPLKSVTFVDNHDTQPGQSLESTVQTWFKPLAYAFILTRESGYPQVFYGDMYGTKGDSQREIPALKHKIEPILEARKQYAYGAQHDYFDHHDIVGWTREGDSSVANSGLAALITDGPGGAKRMYVGRQNAGETWHDITGNRSEPVVINSEGWGEFHVNGGSVSIYVQR

SEQ ID NO: 30519 - protein, 481 aa, Bacillus licheniformis
LNGTLMQYFEWYMPNDGQHWKRLQNDSAYLAEHGITAVWIPPAYKGTSQADVGYGAYDLYDLGEFHQKGTVRTKYGTKGELQSAIKSLHSRDINVYGDVVINHKGGADATEDVTAVEVDPADRNRVISGEHLIKAWTHFHFPGRGSTYSDFKWHWYHFDGTDWDESRKLNRIYKFQGKAWDWEVSNENGNYDYLIYADIDYDHPDVAAEIKRWGTWYANELQLDGFRLDAVKHIKFSFLRDWVNHVREKTGKEMFTVAEYWQNDLGALENYLNKTNFNHSVFDVPLHYQFHAASTQGGGYDMRKLLNGTVVSKHPLKSVTFVDNHDTQPGQSLESTVQTWFKPLAYAFILTRESGYPQVFYGDMYGTKGDSQREIPALKHKIEPILKARKQYAYGAQHDYFDHHDIVGWTREGDSSVANSGLAALITDGPGGAKRMYVGRQNAGETWHDITGNRSEPVVINSEGWGEFHVNGGSVSIYVQR

SEQ ID NO: 30520 - protein, 481 aa, Bacillus licheniformis
LNGTLMQYFEWYMPNDGQHWKRLQNDSAYLAEHGITAVWIPPAYKGTSQADVGYGAYDLYDLGEFHQKGTVRTKYGTKGELQSAIKSLHSRDINVYGDVVINHKGGADATEDVTAVEVDPNDRNRVISGEHLIKAWTHFHFPGRGSTYSDFKWHWYHFDGTDWDESRKLNRIYKFQGKAWDWEVSNENGNYDYLMYADIDYDHPDVAAEIKRWGTWYANELQLDGFRLDAVKHIKFSFLRDWVNHVREKTGKEMFTVAEYWQNDLGALENYLNKTNFNHSVFDVPLHYQFHAASTQGGGYDMRKLLNGTVVSKHPLKSVTFVDNHDTQPGQSLESTVQTWFKPLAYAFILTRESGYPQVFYGDMYGTKGDSQREIPALKHKIEPILKARKQYAYGAQHDYFDHHDIVGWTREGDSSVANSGLAALITDGPGGAKRMYVGRQNAGETWHDITGNRSEPVVINSEGWGEFHVNGGSVSIYVQR

SEQ ID NO: 30521 - protein, 481 aa, Bacillus licheniformis
LNGTLMQYFEWYMPNDGQHWKRLQNDSAYLAEHGITAVWIPPAYKGTSQADVGYGAYDLYDLGEFHQKGTVRTKYGTKGELQSAIKSLHSRDINVYGDVVINHKGGADATEDVTAVEVDPADRNRVISGEHLIKAWTHFHFPGRGSTYSDFKWHWYHFDGTDWDESRKLNRIYKFQGKAWDWEVSNENGNYDYLMYADIDYDHPDVAAEIKRWGTWYANELQLDGFRLDAVKHIKFSFLRDWVNHVREKTGKEAFTVAEYWQNDLGALENYLNKTNFNHSVFDVPLHYQFHAASTQGGGYDMRKLLNGTVVSKHPLKSVTFVDNHDTQPGQSLESTVQTWFKPLAYAFILTRESGYPQVFYGDMYGTKGDSQREIPALKHKIEPILKARKQYAYGAQHDYFDHHDIVGWTREGDSSVANSGLAALITDGPGGAKRMYVGRQNAGETWHDITGNRSEPVVINSEGWGEFHVNGGSVSIYVQR

SEQ ID NO: 30522 - protein, 481 aa, Bacillus licheniformis
LNGTLMQYFEWYMPNDGQHWKRLQNDSAYLAEHGITAVWIPPAYKGTSQADVGYGAYDLYDLGEFHQKGTVRTKYGTKGELQSAIKSLHSRDINVYGDVVINHKGGADATEDVTAVEVDPADRNRVISGEHLIKAWTHFHFPGRGSTYSDFKWHWYHFDGTDWDESRKLNRIYKFQGKAWDWEVSNENGNYDYLMYADIDYDHPDVAAEIKRWGTWYANELQLDGFRLDAVKHIKFSFLRDWVNHVREKTGKEMFTVAEYWQNDLGALENYLNKTNFNHSVFDVPLHYQFHAASTQGGGYDMRKLLNGTVVSKHPLKSVTFVDNHDTQPGQALESTVQTWFKPLAYAFILTRESGYPQVFYGDMYGTKGDSQREIPALKHKIEPILKARKQYAYGAQHDYFDHHDIVGWTREGDSSVANSGLAALITDGPGGAKRMYVGRQNAGETWHDITGNRSEPVVINSEGWGEFHVNGGSVSIYVQR

SEQ ID NO: 30523 - protein, 481 aa, Bacillus licheniformis
LNGTLMQYFEWYMPNDGQHWKRLQNDSAYLAEHGITAVWIPPAYKGTSQADVGYGAYDLYDLGEFHQKGTVRTKYGTKGELQSAIKSLHSRDINVYGDVVINHKGGADATEDVTAVEVDPADRNRVISGEHRIKAWTHFHFPGRGSTYSDFKWHWYHFDGTGWDESRKLNRIYKFQGKAWDWEVSNENGNYDYLMYADIDYDHPDVAAKIKRWGTWYANELQLDGFRLDAVKHIKFSFLRDWVNHVREKTGKEMFTVAEYWQNDLGALENYLNKTNFNHSVFDVPLHYQFHAASTQGGGYDMRKLLNGTVVSKHPLKAVTFVDNHDTQPGQSLESTVQTWFKPLAYAFILTRESGYPQVFYGDMYGTKGDSQREIPALKHKIEPILKARKQYAYGAQHDYFDHHDIVGWTREGDSSVANSGLAALITDGPGGAKRMYVGRQNAGETWHDITGNRSEPVVINSEGWGEFHVNGGSVSIYVQR

SEQ ID NO: 30524 - protein, 481 aa, Bacillus licheniformis
LNGTLMQYFEWYMPNDGQHWKRLQNDSAYLAEHGITAVWIPPAYKGTSQADVGYGAYDLYDLGEFHQKGTVRTKYGTKGELQSAIKSLHSRDINVYGDVVINHKGGADATEDVTAVEVDPADRNRVISGEHLIKAWTHFHFPGRGSTYSDFKWHWYHFDGTDWDQSRKLNRIYKFQGKAWDWEVSNENGNYDYLMYADIDYDHPDVAAEIKRWGTWYANELQLDGFRLDAVKHIKFSFLRDWVNHVREKTGKEMFTVAEYWQNDLGALENYLNKTNFNHSVFDVPLHYQFHAASTQGGGYDMRKLLNGTVVSKHPLKSVTFVDNHDTQPGQSLESTVQTWFKPLAYAFILTRESGYPQVFYGDMYGTKGDSQREIPALKHKIEPILKARKQYAYGAQHDYFDHHDIVGWTREGDSSVANSGLAALITDGPGGAKRMYVGRQNAGETWHDITGNRSEPVVINSEGWGEFHVNGGSVSIYVQR

SEQ ID NO: 30525 - protein, 481 aa, Synthetic construct
LNGTLMQYFEWYMPNDGQHWRRLQNDSAYLAEHGITAVWIPPAYKGTSQADVGYGAYDLYDLGEFHQKGTVRTKYGTKGELQSAIKSLHSRDINVYGDVVINHKGGADATEDVTAVEVDPADRNRVISGEHLIKAWTHFHFPGRGSTYSDFKWHWYHFDGTDWDESRKLNRIYKFQGKAWDWEVSNENGNYDYLMYADIDYDHPDVAAEIKRWGTWYANELQLDGFRLDAVKHIKFSFLRDWVNHVREKTGKEMFTVAEYWQNDLGALENYLNKTNFNHSVFDVPLHYQFHAASTQGGGYDMRKLLFGTVVSKHPLKSVTFVDNHDTQPGQSLESTVQTWFKPLAYAFILTRESGYPQVFYGDMYGTKGDSQREIPALKHKIEPILKARKQYAYGAQHDYFDHHDIVGWTREGDSSVANSGLAALITDGPGGAKRMYVGRQNAGETWHDITGNRSEPVVINSEGWGEFHVNGGSVSIYVQR

SEQ ID NO: 30526 - protein, 481 aa, Bacillus licheniformis
LNGTLMQYFEWYMPNDGQHWKRLQNDSAYLAEHGITAVWIPPAYKGTSQADVGYGAYDLYDLGEFHQKGTVRTKYGTKGELQSAIKSLKSRDINVYGDVVINHKGGADATEDVTAVEVDPADRNRVISGEHLIKAWTHFHFPGRGSTYSDFKWHWYHFDGTDWDESRKLNRIYKFQGKAWDWEVSNENGNYDYLMYADIDYDHPDVAAEIKRWGTWYANELQLDGFRLDAVKHIKFSFLRDWVNHVREKTGKEMFTVAEYWQNDLGALENYLNKTNFNHSVFDVPLHYQFHAASTQGGGYDMRKLLNGTVVSKHPLKSVTFVDNHDTQPGQSLESTVQTWFKPLAYAFILTRESGYPQVFYGDMYGTKGDSQREIPALKHKIEPILKARKQYAYGAQHDYFDHHDIVGWTREGDSSVANSGLAALITDGPGGAKRMYVGRQNAGETWHDITGNRSEPVVINSEGWGEFHVNGGSVSIYVQR

SEQ ID NO: 30527 - protein, 481 aa, Bacillus licheniformis
LNGTLMQYFEWYMPNDGQHWKRLQNDSAYLAEHGITAVWIPPAYKGTSQADVGYGAYDLYDLGEFHQKGTVRTKYGTKGELQSAIKSLHSRDINVYGDVVINHKGGADATEDVTAVEVDPADRNRVISGEHLIKAWTHFHFPGRGSTYSDFKWHWYHFDGTDWDESRKLNRIYKFQGKAWDWEVSNENGNYDYLMYADIDYDHPDVAAEIKRWGTWYANELQLDGFRLDAVKHIKFSFLRDWVNHVREKTGKNMFTVAEYWQNDLGALENYLNKTNFNHSVFDVPLHYQFHAASTQGGGYDMRKLLNGTVVSKHPLKSVTFVDNHDTQPGQSLESTVQTWFKPLAYAFILTRESGYPQVFYGDMYGTKGDSQREIPALKHKIEPILKARKQYAYGAQHDYFDHHDIVGWTREGDSSVANSGLAALITDGPGGAKRMYVGRQNAGETWHDITGNRSEPVVINSEGWGEFHVNGGSVSIYVQR

SEQ ID NO: 30528 - protein, 481 aa, Bacillus licheniformis
LNGTLMQYFEWYMPNDGQHWKRLQNDSAYLAEHGITAVWIPPAYKGTSQADVGYGAYDLYDLGEFHQKGTVRTKYGTKGELQSAIKSLHSRDINVYGDVVINHKGGADATEDVTAVEVDPADRNRVISGEHLIKAWTHFHFPGRGSTYSDFKWHWYHFDGTDWDESRKLNRIYKFQGKAWDWEVSNENGNYDYLGYADIDYDHPDVAAEIKRWGTWYANELQLDGFRLDAVKHIKFSFLRDWVNHVREKTGKEMFTVAEYWQNDLGALENYLNKTNFNHSVFDVPLHYQFHAASTQGGGYDMRKLLNGTVVSKHPLKSVTFVDNHDTQPGQSLESTVQTWFKPLAYAFILTRESGYPQVFYGDMYGTKGDSQREIPALKHKIEPILKARKQYAYGAQHDYFDHHDIVGWTREGDSSVANSGLAALITDGPGGAKRMYVGRQNAGETWHDITGNRSEPVVINSEGWGEFHVNGGSVSIYVQR

SEQ ID NO: 30529 - protein, 481 aa, Bacillus licheniformis
LNGTLMQYFEWYMPNDGQHWRRLQNDSAYLAEHGITAVWIPPAYKGISQADVGYGAYDLYDLGEFHQKGTVRTKYGTKGELQSAIKSLHSRDINVYGDVVINHKGGADATEDVTAVEVDPADRNRVISGEHLIKAWTHFHFPGRGSTYSDFKWHWYHFDGTDWDESRKLNRIYKFQGKAWDWEVSNENGNYDYLMYADFDYDHPDVAAEIKRWGTWYANELQLDGFRLDAVKHIKFSFLRDWVNHVREKTGKEMFTVAEYWQNDLGALENYLNKTNFNHSVFDVPLHYQFHAASTQGGGYDMRKLLNGTVVSKHPLKSVTFVDNHDTQPGQSLESTVQTWFKPLAYAFILTRESGYPQVFYGDMYGTKGDSQREIPALKHKIEPILKARKQYAYGAQHDYFDHHDIVGWTREGDSSVANSGLAALITDGPGGAKRMYVGRQNAGETWHDITGNRSEPVVINSEGWGEFHVNGGSVSIYVQR

SEQ ID NO: 30530 - protein, 481 aa, Bacillus licheniformis
LNGTLMQYFEWYMPNDGQHWKRLQNDSAYLAEHGITAVWIPPAYKGTSQADVGYGAYDLYDLGEFHQKGTVRTKYGTKGELQSAIKSLHSRDINVYGDVVINHKGGADATEDVTAVEVDPADRNRVISGEHLIKAWTHFHFPGRGSTYSDFKWHWYHFDGTDWDESRKLNRIYKFQGKAWDWEVSNENGNYDYLMYADIDYDHPDVAAEIKRWGTWYANELQLDGFRLDAVKHIKFSFLRDWVNHVREKTGKEMFTVAEFWQNDLGALENYLNKTNFNHSVFDVPLHYQFHAASTQGGGYDMRKLLNGTVVSKHPLKSVTFVDNHDTQPGQSLESTVQTWFKPLAYAFILTRESGYPQVFYGDMYGTKGDSQREIPALKHKIEPILKARKQYAYGAQHDYFDHHDIVGWTREGDSSVANSGLAALITDGPGGAKRMYVGRQNAGETWHDITGNRSEPVVINSEGWGEFHVNGGSVSIYVQR

SEQ ID NO: 30531 - protein, 481 aa, Synthetic construct
LNGTLMQYFEWYMPNDGQHWRRLQNDSAYLAEHGITAVWIPPAYKGTSQADVGYGAYDLYDLGEFHQKGTVRTKYGTKGELQSAIKSLHSRDINVYGDVVINHKGGADATEDVTAVEVDPADRNRVISGEHLIKAWTHFHFPGRGSTYSDFKWHWYHFDGTDWDESRKLNRIYKFQGKAWDWEVSNENGNYDYLMYADIDYDHPDVAAEIKRWGTWYANELQLDGFRLDAVKHIKFSFLRDWVNHVREKTGKEMFTVAEYWQNDLGALENYLNKTNFNHSVFDVPLHYQFHAASTQGGGYDMRKLLRGTVVSKHPLKSVTFVDNHDTQPGQSLESTVQTWFKPLAYAFILTRESGYPQVFYGDMYGTKGDSQREIPALKHKIEPILKARKQYAYGAQHDYFDHHDIVGWTREGDSSVANSGLAALITDGPGGAKRMYVGRQNAGETWHDITGNRSEPVVINSEGWGEFHVNGGSVSIYVQR

SEQ ID NO: 30532 - protein, 481 aa, Synthetic construct
LNGTLMQYFEWYMPNDGQHWRRLQNDSAYLAEHGITAVWIPPAYKGTSQADVGYGAYDLYDLGEFHQKGTVRTKYGTKGELQSAIKSLHSRDINVYGDVVINHKGGADATEDVTAVEVDPADRNRVISGEHLIKAWTHFHFPGRGSTYSDFKWHWYHFDGTDWDESRKLNRIYKFQGKAWDWEVSNENGNYDYLMYADIDYDHPDVAAEIKRWGTWYANELQLDGFRLDAVKHIKFSFLRDWVNHVREKTGKEMFTVAEYWQNDLGALENYLNKTNFNHSVFDVPLHYQFHAASTQGGGYDMRKLLLGTVVSKHPLKSVTFVDNHDTQPGQSLESTVQTWFKPLAYAFILTRESGYPQVFYGDMYGTKGDSQREIPALKHKIEPILKARKQYAYGAQHDYFDHHDIVGWTREGDSSVANSGLAALITDGPGGAKRMYVGRQNAGETWHDITGNRSEPVVINSEGWGEFHVNGGSVSIYVQR

SEQ ID NO: 30533 - protein, 481 aa, Bacillus licheniformis
LNGTLMQYFEWYMPNDGQHWKRLQNDSAYLAEHGITAVWIPPAYKGTSQADVGYGAYDLYDLGEFHQKGTVRTKYGTKGELQSAIKSLHSRDINVYGDVVINHKGGADATEDVTAVEVDPADRNRVISGEHLIKAWTHFHFPGRGSTYSDFKWHWYHFDGTDWDESRKLNRIYKFQGKAWDWEVSNENGNYDYLSYADIDYDHPDVAAEIKRWGTWYANELQLDGFRLDAVKHIKFSFLRDWVNHVREKTGKEMFTVAEYWQNDLGALENYLNKTNFNHSVFDVPLHYQFHAASTQGGGYDMRKLLNGTVVSKHPLKSVTFVDNHDTQPGQSLESTVQTWFKPLAYAFILTRESGYPQVFYGDMYGTKGDSQREIPALKHKIEPILKARKQYAYGAQHDYFDHHDIVGWTREGDSSVANSGLAALITDGPGGAKRMYVGRQNAGETWHDITGNRSEPVVINSEGWGEFHVNGGSVSIYVQR

SEQ ID NO: 30534 - protein, 481 aa, Bacillus licheniformis
LNGTLMQYFEWYMPNDGQHWRRLQNDSAYLAEHGITAVWIPPAYKAISQADVGYGAYDLYDLGEFHQKGTVRTKYGTKGELQSAIKSLHSRDINVYGDVVINHKAGADATEDVTAVEVDPADRNRVISGEHLIKAWTHFHFPGRGSTYSDFKWHWYHFDGTDWDESRKLNRIYKFQGKAWDWEVSNENGNYDYLMYADFDYDHPDVAAEIKRWGTWYANELQLDGFRLDAVKHIKFSFLRDWVNHVREKTGKEMFTVAEYWQNDLGALENYLNKTNFNHSVFDVPLHYQFHAASTQGGGYDMRKLLNGTVVSKHPLKSVTFVDNHDTQPGQSLESTVQTWFKPLAYAFILTRESGYPQVFYGDMYGTKGDSQREIPALKHKIEPILKARKQYAYGAQHDYFDHHDIVGWTREGDSSVANSGLAALITDGPGGAKRMYVGRQNAGETWHDITGNRSEPVVINSEGWGEFHVNGGSVSIYVQR

SEQ ID NO: 30535 - protein, 481 aa, Bacillus licheniformis
LNGTLMQYFEWYMPNDGQHWKRLQNDSAYLAEHGITAVWIPPAYKGTSQADVGYGAYDLYDLGEFHQKGTVRTKYGTKGELQSAIKSLHSRDINVYGDVVINHKGGADATEDVTAVEVDPADRNRVISGEHLIKAXTHFHFPGRGSTYSDFKWHWYHFDGTDWDESRKLNRIYKFQGKAWDWEVSNENGNYDYLMYADIDYDHPDVAAEIKRWGTWYANELQLDGFRLDAVKHIKFSFLRDWVNHVREKTGKEMFTVAEYWQNDLGALENYLNKTNFNHSVFDVPLHYQFHAASTQGGGYDMRKLLNGTVVSKHPLKSVTFVDNHDTQPGQSLESTVQTWFKPLAYAFILTRESGYPQVFYGDMYGTKGDSQREIPALKHKIEPILKARKQYAYGAQHDYFDHHDIVGWTREGDSSVANSGLAALITDGPGGAKRMYVGRQNAGETWHDITGNRSEPVVINSEGWGEFHVNGGSVSIYVQR

SEQ ID NO: 30536 - protein, 481 aa, Synthetic construct
LNGTLMQYFEWYMPNDGQHWRRLQNDSAYLAEHGITAVWIPPAYKGTSQADVGYGAYDLYDLGEFHQKGTVRTKYGTKGELQSAIKSLHSRDINVYGDVVINHKGGADATEDVTAVEVDPADRNRVISGEHLIKAWTHFHFPGRGSTYSDFKWHWYHFDGTDWDESRKLNRIYKFQGKAWDWEVSNENGNYDYLMYADIDYDHPDVAAEIKRWGTWYANELQLDGFRLDAVKHIKFSFLRDWVNHVREKTGKEMFTVAEYWQNDLGALENYLNKTNFNHSVFDVPLHYQFHAASTQGGGYDMRKLLWGTVVSKHPLKSVTFVDNHDTQPGQSLESTVQTWFKPLAYAFILTRESGYPQVFYGDMYGTKGDSQREIPALKHKIEPILKARKQYAYGAQHDYFDHHDIVGWTREGDSSVANSGLAALITDGPGGAKRMYVGRQNAGETWHDITGNRSEPVVINSEGWGEFHVNGGSVSIYVQR

SEQ ID NO: 30537 - protein, 481 aa, Bacillus licheniformis
LNGTLMQYFEWYMPNDGQHWKRLQNDSAYLAEHGITAVWIPPAYKGTSQADVGYGAYDLYDLGEFHQKGTVRTKYGTKGELQSAIKSLHSRDINVYGDVVINHKGGADATEDVTAVEVDPADRNRVISGEHLIKAFTHFHFPGRGSTYSDFKWHWYHFDGTDWDESRKLNRIYKFQGKAWDWEVSNENGNYDYLMYADIDYDHPDVAAEIKRWGTWYANELQLDGFRLDAVKHIKFSFLRDWVNHVREKTGKEMFTVAEYWQNDLGALENYLNKTNFNHSVFDVPLHYQFHAASTQGGGYDMRKLLNGTVVSKHPLKSVTFVDNHDTQPGQSLESTVQTWFKPLAYAFILTRESGYPQVFYGDMYGTKGDSQREIPALKHKIEPILKARKQYAYGAQHDYFDHHDIVGWTREGDSSVANSGLAALITDGPGGAKRMYVGRQNAGETWHDITGNRSEPVVINSEGWGEFHVNGGSVSIYVQR

SEQ ID NO: 30538 - protein, 481 aa, Bacillus licheniformis
LNGTLMQYFEWYMPNDGQHWKRLQNDSAYLAEHGITAVWIPPAYKGTSQADVGYGAYDLYDLGEFHQKGTVRTKYGTKGELQSAIKSLHSRDINVYGDVVINHKGGADATEDVTAVEVDPADRNRVISGEHLIKAWTHFHFPGRGSTYSDFKWHWYHFDGTDWDESRKLNRIYKFQGKAWDWEVSNENGNYDYLWYADIDYDHPDVAAEIKRWGTWYANELQLDGFRLDAVKHIKFSFLRDWVNHVREKTGKEMFTVAEYWQNDLGALENYLNKTNFNHSVFDVPLHYQFHAASTQGGGYDMRKLLNGTVVSKHPLKSVTFVDNHDTQPGQSLESTVQTWFKPLAYAFILTRESGYPQVFYGDMYGTKGDSQREIPALKHKIEPILKARKQYAYGAQHDYFDHHDIVGWTREGDSSVANSGLAALITDGPGGAKRMYVGRQNAGETWHDITGNRSEPVVINSEGWGEFHVNGGSVSIYVQR

SEQ ID NO: 30539 - protein, 481 aa, Bacillus licheniformis
LNGTLMQYFEWYMPNDGQHWKRLQNDSAYLAEHGITAVWIPPAYKGTSQADVGYGAYDLYDLGEFHQKGTVRTKYGTKGELQSAIKSLHSRDINVYGDVVINHKGGADATEDVTAVEVDPADRNRVISGEHLIKAHTHFHFPGRGSTYSDFKWHWYHFDGTDWDESRKLNRIYKFQGKAWDWEVSNENGNYDYLMYADIDYDHPDVAAEIKRWGTWYANELQLDGFRLDAVKHIKFSFLRDWVNHVREKTGKEMFTVAEYWQNDLGALENYLNKTNFNHSVFDVPLHYQFHAASTQGGGYDMRKLLNGTVVSKHPLKSVTFVDNHDTQPGQSLESTVQTWFKPLAYAFILTRESGYPQVFYGDMYGTKGDSQREIPALKHKIEPILKARKQYAYGAQHDYFDHHDIVGWTREGDSSVANSGLAALITDGPGGAKRMYVGRQNAGETWHDITGNRSEPVVINSEGWGEFHVNGGSVSIYVQR

SEQ ID NO: 30540 - protein, 481 aa, Bacillus licheniformis
LNGTLMQYFEWYMPNDGQHWKRLQNDSAYLAEHGITAVWIPPAYKGTSQADVGYGAYDLYDLGEFHQKGTVRTKYGTKGELQSAIKSLHSRDINVYGDVVINHKGGADATEDVTAVEVDPADRNRVISGEHLIKAWTHFHFPGRGSTYSDFKWHWYHFDGTDWDESRKLNRIYKFQGKAWDWEVSNENGNYDYLMYADIDYDHPDVAAEIKRWGTWYANELQLDGFRLDAVKHIKFSFLRDWVNHVREKTGKEMFTVAEYWQNDLGALENYLNKTNFNHSVFDVPLHYQFHAASTQGGGYDMRKLLNGTVVSKHPLKSVTFVDNHDTQPGQSLESTVQTWFKPLAYAFILTRESGYPQVFYGDMYGTKGDSQREIPALKHKIEPILKARQQYAYGAQHDYFDHHDIVGWTREGDSSVANSGLAALITDGPGGAKRMYVGRQNAGETWHDITGNRSEPVVINSEGWGEFHVNGGSVSIYVQR

SEQ ID NO: 30541 - protein, 481 aa, Bacillus licheniformis
LNGTLMQYFEWYMPNDGQHWKRLQNDSAYLAEHGITAVWIPPAYKGTSQADVGYGAYDLYDLGEFHQKGTVRTKYGTKGELQSAIKSLHSRDINVYGDVVINHKGGADATEDVTAVEVDPADRNRVISGEHLIKAWTHFHFPGRGSTYSDFKWHWYHFDGTDWDESRKLNRIYKFQGKAWDWEVSNENGNYDYLYYADIDYDHPDVAAEIKRWGTWYANELQLDGFRLDAVKHIKFSFLRDWVNHVREKTGKEMFTVAEYWQNDLGALENYLNKTNFNHSVFDVPLHYQFHAASTQGGGYDMRKLLNGTVVSKHPLKSVTFVDNHDTQPGQSLESTVQTWFKPLAYAFILTRESGYPQVFYGDMYGTKGDSQREIPALKHKIEPILKARKQYAYGAQHDYFDHHDIVGWTREGDSSVANSGLAALITDGPGGAKRMYVGRQNAGETWHDITGNRSEPVVINSEGWGEFHVNGGSVSIYVQR

SEQ ID NO: 30542 - protein, 481 aa, Bacillus licheniformis
LNGTLMQYFEWYMPNDGQHWKRLQNDSAYLAEHGITAVWIPPAYKGTSQADVGYGAYDLYDLGEFHQKGTVRTKYGTKGELQSAIKSLHSRDINVYGDVVINHKGGADATEDVTAVEVDPADRNRVISGEHLIEAWTHFHFPGRGSTYSDFKWHWYHFDGTDWDESRKLNRIYKFQGKAWDWEVSNENGNYDYLMYADIDYDHPDVAAEIKRWGTWYANELQLDGFRLDAVKHIKFSFLRDWVNHVREKTGKEMFTVAEYWQNDLGALENYLNKTNFNHSVFDVPLHYQFHAASTQGGGYDMRKLLNGTVVSKHPLKSVTFVDNHDTQPGQSLESTVQTWFKPLAYAFILTRESGYPQVFYGDMYGTKGDSQREIPALKHKIEPILKARKQYAYGAQHDYFDHHDIVGWTREGDSSVANSGLAALITDGPGGAKRMYVGRQNAGETWHDITGNRSEPVVINSEGWGEFHVNGGSVSIYVQR

SEQ ID NO: 30543 - protein, 481 aa, Bacillus licheniformis
LNGTLMQYFEWYMPNDGQHWKRLQNDSAYLAEHGITAVWIPPAYKGTSQADVGYGAYDLYDLGEFHQKGTVRTKYGTKGELQSAIKSLHSRDINVYGDVVINHKGGADATEDVTAVEVDPADRNRVISGEHLIKAWTHFHFPGRGSTYSDFKWHWYHFDGTDWDESRKLNRIYKFQGKAWDWEVSNENGNYDYLMYADIDYDHPDVAAEIKRWGTWYANELQLDGFRLDAVKHIKFSFLRDWVNHVREKTGKEMFTVAEYWQNDLGALENYLNKTNFNHSVFDVPLHYQFHAASTQGGGYDMRKLLNGTVVSKHPLKSVTFVDNHDTQPGESLESTVQTWFKPLAYAFILTRESGYPQVFYGDMYGTKGDSQREIPALKHKIEPILKARKQYAYGAQHDYFDHHDIVGWTREGDSSVANSGLAALITDGPGGAKRMYVGRQNAGETWHDITGNRSEPVVINSEGWGEFHVNGGSVSIYVQR

SEQ ID NO: 30544 - protein, 481 aa, Bacillus licheniformis
LNGTLMQYFEWYMPNDGQHWKRLQNDSAYLAEHGITAVWIPPAYKGTSQADVGYGAYDLYDLGEFHQKGTVRTKYGTKGELQSAIKSLHSRDINVYGDVVINHKGGADATEDVTAVEVDPADRNRVISGEHLIKAWTHFHFPGRGSTYSDFKWHWYHFDGTDWDESRKLNRIYKFQGKAWDWEVSNENGNYDYLMYADIDYDHPDVAAEIKRWGTWYANELQLDGFRLDAVKHIKFQFLRDWVNHVREKTGKEMFTVAEYWQNDLGALENYLNKTNFNHSVFDVPLHYQFHAASTQGGGYDMRKLLNGTVVSKHPLKSVTFVDNHDTQPGQSLESTVQTWFKPLAYAFILTRESGYPQVFYGDMYGTKGDSQREIPALKHKIEPILKARKQYAYGAQHDYFDHHDIVGWTREGDSSVANSGLAALITDGPGGAKRMYVGRQNAGETWHDITGNRSEPVVINSEGWGEFHVNGGSVSIYVQR

SEQ ID NO: 30545 - protein, 481 aa, Bacillus licheniformis
LNGTLMQYFEWYMPNDGQHWKRLQNDSAYLAEHGITAVWIPPAYKGTSQADVGYGAYDLYDLGEFHQKGTVRTKYGTKGELQSAIKSLHSRDINVYGDVVINHKGGADATEDVTAVEVDPADRNRVISGEHLIKAWTHFHFPGRGSTYSDFKWHWYHFDGTDWDESRKLNRIYKFQGKAWDWEVSNENGNYDYLHYADIDYDHPDVAAEIKRWGTWYANELQLDGFRLDAVKHIKFSFLRDWVNHVREKTGKEMFTVAEYWQNDLGALENYLNKTNFNHSVFDVPLHYQFHAASTQGGGYDMRKLLNGTVVSKHPLKSVTFVDNHDTQPGQSLESTVQTWFKPLAYAFILTRESGYPQVFYGDMYGTKGDSQREIPALKHKIEPILKARKQYAYGAQHDYFDHHDIVGWTREGDSSVANSGLAALITDGPGGAKRMYVGRQNAGETWHDITGNRSEPVVINSEGWGEFHVNGGSVSIYVQR

SEQ ID NO: 30546 - protein, 481 aa, Bacillus licheniformis
LNGTLMQYFEWYMPNDGQHWKRLQNDSAYLAEHGITAVWIPPAYKGTSQADVGYGAYDLYDLGEFHQKGTVRTKYGTKGELQSAIKSLHSRDINVYGDVVINHKGGADATEDVTAVEVDPADRNRVISGEHLIKAWTHFHFPGRGSTYSDFKWHWYHFDGTDWDESRKLNRIYKFQGKAWDWEVSNENGNYDYLVYADIDYDHPDVAAEIKRWGTWYANELQLDGFRLDAVKHIKFSFLRDWVNHVREKTGKEMFTVAEYWQNDLGALENYLNKTNFNHSVFDVPLHYQFHAASTQGGGYDMRKLLNGTVVSKHPLKSVTFVDNHDTQPGQSLESTVQTWFKPLAYAFILTRESGYPQVFYGDMYGTKGDSQREIPALKHKIEPILKARKQYAYGAQHDYFDHHDIVGWTREGDSSVANSGLAALITDGPGGAKRMYVGRQNAGETWHDITGNRSEPVVINSEGWGEFHVNGGSVSIYVQR

SEQ ID NO: 30547 - protein, 481 aa, Bacillus licheniformis
LNGTLMQYFEWYMPNDGQHWKRLQNDSAYLAEHGITAVWIPPAYKGTSQADVGYGAYDLYDLGEFHQKGTVRTKYGTKGELQSAIKSLHSRDINVYGDVVINHKGGADATEDVTAVEVDPADRNRVISGEHLIKAWTHFHFPGRGSTYSDFKWHWYHFDGTDWDESRKLNRIYKFQGKAWDWEVSNENGNYDYLMYADIDYDHPDVAAEIKRWGTWYANELQLDGFRLDAVKHIKFSFLRDWVNHVREKTGKEMFTVAEYWQNDLGALENYLNKTNFNHSVFDVPLHYQFHAASTQGGGYDMRKLLNGTVVSKHPLKSVTFVDNHDTQPGQSLESTVQTWFKPLAYAFILTRESGYPQVFYGDMYGTKGDSQREIPALKHKIEPILKARKQYAYGAQNDYFDHHDIVGWTREGDSSVANSGLAALITDGPGGAKRMYVGRQNAGETWHDITGNRSEPVVINSEGWGEFHVNGGSVSIYVQR

SEQ ID NO: 30548 - protein, 481 aa, Bacillus licheniformis
LNGTLMQYFEWYMPNDGQHWKRLQNDSAYLAEHGITAVWIPPAYKGTSQADVGYGAYDLYDLGEFHQKGTVRTKYGTKGELQSAIKSLHSRDINVYGDVVINHKGGADATELVTAVEVDPADRNRVISGEHLIKAWTHFHFPGRGSTYSDFKWHWYHFDGTDWDESRKLNRIYKFQGKAWDWEVSNENGNYDYLMYADIDYDHPDVAAEIKRWGTWYANELQLDGFRLDAVKHIKFSFLRDWVNHVREKTGKEMFTVAEYWQNDLGALENYLNKTNFNHSVFDVPLHYQFHAASTQGGGYDMRKLLNGTVVSKHPLKSVTFVDNHDTQPGQSLESTVQTWFKPLAYAFILTRESGYPQVFYGDMYGTKGDSQREIPALKHKIEPILKARKQYAYGAQHDYFDHHDIVGWTREGDSSVANSGLAALITDGPGGAKRMYVGRQNAGETWHDITGNRSEPVVINSEGWGEFHVNGGSVSIYVQR

SEQ ID NO: 30549 - protein, 481 aa, Bacillus licheniformis
LNGTLMQYFEWYMPNDGQHWKRLQNDSAYLAEHGITAVWIPPAYKGTSQADVGYGAYDLYDLGEFHQKGTVRTKYGTKGELQSAIKSLHSRDINVYGDVVINHKGGADATEDVTAVEVDPADRNRVISGEHLIKAWTHFHFPGRGSTYSDFKWHWYHFDGTDWDESRKLNRIYKFQGKAWDWEVSNENGNYDYLMYADIDYDHPDVAAEIKRWGTWYANELQLDGFRLDAVKHIKFSFLRDWVNHVREKTGKEMFTVAEYWQNDLGALENYLNKTNFNHSVFDVPLHYQFHAASTQGGGYDMRKLLNGTVVSKHPLKSVTFVDNHDTQPGQSLESTVQEWFKPLAYAFILTRESGYPQVFYGDMYGTKGDSQREIPALKHKIEPILKARKQYAYGAQHDYFDHHDIVGWTREGDSSVANSGLAALITDGPGGAKRMYVGRQNAGETWHDITGNRSEPVVINSEGWGEFHVNGGSVSIYVQR

SEQ ID NO: 30550 - protein, 481 aa, Synthetic construct
LNGTLMQYFEWYMPNDGQHWRRLQNDSAYLAEHGITAVWIPPAYKGTSQADVGYGAYDLYDLGEFHQKGTVRTKYGTKGELQSAIKSLHSRDINVYGDVVINHKGGADATEDVTAVEVDPADRNRVISGEHLIKAWTHFHFPGRGSTYSDFKWHWYHFDGTDWDESRKLNRIYKFQGKAWDWEVSNENGNYDYLMYADIDYDHPDVAAEIKRWGTWYANELQLDGFRLDAVKHIKFSFLRDWVNHVREKTGKEMFTVAEYWQNDLGALENYLNKTNFNHSVFDVPLHYQFHAASTQGGGYDMRKLLHGTVVSKHPLKSVTFVDNHDTQPGQSLESTVQTWFKPLAYAFILTRESGYPQVFYGDMYGTKGDSQREIPALKHKIEPILKARKQYAYGAQHDYFDHHDIVGWTREGDSSVANSGLAALITDGPGGAKRMYVGRQNAGETWHDITGNRSEPVVINSEGWGEFHVNGGSVSIYVQR

SEQ ID NO: 30551 - protein, 481 aa, Bacillus licheniformis
LNGTLMQYFEWYMPNDGQHWKRLQNDSAYLAEHGITAVWIPPAYKGTSQADVGYGAYDLYDLGEFHQKGTVRTKYGTKGELQSAIKSLHSRDINVYGDVVINHKGGADATEDVTAVEVDPADRNRVISGEHLIKAWTHFHFPGRGSTYSDFKWHWYHFDGTDWDESRKLNRIYKFQGKAWDWEVSNENGNYDYLMYADIDYDHPDVAAEIKRWGTWYANELQLDGFRLDAVKHIKFSFLRDWVNHVREKTGKEMFTVAEYWQNDLGALENYLNKTDYNHSVFDVPLHYQFHAASTQGGGYDMRKLLNGTVVSKHPLKSVTFVDNHDTQPGQSLESTVQTWFKPLAYAFILTRESGYPQVFYGDMYGTKGDSQREIPALKHKIEPILKARKQYAYGAQHDYFDHHDIVGWTREGDSSVANSGLAALITDGPGGAKRMYVGRQNAGETWHDITGNRSEPVVINSEGWGEFHVNGGSVSIYVQR

SEQ ID NO: 30552 - protein, 481 aa, Bacillus licheniformis
LNGTLMQYFEWYMPNDGQHWKRLQNDSAYLAEHGITAVWIPPAYKGTSQADVGYGAYDLYDLGEFHQKGTVRTKYGTKGELQSAIKSLHSRDINVYGDVVINHKGGADATEDVTAVEVDPADRNRVISGEHLIKAWTHFHFPGRGSTYSDFKWHWYHFDGTDWDESRKLNRIYKFQGKAWDWEVSNENGNYDYLMYADIDYDHPDVAAEIKRWGTWYANELQLDGFRLDAVKHIKFSFLRDWVNHVREKTGKEMFTVAEYWQNDLGALENYLNKTNFNHSVFDVPLHYQFHAASTQGGGYDMRKLLNGTVVSKHPLKSVTFVDNHDTQPGQSLESTVQTWFKPLAYAFILTRESGYPQVFYGDMYGTKGDSQREIPALKHKIEPILKARKQYAYGAQHDYFDHHDIVGWTREGDSSVANSGLAALITDGPGGAKRMYVGRQNAGETWHDITGNRSEPVVINSEGWGNFHVNGGSVSIYVQR

SEQ ID NO: 30553 - protein, 481 aa, Bacillus licheniformis
LNGTLMQYFEWYMPNDGQHWKRLQNDSAYLAEHGITAVWIPPAYKGTSQADVGYGAYDLYDLGEFHQKGTVRTKYGTKGELQSAIKSLHSRDINVYGDVVINHKGGADATEDVTAVEVDPADRNRVISGEHLIKAWTHFHFPGRGSTYSNFKWHWYHFDGTDWDESRKLNRIYKFQGKAWDWEVSNENGNYDYLMYADIDYDHPDVAAEIKRWGTWYANELQLDGFRLDAVKHIKFSFLRDWVNHVREKTGKEMFTVAEYWQNDLGALENYLNKTNFNHSVFDVPLHYQFHAASTQGGGYDMRKLLNGTVVSKHPLKSVTFVDNHDTQPGQSLESTVQTWFKPLAYAFILTRESGYPQVFYGDMYGTKGDSQREIPALKHKIEPILKARKQYAYGAQHDYFDHHDIVGWTREGDSSVANSGLAALITDGPGGAKRMYVGRQNAGETWHDITGNRSEPVVINSEGWGEFHVNGGSVSIYVQR

SEQ ID NO: 30554 - protein, 481 aa, Synthetic construct
LNGTLMQYFEWYMPNDGQHWRRLQNDSAYLAEHGITAVWIPPAYKGTSQADVGYGAYDLYDLGEFHQKGTVRTKYGTKGELQSAIKSLHSRDINVYGDVVINHKGGADATEDVTAVEVDPADRNRVISGEHLIKAWTHFHFPGRGSTYSDFKWHWYHFDGTDWDESRKLNRIYKFQGKAWDWEVSNENGNYDYLMYADIDYDHPDVAAEIKRWGTWYANELQLDGFRLDAVKHIKFSFLRDWVNHVREKTGKEMFTVAEYWQNDLGALENYLNKTNFNHSVFDVPLHYQFHAASTQGGGYDMRKLLTGTVVSKHPLKSVTFVDNHDTQPGQSLESTVQTWFKPLAYAFILTRESGYPQVFYGDMYGTKGDSQREIPALKHKIEPILKARKQYAYGAQHDYFDHHDIVGWTREGDSSVANSGLAALITDGPGGAKRMYVGRQNAGETWHDITGNRSEPVVINSEGWGEFHVNGGSVSIYVQR

SEQ ID NO: 30555 - protein, 481 aa, Bacillus licheniformis
LNGTLMQYFEWYMPNDGQHWKRLQNDSAYLAEHGITAVWIPPAYKGTSQADVGYGAYDLYDLGEFHQKGTVRTKYGTKGELQSAIKSLHSRDINVYGDVVINHKGGADATEDVTAVEVDPADRNRVISGEHLIKAWTHFHFPGRGSTYSDFKWHWYHFDGTDWDESRRLNRIYKFQGKAWDWEVSNENGNYDYLMYADIDYDHPDVAAEIKRWGTWYANELQLDGFRLDAVKHIKFSFLRDWVNHVREKTGKEMFTVAEYWQNDLGALENYLNKTNFNHSVFDVPLHYQFHAASTQGGGYDMRKLLNGTVVSKHPLKSVTFVDNHDTQPGQSLESTVQTWFKPLAYAFILTRESGYPQVFYGDMYGTKGDSQREIPALKHKIEPILKARKQYAYGAQHDYFDHHDIVGWTREGDSSVANSGLAALITDGPGGAKRMYVGRQNAGETWHDITGNRSEPVVINSEGWGEFHVNGGSVSIYVQR

SEQ ID NO: 30556 - protein, 481 aa, Bacillus licheniformis
LNGTLMQYFEWYMPNDGQHWKRLQNDSAYLAEHGITAVWIPPAYKGTSQADVGYGAYDLYDLGEFHQKGTVRTKYGTKGELQSAIKSLHSRDINVYGDVVINHKGGADATEDVTAVEVDPADRNRVISGEHLIKAWTHFHFPGRGSTYSDFKWHWYHFDGTDWDESRKLNRIYKFQGKAWDWEVSNENGNYDYLDYADIDYDHPDVAAEIKRWGTWYANELQLDGFRLDAVKHIKFSFLRDWVNHVREKTGKEMFTVAEYWQNDLGALENYLNKTNFNHSVFDVPLHYQFHAASTQGGGYDMRKLLNGTVVSKHPLKSVTFVDNHDTQPGQSLESTVQTWFKPLAYAFILTRESGYPQVFYGDMYGTKGDSQREIPALKHKIEPILKARKQYAYGAQHDYFDHHDIVGWTREGDSSVANSGLAALITDGPGGAKRMYVGRQNAGETWHDITGNRSEPVVINSEGWGEFHVNGGSVSIYVQR

SEQ ID NO: 30557 - protein, 481 aa, Bacillus licheniformis
LNGTLMQYFEWYMPNDGQHWKRLQNDSAYLAEHGITAVWIPPAYKGTSQADVGYGAYDLYDLGEFHQKGTVRTKYGTKGELQSAIKSLHSRDINVYGDVVINHKGGADATEDVTAVEVDPADRNRVISGEHLIKAWTHFHFPGRGSTYSDFKWHWYHFDGTDWDESRKLNRIYKFQGKAWDWEVSNENGNYDYLMYADIDYDHPDVAAEIKRWGTWYANELQLDGFRLDAVKHIKFSFLRDWVNHVREKTGKEMFTVAEYWQNDLGALENYLNKTNFNHSVFDVPLHYQFHAASTQGGGYDMRKLLNGTVVSKHPLHSVTFVDNHDTQPGQSLESTVQTWFKPLAYAFILTRESGYPQVFYGDMYGTKGDSQREIPALKHKIEPILKARKQYAYGAQHDYFDHHDIVGWTREGDSSVANSGLAALITDGPGGAKRMYVGRQNAGETWHDITGNRSEPVVINSEGWGEFHVNGGSVSIYVQR

SEQ ID NO: 30558 - protein, 481 aa, Bacillus licheniformis
LNGTLMQYFEWYMPNDGQHWRRLQNDSAYLAEHGITAVWIPPAYKGISQADVGYGAYDLYDLGEFHQKGTVRTKYGTKGELQSAIKSLHSRDINVYGDVVINHKGGADATEDVTAVEVDPADRNRVISGVHLIKAWTHFHFPGRGSTYSDFKWHWYHFDGTDWDESRKLNRIYKFQGKAWDWEVSNENGNYDYLMYADIDYDHPDVAAEIKRWGTWYANELQLDGFRLDAVKHIKFSFLRDWVNHVREKTGKEMFTVAEYWQNDLGALENYLNKTNFNHSVFDVPLHYQFHAASTQGGGYDMRKLLNGTVVSKHPLKSVTFVDNHDTQPGQSLESTVQTWFKPLAYAFILTRESGYPQVFYGDMYGTKGDSQREIPALKHKIEPILKARKQYAYGAQHDYFDHHDIVGWTREGDSSVANSGLAALITDGPGGAKRMYAGRQNAGETWHDITGNRSEPVVINSEGWGEFHVNGGSVSIYVQR

SEQ ID NO: 30559 - protein, 481 aa, Bacillus licheniformis
LNGTLMQYFEWYMPNDGQHWKRLQNDSAYLAEHGITAVWIPPAYKGTSQADVGYGAYDLYDLGEFHQKGTVRTKYGTKGELQSAIKSLHSRDINVYGDVVINHKGGADATEDVTAVEVDPADRNRVISGEHLIKAWTHFHFPGRGSTYSDFKWHWYHFDGTDWDESRKLNRIYKFQGKGWDWEVSNENGNYDYLMYADIDYDHPDVAAEIKRWGTWYANELQLDGFRLDAVKHIKFSFLRDWVNHVREKTGKEMFTVAEYWQNDLGALENYLNKTNFNHSVFDVPLHYQFHAASTQGGGYDMRKLLNGTVVSKHPLKSVTFVDNHDTQPGQSLESTVQTWFKPLAYAFILTRESGYPQVFYGDMYGTKGDSQREIPALKHKIEPILKARKQYAYGAQHDYFDHHDIVGWTREGDSSVANSGLAALITDGPGGAKRMYVGRQNAGETWHDITGNRSEPVVINSEGWGEFHVNGGSVSIYVQR

SEQ ID NO: 30560 - protein, 481 aa, Bacillus licheniformis
LNGTLMQYFEWYMPNDGQHWKRLQNDSAYLAEHGITAVWIPPAYKGTSQADVGYGAYDLYDLGEFHQKGTVRTKYGTKGELQSAIKSLHSRDINVYGDVVINHKGGADATEDVTAVEVDPADRNRVISGEHLIKALTHFHFPGRGSTYSDFKWHWYHFDGTDWDESRKLNRIYKFQGKAWDWEVSNENGNYDYLMYADIDYDHPDVAAEIKRWGTWYANELQLDGFRLDAVKHIKFSFLRDWVNHVREKTGKEMFTVAEYWQNDLGALENYLNKTNFNHSVFDVPLHYQFHAASTQGGGYDMRKLLNGTVVSKHPLKSVTFVDNHDTQPGQSLESTVQTWFKPLAYAFILTRESGYPQVFYGDMYGTKGDSQREIPALKHKIEPILKARKQYAYGAQHDYFDHHDIVGWTREGDSSVANSGLAALITDGPGGAKRMYVGRQNAGETWHDITGNRSEPVVINSEGWGEFHVNGGSVSIYVQR

SEQ ID NO: 30561 - protein, 481 aa, Bacillus licheniformis
LNGTLMQYFEWYMPNDGQHWRRLQNDSAYLAEHGITAVWIPPAYKGTSQADVGYGAYDLYDLGEFHQKGTVRTKYGTKGELQSAIKSLHSRDINVYGDVVINHKGGADATEDVTAVEVDPADRNRVISGEHLIKAWTHFHFPGRGSTYSDFKWHWYHFDGTDWDESRKLNRIYKFQGKAWDWEVSNENGNYDYLMYADIDYDHPDVAAEIKRWGTWYANELQLDGFRLDAVKHIKFSFLRDWVNHVREKTGKEMFTVAEYWQNDLGALENYLNKTNFNHSVFDVPLHXQFHAASTQGGGYDMRKLLNGTVVSKHPLKSVTFVDNHDTQPGQSLESTVQTWFKPLAYAFILTRESGYPQVFYGDMYGTKGDSQREIPALKHKIEPILKARKQYAYGAQHDYFDHHDIVGWTREGDSSVANSGLAALITDGPGGAKRMYVGRQNAGETWHDITGNRSEPVVINSEGWGEFHVNGGSVSIYVQR

SEQ ID NO: 30562 - protein, 481 aa, Bacillus licheniformis
LNGTLMQYFEWYMPNDGQHWKRLQNDSAYLAEHGITAVWIPPAYKGTSQADVGYGAYDLYDLGEFHQKGTVRTKYGTKGQLQSAIKSLHSRDINVYGDVVINHKGGADATEDVTAVEVDPADRNRVISGEHLIKAWTHFHFPGRGSTYSDFKWHWYHFDGTDWDESRKLNRIYKFQGKAWDWEVSNENGNYDYLMYADIDYDHPDVAAEIKRWGTWYANELQLDGFRLDAVKHIKFSFLRDWVNHVREKTGKEMFTVAEYWQNDLGALENYLNKTNFNHSVFDVPLHYQFHAASTQGGGYDMRKLLNGTVVSKHPLKSVTFVDNHDTQPGQSLESTVQTWFKPLAYAFILTRESGYPQVFYGDMYGTKGDSQREIPALKHKIEPILKARKQYAYGAQHDYFDHHDIVGWTREGDSSVANSGLAALITDGPGGAKRMYVGRQNAGETWHDITGNRSEPVVINSEGWGEFHVNGGSVSIYVQR

SEQ ID NO: 30563 - protein, 481 aa, Bacillus licheniformis
LNGTLMQYFEWYMPNDGQHWKRLQNDSAYLAEHGITAVWIPPAYKGTSQADVGYGAYDLYDLGEFHQKGTVRTKYGTKGELQSAIKSLHSRDINVYGDVVINHKGGADATEDVTAVEVDPADRNRVISGEHLIKAWTHFHFPGRGSTYSDFKWHWYHFDGTDWDESRKLNRIYKFQGKAWDWEVSNENGNYDYLKYADIDYDHPDVAAEIKRWGTWYANELQLDGFRLDAVKHIKFSFLRDWVNHVREKTGKEMFTVAEYWQNDLGALENYLNKTNFNHSVFDVPLHYQFHAASTQGGGYDMRKLLNGTVVSKHPLKSVTFVDNHDTQPGQSLESTVQTWFKPLAYAFILTRESGYPQVFYGDMYGTKGDSQREIPALKHKIEPILKARKQYAYGAQHDYFDHHDIVGWTREGDSSVANSGLAALITDGPGGAKRMYVGRQNAGETWHDITGNRSEPVVINSEGWGEFHVNGGSVSIYVQR

SEQ ID NO: 30564 - protein, 481 aa, Bacillus licheniformis
LNGTLMQYFEWYMPNDGQHWKRLRNDSAYLAEHGITAVWIPPAYKGTSQADVGYGAYDLYDLGEFHQKGTVRTKYGTKGELQSAIKSLHSRDINVYGDVVINHKGGADATEDVTAVEVDPADRNRVISGEHLIKAWTHFHFPGRGSTYSDFKWHWYHFDGTDWDESRKLNRIYKFQGKAWDWEVSNENGNYDYLMYADIDYDHPDVAAEIKRWGTWYANELQLDGFRLDAVKHIKFSFLRDWVNHVREKTGKEMFTVAEYWQNDLGALENYLNKTNFNHSVFDVPLHYQFHAASTQGGGYDMRKLLNGTVVSKHPLKSVTFVDNHDTQPGQSLESTVQTWFKPLAYAFILTRESGYPQVFYGDMYGTKGDSQREIPALKHKIEPILKARKQYAYGAQHDYFDHHDIVGWTREGDSSVANSGLAALITDGPGGAKRMYVGRQNAGETWHDITGNRSEPVVINSEGWGEFHVNGGSVSIYVQR

SEQ ID NO: 30565 - protein, 481 aa, Synthetic construct
LNGTLMQYFEWYMPNDGQHWRRLQNDSAYLAEHGITAVWIPPAYKGTSQADVGYGAYDLYDLGEFHQKGTVRTKYGTKGELQSAIKSLHSRDINVYGDVVINHKGGADATEDVTAVEVDPADRNRVISGEHLIKAWTHFHFPGRGSTYSDFKWHWYHFDGTDWDESRKLNRIYKFQGKAWDWEVSNENGNYDYLMYADIDYDHPDVAAEIKRWGTWYANELQLDGFRLDAVKHIKFSFLRDWVNHVREKTGKEMFTVAEYWQNDLGALENYLNKTNFNHSVFDVPLHYQFHAASTQGGGYDMRKLLIGTVVSKHPLKSVTFVDNHDTQPGQSLESTVQTWFKPLAYAFILTRESGYPQVFYGDMYGTKGDSQREIPALKHKIEPILKARKQYAYGAQHDYFDHHDIVGWTREGDSSVANSGLAALITDGPGGAKRMYVGRQNAGETWHDITGNRSEPVVINSEGWGEFHVNGGSVSIYVQR

SEQ ID NO: 30566 - protein, 481 aa, Bacillus licheniformis
LNGTLMQYFEWYMPNDGQHWKRLQNDSAYLAEHGITAVWIPPAYKGTSQADVGYGAYDLYDLGEFHQKGTVRTKYGTKGELQSAIKSLHSRDINVYGDVVINHKGGADATEDVTAVEVDPADRNRVISGEXLIKAWTHFHFPGRGSTYSDFKWHWYHFDGTDWDESRKLNRIYKFQGKAWDWEVSNENGNYDYLMYADIDYDHPDVAAEIKRWGTWYANELQLDGFRLDAVKHIKFSFLRDWVNHVREKTGKEMFTVAEYWQNDLGALENYLNKTNFNHSLFDVPLHYQFHAASTQGGGYDMRKLLNGTVVSKHPLKSVTFVDNHDTQPGQSLESTVQTWFKPLAYAFILTRESGYPQVFYGDMYGTKGDSQREIPALKHKIEPILKARKQYAYGAQHDYFDHHDIVGWTREGDSSVANSGLAALITDGPGGAKRMYVGRQNAGETWHDITGNRSEPVVINSEGWGEFHVNGGSVSIYVQR

SEQ ID NO: 30567 - protein, 481 aa, Bacillus licheniformis
LNGTLMQYFEWYMPNDGQHWKRLQNDSAYLAEHGITAVWIPPAYKGTSQADVGYGAYDLYDLGEFHQKGTVRTKYGTKGELQSAIKSLHSRDINVYGDVVINHKGGADATEDVTAVEVDPADRNRVISGEHLIKAWTHFHFPGRGSTYSDFKWHWYHFDGTDWDESRKLNRIYKFQGKAWDWEVSNENGNYDYLCYADIDYDHPDVAAEIKRWGTWYANELQLDGFRLDAVKHIKFSFLRDWVNHVREKTGKEMFTVAEYWQNDLGALENYLNKTNFNHSVFDVPLHYQFHAASTQGGGYDMRKLLNGTVVSKHPLKSVTFVDNHDTQPGQSLESTVQTWFKPLAYAFILTRESGYPQVFYGDMYGTKGDSQREIPALKHKIEPILKARKQYAYGAQHDYFDHHDIVGWTREGDSSVANSGLAALITDGPGGAKRMYVGRQNAGETWHDITGNRSEPVVINSEGWGEFHVNGGSVSIYVQR

SEQ ID NO: 30568 - protein, 481 aa, Bacillus licheniformis
LNGTLMQYFEWYMPNDGQHWKRLQNDSAYLAEHGITAVWIPPAYKGTSQADVGYGAYDLYDLGEFHQKGTVRTKYGTKGELQSAIKSLHSRDINVYGDVVINHKGGADATEDVTAVEVDPADRNRVISGEHLIKAWTHFHFPGRGSTYSDFKWHWYHFDGTDWDESRKLNRIYKFQGKAWDWEVSNENGNYDYLQYADIDYDHPDVAAEIKRWGTWYANELQLDGFRLDAVKHIKFSFLRDWVNHVREKTGKEMFTVAEYWQNDLGALENYLNKTNFNHSVFDVPLHYQFHAASTQGGGYDMRKLLNGTVVSKHPLKSVTFVDNHDTQPGQSLESTVQTWFKPLAYAFILTRESGYPQVFYGDMYGTKGDSQREIPALKHKIEPILKARKQYAYGAQHDYFDHHDIVGWTREGDSSVANSGLAALITDGPGGAKRMYVGRQNAGETWHDITGNRSEPVVINSEGWGEFHVNGGSVSIYVQR

SEQ ID NO: 30569 - protein, 481 aa, Bacillus licheniformis
LNGTLMQYFEWYMPNDGQHWKRLQNDSAYLAEHGITAVWIPPAYKGTSQADVGYGAYDLYDLGEFHQKGTVRTKYGTKGELQSAIKSLHSRDINVYGDVVINHKGGADATEDVTAVEVDPADRNRVISGEHLIKAWTHFHFPGRGSTYSDFKWHWYHFDGTDWDESRKLNRIYKFQGKAWDWEVSNENGNYDYLMYADIDYDHPDVAAEIKRWGTWYANELQLDGFRLDAVKHIKFSFLRDWVNHVREKTGKEMFTVAEYWQNDLGALENYLNKTNFNHSVFDVPLHYQFHAASTQGGGYDMRKLLNGTVVSKHPLKSVTFVDNHDTQPGQSLESTVQTWFKPLAYAFILTRESGYPQVFYGDMYGTKGDSQREIPALKHKIEPILKARKQYAYGAQHDYFDHHDIVGWTREGDSSVANSGLAALITDGPGGAKWMYVGRQNAGETWHDITGNRSEPVVINSEGWGEFHVNGGSVSIYVQR

SEQ ID NO: 30570 - protein, 481 aa, Bacillus licheniformis
LNGTLMQYFEWYMPNDGQHWKRLQNDSAYLAEHGITAVWIPPAYKGTSQADVGYGAYDLYDLGEFHQKGTVRTKYGTKGELQSAIKSLHSRDINVYGDVVINHKGGADATEDVTAVEVDPADRNRVISGEHLIKAWTHFHFPGRGSTYSDFKWHWYHFDGTDWDESRKLNRIYKFQGKAWDWEVSNENGNYDYLPYADIDYDHPDVAAEIKRWGTWYANELQLDGFRLDAVKHIKFSFLRDWVNHVREKTGKEMFTVAEYWQNDLGALENYLNKTNFNHSVFDVPLHYQFHAASTQGGGYDMRKLLNGTVVSKHPLKSVTFVDNHDTQPGQSLESTVQTWFKPLAYAFILTRESGYPQVFYGDMYGTKGDSQREIPALKHKIEPILKARKQYAYGAQHDYFDHHDIVGWTREGDSSVANSGLAALITDGPGGAKRMYVGRQNAGETWHDITGNRSEPVVINSEGWGEFHVNGGSVSIYVQR

SEQ ID NO: 30571 - protein, 481 aa, Bacillus licheniformis
LNGTLMQYFEWYMPNDGQHWKRLQNDSAYLAEHGITAVWIPPAYKGTSQADVGYGAYDLYDLGEFHQKGTVRTKYGTKGELQSAIKSLHSRDINVYGDVVINHKGGADATEDVTAVEVDPADRNRVISGEHLIKAWTHFHFPGRGSTYSDFKWHWYHFDGTDWDESRKLNRIYKFQGKAWDWEVSNENGNYDYLMYADIDYDHPDVAAEIKRWGTWYANELQLDGFRLDAVKHIKFSFLRDWVNHVREKTGKEMFTVAEYWQNDLGALENYLNKTNFNHSVFDVPLHYQFHAASTQGGGYDMRKLLNGTVVSKHPLKSVIFVDNHDTQPGQSLESTVQTWFKPLAYAFILTRESGYPQVFYGDMYGTKGDSQREIPALKHKIEPILKARKQYAYGAQHDYFDHHDIVGWTREGDSSVANSGLAALITDGPGGAKRMYVGRQNAGETWHDITGNRSEPVVINSEGWGEFHVNGGSVSIYVQR

SEQ ID NO: 30572 - protein, 481 aa, Bacillus licheniformis
LNGTLAQYFEWYMPNDGQHWKRLQNDSAYLAEHGITAVWIPPAYKGTSQADVGYGAYDLYDLGEFHQKGTVRTKYGTKGELQSAIKSLHSRDINVYGDVVINHKGGADATEDVTAVEVDPADRNRVISGEHLIKAWTHFHFPGRGSTYSDFKWHWYHFDGTDWDESRKLNRIYKFQGKAWDWEVSNENGNYDYLMYADIDYDHPDVAAEIKRWGTWYANELQLDGFRLDAVKHIKFSFLRDWVNHVREKTGKEMFTVAEYWQNDLGALENYLNKTNFNHSVFDVPLHYQFHAASTQGGGYDMRKLLNGTVVSKHPLKSVTFVDNHDTQPGQSLESTVQTWFKPLAYAFILTRESGYPQVFYGDMYGTKGDSQREIPALKHKIEPILKARKQYAYGAQHDYFDHHDIVGWTREGDSSVANSGLAALITDGPGGAKRMYVGRQNAGETWHDITGNRSEPVVINSEGWGEFHVNGGSVSIYVQR

SEQ ID NO: 30573 - protein, 481 aa, Bacillus licheniformis
LNGTLMQYFEWYMPNDGQHWKRLQNDSAYLAEHGITAVWIPPAYKGTSQADVGYGAYDLYDLGEFHQKGTVRTKYGTKGELQSAIKSLHSRDINVYGDVVINHKGGADATEDVTAVEVDPADRNRVISGEHLIKAWTHFHFPGRGSTYSDFKWHWYHFDGTDWDESRKLNRIYKFQGKAWDWEVSNENGNYDYLMYADIDYDHPDVAAEIKRWGTWYANELQLDGFRLDAVKHIKFAFLRDWVNHVREKTGKEMFTVAEYWQNDLGALENYLNKTNFNHSVFDVPLHYQFHAASTQGGGYDMRKLLNGTVVSKHPLKSVTFVDNHDTQPGQSLESTVQTWFKPLAYAFILTRESGYPQVFYGDMYGTKGDSQREIPALKHKIEPILKARKQYAYGAQHDYFDHHDIVGWTREGDSSVANSGLAALITDGPGGAKRMYVGRQNAGETWHDITGNRSEPVVINSEGWGEFHVNGGSVSIYVQR

SEQ ID NO: 30574 - protein, 481 aa, Bacillus licheniformis
LNGTLMQYFEWYMPNDGQHWKRLQNDSAYLAEHGITAVWIPPAYKGTSQADVGYGAYDLYDLGEFHQKGTVRTKYGTKGELQSAIKSLHSRDINVYGDVVINHKGGADATEDVTAVEVDPADRNRVISGEHLIKAWTHFHFPGRGSTYSDFKWHWYHFDGTDWDESRKLNRIYKFQGKAWDWEVSNENGNYDYLLYADIDYDHPDVAAEIKRWGTWYANELQLDGFRLDAVKHIKFSFLRDWVNHVREKTGKEMFTVAEYWQNDLGALENYLNKTNFNHSVFDVPLHYQFHAASTQGGGYDMRKLLNGTVVSKHPLKSVTFVDNHDTQPGQSLESTVQTWFKPLAYAFILTRESGYPQVFYGDMYGTKGDSQREIPALKHKIEPILKARKQYAYGAQHDYFDHHDIVGWTREGDSSVANSGLAALITDGPGGAKRMYVGRQNAGETWHDITGNRSEPVVINSEGWGEFHVNGGSVSIYVQR

SEQ ID NO: 30575 - protein, 481 aa, Bacillus licheniformis
LNGTLMQYFEWYMPNDGQHWNRLQNDSAYLAEHGITAVWIPPAYKGTSQADVGYGAYDLYDLGEFHQKGTVRTKYGTKGELQSAIKSLHSRDINVYGDVVINHKGGADATEDVTAVEVDPADRNRVISGEHLIKAWTHFHFPGRGSTYSDFKWHWYHFDGTDWDESRKLNRIYKFQGKAWDWEVSNENGNYDYLMYADIDYDHPDVAAEIKRWGTWYANELQLDGFRLDAVKHIKFSFLRDWVNHVREKTGKEMFTVAEYWQNDLGALENYLNKTNFNHSVFDVPLHYQFHAASTQGGGYDMRKLLNGTVVSKHPLKSVTFVDNHDTQPGQSLESTVQTWFKPLAYAFILTRESGYPQVFYGDMYGTKGDSQREIPALKHKIEPILKARKQYAYGAQHDYFDHHDIVGWTREGDSSVANSGLAALITDGPGGAKRMYVGRQNAGETWHDITGNRSEPVVINSEGWGEFHVNGGSVSIYVQR

SEQ ID NO: 30576 - protein, 481 aa, Bacillus licheniformis
LNGTLMQYFEWYMPNDGQHWKRLQNDSAYLAEHGITAVWIPPAYKGTSQADVGYGAYDLYDLGEFHQKGTVRTKYGTKGELQSAIKSLHSRDINVYGDVVINHKGGADATEDVTAVEVDPADRNRVISGEHLIKAWTHFHFPGRGSTYSDFKWHWYHFDGTDWDESRKLNRIYKFQGKAWDWEVSNENGNYDYLEYADIDYDHPDVAAEIKRWGTWYANELQLDGFRLDAVKHIKFSFLRDWVNHVREKTGKEMFTVAEYWQNDLGALENYLNKTNFNHSVFDVPLHYQFHAASTQGGGYDMRKLLNGTVVSKHPLKSVTFVDNHDTQPGQSLESTVQTWFKPLAYAFILTRESGYPQVFYGDMYGTKGDSQREIPALKHKIEPILKARKQYAYGAQHDYFDHHDIVGWTREGDSSVANSGLAALITDGPGGAKRMYVGRQNAGETWHDITGNRSEPVVINSEGWGEFHVNGGSVSIYVQR

SEQ ID NO: 30577 - protein, 481 aa, Bacillus licheniformis
LNGTLMQYFEWYMPNDGQHWKRLQNDSAYLAEHGITAVWIPPAYKGTSQADVGYGAYDLYDLGEFHQKGTVRTKYGTKGELQSAIKSLHSRDINVYGDVVINHKGGADATEDVTAVEVDPADRNRVISGEHLIKAATHFHFPGRGSTYSDFKWHWYHFDGTDWDESRKLNRIYKFQGKAWDWEVSNENGNYDYLMYADIDYDHPDVAAEIKRWGTWYANELQLDGFRLDAVKHIKFSFLRDWVNHVREKTGKEMFTVAEYWQNDLGALENYLNKTNFNHSVFDVPLHYQFHAASTQGGGYDMRKLLNGTVVSKHPLKSVTFVDNHDTQPGQSLESTVQTWFKPLAYAFILTRESGYPQVFYGDMYGTKGDSQREIPALKHKIEPILKARKQYAYGAQHDYFDHHDIVGWTREGDSSVANSGLAALITDGPGGAKRMYVGRQNAGETWHDITGNRSEPVVINSEGWGEFHVNGGSVSIYVQR

SEQ ID NO: 30578 - protein, 481 aa, Bacillus licheniformis
LNGTLMQYFEWYMPNDGQHWKRLQNDSAYLAEHGITAVWIPPAYKGTSQADVGYGAYDLYDLGEFHQKGTVRTKYGTKGELQSAIKSLHSRDINVYGDVVINHKGGADATEDVTAVEVDPADRNRVISGEHLIKAWTHFHFPGRGSTYSDFKWHWYHFDGTDWDESRKLNRIYKFQGKAWDWEVSNENGNYDYLNYADIDYDHPDVAAEIKRWGTWYANELQLDGFRLDAVKHIKFSFLRDWVNHVREKTGKEMFTVAEYWQNDLGALENYLNKTNFNHSVFDVPLHYQFHAASTQGGGYDMRKLLNGTVVSKHPLKSVTFVDNHDTQPGQSLESTVQTWFKPLAYAFILTRESGYPQVFYGDMYGTKGDSQREIPALKHKIEPILKARKQYAYGAQHDYFDHHDIVGWTREGDSSVANSGLAALITDGPGGAKRMYVGRQNAGETWHDITGNRSEPVVINSEGWGEFHVNGGSVSIYVQR

SEQ ID NO: 30579 - protein, 481 aa, Bacillus licheniformis
LNGTLMQYFEWYMPNDGQHWKRLQNDSAYLAEHGITAVWIPPAYKGTSQADVGYGAYDLYDLGEFHQKGTVRTKYGTKGELQSAIKSLHSRDINVYGDVVINHKGGADATEDVTAVEVDPADRNRVISGEHLIKAWTHFHFPGRGSTYSDFKWHWYHFDGTDWDESRKLNRIYKFQGKAWDWEVSNENGNYDYLMYADIDYDHPDVAAEIKRWGTWYANELQLDGFRLDAVKHIKFSFLRDWVNHVREKTGKEMFTVAEYWQNDLGALENYLNKTNFNHSVFDVPLHYQFHAASTQGGGYDLRKLLNGTVVSKHPLKSVTFVDNHDTQPGQSLESTVQTWFKPLAYAFILTRESGYPQVFYGDMYGTKGDSQREIPALKHKIEPILKARKQYAYGAQHDYFDHHDIVGWTREGDSSVANSGLAALITDGPGGAKRMYVGRQNAGETWHDITGNRSEPVVINSEGWGEFHVNGGSVSIYVQR

SEQ ID NO: 30580 - protein, 480 aa, Bacillus sp.
HHDGTNGTIMQYFEWNVPNDGQHWNRLHNNAQNLKNAGITAIWIPPAWKGTSQNDVGYGAYDLYDLGEFNQKGTVRTKYGTKAELERAIRSLKANGIQVYGDVVMNHKGGADFTERVQAVEVNPQNRNQEVSGTYQIEAWTGFNFPGRGNQHSSFKWRWYHFDGTDWDRQLNRIYKFRGKAWDWEVDTENGNYDYLMYADVDMDHPEVINELNRWGVWYANTLNLDGFRLDAVKHIKFSFMRDWLGHVRGQTGKNLFAVAEYWKNDLGALENYLSKTNWTMSAFDVPLHYNLYQASNSSGNYDMRNLLNGTLVQRHPSHAVTFVDNHDTQPGEALESFVQGWFKPLAYATILTREQGYPQVFYGDYYGIPSDGVPSYRQQIDPLLKARQQYAYGRQHDYFDHWDVIGWTREGNASHPNSGLATIMSDGPGGSKWMYVGRQKAGEVWHDMTGNRSGTVTINQDGWGHFFVNGGSVSVWVKR

SEQ ID NO: 30581 - protein, 480 aa, Bacillus sp.
APINETMMQYFEWDLPNDGTLWNRLHNNAQNLKNAGITALWLPPAYKGTSQSDVGYGVYDLYDLGEFNQKGTIRTKYGTKTQYIQAIQAAKAAGMQVYADVVFNHKAGADGTEFVDAVEVDPSNRNQEVSGTYQIEAWTKFDFPGRGNTYSSFKWRWYHFDGTDWDESRKLNRIYKFRGKAWDWEVDTENGNYDYLMFADLDMDHPEVVTELKNWGTWYVNTTNIDGFRLDAVKHIKFSFMRDWLTYVRNQTGKNLFAVGEFWKNDLGALENYITKTNGSMSLFDAPLHNNFYTASKSSGYFDMRNLLNGTLVQRHPSHAVTLVDNHDTQPGEALESFVQGWFKPLAYAFILTRQEGYPCVFYGDYYGIPKYNIPGLKSKIDPLLIARRDYAYGTQRDYIDHQDIIGWTREGIDTKPNSGLAALITDGPGGSKWMYVGKKHAGKVFYDLTGNRSDTVTINADGWGEFKVNGGSVSIWVAK

SEQ ID NO: 30582 - protein, 474 aa, Bacillus sp. (in: firmicutes)
HHDGTNGTIMQYFEWNVPNDGQHWNRLHNNAQNLKNAGITAIWIPPAWKGTSQNDVGYGAYDLYDLGEFNQKGTVRTKYGTKAELERAIRSLKANGIQVYGDVVMNHKGGADFTERVQAVEVNPQNRNQEVSGTYQIEAWTGFNFPGRGNQHSSFKWRWYHFDGTDDIYKFRGKAWDWEVDTENGNYDYLMYADVDMDHPEVINELNRWGVWYANTLNLDGFRLDAVKHIKFSFMRDWLGHVRGQTGKNLFAVAEYWKNDLGALENYLSKTNWTMSAFDVPLHYNLYQASNSSGNYDMRNLLNGTLVQRHPSHAVTFVDNHDTQPGEALESFVQGWFKPLAYATILTREQGYPQVFYGDYYGIPSDGVPSYRQQIDPLLKARQQYAYGRQHDYFDHWDVIGWTREGNASHPNSGLATIMSDGPGGSKWMYVGRQKAGEVWHDMTGNRSGTVTINQDGWGHFFVNGGSVSVWVKR

SEQ ID NO: 30583 - protein, 479 aa, Bacillus sp. (in: firmicutes)
HHDGTNGTIMQYFEWNVPNDGQHWNRLHNNAQNLKNAGITAIWIPPAWKGTSQNDVGYGAYDLYDLGEFNQKGTVRTKYGTKAELERAIRSLKANGIQVYGDVVMNHKGGADFTERVQAVEVNPQNRNQEVSGTYQIEAWTGFNFPGRGNQHSSFKWRWYHFDGTDWDQLNRIYKFRGKAWDWEVDTENGNYDYLMYADVDMDHPEVINELNRWGVWYANTLNLDGFRLDAVKHIKFSFMRDWLGHVRGQTGKNLFAVAEYWKNDLGALENYLSKTNWTMSAFDVPLHYNLYQASNSSGNYDMRNLLNGTLVQRHPSHAVTFVDNHDTQPGEALESFVQGWFKPLAYATILTREQGYPQVFYGDYYGIPSDGVPSYRQQIDPLLKARQQYAYGRQHDYFDHWDVIGWTREGNASHPNSGLATIMSDGPGGSKWMYVGRQKAGEVWHDMTGNRSGTVTINQDGWGHFFVNGGSVSVWVKR

SEQ ID NO: 30584 - protein, 478 aa, Bacillus sp. (in: firmicutes)
HHDGTNGTIMQYFEWNVPNDGQHWNRLHNNAQNLKNAGITAIWIPPAWKGTSQNDVGYGAYDLYDLGEFNQKGTVRTKYGTKAELERAIRSLKANGIQVYGDVVMNHKGGADFTERVQAVEVNPQNRNQEVSGTYQIEAWTGFNFPGRGNQHSSFKWRWYHFDGTDWDSNRIYKFRGKAWDWEVDTENGNYDYLMYADVDMDHPEVINELNRWGVWYANTLNLDGFRLDAVKHIKFSFMRDWLGHVRGQTGKNLFAVAEYWKNDLGALENYLSKTNWTMSAFDVPLHYNLYQASNSSGNYDMRNLLNGTLVQRHPSHAVTFVDNHDTQPGEALESFVQGWFKPLAYATILTREQGYPQVFYGDYYGIPSDGVPSYRQQIDPLLKARQQYAYGRQHDYFDHWDVIGWTREGNASHPNSGLATIMSDGPGGSKWMYVGRQKAGEVWHDMTGNRSGTVTINQDGWGHFFVNGGSVSVWVKR

SEQ ID NO: 30585 - protein, 485 aa, Bacillus sp.
HHDGTNGTIMQYFEWNVPNDGQHWNRLHNNAQNLKNAGITAIWIPPAWKGTSQNDVGYGAYDLYDLGEFNQKGTVRTKYGTKAELERAIRSLKANGIQVYGDVVMNHKGGADFTERVQAVEVNPQNRNQEVSGTYQIEAWTGFNFPGRGNQHSSFKWRWYHFDGTDWDQSRQLANRIYKFRGDGKAWDWEVDTENGNYDYLMYADVDMDHPEVINELNRWGVWYANTLNLDGFRLDAVKHIKFSFMRDWLGHVRGQTGKNLFAVAEYWKNDLGALENYLSKTNWTMSAFDVPLHYNLYQASNSSGNYDMRNLLNGTLVQRHPSHAVTFVDNHDTQPGEALESFVQGWFKPLAYATILTREQGYPQVFYGDYYGIPSDGVPSYRTQIDPLLKARQQYAYGRQHDYFDHWDVIGWTREGNASHPNSGLATIMSDGPGGSKWMYVGRQKAGEVWHDMTGNRSGTVTINQDGWGHFFVNGGSVSVWVKR

SEQ ID NO: 30586 - protein, 485 aa, Bacillus sp.
HHDGTNGTIMQYFEWNVPNDGQHWNRLHNNAQNLKNAGITAIWIPPAWKGTSQNDVGYGAYDLYDLGEFNQKGTVRTKYGTKAELERAIRSLKANGIQVYGDVVMNHKGGADFTERVQAVEVNPQNRNQEVSGTYQIEAWTRFNFPGRGNQHSSFKWRWYHFDGTDWDQSRQLANRIYKFRGDGKAWDWEVDTENGNYDYLMYADVDMDHPEVINELNRWGVWYANTLNLDGFRLDAVKHIKFSFMRDWLGHVRGQTGKNLFAVAEYWKNDLGALENYLSKTNWTMSAFDVPLHYNLYQASNSSGNYDMRNLLNGTLVQRHPSHAVTFVDNHDTQPGEALESFVQGWFKPLAYATILTREQGYPQVFYGDYYGIPSDGVPSYRQQIDPLLKARQQYAYGRQHDYFDHWDVIGWTREGNASHPNSGLATIMSDGPGGSKWMYVGRQKAGEVWHDMTGNRSGTVTINQDGWGHFFVNGGSVSVWVKR

SEQ ID NO: 30587 - protein, 485 aa, Bacillus sp.
HHDGTNGTIMQYFEWNVPNDGQHWNRLHNNAQNLKNAGITAIWIPPAWKGTSQNDVGYGAYDLYDLGEFNQKGTVRTKYGTKAELERAIRSLKANGIQVYGDVVMNHKGGADFTERVQAVEVNPQNRNQEVSGTYQIEAWTGFNFPGRGNQHSSFKWRWYHFDGTDWDQSRQLANRIYKFRGDGKAWDWEVDTENGNYDYLMYADVDMDHPEVINELNRWGVWYANTLNLDGFRLDAVKHIKFSFMRDWLGHVRGQTGKNLFAVAEYWKNDLGALENYLSKTNWTMSAFDVPLHYNLYQASNSSGNYDMRNLLNGTLVQRHPSHAVTFVDNHDTQPGEALESFVQGWFKPLAYATILTREQGYPQVFYGDYYGIPSDGVPVYRQQIDPLLKARQQYAYGRQHDYFDHWDVIGWTREGNASHPNSGLATIMSDGPGGSKWMYVGRQKAGEVWHDMTGNRSGTVTINQDGWGHFFVNGGSVSVWVKR

SEQ ID NO: 30588 - protein, 485 aa, Bacillus sp.
HHDGTNGTIMQYFEWNVPNDGQHWNRLHNNAQNLKNAGITAIWIPPAWKGTSQNDVGYGAYDLYDLGEFNQKGTVRTKYGTKAELERAIRSLKANGIQVYGDVVMNHKGGADFTERVQAVEVNPQNRNQEVSGTYQIEAWTGFNFPGRGNQHSSFKWRWYHFDGTDWDQSRQLANRIYKFRGDGKAWDWEVDTENGNYDYLMYADVDMDHPEVINELNRWGVWYANTLNLDGFRLDAVKHIKFSFMRDWLGHVRGQTGKNLFAVAEYWKNDLGALENYLSKTNWTMSAFDVPLHYNLYQASNSSGNYDMRNLLNGTLVQRHPSHAVTFVDNHDTQPGEALESFVQGWFKPLAYATILTREQGYPMVFYGDYYGIPSDGVPSYRQQIDPLLKARQQYAYGRQHDYFDHWDVIGWTREGNASHPNSGLATIMSDGPGGSKWMYVGRQKAGEVWHDMTGNRSGTVTINQDGWGHFFVNGGSVSVWVKR

SEQ ID NO: 30589 - protein, 485 aa, Bacillus sp.
HHDGTNGTIMQYFEWNVPNDGQHWNRLHNNAQNLKNAGITAIWIPPAWKGTSQNDVGYGAYDLYDLGEFNQKGTVRTKYGTKAELERAIRSLKANGIQVYGDVVMNHKGGADFTERVQAVEVNPQNRNQEVSGTYQIEAWTGFNFPGRGNQHSSFKWRWYHFDGMDWDQSRQLANRIYKFRGDGKAWDWEVDTENGNYDYLMYADVDMDHPEVINELNRWGVWYANTLNLDGFRLDAVKHIKFSFMRDWLGHVRGQTGKNLFAVAEYWKNDLGALENYLSKTNWTMSAFDVPLHYNLYQASNSSGNYDMRNLLNGTLVQRHPSHAVTFVDNHDTQPGEALESFVQGWFKPLAYATILTREQGYPQVFYGDYYGIPSDGVPSYRQQIDPLLKARQQYAYGRQHDYFDHWDVIGWTREGNASHPNSGLATIMSDGPGGSKWMYVGRQKAGEVWHDMTGNRSGTVTINQDGWGHFFVNGGSVSVWVKR

SEQ ID NO: 30590 - protein, 485 aa, Bacillus sp.
HHDGTNGTIMQYFEWNVPNDGQHWNRLHNNAQNLKNAGITAIWIPPAWKGTSQNDVGYGAYDLYDLGEFNQKGTVRTKYGTKAELERAIGSLKANGIQVYGDVVMNHKGGADFTERVQAVEVNPQNRNQEVSGTYQIEAWTGFNFPGRGNQHSSFKWRWYHFDGTDWDQSRQLANRIYKFRGDGKAWDWEVDTENGNYDYLMYADVDMDHPEVINELNRWGVWYANTLNLDGFRLDAVKHIKFSFMRDWLGHVRGQTGKNLFAVAEYWKNDLGALENYLSKTNWTMSAFDVPLHYNLYQASNSSGNYDMRNLLNGTLVQRHPSHAVTFVDNHDTQPGEALESFVQGWFKPLAYATILTREQGYPQVFYGDYYGIPSDGVPSYRQQIDPLLKARQQYAYGRQHDYFDHWDVIGWTREGNASHPNSGLATIMSDGPGGSKWMYVGRQKAGEVWHDMTGNRSGTVTINQDGWGHFFVNGGSVSVWVKR

SEQ ID NO: 30591 - protein, 485 aa, Bacillus sp.
HHDGTNGTIMQYFEWNVPNDGQHWNRLHNNAQNLKNAGITAIWIPPAWKGTSQNDVGYGAYDLYDLGEFNQKGTVRTKYGTKAELERAIRSLKANGIQVYGDVVMNHKGGADFTERVQAVEVNPQNRNQEVSGTYQIEAWTGFNFPGRGNQHSSFKWRWYHFDGTDWDQSRQLANRIYKFRGDGKAWDWEVDTENGNYDYLMYADVDMDHPEVINELNRWGVWYANTLNLDGFRLDAVKHIKFSFMRDWLGHVRGQTGKNLFAVAEYWKNDLGALENYLSKTNWTMSAFDVPLHYNLYQASNSSGNYDMRNLLNGTLVQRHPSHAVTFVDNHDTQPGEALESFVQGWFKPLAYATILTREQGYPQVFYGDYYGIPSDGVPSYRQQIDPLLKARQQYAYGRQHDYFDHWDVIGWTREGNASHPNSGLATIMSDGPGGSKWMYVGRCKAGEVWHDMTGNRSGTVTINQDGWGHFFVNGGSVSVWVKR

SEQ ID NO: 30592 - protein, 485 aa, Bacillus sp.
HHDGTNGTIMQYFEWNVPNDGQHWNRLHNNAQNLKNAGITAIWIPPAWKGTSQNDVGYGAYDLYDLGEFNQKGTVRTKYGTKAELERAIRSLKANGIQVYGDVVMNHKGGADFTERVQAVEVNPQNRNQEVSGTYQIEAWTGFKFPGRGNQHSSFKWRWYHFDGTDWDQSRQLANRIYKFRGDGKAWDWEVDTENGNYDYLMYADVDMDHPEVINELNRWGVWYANTLNLDGFRLDAVKHIKFSFMRDWLGHVRGQTGKNLFAVAEYWKNDLGALENYLSKTNWTMSAFDVPLHYNLYQASNSSGNYDMRNLLNGTLVQRHPSHAVTFVDNHDTQPGEALESFVQGWFKPLAYATILTREQGYPQVFYGDYYGIPSDGVPSYRQQIDPLLKARQQYAYGRQHDYFDHWDVIGWTREGNASHPNSGLATIMSDGPGGSKWMYVGRQKAGEVWHDMTGNRSGTVTINQDGWGHFFVNGGSVSVWVKR

SEQ ID NO: 30593 - protein, 485 aa, Bacillus sp.
HHDGTNGTIMQYFEWNVPNDGQHWNRLHNNAQNLKNAGITAIWIPPAWKGTSQNDVGYGAYDLYDLGEFNQKGTVRTKYGTKAELERAIRSLKANGIQVYGDVVMNHKGGADFTERVQAVEVNPQNRNQEVSGTYQIEAWTGFNFPGRGNQHSSFKWRWYHFDGTDWDQSRQLANRIYKFRGDGKAWDWEVDTENGNYDYLMYADVDMDHPEVINELNRWGVWYANTLNLDGFRLDAVKHIKFSFMRDWLGHVRGQTGKNLFAVAEYWKNDLGALENYLSKTNWTMSAFDVPLHYNLYQASNSIGNYDMRNLLNGTLVQRHPSHAVTFVDNHDTQPGEALESFVQGWFKPLAYATILTREQGYPQVFYGDYYGIPSDGVPSYRQQIDPLLKARQQYAYGRQHDYFDHWDVIGWTREGNASHPNSGLATIMSDGPGGSKWMYVGRQKAGEVWHDMTGNRSGTVTINQDGWGHFFVNGGSVSVWVKR

SEQ ID NO: 30594 - protein, 485 aa, Bacillus sp.
HHDGTNGTIMQYFEWNVPNDGQHWNRLHNNAQNLKNTGITAIWIPPAWKGTSQNDVGYGAYDLYDLGEFNQKGTVRTKYGTKAELERAIRSLKANGIQVYGDVVMNHKGGADFTERVQAVEVNPQNRNQEVSGTYQIEAWTGFNFPGRGNQHSSFKWRWYHFDGTDWDQSRQLANRIYKFRGDGKAWDWEVDTENGNYDYLMYADVDMDHPEVINELNRWGVWYANTLNLDGFRLDAVKHIKFSFMRDWLGHVRGQTGKNLFAVAEYWKNDLGALENYLSKTNWTMSAFDVPLHYNLYQASNSSGNYDMRNLLNGTLVQRHPSHAVTFVDNHDTQPGEALESFVQGWFKPLAYATILTREQGYPQVFYGDYYGIPSDGVPSYRQQIDPLLKARQQYAYGRQHDYFDHWDVIGWTREGNASHPNSGLATIMSDGPGGSKWMYVGRQKAGEVWHDMTGNRSGTVTINQDGWGHFFVNGGSVSVWVKR

SEQ ID NO: 30595 - protein, 483 aa, Bacillus sp. (in: firmicutes)
HHDGTNGTIMQYFEWNVPNDGQHWNRLHNNAQNLKNAGITAIWIPPAWKGTSQNDVGYGAYDLYDLGEFNQKGTVRTKYGTKAELERAIRSLKANGIQVYGDVVMNHKGGADFTERVQAVEVNPQNRNQEVSGTYQIEAWTGFNFPGRGNQHSSFKWRWYHFDGTDWDQSRQLANRIYKFRGKAWDWEVDTENGNYDYLMYADVDMDHPEVINELNRWGVWYANTLNLDGFRLDAVKHIKFSFMRDWLGHVRGQTGKNLFAVAEYWKNDLGALENYLSKTNWTMSAFDVPLHYNLYQASNSSGNYDMRNLLNGTLVQRHPSHAVTFVDNHDTQPGEALESFVQGWFKPLAYATILTREQGYPQVFYGDYYGIPSDGVPSYRQQIDPLLKARQQYAYGRQHDYFDHWDVIGWTREGNASHPNSGLATIMSDGPGGSKWMYVGRQKAGEVWHDMTGNRSGTVTINQDGWGHFFVNGGSVSVWVKR

SEQ ID NO: 30596 - protein, 485 aa, Bacillus sp.
HHDGTNGTIMQYFEWNVPNDGQHWNRLHNNAQNLENAGITAIWIPPAWKGTSQNDVGYGAYDLYDLGEFNQKGTVRTKYGTKAELERAIRSLKANGIQVYGDVVMNHKGGADFTERVQAVEVNPQNRNQEVSGTYQIEAWTGFNFPGRGNQHSSFKWRWYHFDGTDWDQSRQLANRIYKFRGDGKAWDWEVDTENGNYDYLMYADVDMDHPEVINELNRWGVWYANTLNLDGFRLDAVKHIKFSFMRDWLGHVRGQTGKNLFAVAEYWKNDLGALENYLSKTNWTMSAFDVPLHYNLYQASNSSGNYDMRNLLNGTLVQRHPSHAVTFVDNHDTQPGEALESFVQGWFKPLAYATILTREQGYPQVFYGDYYGIPSDGVPSYRQQIDPLLKARQQYAYGRQHDYFDHWDVIGWTREGNASHPNSGLATIMSDGPGGSKWMYVGRQKAGEVWHDMTGNRSGTVTINQDGWGHFFVNGGSVSVWVKR

SEQ ID NO: 30597 - protein, 485 aa, Bacillus sp.
HHDGTNGTIMQYFEWNVPNDGQHWNRLHNNAQNLKNAGITAIWIPPAWKGTSQNDVGYGAYDLYDLGEFNQKGTVRTKYGTKAELERAIRSLKANGIQVYGDVVMNHKGGADFTERVQAVEVNPQNRNQEVSGTYQIEAWTGFNFPGRGNQHSSFKWRWYHFDGTDWDQSRQLANRIYKFRGDGKAWDWEVDTENGNYDYLMYADVDMDHPEVINELDRWGVWYANTLNLDGFRLDAVKHIKFSFMRDWLGHVRGQTGKNLFAVAEYWKNDLGALENYLSKTNWTMSAFDVPLHYNLYQASNSSGNYDMRNLLNGTLVQRHPSHAVTFVDNHDTQPGEALESFVQGWFKPLAYATILTREQGYPQVFYGDYYGIPSDGVPSYRQQIDPLLKARQQYAYGRQHDYFDHWDVIGWTREGNASHPNSGLATIMSDGPGGSKWMYVGRQKAGEVWHDMTGNRSGTVTINQDGWGHFFVNGGSVSVWVKR

SEQ ID NO: 30598 - protein, 485 aa, Bacillus sp.
HHDGTNGTIMQYFEWNVPNDGQHWNRLHNHAQNLKNAGITAIWIPPAWKGTSQNDVGYGAYDLYDLGEFNQKGTVRTKYGTKAELERAIRSLKANGIQVYGDVVMNHKGGADFTERVQAVEVNPQNRNQEVSGTYQIEAWTGFNFPGRGNQHSSFKWRWYHFDGTDWDQSRQLANRIYKFRGDGKAWDWEVDTENGNYDYLMYADVDMDHPEVINELNRWGVWYANTLNLDGFRLDAVKHIKFSFMRDWLGHVRGQTGKNLFAVAEYWKNDLGALENYLSKTNWTMSAFDVPLHYNLYQASNSSGNYDMRNLLNGTLVQRHPSHAVTFVDNHDTQPGEALESFVQGWFKPLAYATILTREQGYPQVFYGDYYGIPSDGVPSYRQQIDPLLKARQQYAYGRQHDYFDHWDVIGWTREGNASHPNSGLATIMSDGPGGSKWMYVGRQKAGEVWHDMTGNRSGTVTINQDGWGHFFVNGGSVSVWVKR

SEQ ID NO: 30599 - protein, 485 aa, Bacillus sp.
HHDGTNGTIMQYFEWNVPNDGQHWNRLHNNAQNLKNAGITAIWIPPAWKGTSQNDVGYGAYDLYDLGEFNQKGTVRTKYGTKAELERAIRSLKANGIQVYGDVVMNHKGGADFTERVQAVEVNPQNRNQEVSGTYQIEAWTGFNFPGRGNQHSSFKWRWYHFDGTDWDQSRQLANRIYKFRGDGKAWDWEVDTENGNYDYLMYADVDMDHPEVINELNRWGVWYANTLNLDGFRLDAVKHIKFSFMRDWLGHVRGQTGKNLFAVAEYWKNDLGALENYLSKTNWTMSAFDVPLHYNLYQASNSSGNYDMRNLLNGTLVQRHPSHAVTFVDNHDTQPGEALESFVQGWFKPLAYATILTREQGYPQVFYGDYYGIPFDGVPSYRQQIDPLLKARQQYAYGRQHDYFDHWDVIGWTREGNASHPNSGLATIMSDGPGGSKWMYVGRQKAGEVWHDMTGNRSGTVTINQDGWGHFFVNGGSVSVWVKR

SEQ ID NO: 30600 - protein, 485 aa, Bacillus sp.
HHDGTNGTIMQYFEWNVPNDGQHWNRLHNNAQNLKNAGITAIWIPPAWKGTSQNDVGYGAYDLYDLGEFNQKGTVRTKYGTKAELERAIRSLKANGIQVYGDVVMNHKGGADFTERVQAVEVNPQNRNQEVSGTYQIEAWTGFNFPGRGNQHSSFKWRWYHFDGTDWDQSRQLANRIYKFRGDGKAWDWEVDTENGNYDYLMYADVDMDHPEVINELNRWGVWYANTLNLDGFRLDAVKHIKFSFMRDWLGHVRGQTGKNLFAVAEYWKNDLGALENYLSKTNWTMSAFDVPLHYNLYQASNSSGNYDMRNLLNGTLVQRHPSHAVTFVDNHDTQPGEALESFVQSWFKPLAYATILTREQGYPQVFYGDYYGIPSDGVPSYRQQIDPLLKARQQYAYGRQHDYFDHWDVIGWTREGNASHPNSGLATIMSDGPGGSKWMYVGRQKAGEVWHDMTGNRSGTVTINQDGWGHFFVNGGSVSVWVKR

SEQ ID NO: 30601 - protein, 485 aa, Bacillus sp.
HHDGTNGTIMQYFEWNVPNDGQHWNRLHNNAQNLKNAGITAIWIPPAWKGTSQNDVGYGAYDLYDLGEFNQKGTVRTKYGTKAELERAIRSLKANGIQVYGDVVMNHKGGADFTERVEAVEVNPQNRNQEVSGTYQIEAWTGFNFPGRGNQHSSFKWRWYHFDGTDWDQSRQLANRIYKFRGDGKAWDWEVDTENGNYDYLMYADVDMDHPEVINELNRWGVWYANTLNLDGFRLDAVKHIKFSFMRDWLGHVRGQTGKNLFAVAEYWKNDLGALENYLSKTNWTMSAFDVPLHYNLYQASNSSGNYDMRNLLNGTLVQRHPSHAVTFVDNHDTQPGEALESFVQGWFKPLAYATILTREQGYPQVFYGDYYGIPSDGVPSYRQQIDPLLKARQQYAYGRQHDYFDHWDVIGWTREGNASHPNSGLATIMSDGPGGSKWMYVGRQKAGEVWHDMTGNRSGTVTINQDGWGHFFVNGGSVSVWVKR

SEQ ID NO: 30602 - protein, 485 aa, Bacillus sp.
HHDGTNGTIMQYFEWNVPNDGYHWNRLHNNAQNLKNAGITAIWIPPAWKGTSQNDVGYGAYDLYDLGEFNQKGTVRTKYGTKAELERAIRSLKANGIQVYGDVVMNHKGGADFTERVQAVEVNPQNRNQEVSGTYQIEAWTGFNFPGRGNQHSSFKWRWYHFDGTDWDQSRQLANRIYKFRGDGKAWDWEVDTENGNYDYLMYADVDMDHPEVINELNRWGVWYANTLNLDGFRLDAVKHIKFSFMRDWLGHVRGQTGKNLFAVAEYWKNDLGALENYLSKTNWTMSAFDVPLHYNLYQASNSSGNYDMRNLLNGTLVQRHPSHAVTFVDNHDTQPGEALESFVQGWFKPLAYATILTREQGYPQVFYGDYYGIPSDGVPSYRQQIDPLLKARQQYAYGRQHDYFDHWDVIGWTREGNASHPNSGLATIMSDGPGGSKWMYVGRQKAGEVWHDMTGNRSGTVTINQDGWGHFFVNGGSVSVWVKR

SEQ ID NO: 30603 - protein, 485 aa, Bacillus sp.
HHDGTNGTIMQYFEWNVPNDGQHWNRLHNNAQNLKNAGITAIWIPPAWKGTSQNDVGYGAYDLYDLGEFNQKGTVRTKYGTKAELERAIRSLKANGIQVYGDVVMNHKGGADFTERVQAVEVNPQNRNQEVSGTYQIEAWTGFNFPGRGNQHSSFKWRWYHFDGTDWDQSRQLANRIYKFRGDGKAWDWEVDTENGNYDYLMYADVDMDHPEVINELNRWGVWYANTLNLDGFRLDAVKHIKFSFMRDWLGHVRGQTGKNLFAVAEYWKNDLGALENYLSKTNWTMSAFDVPLHYNLYQASNSSGNYDMRNLLNGTLVQRHPSHAVTFVDNHDTQPGEALESFVQGWFKPLAYATILTREQGYPQVFYGDYYGIPSDGVPSYRQQIDPLLKARQRYAYGRQHDYFDHWDVIGWTREGNASHPNSGLATIMSDGPGGSKWMYVGRQKAGEVWHDMTGNRSGTVTINQDGWGHFFVNGGSVSVWVKR

SEQ ID NO: 30604 - protein, 485 aa, Bacillus sp.
HHDGTNGTIMQYFEWNVPNDGQHWNRLHGNAQNLKNAGITAIWIPPAWKGTSQNDVGYGAYDLYDLGEFNQKGTVRTKYGTKAELERAIRSLKANGIQVYGDVVMNHKGGADFTERVQAVEVNPQNRNQEVSGTYQIEAWTGFNFPGRGNQHSSFKWRWYHFDGTDWDQSRQLANRIYKFRGDGKAWDWEVDTENGNYDYLMYADVDMDHPEVINELNRWGVWYANTLNLDGFRLDAVKHIKFSFMRDWLGHVRGQTGKNLFAVAEYWKNDLGALENYLSKTNWTMSAFDVPLHYNLYQASNSSGNYDMRNLLNGTLVQRHPSHAVTFVDNHDTQPGEALESFVQGWFKPLAYATILTREQGYPQVFYGDYYGIPSDGVPSYRQQIDPLLKARQQYAYGRQHDYFDHWDVIGWTREGNASHPNSGLATIMSDGPGGSKWMYVGRQKAGEVWHDMTGNRSGTVTINQDGWGHFFVNGGSVSVWVKR

SEQ ID NO: 30605 - protein, 485 aa, Bacillus sp.
HHNGTNGTMMQYFEWYLPNDGNHWNRLNSDASNLKSKGITAVWIPPAWKAVSQNDVGYGAYDLYDLGEFNQKGTVRTKYGTRSQLQAAVTSLKNNGIQVYGDVVMNHKGGADATEMVRAVEVNPNNRNQEVTGEYTIEAWTRFDFPGRGNTHSSFKWRWYHFDGVDFDQSREFTNRIYKFRGHGKAWDWEVDTEFGNYDYLMYADYDYDHPESTNEMRNWGVWYTNTLGLDGFRIDAVKHIKYSFTRDWINHVRSATGKNMFAVAEFWKNDLGAIENYLQKTNWNHSVFDVPLHYNLYNASKSGGNYDMRNIFNGTVVQRHPSHAVTFVDNHDSQPEEALESFVETWFKPLAYALTLTREQGYPSVFYGDYYGIPTHGVPAMRSKIDPILEARQKYAYGPQHDYLDHPDVIGWTREGDSSHPKSGLATLITDGPGGSKRMYAGLKNAGETWYDITGNRSDTVKIGSDGWGEFHVNKASVSIYVQK

SEQ ID NO: 30606 - protein, 485 aa, Bacillus sp.
HHDGTNGTIMQYFEWNVPNDGQHWNRLHNNAQNLKNAGITAIWIPPAWKGTSQNDVGYGAYDLYDLGEFNQKGTVRTKYGTKAELERAIRSLKANGIQVYGDVVMNHKGGADFTERVQAVEVNPQNRNQEVSGTYQIEAWTGFNFPGRGNQHSSFKWRWYHFDGTDWDQSRQLANRIYKFRGDGKAWDWEVDTENGNYDYLMYADVDMDHPEVINELNRWGVWYANTLNLDGFRLDAVKHIKFSFMRDWLGHVRGQTGKNLFAVAEYWKNDLGALENYLSKTNWTMSAFDVPLHYNLYQASNSSGNYDMRNLLNGTLVQRHPSHAVTFVDNHDTQPGEALESFVQGWFKPLAYAVILTREQGYPQVFYGDYYGIPSDGVPSYRQQIDPLLKARQQYAYGRQHDYFDHWDVIGWTREGNASHPNSGLATIMSDGPGGSKWMYVGRQKAGEVWHDMTGNRSGTVTINQDGWGHFFVNGGSVSVWVKR

SEQ ID NO: 30607 - protein, 485 aa, Bacillus sp.
HHDGTNGTIMQYFEWNVPNDGQHWNRLHNNAQNLKNGGITAIWIPPAWKGTSQNDVGYGAYDLYDLGEFNQKGTVRTKYGTKAELERAIRSLKANGIQVYGDVVMNHKGGADFTERVQAVEVNPQNRNQEVSGTYQIEAWTGFNFPGRGNQHSSFKWRWYHFDGTDWDQSRQLANRIYKFRGDGKAWDWEVDTENGNYDYLMYADVDMDHPEVINELNRWGVWYANTLNLDGFRLDAVKHIKFSFMRDWLGHVRGQTGKNLFAVAEYWKNDLGALENYLSKTNWTMSAFDVPLHYNLYQASNSSGNYDMRNLLNGTLVQRHPSHAVTFVDNHDTQPGEALESFVQGWFKPLAYATILTREQGYPQVFYGDYYGIPSDGVPSYRQQIDPLLKARQQYAYGRQHDYFDHWDVIGWTREGNASHPNSGLATIMSDGPGGSKWMYVGRQKAGEVWHDMTGNRSGTVTINQDGWGHFFVNGGSVSVWVKR

SEQ ID NO: 30608 - protein, 485 aa, Bacillus sp.
HHDGTNGTIMQYFEWNVPNDGQHWNRLHNNAQNLKNAGITAIWIPPAWKGTSQNDVGYGAYDLYDLGEFNQKGTVRTKYGTKAELERAIRSLKANGIQVYGDVVMNHKGGADFTERVQAVEVNPQNRNQEVSGTYQIEAWTGFNFPGRGNQHSSFKWRWYHFDGTDWDQSRQLANRIYKFRGDTKAWDWEVDTENGNYDYLMYADVDMDHPEVINELNRWGVWYANTLNLDGFRLDAVKHIKFSFMRDWLGHVRGQTGKNLFAVAEYWKNDLGALENYLSKTNWTMSAFDVPLHYNLYQASNSSGNYDMRNLLNGTLVQRHPSHAVTFVDNHDTQPGEALESFVQGWFKPLAYATILTREQGYPQVFYGDYYGIPSDGVPSYRQQIDPLLKARQQYAYGRQHDYFDHWDVIGWTREGNASHPNSGLATIMSDGPGGSKWMYVGRQKAGEVWHDMTGNRSGTVTINQDGWGHFFVNGGSVSVWVKR

SEQ ID NO: 30609 - protein, 485 aa, Bacillus sp.
HHDGTNGTIMQYFEWNVPNDGQHWNRLHNNAQNLKNAGITAIWIPPAWKGTSQNDVGYGAYDLYDLGEFNQKGTVRTKYGTKAELERAIRSLKANGIQVYGDVVMNHKGGADMTERVQAVEVNPQNRNQEVSGTYQIEAWTGFNFPGRGNQHSSFKWRWYHFDGTDWDQSRQLANRIYKFRGDGKAWDWEVDTENGNYDYLMYADVDMDHPEVINELNRWGVWYANTLNLDGFRLDAVKHIKFSFMRDWLGHVRGQTGKNLFAVAEYWKNDLGALENYLSKTNWTMSAFDVPLHYNLYQASNSSGNYDMRNLLNGTLVQRHPSHAVTFVDNHDTQPGEALESFVQGWFKPLAYATILTREQGYPQVFYGDYYGIPSDGVPSYRQQIDPLLKARQQYAYGRQHDYFDHWDVIGWTREGNASHPNSGLATIMSDGPGGSKWMYVGRQKAGEVWHDMTGNRSGTVTINQDGWGHFFVNGGSVSVWVKR

SEQ ID NO: 30610 - protein, 485 aa, Bacillus sp.
HHDGTNGTIMQYFEWNVPNDGQHWNRLHNNAQNLKNAGITAIWIPPAWKGTSQNDVGYGAYDLYDLGEFNQKGTVRTKYGTKAELERAIRSLKANGIQVYGDVVMNHKGGADFTERVQAVEVNPQNRNQEVSGTYQIEAWTGFNFPGRGNQHSSFKWRWYHFDGTDWDQSRQLANRIYKFRGDGKAWDWEVDTENGNYDYLMYADVDMDHPEVINELNRWGVWYANTLNLDGFRLDAVKHIKFSFMRDWLGHVRGQTGKNLFAVAEYWKNDLGALENYLSKTNWMMSAFDVPLHYNLYQASNSSGNYDMRNLLNGTLVQRHPSHAVTFVDNHDTQPGEALESFVQGWFKPLAYATILTREQGYPQVFYGDYYGIPSDGVPSYRQQIDPLLKARQQYAYGRQHDYFDHWDVIGWTREGNASHPNSGLATIMSDGPGGSKWMYVGRQKAGEVWHDMTGNRSGTVTINQDGWGHFFVNGGSVSVWVKR

SEQ ID NO: 30611 - protein, 485 aa, Bacillus sp.
HHDGTNGTIMQYFEWNVPNDGQHWNRLHNNAQNLKNAGITAIWIPPAWKGTSQNDVGYGAYDLYDLGEFNQKGTVRTKYGTKAELERAIRSLKANGIQVYGDVVMNHKGGADFTERVQAVEVNPQNRNQEVSGTYQIEAWTGFNFPGRGNQHSSFKWRWYHFDGIDWDQSRQLANRIYKFRGDGKAWDWEVDTENGNYDYLMYADVDMDHPEVINELNRWGVWYANTLNLDGFRLDAVKHIKFSFMRDWLGHVRGQTGKNLFAVAEYWKNDLGALENYLSKTNWTMSAFDVPLHYNLYQASNSSGNYDMRNLLNGTLVQRHPSHAVTFVDNHDTQPGEALESFVQGWFKPLAYATILTREQGYPQVFYGDYYGIPSDGVPSYRQQIDPLLKARQQYAYGRQHDYFDHWDVIGWTREGNASHPNSGLATIMSDGPGGSKWMYVGRQKAGEVWHDMTGNRSGTVTINQDGWGHFFVNGGSVSVWVKR

SEQ ID NO: 30612 - protein, 483 aa, Bacillus sp. (in: firmicutes)
HHDGTNGTMMQYFEWNVPNDGQHWNRLHNNAQNLKNAGITAIWIPPAWKGTSQNDVGYGAYDLYDLGEFNQKGTVRTKYGTKAELERAIRSLKANGIQVYGDVVMNHKGGADFTERVQAVEVNPQNRNQEVSGTYQIEAWTGFNFPGRGNQHSSFKWRWYHFDGTDWDQSHQLANRIYKFRGKAWDWEVDTEFGNYDYLMYADVDMDHPEVINELNRWGVWYANTLNLDGFRLDAVKHIKFSFMRDWLGHVRGQTGKNLFAVAEYWKNDLGALENYLSKTNWTMSAFDVPLHYNLYQASNSSGNYDMRNLLNGTLVQRHPSHAVTFVDNHDTQPGEALESFVQGWFKPLAYATILTREQGYPSVFYGDYYGIPSDGVPSYRQQIDPLLKARQQYAYGRQHDYFDHWDVIGWTREGNASHPNSGLATIMSDGPGGSKWMYVGRQKAGEVWHDMTGNRSGTVTINQDGWGHFFVNGGSVSVWVKR

SEQ ID NO: 30613 - protein, 483 aa, Bacillus sp. (in: firmicutes)
HHDGTNGTIMQYFEWNVPNDGQHWNRLHNNAQNLKNAGITAIWIPPAWKGTSQNDVGYGAYDLYDLGEFNQKGTVRTKYGTKAELERAIRSLKANGIQVYGDVVMNHKGGADFTERVQAVEVNPQNRNQEVSGTYQIEAWTGFNFPGRGNQHSSFKWRWYHFDGTDWDQSLQLANRIYKFRGKAWDWEVDTENGNYDYLMYADVDMDHPEVINELNRWGVWYANTLNLDGFRLDAVKHIKFSFMRDWLGHVRGQTGKNLFAVAEYWKNDLGALENYLSKTNWTMSAFDVPLHYNLYQASNSSGNYDMRNLLNGTLVQRHPSHAVTFVDNHDTQPGEALESFVQGWFKPLAYATILTREQGYPSVFYGDYYGIPSDGVPSYRQQIDPLLKARQQYAYGRQHDYFDHWDVIGWTREGNASHPNSGLATIMSDGPGGSKWMYVGRQKAGEVWHDMTGNRSGTVTINQDGWGHFFVNGGSVSVWVKR

SEQ ID NO: 30614 - protein, 485 aa, Bacillus sp.
HHDGTNGTIMQYFEWNVPNDGQHWNRLHNNAQNLKNAGITAIWIPPAWKGTSQNDVGYGAYDLYDLGEFNQKGTVRTKYGTKAELERAIRSLKANGIQVYGDVVMNHKGGADFTERVRAVEVNPQNRNQEVSGTYQIEAWTGFNFPGRGNQHSSFKWRWYHFDGTDWDQSRQLANRIYKFRGDGKAWDWEVDTENGNYDYLMYADVDMDHPEVINELNRWGVWYANTLNLDGFRLDAVKHIKFSFMRDWLGHVRGQTGKNLFAVAEYWKNDLGALENYLSKTNWTMSAFDVPLHYNLYQASNSSGNYDMRNLLNGTLVQRHPSHAVTFVDNHDTQPGEALESFVQGWFKPLAYATILTREQGYPQVFYGDYYGIPSDGVPSYRQQIDPLLKARQQYAYGRQHDYFDHWDVIGWTREGNASHPNSGLATIMSDGPGGSKWMYVGRQKAGEVWHDMTGNRSGTVTINQDGWGHFFVNGGSVSVWVKR

SEQ ID NO: 30615 - protein, 483 aa, Bacillus sp.
HHNGTNGTMMQYFEWYLPNDGNHWNRLNSDASNLKSKGITAVWIPPAWKGASQNDVGYGAYDLYDLGEFNQKGTVRTKYGTRSQLQAAVTSLKNNGIQVYGDVVMNHKGGADATEMVRAVEVNPNNRNQEVTGEYTIEAWTRFDFPGRGNTHSSFKWRWYHFDGVDWDQSRELDNRIYKFRGKAWDWEVDTEFGNYDYLMYTDYDYDHPESTNEMRNWGVWYTNTLGLDGFRIDAVKHIKYSFTRDWINHVRSATGKNMFAVAEFWKNDLGAIENYLQKTNWNHSVFDVPLHYNLYNASKSQGNYDMRNIFNGTVVQRHPSHAVTFVDNHDSQPEEALESFVDTWFKPLAYALTLTREQGYPSVFYGDYYGIPTHGVPAMRSKIDPILEARQKYAYGPQHDYLDHPDVIGWTREGDSSHPKSGLATLITDGPGGSKRMYAGLKNAGETWYDITGNRSDTVKIGSDGWGEFHVNGSSVSIYVQK

SEQ ID NO: 30616 - protein, 483 aa, Bacillus sp.
HHNGTNGTMMQYFEWYLPNDGNHWNRLNSDASNLKSKGITAVWIPPAWKGASQNDVGYGAYDLYDLGEFNQKGTVRTKYGTRSQLQAAVTSLKNNGIQVYGDVVMNHKGGADATEMVRAVEVNPNNRNQEVTGEYTIEAWTRFDFPGRGNTHSSFKWRWYHFDGVDWDQSRELDNRIYKFRGKAWDWEVDTEFGNYDYLMYTDYDYDHPETTNEMRNWGVWYTNTLGLDGFRIDAVKHIKYSFTRDWINHVRSATGKNMFAVAEFWKNDLGAIENYLQKTNWNHSVFDVPLHYNLYNASKSQGNYDMRNIFNGTVVQRHPSHAVTFVDNHDSQPEEALESFVDTWFKPLAYALTLTREQGYPSVFYGDYYGIPTHGVPAMRSKIDPILEARQKYAYGPQHDYLDHPDVIGWTREGDSSHPKSGLATLITDGPGGSKRMYAGLKNAGETWYDITGNRSDTVKIGSDGWGEFHVNGSSVSIYVQK

SEQ ID NO: 30617 - protein, 483 aa, Bacillus sp. (in: firmicutes)
HHDGTNGTIMQYFEWNVPNDGQHWNRLHNNAQNLKNAGITAIWIPPAWKGTSQNDVGYGAYDLYDLGEFNQKGTVRTKYGTKAELERAIRSLKANGIQVYGDVVMNHKGGADFTERVQAVEVNPQNRNQEVSGTYQIEAWTGFNFPGRGNQHSSFKWRWYHFDGTDWDQSRQLANRIYKFRGKAWDWEVDTENGNYDYLMYADVDMDHPEVINELNRWGVWYANTLNLDGFRLDAVKHIKFSFLRDWLGHVRGQTGKNLFAVAEYWKNDLGALENYLSKTNWTMSAFDVPLHYNLYQASNSSGNYDMRNLLNGTLVQRHPSHAVTFVDNHDTQPGEALESFVQGWFKPLAYATILTREQGYPQVFYGDYYGIPSDGVPSYRQQIDPLLKARQQYAYGRQHDYFDHWDVIGWTREGNASHPNSGLATIMSDGPGGSKWMYVGRQKAGEVWHDMTGNRSGTVTINQDGWGHFFVNGGSVSVWVKR

SEQ ID NO: 30618 - protein, 485 aa, Bacillus sp.
HHDGTNGTIMQYFEWNVPNDGQHWNRLHNNAQNLKNAGITAIWIPPAWKGTSQNDVGYGAYDLYDLGEFNQKGTVRTKYGTKAELERAIRSLKANGIQVYGDVVMNHKGGADFTERVQAVEVNPQNRNQEVSGTYQIEAWTGFNFPGRGNQHSSFKWRWYHFDGTDWDQSRQLANRIYKFRGDGKAWDWEVDTENGNYDYLMYADVDMDHPEVINELNRWGVWYANTLNLDGFRLDAVKHIKFSFMRDWLGHVRGQTGKNLFAVAEYWKNDLGALENYLSKTNWTMSAFDVPLHYNLYQASNSSGNYDMRNLLNGTLVQRHPSHAVTFVDNHDTQPGEALESFVQGWFKPLAYATILTREQGYPQVFYGDYYGIPSDGVPSYRGQIDPLLKARQQYAYGRQHDYFDHWDVIGWTREGNASHPNSGLATIMSDGPGGSKWMYVGRQKAGEVWHDMTGNRSGTVTINQDGWGHFFVNGGSVSVWVKR

SEQ ID NO: 30619 - protein, 485 aa, Bacillus sp.
HHDGTNGTIMQYFEWNVPNDGQHWNRLHNNAQNLKNAGITAIWIPPAWKGTSQNDVGYGAYDLYDLGEFNQKGTVRTKYGTKAELEMAIRSLKANGIQVYGDVVMNHKGGADFTERVQAVEVNPQNRNQEVSGTYQIEAWTGFNFPGRGNQHSSFKWRWYHFDGTDWDQSRQLANRIYKFRGDGKAWDWEVDTENGNYDYLMYADVDMDHPEVINELNRWGVWYANTLNLDGFRLDAVKHIKFSFMRDWLGHVRGQTGKNLFAVAEYWKNDLGALENYLSKTNWTMSAFDVPLHYNLYQASNSSGNYDMRNLLNGTLVQRHPSHAVTFVDNHDTQPGEALESFVQGWFKPLAYATILTREQGYPQVFYGDYYGIPSDGVPSYRQQIDPLLKARQQYAYGRQHDYFDHWDVIGWTREGNASHPNSGLATIMSDGPGGSKWMYVGRQKAGEVWHDMTGNRSGTVTINQDGWGHFFVNGGSVSVWVKR

SEQ ID NO: 30620 - protein, 485 aa, Bacillus sp.
HHDGTNGTIMQYFEWNVPNDGQHWNRLHNNAQNLKNAGITAIWIPPAWKGTSQNDVGYGAYDLYDLGEFNQKGTVRTKYGTKAELERAIRSLKANGIQVYGDVVMNHKGGADFTERVQAVEVNPQNRNQEVSGTYQIEAWTGFNFPGRGNQHSSFKWRWYHFDGTDWDQSRQLANRIYKFRGDGKAWDWEVDTENGNYDYLMYADVDMDHPEVINELNRWGVWYANTLNLDGFRLDAVKHIKFSFMRDWLGHVRGQTGKNLFAVAEYWKNDLGALENYLSKTNWTMSAFDVPLHYNLYQASNSSGNYDMRNLLNGTLVQRHPSHAVTFVDNHDTQPGEALESFVQGWFKPLAYATILTREQGYPQVFYGDYYGIPSDGVPSYRQQIDPLLKARQQYAYGRQHDYFDHWDVIGWTREGNASHPNSGLATIMSDGPGGSKWMYVGRQKAGEVWHDMTGNRCGTVTINQDGWGHFFVNGGSVSVWVKR

SEQ ID NO: 30621 - protein, 483 aa, Bacillus sp. (in: firmicutes)
HHDGTNGTIMQYFEWNVPNDGQHWNRLHNNAQNLKNAGITAIWIPPAWKGTSQNDVGYGAYDLYDLGEFNQKGTVRTKYGTKAELERAIRSLKANGIQVYGDVVMNHKGGADQTEHVQAVEVNPQNRNQEVSGTYQIEAWTGFNFPGRGNQHSSFKWRWYHFDGTDWDQSRQLANRIYKFRGKAWDWEVDTENGNYDYLMYADVDMDHPEVINELNRWGVWYANTLNLDGFRLDAVKHIKFSFMRDWLGHVRGQTGKNLFAVAEYWKNDLGALENYLSKTNWTMSAFDVPLHYNLYQASNSSGNYDMRNLLNGTLVQRHPSHAVTFVDNHDTQPGEALESFVQGWFKPLAYATILTREQGYPQVFYGDYYGIPSDGVPSYRQQIDPLLKARQQYAYGRQHDYFDHWDVIGWTREGNASHPNSGLATIMSDGPGGSKWMYVGRQKAGEVWHDMTGNRSGTVTINQDGWGHFFVNGGSVSVWVKR

SEQ ID NO: 30622 - protein, 485 aa, Bacillus sp.
HHDGTNGTIMQYFEWNVPNDGQHWNRLHNLAQNLKNAGITAIWIPPAWKGTSQNDVGYGAYDLYDLGEFNQKGTVRTKYGTKAELERAIRSLKANGIQVYGDVVMNHKGGADFTERVQAVEVNPQNRNQEVSGTYQIEAWTGFNFPGRGNQHSSFKWRWYHFDGTDWDQSRQLANRIYKFRGDGKAWDWEVDTENGNYDYLMYADVDMDHPEVINELNRWGVWYANTLNLDGFRLDAVKHIKFSFMRDWLGHVRGQTGKNLFAVAEYWKNDLGALENYLSKTNWTMSAFDVPLHYNLYQASNSSGNYDMRNLLNGTLVQRHPSHAVTFVDNHDTQPGEALESFVQGWFKPLAYATILTREQGYPQVFYGDYYGIPSDGVPSYRQQIDPLLKARQQYAYGRQHDYFDHWDVIGWTREGNASHPNSGLATIMSDGPGGSKWMYVGRQKAGEVWHDMTGNRSGTVTINQDGWGHFFVNGGSVSVWVKR

SEQ ID NO: 30623 - protein, 485 aa, Bacillus sp.
HHDGTNGTIMQYFEWNVPNDGQHWNRLHNNAQNLKNAGITAIWIPPAWKGTSQNDVGYGAYDLYDLGEFNQKGTVRTKYGTKAELERAIRSLKANGIQVYGDVVMNHKGGADFTERVQAVEVNPQNRNQEVSGTYQIEAWTGFNFPGRGNQHSVFKWRWYHFDGTDWDQSRQLANRIYKFRGDGKAWDWEVDTENGNYDYLMYADVDMDHPEVINELNRWGVWYANTLNLDGFRLDAVKHIKFSFMRDWLGHVRGQTGKNLFAVAEYWKNDLGALENYLSKTNWTMSAFDVPLHYNLYQASNSSGNYDMRNLLNGTLVQRHPSHAVTFVDNHDTQPGEALESFVQGWFKPLAYATILTREQGYPQVFYGDYYGIPSDGVPSYRQQIDPLLKARQQYAYGRQHDYFDHWDVIGWTREGNASHPNSGLATIMSDGPGGSKWMYVGRQKAGEVWHDMTGNRSGTVTINQDGWGHFFVNGGSVSVWVKR

SEQ ID NO: 30624 - protein, 485 aa, Bacillus sp.
HHDGTNGTIMQYFEWNVPNDGQHWNRLHNNAQNLKNAGITAIWIPPAWKGTSQNDVGYGAYDLYDLGEFNQKGTVRTKYGTKAELERAIRSLKANGIQVYGDVVMNHKGGADFTERVQAVEVNPQNRNQEVSGTYQIEAWTGFNFPGRGNQHSSFKWRWYHFDGTDWDQSRQLANRIYKFRGDGKAWDWEVDTENGNYDYLMYADVDMDHPEVINELNRWGVWYANTLNLDGFRLDAVKHIKFSFMRDWLGHVRCQTGKNLFAVAEYWKNDLGALENYLSKTNWTMSAFDVPLHYNLYQASNSSGNYDMRNLLNGTLVQRHPSHAVTFVDNHDTQPGEALESFVQGWFKPLAYATILTREQGYPQVFYGDYYGIPSDGVPSYRQQIDPLLKARQQYAYGRQHDYFDHWDVIGWTREGNASHPNSGLATIMSDGPGGSKWMYVGRQKAGEVWHDMTGNRSGTVTINQDGWGHFFVNGGSVSVWVKR

SEQ ID NO: 30625 - protein, 485 aa, Bacillus sp.
HHDGTNGTIMQYFEWNVPNDGAHWNRLHNNAQNLKNAGITAIWIPPAWKGTSQNDVGYGAYDLYDLGEFNQKGTVRTKYGTKAELERAIRSLKANGIQVYGDVVMNHKGGADFTERVQAVEVNPQNRNQEVSGTYQIEAWTGFNFPGRGNQHSSFKWRWYHFDGTDWDQSRQLANRIYKFRGDGKAWDWEVDTENGNYDYLMYADVDMDHPEVINELNRWGVWYANTLNLDGFRLDAVKHIKFSFMRDWLGHVRGQTGKNLFAVAEYWKNDLGALENYLSKTNWTMSAFDVPLHYNLYQASNSSGNYDMRNLLNGTLVQRHPSHAVTFVDNHDTQPGEALESFVQGWFKPLAYATILTREQGYPQVFYGDYYGIPSDGVPSYRQQIDPLLKARQQYAYGRQHDYFDHWDVIGWTREGNASHPNSGLATIMSDGPGGSKWMYVGRQKAGEVWHDMTGNRSGTVTINQDGWGHFFVNGGSVSVWVKR

SEQ ID NO: 30626 - protein, 485 aa, Bacillus sp.
HHDGTNGTIMQYFEWNVPNDGQHWNRLHNNAQNLKNAGITAIWIPPAWKGTSQNDVGYGAYDLYDLGEFNQKGTVRTKYGTKAELERAIRSLKANGIQVYGDVVMNHKGGADFTERVQAVEVNPQNRNQEVSGTYQIEAWTGFNFPGRGNQHSSFKWRWYHFDGTDWDQSRQLANRIYKFRGDGKAWDWEVDTENGNYDYLMYADVDMDHPEVINELNRWGVWYANTLNLDGFRLDAVKHIKFSFMRDWLGHVRGQTGKNLFAVAEYWKNDLGALENYLSKTNWTMSAFDVPLHYNLYQASNSSGNYDMRNLLNGTLVQRHPSHAVTFVDNHDTQPGEALESFVQGWFKPLAYATILTREQGYPQVFYGDYYGIPWDGVPSYRQQIDPLLKARQQYAYGRQHDYFDHWDVIGWTREGNASHPNSGLATIMSDGPGGSKWMYVGRQKAGEVWHDMTGNRSGTVTINQDGWGHFFVNGGSVSVWVKR

SEQ ID NO: 30627 - protein, 485 aa, Bacillus sp.
HHDGTNGTIMQYFEWNVPNDGQHWNRLHNNAQNLKNAGITAIWIPPAWKGTSQNDVGYGAYDLYDLGEFNQKGTVRTKYGTKAELERAIRTLKANGIQVYGDVVMNHKGGADFTERVQAVEVNPQNRNQEVSGTYQIEAWTGFNFPGRGNQHSSFKWRWYHFDGTDWDQSRQLANRIYKFRGDGKAWDWEVDTENGNYDYLMYADVDMDHPEVINELNRWGVWYANTLNLDGFRLDAVKHIKFSFMRDWLGHVRGQTGKNLFAVAEYWKNDLGALENYLSKTNWTMSAFDVPLHYNLYQASNSSGNYDMRNLLNGTLVQRHPSHAVTFVDNHDTQPGEALESFVQGWFKPLAYATILTREQGYPQVFYGDYYGIPSDGVPSYRQQIDPLLKARQQYAYGRQHDYFDHWDVIGWTREGNASHPNSGLATIMSDGPGGSKWMYVGRQKAGEVWHDMTGNRSGTVTINQDGWGHFFVNGGSVSVWVKR

SEQ ID NO: 30628 - protein, 485 aa, Bacillus sp.
HHDGTNGTIMQYFEWNVPNDGQHWNRLHNNAQNLKNAGITAIWIPPAWKGTSQNDVGYGAYDLYDLGEFNQKGTVRTKYGTKAELERAIRSLKANGIQVYGDVVMNHKGGADFTERVQAVEVNPQNRNQEVSGTYQIEAWTGFNFPGRGNQHSSFKWRWYHFDGTDWDQSRQLANRIYKFRGDDKAWDWEVDTENGNYDYLMYADVDMDHPEVINELNRWGVWYANTLNLDGFRLDAVKHIKFSFMRDWLGHVRGQTGKNLFAVAEYWKNDLGALENYLSKTNWTMSAFDVPLHYNLYQASNSSGNYDMRNLLNGTLVQRHPSHAVTFVDNHDTQPGEALESFVQGWFKPLAYATILTREQGYPQVFYGDYYGIPSDGVPSYRQQIDPLLKARQQYAYGRQHDYFDHWDVIGWTREGNASHPNSGLATIMSDGPGGSKWMYVGRQKAGEVWHDMTGNRSGTVTINQDGWGHFFVNGGSVSVWVKR

SEQ ID NO: 30629 - protein, 485 aa, Bacillus sp.
HHDGTNGTIMQYFEWNVPNDGQHWNRLHNNAQNLKNAGITAIWIPPAWKGTSQNDVGYGAYDLYDLGEFNQKGTVRTKYGTKAELERAIRSLKANGIQVYGDVVMNHKGGADFTERVQAVEVNPQNRNQEVSGTYQIEAWTGFNFPGRGNQHSSFKWRWYHFDGTDWDQSRQLANRIYKFRGDGKAWDWEVDTENGNYDYLMYADVDMDHPEVINELNRWGVWYANTLNLDGFRLDAVKHIKFSFMRDWLGHVRGQTGKNLFAVAEYWKNDLGALENYLSKTNWTMSAFDVPLHYNLYQASNSSGNYDMRNLLNGTLVQRHPSHAVTFVDNHDTQPGEALESFVQGWFKPLAYATILTREQGYPQVFYGDYYGIPSDGVPSYRQQIDPLLKARQQYAYGRQHDYFDHWDVIGWTREGNASHPNSGLATIMSDGPGGSKWMYVGSQKAGEVWHDMTGNRSGTVTINQDGWGHFFVNGGSVSVWVKR

SEQ ID NO: 30630 - protein, 485 aa, Bacillus sp.
HHDGTNGTIMQYFEWNVPNDGQHWNRLHNNAQNLKNAGITAIWIPPAWKGTSQNDVGYGAYDLYDLGEFNQKGTVRTKYGTKAELERAIRSLKANGIQVYGDVVMNHKGGADFTERVQAVEVNPQNRNQEVSGTYQIEAWTGFNFPGRGNQHSSFKWRWYHFDGTDWDQSRQLANRIYKFRGDGKAWDWEVDTENGNYDYLMYADVDMDHPEVINELNRWGVWYANTLNLDGFRLDAVKHIKFSFMRDWLGHVRGQTGKNLFAVAEYWKNDLGALENYLSKTNWTMSAFDVPLHYNLYQASNSSGNYDMRNLLNGTLVQRHPSHAVTFVDNHDTQPGEALESFVQGWFKPLAYATILTREQGYPQVFYGDYYGIPSDGVPSYRQQIDPLLKARQQYAYGRQHDYFDHWDVIGWTREGNCSHPNSGLATIMSDGPGGSKWMYVGRQKAGEVWHDMTGNRSGTVTINQDGWGHFFVNGGSVSVWVKR

SEQ ID NO: 30631 - protein, 485 aa, Bacillus sp.
HHDGTNGTIMQYFEWNVPNDGQHWNRLHNNAQNLKNAGITAIWIPPAWKGTSQNDVGYGAYDLYDLGEFNQKGTVRTKYGTKAELERAIRSLKANGIQVYGDVVMNHKGGADFTERVQAVEVNPQNRNQEVSGTYQIEAWTGFNFPGRGNQHSSFKWRWYHFDGTDWDQSRQLANRIYKFRGDGKAWDWEVDTENGNYDYLMYADVDMDHPEVINELNRWGVWYANTLNLDGFRLDAVKHIKFSFMRDWLGHVRGQTGKNLFAVAEYWKNDLGALENYLSKTNWTMSAFDVPLHYNLYQASNSSGNYDMRNLLNGTLVQSHPSHAVTFVDNHDTQPGEALESFVQGWFKPLAYATILTREQGYPQVFYGDYYGIPSDGVPSYRQQIDPLLKARQQYAYGRQHDYFDHWDVIGWTREGNASHPNSGLATIMSDGPGGSKWMYVGRQKAGEVWHDMTGNRSGTVTINQDGWGHFFVNGGSVSVWVKR

SEQ ID NO: 30632 - protein, 485 aa, Bacillus sp.
HHDGTNGTIMQYFEWNVPNDGQHWNRLHNNAQNLKNAGITAIWIPPAWKGTSQNDVGYGAYDLYDLGEFNQKGTVRTKYGTKAELERAIRSLKANGIQVYGDVVMNHKGGADFTERVQAVEVNPQNRNQEVSGTYQIEAWTGFNFPGRGNLHSSFKWRWYHFDGTDWDQSRQLANRIYKFRGDGKAWDWEVDTENGNYDYLMYADVDMDHPEVINELNRWGVWYANTLNLDGFRLDAVKHIKFSFMRDWLGHVRGQTGKNLFAVAEYWKNDLGALENYLSKTNWTMSAFDVPLHYNLYQASNSSGNYDMRNLLNGTLVQRHPSHAVTFVDNHDTQPGEALESFVQGWFKPLAYATILTREQGYPQVFYGDYYGIPSDGVPSYRQQIDPLLKARQQYAYGRQHDYFDHWDVIGWTREGNASHPNSGLATIMSDGPGGSKWMYVGRQKAGEVWHDMTGNRSGTVTINQDGWGHFFVNGGSVSVWVKR

SEQ ID NO: 30633 - protein, 485 aa, Bacillus sp.
HHDGTNGTIMQYFEWNVPNDGQHWNRLHNNALNLKNAGITAIWIPPAWKGTSQNDVGYGAYDLYDLGEFNQKGTVRTKYGTKAELERAIRSLKANGIQVYGDVVMNHKGGADFTERVQAVEVNPQNRNQEVSGTYQIEAWTGFNFPGRGNQHSSFKWRWYHFDGTDWDQSRQLANRIYKFRGDGKAWDWEVDTENGNYDYLMYADVDMDHPEVINELNRWGVWYANTLNLDGFRLDAVKHIKFSFMRDWLGHVRGQTGKNLFAVAEYWKNDLGALENYLSKTNWTMSAFDVPLHYNLYQASNSSGNYDMRNLLNGTLVQRHPSHAVTFVDNHDTQPGEALESFVQGWFKPLAYATILTREQGYPQVFYGDYYGIPSDGVPSYRQQIDPLLKARQQYAYGRQHDYFDHWDVIGWTREGNASHPNSGLATIMSDGPGGSKWMYVGRQKAGEVWHDMTGNRSGTVTINQDGWGHFFVNGGSVSVWVKR

SEQ ID NO: 30634 - protein, 485 aa, Bacillus sp.
HHDGTNGTIMQYFEWNVPNDGQHWNRLHNNAQNLKNAGITAIWIPPAWKGTSQNDVGYGAYDLYDLGEFNQKGTVRTKYGTKAELERAIRSLKANGIQVYGDVVMNHKGGADFTERVQAVEVNPQNRNQEVSGTYQIEAWTGFRFPGRGNQHSSFKWRWYHFDGTDWDQSRQLANRIYKFRGDGKAWDWEVDTENGNYDYLMYADVDMDHPEVINELNRWGVWYANTLNLDGFRLDAVKHIKFSFMRDWLGHVRGQTGKNLFAVAEYWKNDLGALENYLSKTNWTMSAFDVPLHYNLYQASNSSGNYDMRNLLNGTLVQRHPSHAVTFVDNHDTQPGEALESFVQGWFKPLAYATILTREQGYPQVFYGDYYGIPSDGVPSYRQQIDPLLKARQQYAYGRQHDYFDHWDVIGWTREGNASHPNSGLATIMSDGPGGSKWMYVGRQKAGEVWHDMTGNRSGTVTINQDGWGHFFVNGGSVSVWVKR

SEQ ID NO: 30635 - protein, 485 aa, Bacillus sp.
HHDGTNGTIMQYFEWNVPNDGQHWNRLHVNAQNLKNAGITAIWIPPAWKGTSQNDVGYGAYDLYDLGEFNQKGTVRTKYGTKAELERAIRSLKANGIQVYGDVVMNHKGGADFTERVQAVEVNPQNRNQEVSGTYQIEAWTGFNFPGRGNQHSSFKWRWYHFDGTDWDQSRQLANRIYKFRGDGKAWDWEVDTENGNYDYLMYADVDMDHPEVINELNRWGVWYANTLNLDGFRLDAVKHIKFSFMRDWLGHVRGQTGKNLFAVAEYWKNDLGALENYLSKTNWTMSAFDVPLHYNLYQASNSSGNYDMRNLLNGTLVQRHPSHAVTFVDNHDTQPGEALESFVQGWFKPLAYATILTREQGYPQVFYGDYYGIPSDGVPSYRQQIDPLLKARQQYAYGRQHDYFDHWDVIGWTREGNASHPNSGLATIMSDGPGGSKWMYVGRQKAGEVWHDMTGNRSGTVTINQDGWGHFFVNGGSVSVWVKR

SEQ ID NO: 30636 - protein, 485 aa, Bacillus sp.
HHDGTNGTIMQYFEWNVPNDGQHWNRLHNNAQNLKNAGITAIWIPPAWKGTSQNDVGYGAYDLYDLGEFNQKGTVRTKYGTKAELERAIRSLKANGIQVYGDVVMNHKGGADFTERVQAVEVNPQNRNQEVSGTYQIEAWTGFNFPGRGNQHSSFKWRWYHFDGTDWDQSRQLANRIYKFRGDGKAWDWEVDTENGNYDYLMYADVDMDHPEVINELNRWGVWYANTLNLDGFRLDAVKHIKFSFMRDWLGHVRGQTGKNLFAVAEYWKNDLGALENYLSKTNWTMSAFDVPLHYNLYQASNSSGNYDMRNLLNGTLVQRHPSHAVTFVDNHDTQPGEALESFVQGWFKPLAYATILTREQGYPQVFYGDYYGIPSDGVPIYRQQIDPLLKARQQYAYGRQHDYFDHWDVIGWTREGNASHPNSGLATIMSDGPGGSKWMYVGRQKAGEVWHDMTGNRSGTVTINQDGWGHFFVNGGSVSVWVKR

SEQ ID NO: 30637 - protein, 483 aa, Bacillus sp.
HHNGTNGTMMQYFEWYLPNDGNHWNRLNSDASNLKSKGITAVWIPPAWKAVSQNDVGYGAYDLYDLGEFNQKGTVRTKYGTRSQLQAAVTSLKNNGIQVYGDVVMNHKGGADATEMVRAVEVNPNNRNQEVTGEYTIEAWTRFDFPGRGNTHSSFKWRWYHFDGVDFDQSREFTNRIYKFRGKAWDWEVDTEFGNYDYLMYADYDYDHPESTNEMRNWGVWYTNTLGLDGFRIDAVKHIKYSFTRDWINHVRSATGKNMFAVAEFWKNDLGAIENYLQKTNWNHSVFDVPLHYNLYNASKSGGNYDMRNIFNGTVVQRHPSHAVTFVDNHDSQPEEALESFVETWFKPLAYALTLTREQGYPSVFYGDYYGIPTHGVPAMRSKIDPILEARQKYAYGPQHDYLDHPDVIGWTREGDSSHPKSGLATLITDGPGGSKRMYAGLKNAGETWYDITGNRSDTVKIGSDGWGEFHVNKASVSIYVQK

SEQ ID NO: 30638 - protein, 485 aa, Bacillus sp.
HHDGTNGTIMQYFEWNVPNDGQHWNRLHNNAQNLKNAGITAIWIPPAWKGTSQNDVGYGAYDLYDLGEFNQKGTVRTKYGTKAELERAIRSLKANGIQVYGDVVMNHKGGADFTERVQAVEVNPQNRNQEVSGTYQIEAWTGFNFPGRGNQHSSFKWRWYHFDGTDWDQSRQLANRIYKFRGDGKAWDWEVDTENGNYDYLMYADVDMDHPEVINELNRWGVWYANTLNLDGFRLDAVKHIKFSFMRDWLGHVRGQTGKNLFAVAEYWKNDLGALENYLSKTNWTMSAFDVPLHYNLYQASNSPGNYDMRNLLNGTLVQRHPSHAVTFVDNHDTQPGEALESFVQGWFKPLAYATILTREQGYPQVFYGDYYGIPSDGVPSYRQQIDPLLKARQQYAYGRQHDYFDHWDVIGWTREGNASHPNSGLATIMSDGPGGSKWMYVGRQKAGEVWHDMTGNRSGTVTINQDGWGHFFVNGGSVSVWVKR

SEQ ID NO: 30639 - protein, 485 aa, Bacillus sp.
HHDGTNGTIMQYFEWNVPNDGQHWNRLHNNAQNLKNAGITAIWIPPAWKGTSQNDVGYGAYDLYDLGEFNQKGTVRTKYGTKAELERAIRSLKANGIQVYGDVVMNHKGGADFTERVQAVEVNPQNRNQEVSGTYQIEAWTGFNFPGRGNQHSSFKWRWYHFDGTDWDQSRQLANRIYKFRGDGKAWDWEVDTENGNYDYLMYADVDMDHPEVINELNRWGVWYANTLNLDGFRLDAVKHIKFSFMRDWLGHVRGQTGKNLFAVAEYWKNDLGALENYLSKTNWTMSAFDVPLHYNLYQASNSSGNYDMRNLLNGTLVQRHPSHAVTFVDNHDTQPGEALESFVQGWFKPLAYATILTREQGYPQVFYGDYYGIPSDGVPSYRQQIDPLLKARQQYAYGRQHDYFDHWDVIGWTREGNASHPNSGLATIMSDGPGGSKWMYVGRQKAGEVWHDQTGNRSGTVTINQDGWGHFFVNGGSVSVWVKR

SEQ ID NO: 30640 - protein, 485 aa, Bacillus sp.
HHDGTNGTIMQYFEWNVPNDGQHWNRLHNNAQNLKNAGITAIWIPPAWKGTSQNDVGYGAYDLYDLGEFNQKGTVRTKYGTKAELERAIRSLKANGIQVYGDVVMNHKGGADFTERVQAVEVNPQNRNQEVSGTYQIEAWTGFNFPGRGNQHSSFKWRWYHFDGTDWDQSRQVANRIYKFRGDGKAWDWEVDTENGNYDYLMYADVDMDHPEVINELNRWGVWYANTLNLDGFRLDAVKHIKFSFMRDWLGHVRGQTGKNLFAVAEYWKNDLGALENYLSKTNWTMSAFDVPLHYNLYQASNSSGNYDMRNLLNGTLVQRHPSHAVTFVDNHDTQPGEALESFVQGWFKPLAYATILTREQGYPQVFYGDYYGIPSDGVPSYRQQIDPLLKARQQYAYGRQHDYFDHWDVIGWTREGNASHPNSGLATIMSDGPGGSKWMYVGRQKAGEVWHDMTGNRSGTVTINQDGWGHFFVNGGSVSVWVKR

SEQ ID NO: 30641 - protein, 485 aa, Bacillus sp.
HHDGTNGTIMQYFEWNVPNDGQHWNRLHNNAQNLKNAGITAIWIPPAWKGTSQNDVGYGAYDLYDLGEFNQKGTVRTKYGTKAELERAIRSLKANGIQVYGDVVMNHKGGADFTERVQAVEVNPQNRNQEVSGTYQIEAWTGFNFPGRGNQHSSFKWRWYHFDGTDWDQSRQLGNRIYKFRGDGKAWDWEVDTENGNYDYLMYADVDMDHPEVINELNRWGVWYANTLNLDGFRLDAVKHIKFSFMRDWLGHVRGQTGKNLFAVAEYWKNDLGALENYLSKTNWTMSAFDVPLHYNLYQASNSSGNYDMRNLLNGTLVQRHPSHAVTFVDNHDTQPGEALESFVQGWFKPLAYATILTREQGYPQVFYGDYYGIPSDGVPSYRQQIDPLLKARQQYAYGRQHDYFDHWDVIGWTREGNASHPNSGLATIMSDGPGGSKWMYVGRQKAGEVWHDMTGNRSGTVTINQDGWGHFFVNGGSVSVWVKR

SEQ ID NO: 30642 - protein, 485 aa, Bacillus sp.
HHDGTNGTIMQYFEWNVPNDGQHWNRLHNNAQNLKNAGITAIWIPPAWKGTSQNDVGYGAYDLYDLGEFNQKGTVRTKYGTKAELERAIRSLKANGIQVYGDVVMNHKGGADFTERVQAVEVNPQNRNQEVSGTYQIEAWTGFNFPGRGNQHSSFKWRWYHFDGTDWDQSRQLANRIYKFRGDGKAWDWEVDTENGNYDYLMYADVDMDHPEVINELNRWGVWYANTLNLDGFRLDAVKHIKFSFMRDWLGHVRGQTGKNLFAVAEYWKNDLGALENYLSKTNWTMSAFDVPLHYNLYQASNSSGNYDMRNLLNGTLVQRHPSHAVTFVDNHDTQPGEALESFVQGWFKPLAYATILTREQGYPQVFYGDYYGIPSDGVPSYRQQIDPLLKARQQYAYGRQHDYFDHWDVIGWTREGNASHPNSGLATIMSDGPGGSKWMYVGRQKAGEVWHDMTGNRMGTVTINQDGWGHFFVNGGSVSVWVKR

SEQ ID NO: 30643 - protein, 485 aa, Bacillus sp.
HHDGTNGTIMQYFEWNVPNDGQHWNRLHNNAQNLKNAGITAIWIPPAWKGTSQNDVGYGAYDLYDLGEFNQKGTVRTKYGTKAELERAIRSLKANGIQVYGDVVMNHKGGADFTERVQAVEVNPQNRNQEVSGTYQIEAWTGFNFPGRGNQHSSFKWRWYHFDGTDWDQSRQLANRIYKFRGDGKAWDWEVDTENGNYDYLMYADVDMDHPEVINELNRWGVWYANTLNLDGFRLDAVKHIKFSFMRDWLGHVRGQTGKNLFAVAEYWKNDLGALENYLSKTNWTMSAFDVPLHYNLYQASNSSGNYDMRNLLNGTLVQRHPSHAVTFVDNHDTQPGEALESFVQGWFKPLAYATILTREQGYPQVFYGDYYGIPSDGVPSYRQQIDPLLKARQQWAYGRQHDYFDHWDVIGWTREGNASHPNSGLATIMSDGPGGSKWMYVGRQKAGEVWHDMTGNRSGTVTINQDGWGHFFVNGGSVSVWVKR

SEQ ID NO: 30644 - protein, 483 aa, Bacillus sp. (in: firmicutes)
HHDGTNGTIMQYFEWNVPNDGQHWNRLHNNAQNLKNAGITAIWIPPAWKGTSQNDVGYGAYDLYDLGEFNQKGTVRTKYGTKAELERAIRSLKANGIQVYGDVVMNHKGGADFTERVQAVEVNPQNHNQEVSGTYQIEAWTGFNFPGRGNQHSSFKWRWYHFDGTDWDQSRQLANRIYKFRGKAWDWEVDTENGNYDYLMYADVDMDHPEVINELNRWGVWYANTLNLDGFRIDAVKHIKFSFMRDWLGHVRGQTGKNLFAVAEYWKNDLGALENYLSKTNWTMSAFDVPLHYNLYQASNSSGNYDMRNLLNGTLVQRHPSHAVTFVDNHDTQPGEALESFVQGWFKPLAYATILTREQGYPSVFYGDYYGIPSDGVPSYRQQIDPLLKARQQYAYGRQHDYFDHWDVIGWTREGNASHPNSGLATIMSDGPCGSKWMYVGRQKAGEVWHDMTGNRSGTVTINQDGWGHFFVNGGSVSVWVKR

SEQ ID NO: 30645 - protein, 485 aa, Bacillus sp.
HHDGTNGTIMQYFEWNVPNDGQHWNRLHNNAQNLQNAGITAIWIPPAWKGTSQNDVGYGAYDLYDLGEFNQKGTVRTKYGTKAELERAIRSLKANGIQVYGDVVMNHKGGADFTERVQAVEVNPQNRNQEVSGTYQIEAWTGFNFPGRGNQHSSFKWRWYHFDGTDWDQSRQLANRIYKFRGDGKAWDWEVDTENGNYDYLMYADVDMDHPEVINELNRWGVWYANTLNLDGFRLDAVKHIKFSFMRDWLGHVRGQTGKNLFAVAEYWKNDLGALENYLSKTNWTMSAFDVPLHYNLYQASNSSGNYDMRNLLNGTLVQRHPSHAVTFVDNHDTQPGEALESFVQGWFKPLAYATILTREQGYPQVFYGDYYGIPSDGVPSYRQQIDPLLKARQQYAYGRQHDYFDHWDVIGWTREGNASHPNSGLATIMSDGPGGSKWMYVGRQKAGEVWHDMTGNRSGTVTINQDGWGHFFVNGGSVSVWVKR

SEQ ID NO: 30646 - protein, 485 aa, Bacillus sp.
HHDGTNGTLMQYFEWNVPNDGQHWNRLHNNAQNLKNAGITAIWIPPAWKGTSQNDVGYGAYDLYDLGEFNQKGTVRTKYGTKAELERAIRSLKANGIQVYGDVVMNHKGGADFTERVQAVEVNPQNRNQEVSGTYQIEAWTGFNFPGRGNQHSSFKWRWYHFDGTDWDQSRQLANRIYKFRGDGKAWDWEVDTENGNYDYLMYADVDMDHPEVINELNRWGVWYANTLNLDGFRLDAVKHIKFSFMRDWLGHVRGQTGKNLFAVAEYWKNDLGALENYLSKTNWTMSAFDVPLHYNLYQASNSSGNYDMRNLLNGTLVQRHPSHAVTFVDNHDTQPGEALESFVQGWFKPLAYATILTREQGYPQVFYGDYYGIPSDGVPSYRQQIDPLLKARQQYAYGRQHDYFDHWDVIGWTREGNASHPNSGLATIMSDGPGGSKWMYVGRQKAGEVWHDMTGNRSGTVTINQDGWGHFFVNGGSVSVWVKR

SEQ ID NO: 30647 - protein, 485 aa, Bacillus sp.
HHDGTNGTIMQYFEWNVPNDGQHWNRLHNNAQNLKNAGITAIWIPPAWKGTSQNDVGYGAYDLYDLGEFNQKGTVRTKYGTKAELERAIRSLKANGIQVYGDVVMNHKGGADFTERVQAVEVNPQNRNQEVSGTYQIEAWTGFNFPGRGNQHSSFKWRWYHFDGTDWDQSRQLANRIYKFRGDGKAWDWEVDTENGNYDYLMYADVDMDHPEVINELNRWGVWYANTLNLDGFRLDAVKHIKFSFMRDWLGHVRGQTGKNLFAVAEYWKNDLGALENYLSKTNWTMSAFDVPLHYNLYQASNSSGNYDMRNLLNGTLVQRHPSHAVTFVDNHDTQPGEALESFVQGWFKPLAYATILTREQGYPQVFYGDYYGIPSDGVPSYRQQIDPLLKARQQYAYGRQHDYFDHWDVIGWTREGNASHPNSGLATIMSDGPGGSKWMYVGRQKAGEVWHDMTGNRSGTVTINQDGWGHFCVNGGSVSVWVKR

SEQ ID NO: 30648 - protein, 485 aa, Bacillus sp.
HHDGTNGTIMQYFEWNVPNDGQHWNRLHCNAQNLKNAGITAIWIPPAWKGTSQNDVGYGAYDLYDLGEFNQKGTVRTKYGTKAELERAIRSLKANGIQVYGDVVMNHKGGADFTERVQAVEVNPQNRNQEVSGTYQIEAWTGFNFPGRGNQHSSFKWRWYHFDGTDWDQSRQLANRIYKFRGDGKAWDWEVDTENGNYDYLMYADVDMDHPEVINELNRWGVWYANTLNLDGFRLDAVKHIKFSFMRDWLGHVRGQTGKNLFAVAEYWKNDLGALENYLSKTNWTMSAFDVPLHYNLYQASNSSGNYDMRNLLNGTLVQRHPSHAVTFVDNHDTQPGEALESFVQGWFKPLAYATILTREQGYPQVFYGDYYGIPSDGVPSYRQQIDPLLKARQQYAYGRQHDYFDHWDVIGWTREGNASHPNSGLATIMSDGPGGSKWMYVGRQKAGEVWHDMTGNRSGTVTINQDGWGHFFVNGGSVSVWVKR

SEQ ID NO: 30649 - protein, 485 aa, Bacillus sp.
HHDGTNGTIMQYFEWNVPNDGQHWNRLHNNAQNLKNAGITAIWIPPAWKGTSQNDVGYGAYDLYDLGEFNQKGTVRTKYGTKAELERAIRSLKANGIQVYGDVVMNHKGGADFTERVQAVEVNPQNRNQEVSGTYQIEAWTGFNFPGRGNQHSSFKWRWYHFDGTDWDQSRQLANRIYKFRGDGKAWDWEVDTENGNYDYLMYADVDMDHPEVINELNRWGVWYANTLNLDGFRLDAVKHIKFSFMRDWLGHVRGQTGKNLFAVAEYWKNDLGALENYLSKTNWTMSAFDVPLHYNLYQASNSSGNYDMRNLLNGTLVQRHPSHAVTFVDNHDTQPGEALESFVQGWFKPLAYATILTREQGYPQVFYGDYYGIPSDGVPSYRQQIDPLLKARQQYAYGRQHDYFDHWDVIGWTREGNASHPNSGLATIMSDGPGGLKWMYVGRQKAGEVWHDMTGNRSGTVTINQDGWGHFFVNGGSVSVWVKR

SEQ ID NO: 30650 - protein, 485 aa, Bacillus sp.
HHDGTNGTIMQYFEWNVPNDGQHWNRLHNNAQNLKNAGITAIWIPPAWKGTSQNDVGYGAYDLYDLGEFNQKGTVRTKYGTKRELERAIRSLKANGIQVYGDVVMNHKGGADFTERVQAVEVNPQNRNQEVSGTYQIEAWTGFNFPGRGNQHSSFKWRWYHFDGTDWDQSRQLANRIYKFRGDGKAWDWEVDTENGNYDYLMYADVDMDHPEVINELNRWGVWYANTLNLDGFRLDAVKHIKFSFMRDWLGHVRGQTGKNLFAVAEYWKNDLGALENYLSKTNWTMSAFDVPLHYNLYQASNSSGNYDMRNLLNGTLVQRHPSHAVTFVDNHDTQPGEALESFVQGWFKPLAYATILTREQGYPQVFYGDYYGIPSDGVPSYRQQIDPLLKARQQYAYGRQHDYFDHWDVIGWTREGNASHPNSGLATIMSDGPGGSKWMYVGRQKAGEVWHDMTGNRSGTVTINQDGWGHFFVNGGSVSVWVKR

SEQ ID NO: 30651 - protein, 485 aa, Bacillus sp.
HHDGTNGTIMQYFEWNVPNDGQHWNRLHNNAQNLKNAGITAIWIPPAWKGTSQNDVGYGAYDLYDLGEFNQKGTVRTKYGTKAELERAIRSLKANGLQVYGDVVMNHKGGADFTERVQAVEVNPQNRNQEVSGTYQIEAWTGFNFPGRGNQHSSFKWRWYHFDGTDWDQSRQLANRIYKFRGDGKAWDWEVDTENGNYDYLMYADVDMDHPEVINELNRWGVWYANTLNLDGFRLDAVKHIKFSFMRDWLGHVRGQTGKNLFAVAEYWKNDLGALENYLSKTNWTMSAFDVPLHYNLYQASNSSGNYDMRNLLNGTLVQRHPSHAVTFVDNHDTQPGEALESFVQGWFKPLAYATILTREQGYPQVFYGDYYGIPSDGVPSYRQQIDPLLKARQQYAYGRQHDYFDHWDVIGWTREGNASHPNSGLATIMSDGPGGSKWMYVGRQKAGEVWHDMTGNRSGTVTINQDGWGHFFVNGGSVSVWVKR

SEQ ID NO: 30652 - protein, 485 aa, Bacillus sp.
HHDGTNGTIMQYFEWNVPNDGQHWNRLHNNAQNLKNAGITAIWIPPAWKGTSQNDVGYGAYDLYDLGEFNQKGTVRTKYGTKAELERAIRSLKANGIQVYGDVVMNHKGGADFTERVQAVEVNPQNRNQEVSGTYQIEAWTGFNFPGRGNQHSSFKWRWYHFDGTDWDQSRQLANRIYKFRGDGKAWDWEVDTENGNYDYLMYADVDMDHPEVINELNRWGVWYANTLNLDGFRLDAVKHIKFSFMRDWLGHVRGQTGKNLFAVAEYWKNDLGALENYLSKTNWTMSAFDVPLHYNLYQASNSSGNYDMRNLLNGTLVQRHPSHAVTFVDNHDTQPGEALESFVQGWFKPLAYATILTREQGYPQVFYGDYYGIPSDGVPSYRQQIDPLLKARQQYAYGRQHDYFDHWDVIGWTREGNLSHPNSGLATIMSDGPGGSKWMYVGRQKAGEVWHDMTGNRSGTVTINQDGWGHFFVNGGSVSVWVKR

SEQ ID NO: 30653 - protein, 483 aa, Bacillus sp.
HHNGTNGTMMQYFEWYLPNDGNHWNRLNSDASNLKSKGIKAVWIPPAWKGASQNDVGYGAYDLYDLGEFNQRGTVRTKYGTRSQLQAAVTSLKNNGIQVYGDVVMNHKGGADATEMVRAVEVNPNNRNQEVTGEYTIEAWTRFDFPGRGNTHSSFKWRWYHFDGVDFDQSRRLNNRIYKFRGKAWDWEVDTEFGNYDYLMYADIDYDHPESTNEMRNWGVWYTNTLGLDGFRIDAVKHIKYSFTRDWINHVRSATGKNMFAVAEFWKNDLGAIENYLQKTNWNHSVFDVPLHYNLYNASKSGGNYDMRNIFNGTVVQRHPSHAVTFVDNHDSQPEEALESFVEEWFKPLAYALTLTREQGYPSVFYGDYYGIPTHGVPAMRSKIDPILEARQKYAYGPQHDYLDHPDVIGWTREGDSSHPKSGLATLITDGPGGSKRMYAGLKNAGETWYDITGNRSDTVKIGSDGWGEFHVNDGSVSIYVQK

SEQ ID NO: 30654 - protein, 485 aa, Bacillus sp.
HHDGTNGTIMQYFEWNVPNDGQHWNRLHNNAQNLKNAGITAIWIPPAWKGTSQNDVGYGAYDLYDLGEFNQKGTVRTKYGTKAELERAIRSLKANGIQVYGDVVMNHKGGADFTERVQAVEVNPQNRNQEESGTYQIEAWTGFNFPGRGNQHSSFKWRWYHFDGTDWDQSRQLANRIYKFRGDGKAWDWEVDTENGNYDYLMYADVDMDHPEVINELNRWGVWYANTLNLDGFRLDAVKHIKFSFMRDWLGHVRGQTGKNLFAVAEYWKNDLGALENYLSKTNWTMSAFDVPLHYNLYQASNSSGNYDMRNLLNGTLVQRHPSHAVTFVDNHDTQPGEALESFVQGWFKPLAYATILTREQGYPQVFYGDYYGIPSDGVPSYRQQIDPLLKARQQYAYGRQHDYFDHWDVIGWTREGNASHPNSGLATIMSDGPGGSKWMYVGRQKAGEVWHDMTGNRSGTVTINQDGWGHFFVNGGSVSVWVKR

SEQ ID NO: 30655 - protein, 485 aa, Bacillus sp.
HHDGTNGTIMQYFEWNQPNDGQHWNRLHNNAQNLKNAGITAIWIPPAWKGTSQNDVGYGAYDLYDLGEFNQKGTVRTKYGTKAELERAIRSLKANGIQVYGDVVMNHKGGADFTERVQAVEVNPQNRNQEVSGTYQIEAWTGFNFPGRGNQHSSFKWRWYHFDGTDWDQSRQLANRIYKFRGDGKAWDWEVDTENGNYDYLMYADVDMDHPEVINELNRWGVWYANTLNLDGFRLDAVKHIKFSFMRDWLGHVRGQTGKNLFAVAEYWKNDLGALENYLSKTNWTMSAFDVPLHYNLYQASNSSGNYDMRNLLNGTLVQRHPSHAVTFVDNHDTQPGEALESFVQGWFKPLAYATILTREQGYPQVFYGDYYGIPSDGVPSYRQQIDPLLKARQQYAYGRQHDYFDHWDVIGWTREGNASHPNSGLATIMSDGPGGSKWMYVGRQKAGEVWHDMTGNRSGTVTINQDGWGHFFVNGGSVSVWVKR

SEQ ID NO: 30656 - protein, 485 aa, Bacillus sp.
HHDGTNGTIMQYFEWNVPNDGQHWNRLHNNAQNLKNAGITAIWIPPAWKGTSQNDVGYGAYDLYDLGEFNQKGTVRTKYGTKAELERAIRSLKANGIQVYGDVVMNHKGGADFTERVQAVEVNPQNRNQEVSGTYQIEAWTGFNFPGRGNQHSSFKWRWYHFDGTDWDQSRQLANRIYKFRGDGKAWDWEVDTENGNYDYLMYADVDMDHPEVINELNRWGVWYANTLNLDGFRLDAVKHIKFSFMRDWLGHVRGQTGKNLFAVAEYWKNDLGALENYLSKTNWTMSAFDVPLHYNLYQASNSSGNYDMRNLLNGTLVQRHPSHAVTFVDNHDTQPGEALESFVQGWFKPLAYATILTREQGYPQVFYGDYYGIPSDGVPSYRQQIDPALKARQQYAYGRQHDYFDHWDVIGWTREGNASHPNSGLATIMSDGPGGSKWMYVGRQKAGEVWHDMTGNRSGTVTINQDGWGHFFVNGGSVSVWVKR

SEQ ID NO: 30657 - protein, 485 aa, Bacillus sp.
HHDGTNGTIMQYFEWNVPNDGQHWNRLHNNAQNLKNAGITAIWIPPAWKGTSQNDVGYGAYDLYDLGEFNQKGTVRTKYGTKAELERAIRSLKANGIQVYGDVVMNHKGGADFTERVQAVEVNPQNRNQEVSGTYQIEAWTGFNFPGRGNQHSSFKWRWYHFDGTDWDQSRQLANRIYKFRGDGKAWDWEVDTENGNYDYLMYADVDMDHPEVINELNRWGVWYANTLNLDGFRLDAVKHIKFSFMRDWLGHVRGQTGKNLFAVAEYWKNDLGALENYLSKTNWTMSAFDVPLHYNLYQASNSSGNYDMRNLLNGTLVQRHPSHAVTFVDNHDTQPGEALESFVQGWFKPLAYATILTREQGYPQVFYGDYYGIPSDGVPSYRQQIDPLLKARQQYAYGRQHDYFDHWDVIGWTREGNVSHPNSGLATIMSDGPGGSKWMYVGRQKAGEVWHDMTGNRSGTVTINQDGWGHFFVNGGSVSVWVKR

SEQ ID NO: 30658 - protein, 485 aa, Bacillus sp.
HHDGTNGTIMQYFEWNVPNDGQHWNRLHNNAQNLKNAGITAIWIPPAWKGTSQNDVGYGAYDLYDLGEFNQKGTVRTKYGTKAELERAIRGLKANGIQVYGDVVMNHKGGADFTERVQAVEVNPQNRNQEVSGTYQIEAWTGFNFPGRGNQHSSFKWRWYHFDGTDWDQSRQLANRIYKFRGDGKAWDWEVDTENGNYDYLMYADVDMDHPEVINELNRWGVWYANTLNLDGFRLDAVKHIKFSFMRDWLGHVRGQTGKNLFAVAEYWKNDLGALENYLSKTNWTMSAFDVPLHYNLYQASNSSGNYDMRNLLNGTLVQRHPSHAVTFVDNHDTQPGEALESFVQGWFKPLAYATILTREQGYPQVFYGDYYGIPSDGVPSYRQQIDPLLKARQQYAYGRQHDYFDHWDVIGWTREGNASHPNSGLATIMSDGPGGSKWMYVGRQKAGEVWHDMTGNRSGTVTINQDGWGHFFVNGGSVSVWVKR

SEQ ID NO: 30659 - protein, 483 aa, Bacillus sp. (in: firmicutes)
HHDGTNGTMMQYFEWNVPNDGQHWNRLHNNAQNLKNAGITAIWIPPAWKGTSQNDVGYGAYDLYDLGEFNQKGTVRTKYGTKAELERAIRSLKANGIQVYGDVVMNHKGGADFTERVQAVEVNPQNRNQEVSGTYQIEAWTGFNFPGRGNQHSSFKWRWYHFDGTDWDQSRQLANRIYKFRGKAWDWEVDTEFGNYDYLMYADVDMDHPEVINELNRWGVWYANTLNLDGFRLDAVKHIKFSFMRDWLGHVRGQTGKNLFAVAEYWKGDLGALENYLSKTNWTMSAFDVPLHYNLYQASNSSGNYDMRNLLNGTLVQRHPSHAVTFVDNHDTQPGEALESFVQGWFKPLAYATILTREQGYPSVFYGDYYGIPSDGVPSYRQQIDPLLKARQQYAYGRQHDYFDHWDVIGWTREGNASHPNSGLATIMSDGPGGSKWMYVGRQKAGEVWHDMTGNRSGTVTINQDGWGHFFVNGGSVSVWVKR

SEQ ID NO: 30660 - protein, 485 aa, Bacillus sp.
HHDGTNGTIMQYFEWNVPNDGQHWNRLHNNAQNLKNAGITAIWIPPAWKGTSQNDVGYGAYDLYDLGEFNQKGTVRTKYGTKAELERAIRSLKANGMQVYGDVVMNHKGGADFTERVQAVEVNPQNRNQEVSGTYQIEAWTGFNFPGRGNQHSSFKWRWYHFDGTDWDQSRQLANRIYKFRGDGKAWDWEVDTENGNYDYLMYADVDMDHPEVINELNRWGVWYANTLNLDGFRLDAVKHIKFSFMRDWLGHVRGQTGKNLFAVAEYWKNDLGALENYLSKTNWTMSAFDVPLHYNLYQASNSSGNYDMRNLLNGTLVQRHPSHAVTFVDNHDTQPGEALESFVQGWFKPLAYATILTREQGYPQVFYGDYYGIPSDGVPSYRQQIDPLLKARQQYAYGRQHDYFDHWDVIGWTREGNASHPNSGLATIMSDGPGGSKWMYVGRQKAGEVWHDMTGNRSGTVTINQDGWGHFFVNGGSVSVWVKR

SEQ ID NO: 30661 - protein, 485 aa, Bacillus sp.
HHDGTNGTIMQYFEWNVPNDGQHWNRLHNNAQNLKNAGITAIWIPPAWKGTSQNDVGYGAYDLYDLGEFNQKGTVRTKYGTKAELERAIRSLKANGIQVYGDVVMNHKGGADFTERVQAVEVNPQNRNQEVSGTYQIEAWTGFNFPGRGNQHSSFKWRWYHFDGTDWDQSRQLANRIYKFRGDGKAWDWEVDTENGNYDYLMYADVDMDHPEVINELNRWGVWYANTLNLDGFRLDAVKHIKFSFMRDWLGHVRGQTGKNLFAVAEYWKNDLGALENYLSKTNWTMSAFDVPLHYNLYQASNSSGNYDMRNLLNGTLVQRHPSHAVTFVDNHDTQPGEALESFVQGWFKPLAYATILTREQGYPQVFYGDYYGIPSDGVPNYRQQIDPLLKARQQYAYGRQHDYFDHWDVIGWTREGNASHPNSGLATIMSDGPGGSKWMYVGRQKAGEVWHDMTGNRSGTVTINQDGWGHFFVNGGSVSVWVKR

SEQ ID NO: 30662 - protein, 485 aa, Bacillus sp.
HHDGTNGTIMQYFEWNVPNDGQHWNRLHNNAQNLKNAGITAIWIPPAWKGTSQNDVGYGAYDLYDLGEFNQKGTVRTKYGTKAELERAIRSLKANGIQVYGDVVMNHKGGADFTERVQAVEVNPQNRNQEVSGTYQIEAWTGFNFPGRGNQHSSFKWRWYHFDGTDWDQSRQLANRIYKFRGDGKAWDWEVDTENGNYDYLMYADVDMDHPEVINELNRWGVWYANTLNLDGFRLDAVKHIKFSFMRDWLGHVRGPTGKNLFAVAEYWKNDLGALENYLSKTNWTMSAFDVPLHYNLYQASNSSGNYDMRNLLNGTLVQRHPSHAVTFVDNHDTQPGEALESFVQGWFKPLAYATILTREQGYPQVFYGDYYGIPSDGVPSYRQQIDPLLKARQQYAYGRQHDYFDHWDVIGWTREGNASHPNSGLATIMSDGPGGSKWMYVGRQKAGEVWHDMTGNRSGTVTINQDGWGHFFVNGGSVSVWVKR

SEQ ID NO: 30663 - protein, 485 aa, Bacillus sp.
HHDGTNGTIMQYFEWNVPNDGQHWNRLHNNAQNLKNAGITAIWIPPAWKGTSQNDVGYGAYDLYDLGEFNQKGTVRTKYGTKAELERAIRSLKANGIQVYGDVVMNHKGGADFTERVQAVEVNPQNRNQEVSGTYQIEAWTGFNFPGRGNQHSSFKWRWYHFDGTDWDQSRQLANRIYKFRGDGKAWDWEVDTENGNYDYLMYADVDMDHPEVINELNRWGVWYANTLNLDGFRLDAVKHIKFSFMRDWLGHVRGQTGKNLFAVAEYWKNDLGALENYLSKTNWTMSAFDVPLHYNLYQASNSSGNYDMRNLLNGTLVQRHPSHAVTFVDNHDTQPGEALESFVQGWFKPLAYATILTREQGYPQVFYGDYYGIPSDGVPSYRQQIDPLLKARQQYAYGRQHDYFDHWDVIGWTREGNASHPNSGLATIMSDGPGGSKWMYVGRQKAGEVWHDMTGNRSGTVTINQDGWGHFFVNGGSVSSWVKR

SEQ ID NO: 30664 - protein, 485 aa, Bacillus sp.
HHDGTNGTIMQYFEWNVPNDGQHWNRLHNNAQNLKNAGITAIWIPPAWKGTSQNDVGYGAYDLYDLGEFNQKGTVRTKYGTKAELERAIRSLKANGIQVYGDVVMNHKGGADFTERVQAVEVNPQNRNQEVSGTYQIEAWTGFNFPGRGNQHSSFKWRWYHFDGTDWDQSRQLANRIYKFRGDGKAWDWEVDTENGNYDYLMYADVDMDHPEVINELNRWGVWYANTLNLDGFRLDAVKHIKFSFMRDWLGHVRGQTGKNLFAVAEYWKNDLGALENYLSKTNWTMSAFDVPLHYNLYQASNSSGNYDMRNLLNGTLVQRHPSHAVTFVDNHDTQPGEALESFVQGWFKPLAYATILTREQGYPQVFYGDYYGIPSDGVPSYREQIDPLLKARQQYAYGRQHDYFDHWDVIGWTREGNASHPNSGLATIMSDGPGGSKWMYVGRQKAGEVWHDMTGNRSGTVTINQDGWGHFFVNGGSVSVWVKR

SEQ ID NO: 30665 - protein, 485 aa, Bacillus sp.
HHDGTNGTIMQYFEWNVPNDGQHWNRLHNNAQNLKNAGITAIWIPPAWKGTSQNDVGYGAYDLYDLGEFNQKGTVRTKYGTKAELERAIRSLKANGIQVYGDVVMNHKGGADFTERVQAVEVNPQNRNQEVSGTYQIEAWTGFNFPGRGNQHSSFKWRWYHFDGTDWDQSRQGANRIYKFRGDGKAWDWEVDTENGNYDYLMYADVDMDHPEVINELNRWGVWYANTLNLDGFRLDAVKHIKFSFMRDWLGHVRGQTGKNLFAVAEYWKNDLGALENYLSKTNWTMSAFDVPLHYNLYQASNSSGNYDMRNLLNGTLVQRHPSHAVTFVDNHDTQPGEALESFVQGWFKPLAYATILTREQGYPQVFYGDYYGIPSDGVPSYRQQIDPLLKARQQYAYGRQHDYFDHWDVIGWTREGNASHPNSGLATIMSDGPGGSKWMYVGRQKAGEVWHDMTGNRSGTVTINQDGWGHFFVNGGSVSVWVKR

SEQ ID NO: 30666 - protein, 485 aa, Bacillus sp.
HHDGTNGTIMQYFEWNVPNDGQHWNRLHNNAQNLKNAGITAIWIPPAWKGTSQNDVGYGAYDLYDLGEFNQKGTVRTKYGTKAELERAIRSLKANGIQVYGDVVMNHKGGADFTERVQAVEVNPQNRNQEVSGTYQIEAWTGFNFPGRGNQHSSFKWRWYHFDGTDWDQSRQLANRIYKFRGDGKAWDWEVDTENGNYDYLMYADVDMDHPEVINELNRWGVWYANTLNLDGFRLDAVKHIKFSFMRDWLGHVRGQTGKNLFAVAEYWKNDLGALENYLSKTNWTMSAFDVPLHYNLYQASNSSGNYDMRNLLNGTLVQRHPSHAVTFVDNHDTQPGEALESFVQGWFKPLAYATILTREQGYPQVFYGDYYGIPSDGVPSYRQQIDPLLKARQQYAYGRQHDYFDHWDVIGWTREGNASHPNSGLATIMSDGPGGSKWMYVGRQKAGEVWHDMTGNRSGTVTINQDGWGHFTVNGGSVSVWVKR

SEQ ID NO: 30667 - protein, 485 aa, Bacillus sp.
HHDGTNGTIMQYFEWNVPNDGQHWNRLHNNAQNLKNAGITAIWIPPAWKGTSQNDVGYGAYDLYDLGEFNQKGTVRTKYGTKAELERAIRSLKANGIQVYGDVVMNHKGGADFTERVQAVEVNPQNRNQEVSGTYQIEAWTGFNFPGRGNQHSSFKWRWYHFDGTDWDQSRQLANRIYKFRGDGKAWDWEVDTENGNYDYLMYADVDMDHPEVINELNRWGVWYANTLNLDGFRLDAVKHIKFSFFRDWLGHVRGQTGKNLFAVAEYWKNDLGALENYLSKTNWTMSAFDVPLHYNLYQASNSSGNYDMRNLLNGTLVQRHPSHAVTFVDNHDTQPGEALESFVQGWFKPLAYATILTREQGYPQVFYGDYYGIPSDGVPSYRQQIDPLLKARQQYAYGRQHDYFDHWDVIGWTREGNASHPNSGLATIMSDGPGGSKWMYVGRQKAGEVWHDMTGNRSGTVTINQDGWGHFFVNGGSVSVWVKR

SEQ ID NO: 30668 - protein, 485 aa, Bacillus sp.
HHDGTNGTIMQYFEWNVPNDGQHWNRLHNNAQNLKNAGITAIWIPPAWKGTSQNDVGYGAYDLYDLGEFNQKGTVRTKYGTKAELERAIRSLKANGIQVYGDVVMNHKGGADFTERVQAVEVNPQNRNQEVSGTYQIEAWTGFNFPGRGNQHSSFKWRWYHFDGTDWDQSRQLANRIYKFRGDGKAWDWEVDTENGNYDYLMYADVDMDHPEVINELNRWGVWYANTLNLDGFRLDAVKHIKFSFMRDWLGHVRGQTGKNLFAVAEVWKNDLGALENYLSKTNWTMSAFDVPLHYNLYQASNSSGNYDMRNLLNGTLVQRHPSHAVTFVDNHDTQPGEALESFVQGWFKPLAYATILTREQGYPQVFYGDYYGIPSDGVPSYRQQIDPLLKARQQYAYGRQHDYFDHWDVIGWTREGNASHPNSGLATIMSDGPGGSKWMYVGRQKAGEVWHDMTGNRSGTVTINQDGWGHFFVNGGSVSVWVKR

SEQ ID NO: 30669 - protein, 485 aa, Bacillus sp.
HHDGTNGTIMQYFEWNVPNDGQHWNRLHNNAQNLKNAGITAIWIPPAWKGTSQNDVGYGAYDLYDLGEFNQKGTVRTKYGTKAELERAIRSLKANGIQVYGDVVMNHKGGADFTERVQAVEVNPQNRNQEVSGTYQIEAWTEFNFPGRGNQHSSFKWRWYHFDGTDWDQSRQLANRIYKFRGDGKAWDWEVDTENGNYDYLMYADVDMDHPEVINELNRWGVWYANTLNLDGFRLDAVKHIKFSFMRDWLGHVRGQTGKNLFAVAEYWKNDLGALENYLSKTNWTMSAFDVPLHYNLYQASNSSGNYDMRNLLNGTLVQRHPSHAVTFVDNHDTQPGEALESFVQGWFKPLAYATILTREQGYPQVFYGDYYGIPSDGVPSYRQQIDPLLKARQQYAYGRQHDYFDHWDVIGWTREGNASHPNSGLATIMSDGPGGSKWMYVGRQKAGEVWHDMTGNRSGTVTINQDGWGHFFVNGGSVSVWVKR

SEQ ID NO: 30670 - protein, 483 aa, Bacillus sp. (in: firmicutes)
HHDGTNGTMMQYFEWNVPNDGQHWNRLHNNAQNLKNAGITAIWIPPAWKGTSQNDVGYGAYDLYDLGEFNQKGTVRTKYGTKAELERAIRSLKANGIQVYGDVVMNHKGGTDFTERVQAVEVNPQNRNQEVSGTYQIEAWTGFNFPGRGNQHSSFKWRWYHFDGTDWDQSRQLANRIYKFRGKAWDWEVDTEFGNYDYLMYADVDMDHPEVINELNRWGVWYANTLNLDGFRLDAVKHIKFSFMRDWLGHVRGQTGKNLFAVAEYWKNDLGALENYLSKTNWTMSAFDVPLHYNLYQASNSSGNYDMRNLLNGTLVQRHPSHAVTFVDNHDTQPGEALESFVQGWFKPLAYATILTREQGYPSVFYGDYYGIPSDGVPSYRQQIDPLLKARQQYAYGRQHDYFDHWDVIGWTREGNASHPNSGLATIMSDGPGGSKWMYVGRQKAGEVWHDMTGNRSGTVTINQDGWGHFFVNGGSVSVWVKR

SEQ ID NO: 30671 - protein, 485 aa, Bacillus sp.
HHDGTNGTIMQYFEWNVPNDGQHWNRLHNNAQNLKNAGITAIWIPPAWKGTSQNDVGYGAYDLYDLGEFNQKGTVRTKYGTKAELERAIRSLKANGIQVYGDVVMNHKGGADFTERVQAVEVNPENRNQEVSGTYQIEAWTGFNFPGRGNQHSSFKWRWYHFDGTDWDQSRQLANRIYKFRGDGKAWDWEVDTENGNYDYLMYADVDMDHPEVINELNRWGVWYANTLNLDGFRLDAVKHIKFSFMRDWLGHVRGQTGKNLFAVAEYWKNDLGALENYLSKTNWTMSAFDVPLHYNLYQASNSSGNYDMRNLLNGTLVQRHPSHAVTFVDNHDTQPGEALESFVQGWFKPLAYATILTREQGYPQVFYGDYYGIPSDGVPSYRQQIDPLLKARQQYAYGRQHDYFDHWDVIGWTREGNASHPNSGLATIMSDGPGGSKWMYVGRQKAGEVWHDMTGNRSGTVTINQDGWGHFFVNGGSVSVWVKR

SEQ ID NO: 30672 - protein, 485 aa, Bacillus sp.
HHDGTNGTIMQYFEWNVPNDGQHWNRLHNNAQNLKNAGITAIWIPPAWKGTSQNDVGYGAYDLYDLGEFNQKGTVRTKYGTKAELERAIRSLKANGIQVYGDVVMNHKGGADFTERVQAVEVNPQNRNQEVSGTYQIEAWTGFNFPGRGNQHSSFKWRWYHFDGTDWDQSRQLANRIYKFRGDGKAWDWEVDTENGNYDYLMYADVDMDHPEVINELNRWGVWYANTLNLDGFRLDAVKHIKFSFMRDWLGHVRGQTGKNLFAVAEYWKNDLGALENYLSKTNWTMSAFDVPLHYNLYQASNSSGNYDMRNLLNGTLVQRHPSHAVTFVDNHDTQPGEALESFVQGWFKPLAYATILTREQGYPQVFYGDYYGIPSDGVPSYRQQIDPLLKARQQYAYGRQHDYFDHWDVIGWTREGNASHPNSGLATIMSDGPGGSKWMYVGRRKAGEVWHDMTGNRSGTVTINQDGWGHFFVNGGSVSVWVKR

SEQ ID NO: 30673 - protein, 485 aa, Bacillus sp.
HHDGTNGTIMQYFEWNVPNDGQHWNRLHNNAQNLKNAGITAIWIPPAWKGTSQNDVGYGAYDLYDLGEFNQKGTVRTKYGTKAELERAIRSLKANGIQVYGDVVMNHKGGADFTERVQAVEVNPQNRNQEVSGTYQIEAWTGFNFPGRGNQHSSFKWRWYHFDGTDWDQSRQLANRIYKFRGDGKAWDWEVDTENGNYDYLMYADVDMDHPEVINELNRWGVWYANTLNLDGFRLDAVKHIKFSFMRDWLGHVRGQTGKNLFAVAEYWKNDLGALENYLSKTNWTMSAFDVPLHYNLYQASNSSGNYDMRYLLNGTLVQRHPSHAVTFVDNHDTQPGEALESFVQGWFKPLAYATILTREQGYPQVFYGDYYGIPSDGVPSYRQQIDPLLKARQQYAYGRQHDYFDHWDVIGWTREGNASHPNSGLATIMSDGPGGSKWMYVGRQKAGEVWHDMTGNRSGTVTINQDGWGHFFVNGGSVSVWVKR

SEQ ID NO: 30674 - protein, 485 aa, Bacillus sp.
HHDGTNGTIMQYFEWNVPNDGQHWNRLHNNAQNLKNAGITAIWIPPAWKGTSQNDVGYGAYDLYDLGEFNQKGTVRTKYGTKAELERAIRSLKANGIQVYGDVVMNHKGGADFTETVQAVEVNPQNRNQEVSGTYQIEAWTGFNFPGRGNQHSSFKWRWYHFDGTDWDQSRQLANRIYKFRGDGKAWDWEVDTENGNYDYLMYADVDMDHPEVINELNRWGVWYANTLNLDGFRLDAVKHIKFSFMRDWLGHVRGQTGKNLFAVAEYWKNDLGALENYLSKTNWTMSAFDVPLHYNLYQASNSSGNYDMRNLLNGTLVQRHPSHAVTFVDNHDTQPGEALESFVQGWFKPLAYATILTREQGYPQVFYGDYYGIPSDGVPSYRQQIDPLLKARQQYAYGRQHDYFDHWDVIGWTREGNASHPNSGLATIMSDGPGGSKWMYVGRQKAGEVWHDMTGNRSGTVTINQDGWGHFFVNGGSVSVWVKR

SEQ ID NO: 30675 - protein, 483 aa, Bacillus sp.
HHNGTNGTMMQYFEWYLPNDGNHWNRLNSDASNLKSKGIKAVWIPPAWKGASQNDVGYGAYDLYDLGEFNQRGTVRTKYGTRSQLQAAVTSLKNNGIQVYGDVVMNHKGGADATEMVRAVEVNPNNRNQEVTGEYTIEAWTRFDFPGRGNTHSSFKWRWYHFDGVDFDQSRRLNNRIYKFRGKAWDWEVDTEFGNYDYLMYADYDYDHPETTNEMRNWGVWYTNTLGLDGFRIDAVKHIKYSFTRDWINHVRSATGKNMFAVAEFWKNDLGAIENYLQKTNWNHSVFDVPLHYNLYNASKSGGNYDMRNIFNGTVVQAHPNHAVTFVDNHDSQPEEALESFVEEWFKPLAYALTLTREQGYPSVFYGDYYGIPTHGVPAMRSKIDPILEARQKYAYGPQHDYLDHPDVIGWTREGDSSHPKSGLATLITDGPGGSKRMYAGLKNAGETWYDITGNRSDTVKIGSDGWGEFHVNDGSVSIYVQK

SEQ ID NO: 30676 - protein, 485 aa, Bacillus sp.
HHDGTNGTIMQYFEWNVPNDGQHWNRLHNNAQNLKNAGITAIWIPPAWKGTSQNDVGYGAYDLYDLGEFNQKGTVRTKYGTKAELERAIRSLKANGIQVYGDVVMNHKGGADFTERVQAVEVNPQNRNQEVSGTYQIEAWTGFNFPGRGNQHSSFKWRWYHFDGTDWDQSRQLANRIYKFRGDGKAWDWEVDTENGNYDYLMYADVDMDHPEVINELNRWGVWYANTLNLDGFRLDAVKHIKFSFMRDWLGHVRGQTGKNLFAVAEYWKNDLGALENYLSKTNWTMSAFDVPLHYNLYQASNSSGNYDMRNLLNGTLVQRHPSHAVTFVDNHDTQPGEALESFVQGWFKPLAYATILTREQGYPQVFYGDYYGIPSDGVPSYRQQIDPLLYARQQYAYGRQHDYFDHWDVIGWTREGNASHPNSGLATIMSDGPGGSKWMYVGRQKAGEVWHDMTGNRSGTVTINQDGWGHFFVNGGSVSVWVKR

SEQ ID NO: 30677 - protein, 485 aa, Bacillus sp.
HHDGTNGTIMQYFEWNVPNDGQHWNRLHNNAQNLKNAGITAIWIPPAWKGTSQNDVGYGAYDLYDLGEFNQKGTVRTKYGTKAELERAIRSLKANGIQVYGDVVMNHKGGADFTERVQAVEVNPQNRNQEVSGTYQIEAWTGFNFPGRGNQHSSFKWRWYHFDGTDWDQSRQLANRIYKFRGDGKAWDWEVDTENGNYDYLMYADVDMDHPEVINELNRWGVWYANTLNLDGFRLDAVKHIKFSFMRDWLGHVRGQTGKNLFAVAEYWKNDLGALENYLSKTNWTMSAFDVPLHYNLYQASNSSGNYDMRNLLNGTLVQRHPSHAVTFVDNHDAQPGEALESFVQGWFKPLAYATILTREQGYPQVFYGDYYGIPSDGVPSYRQQIDPLLKARQQYAYGRQHDYFDHWDVIGWTREGNASHPNSGLATIMSDGPGGSKWMYVGRQKAGEVWHDMTGNRSGTVTINQDGWGHFFVNGGSVSVWVKR

SEQ ID NO: 30678 - protein, 485 aa, Bacillus sp.
HHDGTNGTIMQYFEWNVPNDGQHWNRLHNNAQNLKNAGITAIWIPPAWKGTSQNDVGYGAYDLYDLGEFNQKGTVRTKYGTKAELERAIRSLKANGIQVYGDVVMNHKGGADFTERVQAVEVNPQNRNQEVSGTYQIEAWTGFNFPGRGNQHSSFKWRWYHFDGTDWDQSRQLANRIYKFRGDGKAWDWEVDTENGNYDYLMYADVDMDHPEVINELNRWGVWYANTLNLDGFRLDAVKHIKFSFMRDWLGHVRGQTGKNLFAVAEYWKNDLGALENYLSKTNWTMSAFDVPLHYNLYQASNSSGNYDMRNLLNGTLVQRHPSHAVTFVDNHDTQPGEALESFVQGWFKPLAYATILTREQGYPQVFYGDYYGIPSDGVPSYRQQIDPLLQARQQYAYGRQHDYFDHWDVIGWTREGNASHPNSGLATIMSDGPGGSKWMYVGRQKAGEVWHDMTGNRSGTVTINQDGWGHFFVNGGSVSVWVKR

SEQ ID NO: 30679 - protein, 485 aa, Bacillus sp.
HHDGTNGTIMQYFEWNVPNDGQHWNRLHNNAQNLKNAGITAIWIPPAWKGTSQNDVGYGAYDLYDLGEFNQKGTVRTKYGTKAELERAIRSLKANGIQVYGDVVMNHKGGADFTERVQAVEVNPQNRNQEVSGTYQIEAWTGFNFPGRGNQHSSFKWRWYHFDGTDWDQSRQLANRIYKFRGDGKAWDWEVDTENGNYDYLMYADVDMDHPEVINELNRWGVWYANTLNLDGFRLDAVKHIKFSFMRDWLGHVRGQTGKNLFAVAEYWKNDLGALENYLSKTNWTMSAFDVPLHYNLYQASNSSGNYDMRNLLNGTLVQRHPSHAVTFVDNHDTQPGEALESFVQGWFKPLAYATILTREQGYPQVFYGDYYGIPSDGVPSYRQQIDPLLKARQQYAYGRQHDYFDHWDVIGWTREGNASHPNSGLATIMSDGPGGSKWMYVGLQKAGEVWHDMTGNRSGTVTINQDGWGHFFVNGGSVSVWVKR

SEQ ID NO: 30680 - protein, 485 aa, Bacillus sp.
HHDGTNGTIMQYFEWRVPNDGQHWNRLHNNAQNLKNAGITAIWIPPAWKGTSQNDVGYGAYDLYDLGEFNQKGTVRTKYGTKAELERAIRSLKANGIQVYGDVVMNHKGGADFTERVQAVEVNPQNRNQEVSGTYQIEAWTGFNFPGRGNQHSSFKWRWYHFDGTDWDQSRQLANRIYKFRGDGKAWDWEVDTENGNYDYLMYADVDMDHPEVINELNRWGVWYANTLNLDGFRLDAVKHIKFSFMRDWLGHVRGQTGKNLFAVAEYWKNDLGALENYLSKTNWTMSAFDVPLHYNLYQASNSSGNYDMRNLLNGTLVQRHPSHAVTFVDNHDTQPGEALESFVQGWFKPLAYATILTREQGYPQVFYGDYYGIPSDGVPSYRQQIDPLLKARQQYAYGRQHDYFDHWDVIGWTREGNASHPNSGLATIMSDGPGGSKWMYVGRQKAGEVWHDMTGNRSGTVTINQDGWGHFFVNGGSVSVWVKR

SEQ ID NO: 30681 - protein, 485 aa, Bacillus sp.
HHDGTNGTIMQYFEWNVPNDGQHWNRLHNNAQNLKNAGITAIWIPPAWKGTSQNDVGYGAYDLYDLGEFNQKGTVRTKYGTGAELERAIRSLKANGIQVYGDVVMNHKGGADFTERVQAVEVNPQNRNQEVSGTYQIEAWTGFNFPGRGNQHSSFKWRWYHFDGTDWDQSRQLANRIYKFRGDGKAWDWEVDTENGNYDYLMYADVDMDHPEVINELNRWGVWYANTLNLDGFRLDAVKHIKFSFMRDWLGHVRGQTGKNLFAVAEYWKNDLGALENYLSKTNWTMSAFDVPLHYNLYQASNSSGNYDMRNLLNGTLVQRHPSHAVTFVDNHDTQPGEALESFVQGWFKPLAYATILTREQGYPQVFYGDYYGIPSDGVPSYRQQIDPLLKARQQYAYGRQHDYFDHWDVIGWTREGNASHPNSGLATIMSDGPGGSKWMYVGRQKAGEVWHDMTGNRSGTVTINQDGWGHFFVNGGSVSVWVKR

SEQ ID NO: 30682 - protein, 485 aa, Bacillus sp.
HHDGTNGTIMQYFEWNVPNDGQHWNRLHNNAQNLKNAGITAIWIPPAWKGTSQNDVGYGAYDLYDLGEFNQKGTVRTKYGTKAELERAIRSLKANGIQVYGDVVMNHKGGADFTESVQAVEVNPQNRNQEVSGTYQIEAWTGFNFPGRGNQHSSFKWRWYHFDGTDWDQSRQLANRIYKFRGDGKAWDWEVDTENGNYDYLMYADVDMDHPEVINELNRWGVWYANTLNLDGFRLDAVKHIKFSFMRDWLGHVRGQTGKNLFAVAEYWKNDLGALENYLSKTNWTMSAFDVPLHYNLYQASNSSGNYDMRNLLNGTLVQRHPSHAVTFVDNHDTQPGEALESFVQGWFKPLAYATILTREQGYPQVFYGDYYGIPSDGVPSYRQQIDPLLKARQQYAYGRQHDYFDHWDVIGWTREGNASHPNSGLATIMSDGPGGSKWMYVGRQKAGEVWHDMTGNRSGTVTINQDGWGHFFVNGGSVSVWVKR

SEQ ID NO: 30683 - protein, 485 aa, Bacillus sp.
HHDGTNGTIMQYFEWNVPNDGQHWNRLHNNAQNLKNAGITAIWIPPAWKGTSQNDVGYGAYDLYDLGEFNQKGTVRTKYGTKAELERAIRSLKANGIQVYGDVVMNHKGGADFTERVQAVEVNPQNRNQEVSGTYQIEAWTGFNFPGRGNQHSSFKWRWYHFDGTDWDQSRQLANRIYKFRGDGKAWDWEVDTENGNYDYLMYADVDMDHPEVINELNRWGVWYANTLNLDGFRLDAVKHIKFSFMRDWLGHVRGQTGKNLFAVAEYWKNDLGALENYLSKTNWTMSAFDVPLHYNLYQASNSSGNYDMRNLLNGTLVQRHPSHAVTFVDNHDTQPGEALESFVQGWFKPLAYATILTREQGYPQVFYGDYYGIPSDGVPSYRQQIDPLLKARQQYAYGRQHDYFDHWDVIGWTREGNASHPNSGLATIMSDGPGGSKWMYVGRQKAGEVWHDMTGNRSGTVTINQDGWGHFVVNGGSVSVWVKR

SEQ ID NO: 30684 - protein, 483 aa, Bacillus sp.
HHNGTNGTMMQYFEWYLPNDGNHWNRLNSDASNLKSKGIKAVWIPPAWKGASQNDVGYGAYDLYDLGEFNQKGTVRTKYGTRSQLQAAVTSLKNNGINVYGDVVMNHKGGADATEMVRAVEVNPNNRNQEVTGEYTIEAWTRFDFPGRGNTHSSFKWRWYHFDGVDFDQSRKLNNRIYKFRGKAWDWEVDTEFGNYDYLMYVDYDYDHPETTNEMRNWGVWYTNTLGLDGFRIDAVKHIKYSFTRDWINHVRIATGKNMFAVAEFWKNDLGAIENYLQKTNWNHSVFDVPLHYNLYNASKSGGNYDMRNIFNGTVVQAHPMHAVTFVDNHDSQPEEALESFVDEWFKPLAYALTLTREQGYPSVFYGDYYGIPTHGVPAMRSKIDPILEARQKYAYGPQHDYLDHPDVIGWTREGDSSHPKSGLATLITDGPGGSKRMYAGLKNAGETWYDITGNRSDTVKIGSDGWGEFHVNDGSVSIYVQK

SEQ ID NO: 30685 - protein, 485 aa, Bacillus sp.
HHDGTNGTIMQYFEWNVPNDGQHWNRLHNNAQNLKNAGITAIWIPPAWKGTSQNDVGYGAYDLYDLGEFNQKGTVRTKYGTKAELERAIRSLKANGIQVYGDVVMNHKGGADFTERVQAVEVNPQNRNQEVSGTYQIEAWTGFNFPGRGNQHSSFKWRWYHFDGTDWDQSRQLANRIYKFRGDGKAWDWEVDTENGNYDYLMYADVDMDHPEVINELNRWGVWYANTLNLDGFRLDAVKHIKFSFMRDWLGHVRGQTGKNLFAVAEYWKNDLGALENYLSKTNWTMSAFDVPLHYNLYQASNSSGNYDMRNLLNGTLVQRHPSHAVTFVDNHDTQPGEALESFVQGWFKPLAYATILTREQGYPQVFYGDYYGIPSDGVPSYRQQIDPLLKARQQYAYGRQHDYFDHWDLIGWTREGNASHPNSGLATIMSDGPGGSKWMYVGRQKAGEVWHDMTGNRSGTVTINQDGWGHFFVNGGSVSVWVKR

SEQ ID NO: 30686 - protein, 485 aa, Bacillus sp.
HHDGTNGTIMQYFEWNVPNDGQHWNRLHNNAQNLKNAGITAIWIPPAWKGTSQNDVGYGAYDLYDLGEFNQKGTVRTKYGTKAELERAIRSLKANGIQVYGDVVMNHKGGADFTERVQAVEVNPQNRNQEVSGTYQIEAWTGFNFPGRGNQHSSFKWRWYHFDGTDWDQSRQLANRIYKFRGDGKAWDWEVDTENGNYDYLMYADVDMDHPEVINELNRWGVWYANTLNLDGFRLDAVKHIKFSFMRDWLMHVRGQTGKNLFAVAEYWKNDLGALENYLSKTNWTMSAFDVPLHYNLYQASNSSGNYDMRNLLNGTLVQRHPSHAVTFVDNHDTQPGEALESFVQGWFKPLAYATILTREQGYPQVFYGDYYGIPSDGVPSYRQQIDPLLKARQQYAYGRQHDYFDHWDVIGWTREGNASHPNSGLATIMSDGPGGSKWMYVGRQKAGEVWHDMTGNRSGTVTINQDGWGHFFVNGGSVSVWVKR

SEQ ID NO: 30687 - protein, 485 aa, Bacillus sp.
HHDGTNGTIMQYFEWNVPNDGQHWNRLHNNAQNLKNAGITAIWIPPAWKGTSQNDVGYGAYDLYDLGEFNQKGTVRTKYGTKAELERAIRSLKANGIQVYGDVVMNHKGGADFTERVQAVEVNPQNRNQEVSGTYQIEAWTGFNFPGRGNQHSSFKWRWYHFDGTDWDQSRQLANRIYKFRGDGKAWDWEVDTENGNYDYLMYADVDMDHPEVINELNRWGVWYANTLNLDGFRLDAVKHIKFSFMRDWLGHVRGQTGKNLFAVAEYWKNDLGALENYLSKTNWTMSAFDVPLHYNLYQASNSSGNYDMRNLLNGTLVQRHPSHAVTFVDNHDTQPGEALESFVQGWFKPLAYATILTREQGYPQVFYGDYYGIPSDGVPSYRQQIDPLLKARQQYAYGMQHDYFDHWDVIGWTREGNASHPNSGLATIMSDGPGGSKWMYVGRQKAGEVWHDMTGNRSGTVTINQDGWGHFFVNGGSVSVWVKR

SEQ ID NO: 30688 - protein, 485 aa, Bacillus sp.
HHDGTNGTIMQYFEWNVPNDGQHWNRLKNNAQNLKNAGITAIWIPPAWKGTSQNDVGYGAYDLYDLGEFNQKGTVRTKYGTKAELERAIRSLKANGIQVYGDVVMNHKGGADFTERVQAVEVNPQNRNQEVSGTYQIEAWTGFNFPGRGNQHSSFKWRWYHFDGTDWDQSRQLANRIYKFRGDGKAWDWEVDTENGNYDYLMYADVDMDHPEVINELNRWGVWYANTLNLDGFRLDAVKHIKFSFMRDWLGHVRGQTGKNLFAVAEYWKNDLGALENYLSKTNWTMSAFDVPLHYNLYQASNSSGNYDMRNLLNGTLVQRHPSHAVTFVDNHDTQPGEALESFVQGWFKPLAYATILTREQGYPQVFYGDYYGIPSDGVPSYRQQIDPLLKARQQYAYGRQHDYFDHWDVIGWTREGNASHPNSGLATIMSDGPGGSKWMYVGRQKAGEVWHDMTGNRSGTVTINQDGWGHFFVNGGSVSVWVKR

SEQ ID NO: 30689 - protein, 485 aa, Bacillus sp.
HHDGTNGTIMQYFEWNVPNDGQHWNRLHNNAQNLKNAGITAIWIPPAWKGTSQNDVGYGAYDLYDLGEFNQKGTVRTKYGTKAELERAIRSLKANGIQVYGDVVMNHKGGADFTERVQAVEVNPQNRNQEVSGTYQIEAWTGFNFPGRGNQHSSFKWRWYHFDGTDWDQSRQLANRIYKFRGDGKAWDWEVDTENGNYDYLMYADVDMDHPEVINELNRWGVWYANTLNLDGFRLDAVKHIKFSFMRDWLGHVRGQTGKGLFAVAEYWKNDLGALENYLSKTNWTMSAFDVPLHYNLYQASNSSGNYDMRNLLNGTLVQRHPSHAVTFVDNHDTQPGEALESFVQGWFKPLAYATILTREQGYPQVFYGDYYGIPSDGVPSYRQQIDPLLKARQQYAYGRQHDYFDHWDVIGWTREGNASHPNSGLATIMSDGPGGSKWMYVGRQKAGEVWHDMTGNRSGTVTINQDGWGHFFVNGGSVSVWVKR

SEQ ID NO: 30690 - protein, 485 aa, Bacillus sp.
HHDGTNGTIMQYFEWNVPNDGQHWNRLHNNAQNLKNAGITAIWIPPAWKGTSQNDVGYGAYDLYDLGEFNQKGTVRTKYGTKAELERAIRSLKANGIQVYGDVVMNHKGGADFTERVQAVEVNPQNRNQEVSGTYQIEAWTGFNFPGRGNQHSSFKWRWYHFDGTDWDQSRQLANRIYKFRGDGKAWDWEVDTENGNYDYLMYADVDMDHPEVINELNRWGVWYANTLNLDGFRLDAVKHIKFSFMRDWLGHVRGQTGKNLFAVAEYWKNDLGALENYLSKTNWTMSAFDVPLHYNLYQASNSLGNYDMRNLLNGTLVQRHPSHAVTFVDNHDTQPGEALESFVQGWFKPLAYATILTREQGYPQVFYGDYYGIPSDGVPSYRQQIDPLLKARQQYAYGRQHDYFDHWDVIGWTREGNASHPNSGLATIMSDGPGGSKWMYVGRQKAGEVWHDMTGNRSGTVTINQDGWGHFFVNGGSVSVWVKR

SEQ ID NO: 30691 - protein, 485 aa, Bacillus sp.
HHDGTNGTIMQYFEWNVPNDGQHWNRLHNNAQNLKNAGITAIWIPPAWKGTSQNDVGYGAYDLYDLGEFNQKGTVRTKYGTKAELERAIRSLKANGIQVYGDVVMNHKGGADFTERVQAVEVNPQNRNQEVSGTYQIEAWTGFNFPGRGNQHSSFKWRWYHFDGTDWDQSRQLANRIYKFRGDGKAWDWEVDTENGNYDYLMYADVDMDHPEVINELNRWGVWYANTLNLDGFRLDAVKHIKFSFMRDWLGHVRGQTGKNLFAVAEYWKNDLGALENYLSKTNWTMSAFDVPLHYNLYQASNSSGNYDMRNLLNGTLVQRHPSHAVTFVDNHDTQPGEALESFVQGWFKPLAYATILTREQGYPQVFYGDYYGIPSDGVPSYRQQIDPLLKARQQYAYGRQHDYFDHWDVIGWTREGNASHPNSGLATIMSDGPGGSKWMYVGRQKAGEVWHDMTGNRSGTVTINLDGWGHFFVNGGSVSVWVKR

SEQ ID NO: 30692 - protein, 485 aa, Bacillus sp.
HHDGTNGTIMQYFEWNVPNDGQHWNRLHNNAQNLKNAGITAIWIPPAWKGTSQNDVGYGAYDLYDLGEFNQKGTVRTKYGTKAELERAIRSLKANGIQVYGDVVMNHKGGADFTERVQAVEVNPQNRNQEVSGTYQIEAWTGFNFPGRGNQHSSFKWRWYHFDGTDWDQSRQLANRIYKFRGDGKAWDWEVDTENGNYDYLMYADVDMDHPEVINELNRWGVWYANTLNLDGFRLDAVKHIKFSFMRDWLGHVRGQTGKNLFAVAEYWKNDLGALENYLSKTNWTMSAFDVPLHYNLYQASNSSGNYDMRNLLNGTLVQRHPSHAVTFVDNHDTQPGEALESFVQGWFKPLAYATILTREQGYPQVFYGDYYGIPSDGVPSYRQQIDPLLKARQQYAYGRQHDYFDHWDVIGWTREGNASHPNSGLATIMSDGPGGSKWMYVGRQKAGEVWHDRTGNRSGTVTINQDGWGHFFVNGGSVSVWVKR

SEQ ID NO: 30693 - protein, 485 aa, Bacillus sp.
HHDGTNGTIMQYFEWNVPNDGQHWNRLHNNAQNLKNAGITAIWIPPAWKGTSQNDVGYGAYDLYDLGEFNQKGTVRTKYGTKAELERAIRSLKANGIQVYGDVVMNHKGGADFTERVQAVEVNPQNRNQEVSGTYQIEAWTGFNFPGRGNQHSSFKWRWYHFDGTDWDQSRQLANRIYKFRGDGKAWDWEVDGENGNYDYLMYADVDMDHPEVINELNRWGVWYANTLNLDGFRLDAVKHIKFSFMRDWLGHVRGQTGKNLFAVAEYWKNDLGALENYLSKTNWTMSAFDVPLHYNLYQASNSSGNYDMRNLLNGTLVQRHPSHAVTFVDNHDTQPGEALESFVQGWFKPLAYATILTREQGYPQVFYGDYYGIPSDGVPSYRQQIDPLLKARQQYAYGRQHDYFDHWDVIGWTREGNASHPNSGLATIMSDGPGGSKWMYVGRQKAGEVWHDMTGNRSGTVTINQDGWGHFFVNGGSVSVWVKR

SEQ ID NO: 30694 - protein, 485 aa, Bacillus sp.
HHDGTNGTIMQYFEWNVPNDGQHWNRLHNNAQNLKNAGITAIWIPPAWKGTSQNDVGYGAYDLYDLGEFNQKGTVRTKYGTKAELERAIRSLKANGIQVYGDVVMNHKGGADFTERVQAVEVNPQNRNQEVSGTYQIEAWTGFNFPGRGNQHSSFKWRWYHFDGTDWDQSRQLANRIYKFRGDGKAWDWEVDTENGNYDYLMYADVDMDHPEVINELNRWGVWYANTLNLDGFRLDAVKHIKFSFMRDWLGHVRGQTGKNLFAVAEYWKNDLGALENYLSKTNWTMSAFDVPLHYNLYQASNSSGNYDMRNLLNGTLVQRHPSHAVTFVDNHDTQPGEALESFVQGWFKPLAYATILTREQGYPQVFYGDYYGIPSDGVPSYRQQIDPLLKARQQYAYGRQHDYFDHWDVIGWTREGNESHPNSGLATIMSDGPGGSKWMYVGRQKAGEVWHDMTGNRSGTVTINQDGWGHFFVNGGSVSVWVKR

SEQ ID NO: 30695 - protein, 485 aa, Bacillus sp.
HHDGTNGTIMQYFEWNVPNDGQHWNRLHNNAQNLKNAGITAIWIPPAWKGTSQNDVGYGAYDLYDLGEFNQKGTVRTKYGTKAELERAIRSLKANGIQVYGDVVMNHKGGADFTERVQAVEVNPQNRNQEVSGTYQIEAWTGFNFPGRGNQHSSFKWRWYHFDGSDWDQSRQLANRIYKFRGDGKAWDWEVDTENGNYDYLMYADVDMDHPEVINELNRWGVWYANTLNLDGFRLDAVKHIKFSFMRDWLGHVRGQTGKNLFAVAEYWKNDLGALENYLSKTNWTMSAFDVPLHYNLYQASNSSGNYDMRNLLNGTLVQRHPSHAVTFVDNHDTQPGEALESFVQGWFKPLAYATILTREQGYPQVFYGDYYGIPSDGVPSYRQQIDPLLKARQQYAYGRQHDYFDHWDVIGWTREGNASHPNSGLATIMSDGPGGSKWMYVGRQKAGEVWHDMTGNRSGTVTINQDGWGHFFVNGGSVSVWVKR

SEQ ID NO: 30696 - protein, 485 aa, Bacillus sp.
HHDGTNGTIMQYFEWNVPNDGQHWNRLHLNAQNLKNAGITAIWIPPAWKGTSQNDVGYGAYDLYDLGEFNQKGTVRTKYGTKAELERAIRSLKANGIQVYGDVVMNHKGGADFTERVQAVEVNPQNRNQEVSGTYQIEAWTGFNFPGRGNQHSSFKWRWYHFDGTDWDQSRQLANRIYKFRGDGKAWDWEVDTENGNYDYLMYADVDMDHPEVINELNRWGVWYANTLNLDGFRLDAVKHIKFSFMRDWLGHVRGQTGKNLFAVAEYWKNDLGALENYLSKTNWTMSAFDVPLHYNLYQASNSSGNYDMRNLLNGTLVQRHPSHAVTFVDNHDTQPGEALESFVQGWFKPLAYATILTREQGYPQVFYGDYYGIPSDGVPSYRQQIDPLLKARQQYAYGRQHDYFDHWDVIGWTREGNASHPNSGLATIMSDGPGGSKWMYVGRQKAGEVWHDMTGNRSGTVTINQDGWGHFFVNGGSVSVWVKR

SEQ ID NO: 30697 - protein, 485 aa, Bacillus sp.
HHDGTNGTIMQYFEWNVPNDGQHWNRLHNNAQNLKNAGITAIWIPPAWKGTSQNDVGYGAYDLYDLGEFNQKGTVRTKYGTKAELERAIRSLKANGIQVYGDVVMNHKGGADFTERVQAVEVNPQNRNQEVSGTYQIEAWTGFNFPGRGNQHSSFKWRWYHFDGTDWDQSRQLANRIYKFRGDGKAWDWEVDTENGNYDYLMYADVDMDHPEVINELNRWGVWYANTLNLDGFRLDAVKHIKFSFMRDWLGHVRGQTGKNLFAVAEYWKNDLGALENYLSKTNWTMSAFDVPLHYNLYQASNSSGNYDMRNLLNGTLVQRHPSHAVTFVDNHDTQPGEALESFVQGWFKPLAYATILTREQGYPDVFYGDYYGIPSDGVPSYRQQIDPLLKARQQYAYGRQHDYFDHWDVIGWTREGNASHPNSGLATIMSDGPGGSKWMYVGRQKAGEVWHDMTGNRSGTVTINQDGWGHFFVNGGSVSVWVKR

SEQ ID NO: 30698 - protein, 485 aa, Bacillus sp.
HHDGTNGTIMQYFEWNVPNDGQHWNRLHNNAQNLKNAGITAIWIPPAWKGTSQNDVGYGAYDLYDLGEFNQKGTVRTKYGTKAELERAIRSLKANGIQVYGDVVMNHKGGADFTERVQAVEVNPQNRNQEVSGTYQIEAWTGFNFPGRGNQHSSFKWRWYHFDGTDWDQSRQLANRIYKFRGDGKAWDWEVDTENGNYDYLMYADVDMDHPEVINELNRWGVWYANTLNLDGFRLDAVKHIKFSFMRDWLGHVRGQTGKNLFAVAEYWKNDLGALENYLSKTNWTMSAFDVPLHYNLYQASNSSGNYDMRNLLNGTLVQRHPSHAVTFVDNHDTQPGEALESFVQGWFKPLAYATILTREQGYPQVFYGDYYGIPSDGVPSYRQQIDPLLKARQQYAYGRQHDYFDHWDVIGWTREGNASHPNSGLATIMSDGPGGSKWMYVGRLKAGEVWHDMTGNRSGTVTINQDGWGHFFVNGGSVSVWVKR

SEQ ID NO: 30699 - protein, 485 aa, Bacillus sp.
HHDGTNGTIMQYFEWNAPNDGQHWNRLHNNAQNLKNAGITAIWIPPAWKGTSQNDVGYGAYDLYDLGEFNQKGTVRTKYGTKAELERAIRSLKANGIQVYGDVVMNHKGGADFTERVQAVEVNPQNRNQEVSGTYQIEAWTGFNFPGRGNQHSSFKWRWYHFDGTDWDQSRQLANRIYKFRGDGKAWDWEVDTENGNYDYLMYADVDMDHPEVINELNRWGVWYANTLNLDGFRLDAVKHIKFSFMRDWLGHVRGQTGKNLFAVAEYWKNDLGALENYLSKTNWTMSAFDVPLHYNLYQASNSSGNYDMRNLLNGTLVQRHPSHAVTFVDNHDTQPGEALESFVQGWFKPLAYATILTREQGYPQVFYGDYYGIPSDGVPSYRQQIDPLLKARQQYAYGRQHDYFDHWDVIGWTREGNASHPNSGLATIMSDGPGGSKWMYVGRQKAGEVWHDMTGNRSGTVTINQDGWGHFFVNGGSVSVWVKR

SEQ ID NO: 30700 - protein, 485 aa, Bacillus sp.
HHDGTNGTIMQYFEWNVPNDGQHWNRLHNNAQNLKNAGITAIWIPPAWKGTSQNDVGYGAYDLYDLGEFNQKGTVRTKYGTKAELERAIRSLKANGIQVYGDVVMNHKGGADFTERVQAVEVNPQNRNQEVSGTYQIEAWTGFNFPGRGNQHSSFKWRWYHFDGTDWDQSRQLANRIYKFRGDGKAWDWEVDTENGNYDYLMYADVDMDHPEVINELNRWGVWYANTLNLDGFRLDAVKHIKFSFMRDWLGHVRGQTGKNLFAVAEYWKNDLGALENYLSKTNWTMSAFDVPLHYNLYQASNSSGNYDMRNLLNGTLVQRHPSHAVTFVDNHDTQPGEALESFVQGWFKPLAYATILTREQGYPQVFYGDYYGIPQDGVPSYRQQIDPLLKARQQYAYGRQHDYFDHWDVIGWTREGNASHPNSGLATIMSDGPGGSKWMYVGRQKAGEVWHDMTGNRSGTVTINQDGWGHFFVNGGSVSVWVKR

SEQ ID NO: 30701 - protein, 485 aa, Bacillus sp.
HHDGTNGTIMQYFEWNVPNDGQHWNRLHNNAQNLWNAGITAIWIPPAWKGTSQNDVGYGAYDLYDLGEFNQKGTVRTKYGTKAELERAIRSLKANGIQVYGDVVMNHKGGADFTERVQAVEVNPQNRNQEVSGTYQIEAWTGFNFPGRGNQHSSFKWRWYHFDGTDWDQSRQLANRIYKFRGDGKAWDWEVDTENGNYDYLMYADVDMDHPEVINELNRWGVWYANTLNLDGFRLDAVKHIKFSFMRDWLGHVRGQTGKNLFAVAEYWKNDLGALENYLSKTNWTMSAFDVPLHYNLYQASNSSGNYDMRNLLNGTLVQRHPSHAVTFVDNHDTQPGEALESFVQGWFKPLAYATILTREQGYPQVFYGDYYGIPSDGVPSYRQQIDPLLKARQQYAYGRQHDYFDHWDVIGWTREGNASHPNSGLATIMSDGPGGSKWMYVGRQKAGEVWHDMTGNRSGTVTINQDGWGHFFVNGGSVSVWVKR

SEQ ID NO: 30702 - protein, 485 aa, Bacillus sp.
HHDGTNGTIMQYFEWNVPNDGQHWNRLHNNAQNLKNAGITAIWIPPAWKGTSQNDVGYGAYDLYDLGEFNQKGTVRTKYGTKAELERAIRSLKANGIQVYGDVVMNHKGGADFTERVQAVEVNPQNRNQEVSGTYQIEAWTGFNFPGRGNQHSSFKWRWYHFDGTDWDQSRQLANRIYKFRGDGKAWDWEVDTENGNYDYLMYADVDMDHPEVINELNRWGVWYANTLNLDGFRLDAVKHIKFSFMRDWLGHVRGQTGKNLFAVAEYWKNDLGALENYLSKTNWTMSAFDVPLHYNLYQASNSSGNYDMRNLLNGTLVQRHPSHAVTFVDNHDTQPGEALESFVQGWFKPLAYATILTREQGYPQVFYGDYYGIPSDGVPSYRQQIDPLLKARQQYAYGSQHDYFDHWDVIGWTREGNASHPNSGLATIMSDGPGGSKWMYVGRQKAGEVWHDMTGNRSGTVTINQDGWGHFFVNGGSVSVWVKR

SEQ ID NO: 30703 - protein, 483 aa, Bacillus sp. (in: firmicutes)
HHDGTNGTMMQYFEWNVPNDGQHWNRLHNNAQNLKNAGITAIWIPPAWKGTSQNDVGYGAYDLYDLGEFNQKGTVRTKYGTKAELERAIRSLKANGIQVYGDVVMNHKGGADFTERVQAVEVNPQNRNQEVSGTYQIEAWTGFNFPGRGNQHSSFKWRWYHFDGTDWDQSRQLANRIYKFRGKAWDWEVDTEFGNYDYLMYADVDMDHPEVINELNRWGVWYANTLNLDGFRLDAVKHIKFSFMRDWLGHVRGQTGKNLFAVAEYWKPDLGALENYLSKTNWTMSAFDVPLHYNLYQASNSSGNYDMRNLLNGTLVQRHPSHAVTFVDNHDTQPGEALESFVQGWFKPLAYATILTREQGYPSVFYGDYYGIPSDGVPSYRQQIDPLLKARQQYAYGRQHDYFDHWDVIGWTREGNASHPNSGLATIMSDGPGGSKWMYVGRQKAGEVWHDMTGNRSGTVTINQDGWGHFFVNGGSVSVWVKR

SEQ ID NO: 30704 - protein, 485 aa, Bacillus sp.
HHDGTNGTIMQYFEWNVPNDGQHWNRLHNNAQNLKNAGITAIWIPPAWKGTSQNDVGYGAYDLYDLGEFNQKGTVRTKYGTKAELERAIRSLKANGIQVYGDVVMNHKGGADFTERVQAVEVNPQNRNQEVSGTYQIEAWTGFNFPGRGNQHSSFKWRWYHFDGTDWDQSRQLANRIYKFRGDGKAWDWEVDTENGNYDYLMYADVDMDHPEVINELNRWGVWYANTLNLDGFRLDAVKHIKFSFMRDWLGHVRGQTGKNLFAVAEYWKNDLGALENYLSKTNWTMSAFDVPLHYNLYQASNSSGNYDMRNLLNGTLVQRHPSHAVTFVDNHDTQPGEALESFVQGWFKPLAYATILTREQGYPQVFYGDYYGIPSDGVPSYRQQIDPLLKARQQYAYGRQHDYFDHWDVIGWTREGNAVHPNSGLATIMSDGPGGSKWMYVGRQKAGEVWHDMTGNRSGTVTINQDGWGHFFVNGGSVSVWVKR

SEQ ID NO: 30705 - protein, 485 aa, Bacillus sp.
HHDGTNGTIMQYFEWNVPNDGQHWNRLHNSAQNLKNAGITAIWIPPAWKGTSQNDVGYGAYDLYDLGEFNQKGTVRTKYGTKAELERAIRSLKANGIQVYGDVVMNHKGGADFTERVQAVEVNPQNRNQEVSGTYQIEAWTGFNFPGRGNQHSSFKWRWYHFDGTDWDQSRQLANRIYKFRGDGKAWDWEVDTENGNYDYLMYADVDMDHPEVINELNRWGVWYANTLNLDGFRLDAVKHIKFSFMRDWLGHVRGQTGKNLFAVAEYWKNDLGALENYLSKTNWTMSAFDVPLHYNLYQASNSSGNYDMRNLLNGTLVQRHPSHAVTFVDNHDTQPGEALESFVQGWFKPLAYATILTREQGYPQVFYGDYYGIPSDGVPSYRQQIDPLLKARQQYAYGRQHDYFDHWDVIGWTREGNASHPNSGLATIMSDGPGGSKWMYVGRQKAGEVWHDMTGNRSGTVTINQDGWGHFFVNGGSVSVWVKR

SEQ ID NO: 30706 - protein, 485 aa, Bacillus sp.
HHDGTNGTIMQYFEWNVPNDGQHWNRLHNNAQNLKNAGITAIWIPPAWKGTSQNDVGYGAYDLYDLGEFNQKGTVRTKYGTKAELERAIRSLKANGIQVYGDVVMNHKGGADFTERVQAVEVNPQNRNQEVSGTYQIEAWTGFNFPGRGNQHSSFKWRWYHFDGTDWDQSRQLANRIYKFRGDGKAWDWEVDTENGNYDYLMYADVDMDHPEVINELNRWGVWYANTLNLDGFRLDAVKHIKFSFMRDWLGHVRGQTGKNLFAVAEYWKNDLGALENYLSKTNWTMSAFDVPLHYNLYQASNSSGNYDMRNLLNGTLVQRHPSHAVTFVDNHDTQPGEALESFVQGWFKPLAYATILTREQGYPQVFYGDYYGIPSDGVPSYRQQIDPLLKARQQYAYGRQHDYFDHWDVIGWTREGNASHPNSGLATIMSDGPGGSKWMYVGRQKAGEVWHDMTGNRSGTVTINCDGWGHFFVNGGSVSVWVKR

SEQ ID NO: 30707 - protein, 485 aa, Bacillus sp.
HHDGTNGTIMQYFEWNVPNDGQHWNRLHNNAQNLKNAGITAIWIPPAWKGTSQNDVGYGAYDLYDLGEFNQKGTVRTKYGTKAELERAIRSLKANGIQVYGDVVMNHKGGADFTERVQAVEVNPQNRNQEVSGTYQIEAWTGFNFPGRGNQHSSFKWRWYHFDGTDWDQSRQLANRIYKFRGDGKAWDWEVDTENGNYDYLMYADVDMDHPEVINELNRWGVWYANTLNLDGFRLDAVKHIKFSFMRDWLGHVRGQTGKNLFAVAEYWKNDLGALENYLSKTNWTMSAFDVPLHYNLYQASNSSGNYDMRNLLNGTLVQRHPSHAVTFVDNHDTQPGEALESFVQGWFKPLAYATILTREQGYPQVFYGDYYGIPSDGVPSYRQQIDPLLKARQQYAYGRQHDYFDHWDVIGWTREGNASHPNSGLATIMSDGPGGSKWMYVGRQKAGEVWHDMTGNRSGTVTINQDGWGHFYVNGGSVSVWVKR

SEQ ID NO: 30708 - protein, 485 aa, Bacillus sp.
HHDGTNGTIMQYFEWNVPNDGQHWNRLHNNAQNLKNAGITAIWIPPAWKGTSQNDVGYGAYDLYDLGEFNQKGTVRTKYGTKAELERAIRSLKANGIQVYGDVVMNHKGGADFTERVQAVEVNPQNRNQEVSGTYQIEAWTGFNFPGRGNQHSSFKWRWYHFDGTDWDQSRQLANRIYKFRGDGKAWDWEVDTENGNYDYLMYADVDMDHPEVINELNRWGVWYANTLNLDGFRLDAVKHIKFSFLRDWLGHVRGQTGKNLFAVAEYWKNDLGALENYLSKTNWTMSAFDVPLHYNLYQASNSSGNYDMRNLLNGTLVQRHPSHAVTFVDNHDTQPGEALESFVQGWFKPLAYATILTREQGYPQVFYGDYYGIPSDGVPSYRQQIDPLLKARQQYAYGRQHDYFDHWDVIGWTREGNASHPNSGLATIMSDGPGGSKWMYVGRQKAGEVWHDMTGNRSGTVTINQDGWGHFFVNGGSVSVWVKR

SEQ ID NO: 30709 - protein, 485 aa, Bacillus sp.
HHDGTNGTIMQYFEWNVPNDGQHWNRLHNNAQNLKNAGITAIWIPPAWKGTSQNDVGYGAYDLYDLGEFNQKGTVRTKYGTKAELERAIRSLKANGIQVYGDVVMNHKGGADFTERVQAVEVNPQNRNQEVSGTYQIEAWTGFNFPGRGNQHSSFKWRWYHFDGGDWDQSRQLANRIYKFRGDGKAWDWEVDTENGNYDYLMYADVDMDHPEVINELNRWGVWYANTLNLDGFRLDAVKHIKFSFMRDWLGHVRGQTGKNLFAVAEYWKNDLGALENYLSKTNWTMSAFDVPLHYNLYQASNSSGNYDMRNLLNGTLVQRHPSHAVTFVDNHDTQPGEALESFVQGWFKPLAYATILTREQGYPQVFYGDYYGIPSDGVPSYRQQIDPLLKARQQYAYGRQHDYFDHWDVIGWTREGNASHPNSGLATIMSDGPGGSKWMYVGRQKAGEVWHDMTGNRSGTVTINQDGWGHFFVNGGSVSVWVKR

SEQ ID NO: 30710 - protein, 485 aa, Bacillus sp.
HHDGTNGTIMQYFEWNVPNDGQHWNRLHNNAQNLKNAGITAIWIPPAWKGTSQNDVGYGAYDLYDLGEFNQKGTVRTKYGTKAELERAIRSLKANGIQVYGDVVMNHKGGADFTERVQAVEVNPQNRNQEVSGTYQIEAWTGFMFPGRGNQHSSFKWRWYHFDGTDWDQSRQLANRIYKFRGDGKAWDWEVDTENGNYDYLMYADVDMDHPEVINELNRWGVWYANTLNLDGFRLDAVKHIKFSFMRDWLGHVRGQTGKNLFAVAEYWKNDLGALENYLSKTNWTMSAFDVPLHYNLYQASNSSGNYDMRNLLNGTLVQRHPSHAVTFVDNHDTQPGEALESFVQGWFKPLAYATILTREQGYPQVFYGDYYGIPSDGVPSYRQQIDPLLKARQQYAYGRQHDYFDHWDVIGWTREGNASHPNSGLATIMSDGPGGSKWMYVGRQKAGEVWHDMTGNRSGTVTINQDGWGHFFVNGGSVSVWVKR

SEQ ID NO: 30711 - protein, 485 aa, Bacillus sp.
HHDGTNGTIMQYFEWNVPNDGQHWNRLHNNAQNLKNAGITAIWIPPAWKGTSQNDVGYGAYDLYDLGEFNQKGTVRTKYGTKAELERAIRSLKANGIQVYGDVVMNHKGGADFTERVQAVEVNPQNRNQEVSGTYQIEAWTGFNFPGRGNQHSSFKWRWYHFDGTDWDQSRQLANRIYKFRGDGKAWDWEVDTENGNYDYLMYADVDMDHPEVINELNRWGVWYANTLNLDGFRLDAVKHIKFSFMRDWLGHVRGQTGKNLFAVAEYWKNDLGALENYLSKTNWTMSAFDVPLHYNLYQASNSSGNYDMRNLLNGTLVQAHPSHAVTFVDNHDTQPGEALESFVQGWFKPLAYATILTREQGYPQVFYGDYYGIPSDGVPSYRQQIDPLLKARQQYAYGRQHDYFDHWDVIGWTREGNASHPNSGLATIMSDGPGGSKWMYVGRQKAGEVWHDMTGNRSGTVTINQDGWGHFFVNGGSVSVWVKR

SEQ ID NO: 30712 - protein, 485 aa, Bacillus sp.
HHDGTNGTIMQYFEWNVPNDGQHWNRLHNTAQNLKNAGITAIWIPPAWKGTSQNDVGYGAYDLYDLGEFNQKGTVRTKYGTKAELERAIRSLKANGIQVYGDVVMNHKGGADFTERVQAVEVNPQNRNQEVSGTYQIEAWTGFNFPGRGNQHSSFKWRWYHFDGTDWDQSRQLANRIYKFRGDGKAWDWEVDTENGNYDYLMYADVDMDHPEVINELNRWGVWYANTLNLDGFRLDAVKHIKFSFMRDWLGHVRGQTGKNLFAVAEYWKNDLGALENYLSKTNWTMSAFDVPLHYNLYQASNSSGNYDMRNLLNGTLVQRHPSHAVTFVDNHDTQPGEALESFVQGWFKPLAYATILTREQGYPQVFYGDYYGIPSDGVPSYRQQIDPLLKARQQYAYGRQHDYFDHWDVIGWTREGNASHPNSGLATIMSDGPGGSKWMYVGRQKAGEVWHDMTGNRSGTVTINQDGWGHFFVNGGSVSVWVKR

SEQ ID NO: 30713 - protein, 485 aa, Bacillus sp.
HHDGTNGTIMQYFEWNVPNDGQHWNRLHNNAQNLKNAGITAIWIPPAWKGTSQNDVGYGAYDLYDLGEFNQKGTVRTKYGTKAELERAIRSLKANGIQVYGDVVMNHKGGADFTERVQAVEVNPQNRNQEVSGTYQIEAWTGFNFPGRGNQHSSFKWRWYHFDGTDWDQSRQLANRIYKFRGDGKAWDWEVDTENGNYDYLMYADVDMDHPEVINELNRWGVWYANTLNLDGFRLDAVKHIKFSFMRDWLGHVRGQTGKNLFAVAEYWKNDLGALENYLSKTNWTMSAFDVPLHYNLYQASNSSGNYDMRNLLNGTLVQRHPSHAVTFVDNHDTQPGEALESFVQGWFKPLAYATILTREQGYPQVFYGDYYGIPSDGVPSYRQQIDPLLKARQQYAYGRQHDYFDHWDVIGWTREGNASHPNSGLATIMSDGPGGSKWMYVGRQKAGEVWHDMTGNRSGTVTINQDGWGHFRVNGGSVSVWVKR

SEQ ID NO: 30714 - protein, 485 aa, Bacillus sp.
HHDGTNGTIMQYFEWNVPNDGQHWNRLHNNAQNLKNAGITAIWIPPAWKGTSQNDVGYGAYDLYDLGEFNQKGTVRTKYGTKAELERAIRSLKANGIQVYGDVVMNHKGGADFTEEVQAVEVNPQNRNQEVSGTYQIEAWTGFNFPGRGNQHSSFKWRWYHFDGTDWDQSRQLANRIYKFRGDGKAWDWEVDTENGNYDYLMYADVDMDHPEVINELNRWGVWYANTLNLDGFRLDAVKHIKFSFMRDWLGHVRGQTGKNLFAVAEYWKNDLGALENYLSKTNWTMSAFDVPLHYNLYQASNSSGNYDMRNLLNGTLVQRHPSHAVTFVDNHDTQPGEALESFVQGWFKPLAYATILTREQGYPQVFYGDYYGIPSDGVPSYRQQIDPLLKARQQYAYGRQHDYFDHWDVIGWTREGNASHPNSGLATIMSDGPGGSKWMYVGRQKAGEVWHDMTGNRSGTVTINQDGWGHFFVNGGSVSVWVKR

SEQ ID NO: 30715 - protein, 485 aa, Bacillus sp.
HHDGTNGTIMQYFEWNVPNDGQHWNRLHNNAQNLKNAGITAIWIPPAWKGTSQNDVGYGAYDLYDLGEFNQKGTVRTKYGTKAELERAIRSLKANGIQVYGDVVMNHKGGADFTERVQAVEVNPQNRNQEVSGTYQIEAWTGFNFPGRGNQHSSFKWRWYHFDGTDWDQSRQLANRIYKFRGDGKAWDWEVDTENGNYDYLMYADVDMDHPEVINELNRWGVWYANTLNLDGFRLDAVKHIKFSFMRDWLGHVRGQTGKNLFAVAEYWKNDLGALENYLSKTNWTMSAFDVPLHYNLYQASNSSGNYDMRNLLNGTLVQRHPSHAVTFVDNHDTQPGEALESFVQGWFKPLAYATILTREQGYPQVFYGDYYGIPSDGVPSYRQQIDPLLKARQQYAYGRQHDYFDHWDVIGWTREGNASHPNSGLATIMSDGPGGSKWMYVGRQKAGEVWHDMTGNRSGTVTINQDGWGHFFVNGGSVSVWVKR

SEQ ID NO: 30716 - protein, 485 aa, Bacillus sp.
HHDGTNGTIMQYFEWNVPNDGQHWNRLHNNAQNLKNAGITAIWIPPAWKGTSQNDVGYGAYDLYDLGEFNQKGTVRTKYGTKAELERAIRSLKANGIQVYGDVVMNHKGGADFTERVQAVEVNPQNRNQEVSGTYQIEAWTGFNFPGRGNQHSSFKWRWYHFDGTDWDQSRQNANRIYKFRGDGKAWDWEVDTENGNYDYLMYADVDMDHPEVINELNRWGVWYANTLNLDGFRLDAVKHIKFSFMRDWLGHVRGQTGKNLFAVAEYWKNDLGALENYLSKTNWTMSAFDVPLHYNLYQASNSSGNYDMRNLLNGTLVQRHPSHAVTFVDNHDTQPGEALESFVQGWFKPLAYATILTREQGYPQVFYGDYYGIPSDGVPSYRQQIDPLLKARQQYAYGRQHDYFDHWDVIGWTREGNASHPNSGLATIMSDGPGGSKWMYVGRQKAGEVWHDMTGNRSGTVTINQDGWGHFFVNGGSVSVWVKR

SEQ ID NO: 30717 - protein, 485 aa, Bacillus sp.
HHDGTNGTIMQYFEWNVPNDGQHWNRLHNNAQNLKNAGITAIWIPPAWKGTSQNDVGYGAYDLYDLGEFNQKGTVRTKYGTKAELERAIRSLKANGIQVYGDVVMNHKGGADFTERVQAVEVNPQNRNQEVSGVYQIEAWTGFNFPGRGNQHSSFKWRWYHFDGTDWDQSRQLANRIYKFRGDGKAWDWEVDTENGNYDYLMYADVDMDHPEVINELNRWGVWYANTLNLDGFRLDAVKHIKFSFMRDWLGHVRGQTGKNLFAVAEYWKNDLGALENYLSKTNWTMSAFDVPLHYNLYQASNSSGNYDMRNLLNGTLVQRHPSHAVTFVDNHDTQPGEALESFVQGWFKPLAYATILTREQGYPQVFYGDYYGIPSDGVPSYRQQIDPLLKARQQYAYGRQHDYFDHWDVIGWTREGNASHPNSGLATIMSDGPGGSKWMYVGRQKAGEVWHDMTGNRSGTVTINQDGWGHFFVNGGSVSVWVKR

SEQ ID NO: 30718 - protein, 483 aa, Bacillus sp. (in: firmicutes)
HHDGTNGTMMQYFEWNVPNDGQHWNRLHNNAQNLKNAGITAIWIPPAWKGTSQNDVGYGAYDLYDLGEFNQKGTVRTKYGTKAELERAIRSLKANGIQVYGDVVMNHKGGADFTERVQAVEVNPQNRNQEVSGTYQIEAWTGFNFPGRGNQHSSFKWRWYHFDGTDWDQSRQLANRIYKFRGKHWDWEVDTEFGNYDYLMYADVDMDHPEVINELNRWGVWYANTLNLDGFRLDAVKHIKFSFMRDWLGHVRGQTGKNLFAVAEYWKNDLGALENYLSKTNWTMSAFDVPLHYNLYQASNSSGNYDMRNLLNGTLVQRHPSHAVTFVDNHDTQPGEALESFVQGWFKPLAYATILTREQGYPSVFYGDYYGIPSDGVPSYRQQIDPLLKARQQYAYGRQHDYFDHWDVIGWTREGNASHPNSGLATIMSDGPGGSKWMYVGRQKAGEVWHDMTGNRSGTVTINQDGWGHFFVNGGSVSVWVKR

SEQ ID NO: 30719 - protein, 483 aa, Bacillus sp. (in: firmicutes)
HHDGTNGTIMQYFEWNVPNDGQHWNRLHNNAQNLKNAGITAIWIPPAWKGTSQNDVGYGAYDLYDLGEFNQKGTVRTKYGTKAELERAIRSLKANGIQVYGDVVMNHKGGADFTERVQAVEVNPQNRNQEVSGTYQIEAWTGFNFPGRGNQHSSFKWRWYHFDGTDWDQSRQLANRIYKFRGKAWDWEVDTENGNYDYLMYADVDMDHPEVINELNRWGVWYANTLNLDGFRLDAVKHIKFSFMRDWLGHVRGQTGKNLFAVAEYWKNDLGALENYLSKTNWTMSAFDVPLHYNLYQASNSSGNYDMRNLLNGTLVQRHPSHAVTLVDNHDTQPGEALESFVQGWFKPLAYATILTREQGYPSVFYGDYYGIPSDGVPSYRQQIDPLLKARQQYAYGRQHDYFDHWDVIGWTREGNASHPNSGLATIMSDGPGGSKWMYVGRQKAGEVWHDMTGNRSGTVTINQDGWGHFFVNGGSVSVWVKR

SEQ ID NO: 30720 - protein, 485 aa, Bacillus sp.
HHDGTNGTIMQYFEWNVPNDGQHWNRLHNNAQNLKNAGITAIWIPPAWKGTSQNDVGYGAYDLYDLGEFNQKGTVRTKYGTKAELERAIRSLKANGIQVYGDVVMNHKGGADFTERVQAVEVNPQNRNQEVSGTYQIEAWTGFNFPGRGNQHSSFKWRWYHFDGTDWDQSRQLANRIYKFRGDGKAWDWEVDTENGNYDYLMYADVDMDHPEVINELNRWGVWYANTLNLDGFRLDAVKHIKFSFMRDWLGHVRGQTGKNLFAVAEYWKNDLGALENYLSKTNWTMSAFDVPLHYNLYQASNSSGNYDMRNLLNGTLVQRHPSHAVTFVDNHDTQPGEALESFVQGWFKPLAYATILTREQGYPQVFYGDYYGIPSDGVPSYRQQIDPLLKARQKYAYGRQHDYFDHWDVIGWTREGNASHPNSGLATIMSDGPGGSKWMYVGRQKAGEVWHDMTGNRSGTVTINQDGWGHFFVNGGSVSVWVKR

SEQ ID NO: 30721 - protein, 485 aa, Bacillus sp.
HHDGTNGTIMQYFEWNVPNDGSHWNRLHNNAQNLKNAGITAIWIPPAWKGTSQNDVGYGAYDLYDLGEFNQKGTVRTKYGTKAELERAIRSLKANGIQVYGDVVMNHKGGADFTERVQAVEVNPQNRNQEVSGTYQIEAWTGFNFPGRGNQHSSFKWRWYHFDGTDWDQSRQLANRIYKFRGDGKAWDWEVDTENGNYDYLMYADVDMDHPEVINELNRWGVWYANTLNLDGFRLDAVKHIKFSFMRDWLGHVRGQTGKNLFAVAEYWKNDLGALENYLSKTNWTMSAFDVPLHYNLYQASNSSGNYDMRNLLNGTLVQRHPSHAVTFVDNHDTQPGEALESFVQGWFKPLAYATILTREQGYPQVFYGDYYGIPSDGVPSYRQQIDPLLKARQQYAYGRQHDYFDHWDVIGWTREGNASHPNSGLATIMSDGPGGSKWMYVGRQKAGEVWHDMTGNRSGTVTINQDGWGHFFVNGGSVSVWVKR

SEQ ID NO: 30722 - protein, 485 aa, Bacillus sp.
HHDGTNGTIMQYFEWNVPNDGQHWNRLHNNAQNLKNAGITAIWIPPAWKGTSQNDVGYGAYDLYDLGEFNQKGTVRTKYGTKAELERAIRSLKANGIQVYGDVVMNHKGGADFTERVQAVEVNPQNRNQEVSGTYQIEAWTGFNFPGRGNQHSSFKWRWYHFDGTDWDQSRQLANRIYKFRGDGKAWDWEVDTENGNYDYLMYADVDMDHPEVINELNRWGVWYANTLNLDGFRLDAVKHIKFSFMRDWLGHVRGQTGKNLFAVAEYWKNDLGALENYLSKTNWTMSAFDVPLHYNLYQASNSSGNYDMRNLLNGTLVQRHPSHAVTFVDNHDTQPGEALESFVQGWFKPLAYATILTREQGYPQVFYGDYYGIPSDGVPSRRQQIDPLLKARQQYAYGRQHDYFDHWDVIGWTREGNASHPNSGLATIMSDGPGGSKWMYVGRQKAGEVWHDMTGNRSGTVTINQDGWGHFFVNGGSVSVWVKR

SEQ ID NO: 30723 - protein, 485 aa, Bacillus sp.
HHDGTNGTIMQYFEWNVPNDGQHWNRLHNNAQNLKNAGITAIWIPPAWKGTSQNDVGYGAYDLYDLGEFNQKGTVRTKYGTKAELERAIRSLKANGIQVYGDVVMNHKGGADFTERVQAVEVNPQNRNQEVSGTYQIEAWTGFNFPGRGNQHSSFKWRWYHFDGTDWDQSRQLANRIYKFRGDGKAWDWEVDTENGNYDYLMYADVDMDHPEVINELLRWGVWYANTLNLDGFRLDAVKHIKFSFMRDWLGHVRGQTGKNLFAVAEYWKNDLGALENYLSKTNWTMSAFDVPLHYNLYQASNSSGNYDMRNLLNGTLVQRHPSHAVTFVDNHDTQPGEALESFVQGWFKPLAYATILTREQGYPQVFYGDYYGIPSDGVPSYRQQIDPLLKARQQYAYGRQHDYFDHWDVIGWTREGNASHPNSGLATIMSDGPGGSKWMYVGRQKAGEVWHDMTGNRSGTVTINQDGWGHFFVNGGSVSVWVKR

SEQ ID NO: 30724 - protein, 485 aa, Bacillus sp.
HHDGTNGTIMQYFEWNVPNDGQHWNRLHNNAQNLKNAGITAIWIPPAWKGTSQNDVGYGAYDLYDLGEFNQKGTVRTKYGTKAELERAIRSLKANGIQVYGDVVMNHKGGADFTERVQAVEVNPQNRNQEVSGTYQIEAWTGFNFPGRGNQHSSFKWRWYHFDGTDWDQSRQLANRIYKFRGDGKAWDWEVDTENGNYDYLMYADVDMDHPEVINELNRWGVWYANTLNLDGFRLDAVKHIKFSFMRDWLGHVRGQTGKNLFAVAEYWKNDLGALENYLSKTNWTMSAFDVPLHYNLYQASNSSGNYDMRNLLNGTLVQRHPSHAVTFVDNHDTQPGEALESFVQGWFKPLAYATILTREQGYPQVFYGDYYGIPSDGVPSYRQQIDPLLKARQQYAYGRQHDYFDHWDVIGWTREGNMSHPNSGLATIMSDGPGGSKWMYVGRQKAGEVWHDMTGNRSGTVTINQDGWGHFFVNGGSVSVWVKR

SEQ ID NO: 30725 - protein, 485 aa, Bacillus sp.
HHDGTNGTIMQYFEWNVPNDGQHWNRLHNNAQNLKNAGITAIWIPPAWKGTSQNDVGYGAYDLYDLGEFNQKGTVRTKYGTKAELERAIRSLKANGIQVYGDVVMNHKGGADFTERVQAVEVNPQNRNQEVSGTYQIEAWTGFNFPGRGNQHSSFKWRWYHFDGTDWDQSRQLANRIYKFRGDGKAWDWEVDTENGNYDYLMYADVDMDHPEVINELNRWGVWYANTLNLDGFRLDAVKHIKFSFMRDWLQHVRGQTGKNLFAVAEYWKNDLGALENYLSKTNWTMSAFDVPLHYNLYQASNSSGNYDMRNLLNGTLVQRHPSHAVTFVDNHDTQPGEALESFVQGWFKPLAYATILTREQGYPQVFYGDYYGIPSDGVPSYRQQIDPLLKARQQYAYGRQHDYFDHWDVIGWTREGNASHPNSGLATIMSDGPGGSKWMYVGRQKAGEVWHDMTGNRSGTVTINQDGWGHFFVNGGSVSVWVKR

SEQ ID NO: 30726 - protein, 485 aa, Bacillus sp.
HHDGTNGTIMQYFEWNVPNDGQHWNRLHNNAQNLKNAGITAIWIPPAWKGTSQNDVGYGAYDLYDLGEFNQKGTVRTKYGTKAELERAIRSLKANGIQVYGDVVMNHKGGADFTERVQAVEVNPQNRNQEVSGTYQIEAWTGFNFPGRGNQHSSFKWRWYHFDGTDWDQSRQLANRIYKFRGDGKAWDWEVDTENGNYDYLMYADVDMDHPEVINELNRWGVWYANTLNLDGFRLDAVKHIKFSFMRDWLGHVRGQTGKNLFAVAEYWKNDLGALENYLSKTNWTMSAFDVPLHYNLYQASNSSGNYDMRNLLNGTLVQRHPSHAVTFVDNHDTQPGEALESFVQGWFKPLAYATILTREQGYPQVFYGDYYGIPLDGVPSYRQQIDPLLKARQQYAYGRQHDYFDHWDVIGWTREGNASHPNSGLATIMSDGPGGSKWMYVGRQKAGEVWHDMTGNRSGTVTINQDGWGHFFVNGGSVSVWVKR

SEQ ID NO: 30727 - protein, 485 aa, Bacillus sp.
HHDGTNGTIMQYFEWNVPNDGQHWNRLHNNAQNLKNAGITAIWIPPAWKGTSQNDVGYGAYDLYDLGEFNQKGTVRTKYGTKAELERAIRSLKANGIQVYGDVVMNHKGGADFTERVQAVEVNPQNRNQEVSGTYQIEAWTGFNFPGRGNQHSSFKWRWYHFDGTDWDQSRQLANRIYKFRGDGKAWDWEVDTENGNYDYLMYADVDMDHPEVINELNRWGVWYANTLNLDGFRLDAVKHIKFSFMRDWLGHVRGQTGKNLFAVAEYWKNDLGALENYLSKTNWTMSAFDVPLHYNLYQASNSSGNYDMRNLLNGTLVQRHPSHAVTFVDNHDTQPGEALESFVQGWFKPLAYATILTREQGYPQVFYGDYYGIPSDGVPSYRQQIDPLLKARQQYAYGRQHDYFDHWDVIGWTREGNASHPNSGLATIMSDGPGGSKWMYVGRQKAGEVWHDMTGNRSGTVTINEDGWGHFFVNGGSVSVWVKR

SEQ ID NO: 30728 - protein, 485 aa, Bacillus sp.
HHDGTNGTIMQYFEWNVPNDGQHWNRLHNNAQNLKNAGITAIWIPPAWKGTSQNDVGYGAYDLYDLGEFNQKGTVRTKYGTKAELERAIRSLKANGIQVYGDVVMNHKGGADFTERVQAVEVNPQNRNQEVSGTYQIEAWTGFNFPGRGNQHSSFKWRWYHFDGTDWDQSRQLANRIYKFRGDGKAWDWEVDTENGNYDYLMYADVDMDHPEVINELNRWGVWYANTLNLDGFRLDAVKHIKFSFMRDWLGHVRGQTGKNLFAVAEYWKNDLGALENYLSKTNWPMSAFDVPLHYNLYQASNSSGNYDMRNLLNGTLVQRHPSHAVTFVDNHDTQPGEALESFVQGWFKPLAYATILTREQGYPQVFYGDYYGIPSDGVPSYRQQIDPLLKARQQYAYGRQHDYFDHWDVIGWTREGNASHPNSGLATIMSDGPGGSKWMYVGRQKAGEVWHDMTGNRSGTVTINQDGWGHFFVNGGSVSVWVKR

SEQ ID NO: 30729 - protein, 485 aa, Bacillus sp.
HHDGTNGTIMQYFEWNVPNDGCHWNRLHNNAQNLKNAGITAIWIPPAWKGTSQNDVGYGAYDLYDLGEFNQKGTVRTKYGTKAELERAIRSLKANGIQVYGDVVMNHKGGADFTERVQAVEVNPQNRNQEVSGTYQIEAWTGFNFPGRGNQHSSFKWRWYHFDGTDWDQSRQLANRIYKFRGDGKAWDWEVDTENGNYDYLMYADVDMDHPEVINELNRWGVWYANTLNLDGFRLDAVKHIKFSFMRDWLGHVRGQTGKNLFAVAEYWKNDLGALENYLSKTNWTMSAFDVPLHYNLYQASNSSGNYDMRNLLNGTLVQRHPSHAVTFVDNHDTQPGEALESFVQGWFKPLAYATILTREQGYPQVFYGDYYGIPSDGVPSYRQQIDPLLKARQQYAYGRQHDYFDHWDVIGWTREGNASHPNSGLATIMSDGPGGSKWMYVGRQKAGEVWHDMTGNRSGTVTINQDGWGHFFVNGGSVSVWVKR

SEQ ID NO: 30730 - protein, 485 aa, Bacillus sp.
HHDGTNGTIMQYFEWNVPNDGQHWNRLHNNAQNLKNAGITAIWIPPAWKGTSQNDVGYGAYDLYDLGEFNQKGTVRTKYGTKAELERAIRSLKANGIQVYGDVVMNHKGGADFTERVQAVEVNPQNRNQEVSGTYQIEAWTGFNFPGRGNQHSSFKWRWYHFDGTDWDQSRQYANRIYKFRGDGKAWDWEVDTENGNYDYLMYADVDMDHPEVINELNRWGVWYANTLNLDGFRLDAVKHIKFSFMRDWLGHVRGQTGKNLFAVAEYWKNDLGALENYLSKTNWTMSAFDVPLHYNLYQASNSSGNYDMRNLLNGTLVQRHPSHAVTFVDNHDTQPGEALESFVQGWFKPLAYATILTREQGYPQVFYGDYYGIPSDGVPSYRQQIDPLLKARQQYAYGRQHDYFDHWDVIGWTREGNASHPNSGLATIMSDGPGGSKWMYVGRQKAGEVWHDMTGNRSGTVTINQDGWGHFFVNGGSVSVWVKR

SEQ ID NO: 30731 - protein, 485 aa, Bacillus sp.
HHDGTNGTIMQYFEWNVPNDGQHWNRLHWNAQNLKNAGITAIWIPPAWKGTSQNDVGYGAYDLYDLGEFNQKGTVRTKYGTKAELERAIRSLKANGIQVYGDVVMNHKGGADFTERVQAVEVNPQNRNQEVSGTYQIEAWTGFNFPGRGNQHSSFKWRWYHFDGTDWDQSRQLANRIYKFRGDGKAWDWEVDTENGNYDYLMYADVDMDHPEVINELNRWGVWYANTLNLDGFRLDAVKHIKFSFMRDWLGHVRGQTGKNLFAVAEYWKNDLGALENYLSKTNWTMSAFDVPLHYNLYQASNSSGNYDMRNLLNGTLVQRHPSHAVTFVDNHDTQPGEALESFVQGWFKPLAYATILTREQGYPQVFYGDYYGIPSDGVPSYRQQIDPLLKARQQYAYGRQHDYFDHWDVIGWTREGNASHPNSGLATIMSDGPGGSKWMYVGRQKAGEVWHDMTGNRSGTVTINQDGWGHFFVNGGSVSVWVKR

SEQ ID NO: 30732 - protein, 485 aa, Bacillus sp.
HHDGTNGTIMQYFEWNVPNDGQHWNRLHNNAQNLKNAGITAIWIPPAWKGTSQNDVGYGAYDLYDLGEFNQKGTVRTKYGTKAWLERAIRSLKANGIQVYGDVVMNHKGGADFTERVQAVEVNPQNRNQEVSGTYQIEAWTGFNFPGRGNQHSSFKWRWYHFDGTDWDQSRQLANRIYKFRGDGKAWDWEVDTENGNYDYLMYADVDMDHPEVINELNRWGVWYANTLNLDGFRLDAVKHIKFSFMRDWLGHVRGQTGKNLFAVAEYWKNDLGALENYLSKTNWTMSAFDVPLHYNLYQASNSSGNYDMRNLLNGTLVQRHPSHAVTFVDNHDTQPGEALESFVQGWFKPLAYATILTREQGYPQVFYGDYYGIPSDGVPSYRQQIDPLLKARQQYAYGRQHDYFDHWDVIGWTREGNASHPNSGLATIMSDGPGGSKWMYVGRQKAGEVWHDMTGNRSGTVTINQDGWGHFFVNGGSVSVWVKR

SEQ ID NO: 30733 - protein, 485 aa, Bacillus sp.
HHRGTNGTIMQYFEWNVPNDGQHWNRLHNNAQNLKNAGITAIWIPPAWKGTSQNDVGYGAYDLYDLGEFNQKGTVRTKYGTKAELERAIRSLKANGIQVYGDVVMNHKGGADFTERVQAVEVNPQNRNQEVSGTYQIEAWTGFNFPGRGNQHSSFKWRWYHFDGTDWDQSRQLANRIYKFRGDGKAWDWEVDTENGNYDYLMYADVDMDHPEVINELNRWGVWYANTLNLDGFRLDAVKHIKFSFMRDWLGHVRGQTGKNLFAVAEYWKNDLGALENYLSKTNWTMSAFDVPLHYNLYQASNSSGNYDMRNLLNGTLVQRHPSHAVTFVDNHDTQPGEALESFVQGWFKPLAYATILTREQGYPQVFYGDYYGIPSDGVPSYRQQIDPLLKARQQYAYGRQHDYFDHWDVIGWTREGNASHPNSGLATIMSDGPGGSKWMYVGRQKAGEVWHDMTGNRSGTVTINQDGWGHFFVNGGSVSVWVKR

SEQ ID NO: 30734 - protein, 485 aa, Bacillus sp.
HHDGTNGTIMQYFEWNVPNDGQHWNRLHNNAQNLKNAGITAIWIPPAWKGTSQNDVGYGAYDLYDLGEFNQKGTVRTKYGTKAELERAIRSLKANGIQVYGDVVMNHKGGADFTERVQAVEVNPQNRNQEVSGTYQIEAWTGFNFPGRGNQHSSFKWRWYHFDGTDWDQSRQLANRIYKFRGDGKAWDWEVDTENGNYDYLMYADVDMDHPEVINELNRWGVWYANTLNLDGFRLDAVKHIKFSFMRDWLGHVRGQTGKNLFAVAEYWKNDLGALENYLSKTNWTMSAFDVPLHYNLYQASNSSGNYDMRNLLNGTLVQRHPSHAVTFVDNHDTQPGEALESFVQNWFKPLAYATILTREQGYPQVFYGDYYGIPSDGVPSYRQQIDPLLKARQQYAYGRQHDYFDHWDVIGWTREGNASHPNSGLATIMSDGPGGSKWMYVGRQKAGEVWHDMTGNRSGTVTINQDGWGHFFVNGGSVSVWVKR

SEQ ID NO: 30735 - protein, 485 aa, Bacillus sp.
HHDGTNGTIMQYFEWNVPNDGQHWNRLHNNAQNLKNAGITAIWIPPAWKGTSQNDVGYGAYDLYDLGEFNQKGTVRTKYGTKAELERAIRSLKANGIQVYGDVVMNHKGGADFTERVQAVEVNPQNRNQEVSGTYQIEAWTGFNFPGRGNQHSSFKWRWYHFDGTDWDQSRQLANRIYKFRGDGKAWDWEVDTENGNYDYLMYADVDMDHPEVINELNRWGVWYANTLNLDGFRLDAVKHIKFSFMRDWLGHVRGQTGKNLFAVAEYWKNDLGALENYLSKTNWTMSLFDVPLHYNLYQASNSSGNYDMRNLLNGTLVQRHPSHAVTFVDNHDTQPGEALESFVQGWFKPLAYATILTREQGYPQVFYGDYYGIPSDGVPSYRQQIDPLLKARQQYAYGRQHDYFDHWDVIGWTREGNASHPNSGLATIMSDGPGGSKWMYVGRQKAGEVWHDMTGNRSGTVTINQDGWGHFFVNGGSVSVWVKR

SEQ ID NO: 30736 - protein, 485 aa, Bacillus sp.
HHDGTNGTIMQYFEWNVPNDGQHWNRLHNNAQNLKNAGITAIWIPPAWKGTSQNDVGYGAYDLYDLGEFNQKGTVRTKYGTKAELERAIRSLKANGIQVYGDVVMNHKGGADFTERVGAVEVNPQNRNQEVSGTYQIEAWTGFNFPGRGNQHSSFKWRWYHFDGTDWDQSRQLANRIYKFRGDGKAWDWEVDTENGNYDYLMYADVDMDHPEVINELNRWGVWYANTLNLDGFRLDAVKHIKFSFMRDWLGHVRGQTGKNLFAVAEYWKNDLGALENYLSKTNWTMSAFDVPLHYNLYQASNSSGNYDMRNLLNGTLVQRHPSHAVTFVDNHDTQPGEALESFVQGWFKPLAYATILTREQGYPQVFYGDYYGIPSDGVPSYRQQIDPLLKARQQYAYGRQHDYFDHWDVIGWTREGNASHPNSGLATIMSDGPGGSKWMYVGRQKAGEVWHDMTGNRSGTVTINQDGWGHFFVNGGSVSVWVKR

SEQ ID NO: 30737 - protein, 485 aa, Bacillus sp.
HHDGTNGTIMQYFEWNVPNDGQHWNRLHKNAQNLKNAGITAIWIPPAWKGTSQNDVGYGAYDLYDLGEFNQKGTVRTKYGTKAELERAIRSLKANGIQVYGDVVMNHKGGADFTERVQAVEVNPQNRNQEVSGTYQIEAWTGFNFPGRGNQHSSFKWRWYHFDGTDWDQSRQLANRIYKFRGDGKAWDWEVDTENGNYDYLMYADVDMDHPEVINELNRWGVWYANTLNLDGFRLDAVKHIKFSFMRDWLGHVRGQTGKNLFAVAEYWKNDLGALENYLSKTNWTMSAFDVPLHYNLYQASNSSGNYDMRNLLNGTLVQRHPSHAVTFVDNHDTQPGEALESFVQGWFKPLAYATILTREQGYPQVFYGDYYGIPSDGVPSYRQQIDPLLKARQQYAYGRQHDYFDHWDVIGWTREGNASHPNSGLATIMSDGPGGSKWMYVGRQKAGEVWHDMTGNRSGTVTINQDGWGHFFVNGGSVSVWVKR

SEQ ID NO: 30738 - protein, 485 aa, Bacillus sp.
HHDGTNGTIMQYFEWNVPNDGQHWNRLHNNAQNLKNAGITAIWIPPAWKGTSQNDVGYGAYDLYDLGEFNQKGTVRTKYGTKAELERAIRSLKANGIQVYGDVVMNHKGGADFTERVQAVEVNPQNRNQEVSGTYQIEAWTGFNFPGRGNQHSMFKWRWYHFDGTDWDQSRQLANRIYKFRGDGKAWDWEVDTENGNYDYLMYADVDMDHPEVINELNRWGVWYANTLNLDGFRLDAVKHIKFSFMRDWLGHVRGQTGKNLFAVAEYWKNDLGALENYLSKTNWTMSAFDVPLHYNLYQASNSSGNYDMRNLLNGTLVQRHPSHAVTFVDNHDTQPGEALESFVQGWFKPLAYATILTREQGYPQVFYGDYYGIPSDGVPSYRQQIDPLLKARQQYAYGRQHDYFDHWDVIGWTREGNASHPNSGLATIMSDGPGGSKWMYVGRQKAGEVWHDMTGNRSGTVTINQDGWGHFFVNGGSVSVWVKR

SEQ ID NO: 30739 - protein, 485 aa, Bacillus sp.
HHDGTNGTIMQYFEWNVPNDGQHWNRLHNNAQNLKNAGITAIWIPPAWKGTSQNDVGYGAYDLYDLGEFNQKGTVRTKYGTKAELERAIRELKANGIQVYGDVVMNHKGGADFTERVQAVEVNPQNRNQEVSGTYQIEAWTGFNFPGRGNQHSSFKWRWYHFDGTDWDQSRQLANRIYKFRGDGKAWDWEVDTENGNYDYLMYADVDMDHPEVINELNRWGVWYANTLNLDGFRLDAVKHIKFSFMRDWLGHVRGQTGKNLFAVAEYWKNDLGALENYLSKTNWTMSAFDVPLHYNLYQASNSSGNYDMRNLLNGTLVQRHPSHAVTFVDNHDTQPGEALESFVQGWFKPLAYATILTREQGYPQVFYGDYYGIPSDGVPSYRQQIDPLLKARQQYAYGRQHDYFDHWDVIGWTREGNASHPNSGLATIMSDGPGGSKWMYVGRQKAGEVWHDMTGNRSGTVTINQDGWGHFFVNGGSVSVWVKR

SEQ ID NO: 30740 - protein, 485 aa, Bacillus sp.
HHDGTNGTIMQYFEWNVPNDGQHWNRLINNAQNLKNAGITAIWIPPAWKGTSQNDVGYGAYDLYDLGEFNQKGTVRTKYGTKAELERAIRSLKANGIQVYGDVVMNHKGGADFTERVQAVEVNPQNRNQEVSGTYQIEAWTGFNFPGRGNQHSSFKWRWYHFDGTDWDQSRQLANRIYKFRGDGKAWDWEVDTENGNYDYLMYADVDMDHPEVINELNRWGVWYANTLNLDGFRLDAVKHIKFSFMRDWLGHVRGQTGKNLFAVAEYWKNDLGALENYLSKTNWTMSAFDVPLHYNLYQASNSSGNYDMRNLLNGTLVQRHPSHAVTFVDNHDTQPGEALESFVQGWFKPLAYATILTREQGYPQVFYGDYYGIPSDGVPSYRQQIDPLLKARQQYAYGRQHDYFDHWDVIGWTREGNASHPNSGLATIMSDGPGGSKWMYVGRQKAGEVWHDMTGNRSGTVTINQDGWGHFFVNGGSVSVWVKR

SEQ ID NO: 30741 - protein, 485 aa, Bacillus sp.
HHDGTNGTIMQYFEWNVPNDGQHWNRLHNNAQNLKNAGITAIWIPPAWKGTSQNDVGYGAYDLYDLGEFNQKGTVRTKYGTKAELERAIRSLKANGIQVYGDVVMNHKGGADFTERVQAVEVNPQNRNQEVSGTYQIEAWTGFNFPGRGNQHSSFKWRWYHFDGTDWDQSRQLANRIYKFRGDGKAWDWEVDTENGNYDYLMYADVDMDHPEVINELNRWGVWYANTLNLDGFRLDAVKHIKFSFMRDWLGHVRGQTGKNLFAVAEYWKNDLGALENYLSKTNWTMSAFDVPLHYNLYQASNSSGNYDMRNLLNGTLVQRHPSHAVTFVDNHDTQPGEALESFVQGWFKPLAYATILTREQGYPQVFYGDYYGIPSDGVPSYRQQIDPLLKARQQYAYGRQHDYFDHWDVIGWTREGNASHPNSGLATIMSDGPGGSKWMYVGRQKAGEVWHDLTGNRSGTVTINQDGWGHFFVNGGSVSVWVKR

SEQ ID NO: 30742 - protein, 485 aa, Bacillus sp.
HHDGTNGTIMQYFEWNVPNDGQHWNRLHNNAQNLKNAGITAIWIPPAWKGTSQNDVGYGAYDLYDLGEFNQKGTVRTKYGTKAELERAIRSLKANGIQVYGDVVMNHKGGADFTERVQAVEVNPQNRNQEVSGTYQIEAWTGFNFPGRGNQHSSFKWRWYHFDGTDWDQSRQLANRIYKFRGDGKAWDWEVDTENGNYDYLMYADVDMDHPEVINELNRWGVWYANTLNLDGFRLDAVKHIKFSFMRDWLGHVRGQTGKNTFAVAEYWKNDLGALENYLSKTNWTMSAFDVPLHYNLYQASNSSGNYDMRNLLNGTLVQRHPSHAVTFVDNHDTQPGEALESFVQGWFKPLAYATILTREQGYPQVFYGDYYGIPSDGVPSYRQQIDPLLKARQQYAYGRQHDYFDHWDVIGWTREGNASHPNSGLATIMSDGPGGSKWMYVGRQKAGEVWHDMTGNRSGTVTINQDGWGHFFVNGGSVSVWVKR

SEQ ID NO: 30743 - protein, 485 aa, Bacillus sp.
HHDGTNGTIMQYFEWNVPNDGQHWNRLHNNAQNLKNAGITAIWIPPAWKGTSQNDVGYGAYDLYDLGEFNQKGTVRTKYGTKAELERAIRSLKANGIQVYGDVVMNHKGGADFTERVQAVEVNPQNRNQEVSGTYQIEAWTGFNFPGRGNQHSSFKWRWYHFDGTDWDQSRQLANRIYKFRGDGKAWDWEVDTENGNYDYLMYADVDMDHPEVINELNRWGVWYANTLNLDGFRLDAVKHIKFSFMRDWLGHVRGQTGKNLFAVAEYWKNDLGALENYLSKTNWFMSAFDVPLHYNLYQASNSSGNYDMRNLLNGTLVQRHPSHAVTFVDNHDTQPGEALESFVQGWFKPLAYATILTREQGYPQVFYGDYYGIPSDGVPSYRQQIDPLLKARQQYAYGRQHDYFDHWDVIGWTREGNASHPNSGLATIMSDGPGGSKWMYVGRQKAGEVWHDMTGNRSGTVTINQDGWGHFFVNGGSVSVWVKR

SEQ ID NO: 30744 - protein, 485 aa, Bacillus sp.
HHDGTNGTIMQYFEWNVPNDGQHWNRLHNNAQNLKNAGITAIWIPPAWKGTSQNDVGYGAYDLYDLGEFNQKGTVRTKYGTKAELERAIRSLKANGIQVYGDVVMNHKGGADFTERVQAVEVNPQNRNQEVSGTYQIEAWTGFNFPGRGNQHSSFKWRWYHFDGTDWDQSRQLANRIYKFRGDGKAWDWEVDTENGNYDYLMYADVDMDHPEVINELNRWGVWYANTLNLDGFRLDAVKHIKFSFMRDWLGHVRGQTGKNLFAVAEYWKNDLGALENYLSKTNWTMSAFDVPLHYNLYIASNSSGNYDMRNLLNGTLVQRHPSHAVTFVDNHDTQPGEALESFVQGWFKPLAYATILTREQGYPQVFYGDYYGIPSDGVPSYRQQIDPLLKARQQYAYGRQHDYFDHWDVIGWTREGNASHPNSGLATIMSDGPGGSKWMYVGRQKAGEVWHDMTGNRSGTVTINQDGWGHFFVNGGSVSVWVKR

SEQ ID NO: 30745 - protein, 485 aa, Bacillus sp.
HHDGTNGTIMQYFEWNVPNDGQHWNRLHNNAQNLKNAGITAIWIPPAWKGTSQNDVGYGAYDLYDLGEFNQKGTVRTKYGTKGELERAIRSLKANGIQVYGDVVMNHKGGADFTERVQAVEVNPQNRNQEVSGTYQIEAWTGFNFPGRGNQHSSFKWRWYHFDGTDWDQSRQLANRIYKFRGDGKAWDWEVDTENGNYDYLMYADVDMDHPEVINELNRWGVWYANTLNLDGFRLDAVKHIKFSFMRDWLGHVRGQTGKNLFAVAEYWKNDLGALENYLSKTNWTMSAFDVPLHYNLYQASNSSGNYDMRNLLNGTLVQRHPSHAVTFVDNHDTQPGEALESFVQGWFKPLAYATILTREQGYPQVFYGDYYGIPSDGVPSYRQQIDPLLKARQQYAYGRQHDYFDHWDVIGWTREGNASHPNSGLATIMSDGPGGSKWMYVGRQKAGEVWHDMTGNRSGTVTINQDGWGHFFVNGGSVSVWVKR

SEQ ID NO: 30746 - protein, 483 aa, Bacillus sp. (in: firmicutes)
HHDGTNGTIMHYFEWNVPNDGQHWNRLHNNAQNLKNAGITAIWIPPAWKGTSQNDVGYGAYDLYDLGEFNQKGTVRTKYGTKAELERAIRSLKANGIQVYGDVVMNHKGGADFTERVQAVEVNPQNRNQEVSGTYQIEAWTGFNFPGRGNQHSSFKWRWYHFDGTDWDQSRQLANRIYKFRGKAWDWEVDTENGNYDYLMYADVDMDHPEVINELNRWGVWYANTLNLDGFRLDAVKHIKFSFMRDWLGHVRGQTGKNLFAVAEFWKNDLGALENYLSKTNWTMSAFDVPLHYNLYQASNSSGNYDMRNLLNGTLVQRHPSHAVTFVDNHDTQPGEALESFVQGWFKPLAYATILTREQGYPCVFYGDYYGIPSDGVPSYRQQIDPLLKARQQYAYGRQHDYFDHWDVIGWTREGNASHPNSGLATIMSDGPGGSKWMYVGRQKAGEVWHDMTGNRSGTVTINQDGWGHFFVNGGSVSVWVKR

SEQ ID NO: 30747 - protein, 485 aa, Bacillus sp.
HHDGTNGTIMQYFEWNVPNDGQHWNRLHNNAQNLKNAGITAIWIPPAWKGTSQNDVGYGAYDLYDLGEFNQKGTVRTKYGTKAELEAAIRSLKANGIQVYGDVVMNHKGGADFTERVQAVEVNPQNRNQEVSGTYQIEAWTGFNFPGRGNQHSSFKWRWYHFDGTDWDQSRQLANRIYKFRGDGKAWDWEVDTENGNYDYLMYADVDMDHPEVINELNRWGVWYANTLNLDGFRLDAVKHIKFSFMRDWLGHVRGQTGKNLFAVAEYWKNDLGALENYLSKTNWTMSAFDVPLHYNLYQASNSSGNYDMRNLLNGTLVQRHPSHAVTFVDNHDTQPGEALESFVQGWFKPLAYATILTREQGYPQVFYGDYYGIPSDGVPSYRQQIDPLLKARQQYAYGRQHDYFDHWDVIGWTREGNASHPNSGLATIMSDGPGGSKWMYVGRQKAGEVWHDMTGNRSGTVTINQDGWGHFFVNGGSVSVWVKR

SEQ ID NO: 30748 - protein, 485 aa, Bacillus sp.
HHDGTNGTIMQYFEWNVPNDGQHWNRLENNAQNLKNAGITAIWIPPAWKGTSQNDVGYGAYDLYDLGEFNQKGTVRTKYGTKAELERAIRSLKANGIQVYGDVVMNHKGGADFTERVQAVEVNPQNRNQEVSGTYQIEAWTGFNFPGRGNQHSSFKWRWYHFDGTDWDQSRQLANRIYKFRGDGKAWDWEVDTENGNYDYLMYADVDMDHPEVINELNRWGVWYANTLNLDGFRLDAVKHIKFSFMRDWLGHVRGQTGKNLFAVAEYWKNDLGALENYLSKTNWTMSAFDVPLHYNLYQASNSSGNYDMRNLLNGTLVQRHPSHAVTFVDNHDTQPGEALESFVQGWFKPLAYATILTREQGYPQVFYGDYYGIPSDGVPSYRQQIDPLLKARQQYAYGRQHDYFDHWDVIGWTREGNASHPNSGLATIMSDGPGGSKWMYVGRQKAGEVWHDMTGNRSGTVTINQDGWGHFFVNGGSVSVWVKR

SEQ ID NO: 30749 - protein, 485 aa, Bacillus sp.
HHDGTNGTIMQYFEWNVPNDGQHWNRLHNEAQNLKNAGITAIWIPPAWKGTSQNDVGYGAYDLYDLGEFNQKGTVRTKYGTKAELERAIRSLKANGIQVYGDVVMNHKGGADFTERVQAVEVNPQNRNQEVSGTYQIEAWTGFNFPGRGNQHSSFKWRWYHFDGTDWDQSRQLANRIYKFRGDGKAWDWEVDTENGNYDYLMYADVDMDHPEVINELNRWGVWYANTLNLDGFRLDAVKHIKFSFMRDWLGHVRGQTGKNLFAVAEYWKNDLGALENYLSKTNWTMSAFDVPLHYNLYQASNSSGNYDMRNLLNGTLVQRHPSHAVTFVDNHDTQPGEALESFVQGWFKPLAYATILTREQGYPQVFYGDYYGIPSDGVPSYRQQIDPLLKARQQYAYGRQHDYFDHWDVIGWTREGNASHPNSGLATIMSDGPGGSKWMYVGRQKAGEVWHDMTGNRSGTVTINQDGWGHFFVNGGSVSVWVKR

SEQ ID NO: 30750 - protein, 485 aa, Bacillus sp.
HHDGTNGTIMQYFEWNVPNDGQHWNRLHNNAQNLKNAGITAIWIPPAWKGTSQNDVGYGAYDLYDLGEFNQKGTVRTKYGTKAELERAIRSLKANGIQVYGDVVMNHKGGADFTERVQAVEVNPQNRNQEVSGTYQIEAWTGFNFPGRGNQHSSFKWRWYHFDGTDWDQSRQLANRIYKFRGDGKAWDWEVDTENGNYDYLMYADVDMDHPEVINELNRWGVWYANTLNLDGFRLDAVKHIKFSFMRDWLGHVRGQTGKNLFAVAEYWKNDLGALENYLSKTNWTMSAFDVPLHYNLYQASNSSGNYDMRNLLNGTLVQRHPSHAVTFVDNHDTQPGEALESFVQGWFKPLAYATILTREQGYPQVFYGDYYGIPSDGVPSYRQQIDPFLKARQQYAYGRQHDYFDHWDVIGWTREGNASHPNSGLATIMSDGPGGSKWMYVGRQKAGEVWHDMTGNRSGTVTINQDGWGHFFVNGGSVSVWVKR

SEQ ID NO: 30751 - protein, 483 aa, Bacillus sp. (in: firmicutes)
HHDGTNGTMMQYFEWNVPNDGQHWNRLHNNAQNLKNAGITAIWIPPAWKGTSQNDVGYGAYDLYDLGEFNQKGTVRTKYGTKAELERAIRSLKANGIQVYGDVVMNHKGGADFTERVQAVEVNPQNRNQEVSGTYQIEAWTGFNFPGRGNQHSSFKWRWHHFDGTDWDQSRQLANRIYKFRGKAWDWEVDTEFGNYDYLMYADVDMDHPEVINELNRWGVWYANTLNLDGFRLDAVKHIKFSFMRDWLGHVRGQTGKNLFAVAEYWKNDLGALENYLSKTNWTMSAFDVPLHYNLYQASNSSGNYDMRNLLNGTLVQRHPSHAVTFVDNHDTQPGEALESFVQGWFKPLAYATILTREQGYPSVFYGDYYGIPSDGVPSYRQQIDPLLKARQQYAYGRQHDYFDHWDVIGWTREGNASHPNSGLATIMSDGPGGSKWMYVGRQKAGEVWHDMTGNRSGTVTINQDGWGHFFVNGGSVSVWVKR

SEQ ID NO: 30752 - protein, 485 aa, Bacillus sp.
HHDGTNGTIMQYFEWNVPNDGQHWNRLHNNAQNLKNAGITAIWIPPAWKGTSQNDVGYGAYDLYDLGEFNQKGTVRTKYGTKAELERAIRSLKANGIQVYGDVVMNHKGGADFTERVQAVEVNPQNRNQEVSGTYQIEAWTGFNFPGRGNQHSSFKWRWYHFDGTDWDQSRQLANRIYKFRGDGKAWDWEVDTENGNYDYLMYADVDMDHPEVINELNRWGVWYANTLNLDGFRLDAVKHIKFSFMRDWLGHVRGQTGKNLFAVAEYWKNDLGALENYLSKTNWTMSAFDVPLHYNLYQASNSSGNYDMRNLLNGTLVQRHPSHAVTFVDNHDTQPGEALESFVQGWFKPLAYATILTREQGYPQVFYGDYYGIPSDGVPSYRQQIDPLLKARQQYAYGRQHDYFDHWDVIGWTREGNAMHPNSGLATIMSDGPGGSKWMYVGRQKAGEVWHDMTGNRSGTVTINQDGWGHFFVNGGSVSVWVKR

SEQ ID NO: 30753 - protein, 483 aa, Bacillus sp. (in: firmicutes)
HHDGTNGTIMQYFEWNVPNDGQHWNRLHNNAQNLKNAGITAIWIPPAWKGTSQNDVGYGAYDLYDLGEFNQKGTVRTKYGTKAELERAIRSLKANGIQVYGDVVMNHKGGADFTERVQAVEVNPQNRNQEVSGTYQIEAWTGFNFPGRGNQHSSFKWRWYHFDGTDWDQSRQLANRIYKFRGKAWDWEVDTENGNYDYLMYADVDMDHPEVINELNRWGVWYANTLNLDGFRLDAVKHIKFSFMRDWLGHVRGQTGKNLFAIAEFWKNDLGALENYLSKTNWTMSAFDVPLHYNLYQASNSSGNYDMRNLLNGTLVQRHPSHAVTLVDNHDTQPGEALESFVQGWFKPLAYATILTREQGYPSVFYGDYYGIPSDGVPSYRQQIDPLLKARQQYAYGRQHDYFDHWDVIGWTREGNASHPNSGLATIMSDGPGGSKWMYVGRQKAGEVWHDMTGNRSGTVTINQDGWGHFFVNGGSVSVWVKR

SEQ ID NO: 30754 - protein, 485 aa, Bacillus sp.
HHDGTNGTIMQYFEWNVPNDGQHWNRLHNNAQNLKNAGITAIWIPPAWKGTSQNDVGYGAYDLYDLGEFNQKGTVRTKYGTKAELERAIRSLKANGIQVYGDVVMNHKGGADFTERVQAVEVNPQNRNQEVSGTYQIEAWTGFNFPGRGNQHSSFKWRWYHFDGTDWDQSRQLANRIYKFRGDGKAWDWEVDTENGNYDYLMYADVDMDHPEVINELNRWGVWYANTLNLDGFRLDAVKHIKFSFMRDWLGHVRGQTGKNLFAVAEYWKNDLGALENYLSKTNWTMSAFDVPLHYNLYQASNSSGNYDMRNLLNGTLVQRHPSHAVTFVDNHDTQPGEALESFVQGWFKPLAYATILTREQGYPQVFYGDYYGIPSDGVPSIRQQIDPLLKARQQYAYGRQHDYFDHWDVIGWTREGNASHPNSGLATIMSDGPGGSKWMYVGRQKAGEVWHDMTGNRSGTVTINQDGWGHFFVNGGSVSVWVKR

SEQ ID NO: 30755 - protein, 485 aa, Bacillus sp.
HHDGTNGTIMQYFEWNVPNDGQHWNRLHNNAQNLKNAGITAIWIPPAWKGTSQNDVGYGAYDLYDLGEFNQKGTVRTKYGTKAELERAIRSLKANGIQVYGDVVMNHKGGADFTERVQAVEVNPQNRNQEVSGTYQIEAWTGFNFPGRGNQHSSFKWRWYHFDGTDWDQSRQLANRIYKFRGDGKAWDWEVDTENGNYDYLMYADVDMDHPEVINELNRWGVWYANTLNLDGFRLDAVKHIKFSFMRDWLGHVRGQTGKNLFAVAEYWKNDLGALENYLSKTNWTMSAFDVPLHYNLYQASNSSGNYDMRNLLNGTLVQRHPSHAVTFVDNHDTQPGEALESFVQGWFKPLAYAYILTREQGYPQVFYGDYYGIPSDGVPSYRQQIDPLLKARQQYAYGRQHDYFDHWDVIGWTREGNASHPNSGLATIMSDGPGGSKWMYVGRQKAGEVWHDMTGNRSGTVTINQDGWGHFFVNGGSVSVWVKR

SEQ ID NO: 30756 - protein, 485 aa, Bacillus sp.
HHDGTNGTIMQYFEWNVPNDGQHWNRLHNNAQNLKNAGITAIWIPPAWKGTSQNDVGYGAYDLYDLGEFNQKGTVRTKYGTKAELERAIRSLKANGIQVYGDVVMNHKGGADFTERVQAVEVNPQNRNQEVSGTYQIEAWTGFNFPGRGNQHSSFKWRWYHFDGTDWDQSRQLANRIYKFRGDGKAWDWEVDTENGNYDYLMYADVDMDHPEVINELNRWGVWYKNTLNLDGFRLDAVKHIKFSFMRDWLGHVRGQTGKNLFAVAEYWKNDLGALENYLSKTNWTMSAFDVPLHYNLYQASNSSGNYDMRNLLNGTLVQRHPSHAVTFVDNHDTQPGEALESFVQGWFKPLAYATILTREQGYPQVFYGDYYGIPSDGVPSYRQQIDPLLKARQQYAYGRQHDYFDHWDVIGWTREGNASHPNSGLATIMSDGPGGSKWMYVGRQKAGEVWHDMTGNRSGTVTINQDGWGHFFVNGGSVSVWVKR

SEQ ID NO: 30757 - protein, 485 aa, Bacillus sp.
HHDGTNGTIMQYFEWNVPNDGQHWNRLHNNAQNLKNAGITAIWIPPAWKGTSQNDVGYGAYDLYDLGEFNQKGTVRTKYGTKAELERAIRSLKANGIQVYGDVVMNHKGGADFTERVQAVEVNPQNRNQEVSGTYQIEAWTGFNFPGRGNQHSSFKWRWYHFDGTDWDQSRQIANRIYKFRGDGKAWDWEVDTENGNYDYLMYADVDMDHPEVINELNRWGVWYANTLNLDGFRLDAVKHIKFSFMRDWLGHVRGQTGKNLFAVAEYWKNDLGALENYLSKTNWTMSAFDVPLHYNLYQASNSSGNYDMRNLLNGTLVQRHPSHAVTFVDNHDTQPGEALESFVQGWFKPLAYATILTREQGYPQVFYGDYYGIPSDGVPSYRQQIDPLLKARQQYAYGRQHDYFDHWDVIGWTREGNASHPNSGLATIMSDGPGGSKWMYVGRQKAGEVWHDMTGNRSGTVTINQDGWGHFFVNGGSVSVWVKR

SEQ ID NO: 30758 - protein, 485 aa, Bacillus sp.
HHDGTNGTIMQYFEWNVPNDGQHWNRLHNNAQNLKNAGITAIWIPPAWKGTSQNDVGYGAYDLYDLGEFNQKGTVRTKYGTKAELERAIRSLKANGIQVYGDVVMNHKGGADFTERVQAVEVNPQNRNQEVSGTYQIEAWTGFNFPGRGNQHSSFKWRWYHFDGTDWDQSRQLANRIYKFRGDRKAWDWEVDTENGNYDYLMYADVDMDHPEVINELNRWGVWYANTLNLDGFRLDAVKHIKFSFMRDWLGHVRGQTGKNLFAVAEYWKNDLGALENYLSKTNWTMSAFDVPLHYNLYQASNSSGNYDMRNLLNGTLVQRHPSHAVTFVDNHDTQPGEALESFVQGWFKPLAYATILTREQGYPQVFYGDYYGIPSDGVPSYRQQIDPLLKARQQYAYGRQHDYFDHWDVIGWTREGNASHPNSGLATIMSDGPGGSKWMYVGRQKAGEVWHDMTGNRSGTVTINQDGWGHFFVNGGSVSVWVKR

SEQ ID NO: 30759 - protein, 485 aa, Bacillus sp.
HHDGTNGTIMQYFEWNVPNDGQHWNRLHNNAQNLKNAGITAIWIPPAWKGTSQNDVGYGAYDLYDLGEFNQKGTVRTKYGTKAELERAIRSLKANGIQVYGDVVMNHKGGADFTERVQAVEVNPQNRNQEVSGTYQIEAWTGFNFPGRGNQHSSFKWRWYHFDGTDWDQSRQLANRIYKFRGDGKAWDWEVDTENGNYDYLMYADVDMDHPEVINELNRWGVWYANTLNLDGFRLDAVKHIKFSFMRDWLGHVRGQTGKNLFAVAEYWKNDLGALENYLSKTNWTMSAFDVPLHYNLYQASNSSGNYDMRNLLNGTLVQRHPSHAVTFVDNHDTQPGEALESFVQGWFKPLAYATILTREQGYPQVFYGDYYGIPSDGVPSYRQQIDPSLKARQQYAYGRQHDYFDHWDVIGWTREGNASHPNSGLATIMSDGPGGSKWMYVGRQKAGEVWHDMTGNRSGTVTINQDGWGHFFVNGGSVSVWVKR

SEQ ID NO: 30760 - protein, 485 aa, Bacillus sp.
HHDGTNGTIMQYFEWNVPNDGQHWNRLHNNAQNLKNAGITAIWIPPAWKGTSQNDVGYGAYDLYDLGEFNQKGTVRTKYGTKAELERAIRSLKANGIQVYGDVVMNHKGGADFTERVQAVEVNPQNRNQEVSGTYQIEAWTGFNFPGRGNQHSEFKWRWYHFDGTDWDQSRQLANRIYKFRGDGKAWDWEVDTENGNYDYLMYADVDMDHPEVINELNRWGVWYANTLNLDGFRLDAVKHIKFSFMRDWLGHVRGQTGKNLFAVAEYWKNDLGALENYLSKTNWTMSAFDVPLHYNLYQASNSSGNYDMRNLLNGTLVQRHPSHAVTFVDNHDTQPGEALESFVQGWFKPLAYATILTREQGYPQVFYGDYYGIPSDGVPSYRQQIDPLLKARQQYAYGRQHDYFDHWDVIGWTREGNASHPNSGLATIMSDGPGGSKWMYVGRQKAGEVWHDMTGNRSGTVTINQDGWGHFFVNGGSVSVWVKR

SEQ ID NO: 30761 - protein, 485 aa, Bacillus sp.
HHNGTNGTMMQYFEWYLPNDGNHWNRLNSDASNLKSKGIKAVWIPPAWKGASQNDVGYGAYDLYDLGEFNQRGTVRTKYGTRSQLQAAVTSLKNNGIQVYGDVVMNHKGGADATEMVRAVEVNPNNRNQEVTGEYTIEAWTRFDFPGRGNTHSSFKWRWYHFDGVDFDQSRRLNNRIYKFRGHGKAWDWEVDTEFGNYDYLMYADIDYDHPESTNEMRNWGVWYTNTLGLDGFRIDAVKHIKYSFTRDWINHVRSATGKNMFAVAEFWKNDLGAIENYLQKTNWNHSVFDVPLHYNLYNASKSGGNYDMRNIFNGTVVQRHPSHAVTFVDNHDSQPEEALESFVEEWFKPLAYALTLTREQGYPSVFYGDYYGIPTHGVPAMRSKIDPILEARQKYAYGPQHDYLDHPDVIGWTREGDSSHPKSGLATLITDGPGGSKRMYAGLKNAGETWYDITGNRSDTVKIGSDGWGEFHVNDGSVSIYVQK

SEQ ID NO: 30762 - protein, 485 aa, Bacillus sp.
HHDGTNGTIMQYFEWNVPNDGQHWNRLHNNAQNLKNAGITAIWIPPAWKGTSQNDVGYGAYDLYDLGEFNQKGTVRTKYGTKAELEEAIRSLKANGIQVYGDVVMNHKGGADFTERVQAVEVNPQNRNQEVSGTYQIEAWTGFNFPGRGNQHSSFKWRWYHFDGTDWDQSRQLANRIYKFRGDGKAWDWEVDTENGNYDYLMYADVDMDHPEVINELNRWGVWYANTLNLDGFRLDAVKHIKFSFMRDWLGHVRGQTGKNLFAVAEYWKNDLGALENYLSKTNWTMSAFDVPLHYNLYQASNSSGNYDMRNLLNGTLVQRHPSHAVTFVDNHDTQPGEALESFVQGWFKPLAYATILTREQGYPQVFYGDYYGIPSDGVPSYRQQIDPLLKARQQYAYGRQHDYFDHWDVIGWTREGNASHPNSGLATIMSDGPGGSKWMYVGRQKAGEVWHDMTGNRSGTVTINQDGWGHFFVNGGSVSVWVKR

SEQ ID NO: 30763 - protein, 483 aa, Bacillus sp. (in: firmicutes)
HHDGTNGTIMQYFEWNVPNDGQHWNRLHNNAQNLKNAGITAIWIPPAWKGTSQNDVGYGAYDLYDLGEFNQKGTVRTKYGTKAELERAIRSLKANGIQVYGDVVMNHKGGADFTERVQAVEVNPQNRNQEVSGTYQIEAWTGFNFPGRGNQHSSFKWRWYHFDGTDWDQSRQLANRIYKFRGKAWDWEVDTENGNYDYLMYADVDMDHPEVINELNRWGVWYANTLNLDGFRLDAVKHIKFSFMRDWLGHVRGQTGKNLFAVAEFWKNDLGALENYLSKTNWTMSAFDAPLHYNLYQASNSSGNYDMRNLLNGTLVQRHPSHAVTLVDNHDTQPGEALESFVQGWFKPLAYATILTREQGYPSVFYGDYYGIPSDGVPSYRQQIDPLLKARQQYAYGRQHDYFDHWDVIGWTREGNASHPNSGLATIMSDGPGGSKWMYVGRQKAGEVWHDMTGNRSGTVTINQDGWGHFFVNGGSVSVWVKR

SEQ ID NO: 30764 - protein, 485 aa, Bacillus sp.
HHDGTNGTIMQYFEWNVPNDGQHWNRLHNNAQNLKNAGITAIWIPPAWKGTSQNDVGYGAYDLYDLGEFNQKGTVRTKYGTKAELERAIRSLKANGIQVYGDVVMNHKGGADFTERVQAVEVNPQNRNQEVSGTYQIEAWTGFNFPGRGNQHSSFKWRWYHFDGTDWDQSRQLANRIYKFRGDGKAWDWEVDTENGNYDYLMYADVDMDHPEVINELNRWGVWYANTLNLDGFRLDAVKHIKFSFMRDWLGHVRGQTGKNLFAVAEYWKNDLGALENYLSKTNWTLSAFDVPLHYNLYQASNSSGNYDMRNLLNGTLVQRHPSHAVTFVDNHDTQPGEALESFVQGWFKPLAYATILTREQGYPQVFYGDYYGIPSDGVPSYRQQIDPLLKARQQYAYGRQHDYFDHWDVIGWTREGNASHPNSGLATIMSDGPGGSKWMYVGRQKAGEVWHDMTGNRSGTVTINQDGWGHFFVNGGSVSVWVKR

SEQ ID NO: 30765 - protein, 485 aa, Bacillus sp.
HHDGTNGTIMQYFEWNVPNDGQHWNRLHNNAQNLKNAGITAIWIPPAWKGTSQNDVGYGAYDLYDLGEFNQKGTVRTKYGTKAELERAIRSLKANGIQVYGDVVMNHKGGADFTERVQAVEVNPQNRNQEVSGTYQIEAWTGFNFPGRGNQHSSFKWRWYHFDGTDWDQSRQLANRIYKFRGDGKAWDWEVDTENGNYDYLMYADVDMDHPEVPNELNRWGVWYANTLNLDGFRLDAVKHIKFSFMRDWLGHVRGQTGKNLFAVAEYWKNDLGALENYLSKTNWTMSAFDVPLHYNLYQASNSSGNYDMRNLLNGTLVQRHPSHAVTFVDNHDTQPGEALESFVQGWFKPLAYATILTREQGYPQVFYGDYYGIPSDGVPSYRQQIDPLLKARQQYAYGRQHDYFDHWDVIGWTREGNASHPNSGLATIMSDGPGGSKWMYVGRQKAGEVWHDMTGNRSGTVTINQDGWGHFFVNGGSVSVWVKR

SEQ ID NO: 30766 - protein, 485 aa, Bacillus sp.
HHDGTNGTIMQYFEWNVPNDGQHWNRLHNNAQNLKNAGITAIWIPPAWKGTSQNDVGYGAYDLYDLGEFNQKGTVRTKYGTKAELERAIRSLKANGIQVYGDVVMNHKGGADFTERVQAVEVNPQNRNQEVSGTYQIEAWTGFNFPGRGNQHSSFKWRWYHFDGTDWDQSRQMANRIYKFRGDGKAWDWEVDTENGNYDYLMYADVDMDHPEVINELNRWGVWYANTLNLDGFRLDAVKHIKFSFMRDWLGHVRGQTGKNLFAVAEYWKNDLGALENYLSKTNWTMSAFDVPLHYNLYQASNSSGNYDMRNLLNGTLVQRHPSHAVTFVDNHDTQPGEALESFVQGWFKPLAYATILTREQGYPQVFYGDYYGIPSDGVPSYRQQIDPLLKARQQYAYGRQHDYFDHWDVIGWTREGNASHPNSGLATIMSDGPGGSKWMYVGRQKAGEVWHDMTGNRSGTVTINQDGWGHFFVNGGSVSVWVKR

SEQ ID NO: 30767 - protein, 485 aa, Bacillus sp.
HHDGTNGTIMQYFEWNVPNDGQHWNRLHNNAQNLKNAGITAIWIPPAWKGTSQNDVGYGAYDLYDLGEFNQKGTVRTKYGTKAELERAIRSLKANGIQVYGDVVMNHKGGADFTERVQAVEVNPQNRNQEVSGTYQIEAWTGFNFPGRGNQHSSFKWRWYHFDGTDWDQSRQLANRIYKFRGDGKAWDWEVDTENGNYDYLMYADVDMDHPEVINELNRWGVWYANTLNLDGFRLDAVKHIKFSFMRDWLGHVRGQTGKNLFAVAEYWKNDLGALENYLSKTNWTMSAFDVPLHYNLYQASNSSGNYDMRNLLNGTLVQRHPSHAVTFVDNHDTQPGEALESFVQGWFKPLAYATILTREQGYPQVFYGDYYGIPSDGVPSYRQQIDPLLKARQQTAYGRQHDYFDHWDVIGWTREGNASHPNSGLATIMSDGPGGSKWMYVGRQKAGEVWHDMTGNRSGTVTINQDGWGHFFVNGGSVSVWVKR

SEQ ID NO: 30768 - protein, 485 aa, Bacillus sp.
HHDGTNGTIMQYFEWNVPNDGQHWNRLHNNAQNLKNAGITAIWIPPAWKGTSQNDVGYGAYDLYDLGEFNQKGTVRTKYGTKAELERAIRSLKANGIQVYGDVVMNHKGGADFTERVQAVEVNPQNRNQEVSGTYQIEAWTGFNFPGRGNQHSSFKWRWYHFDGTDWDQSRQLANRIYKFRGDGKAWDWEVDTENGNYDYLMYADVDMDHPEVINELNRWGVWYANTLNLDGFRLDAVKHIKFSFMRDWLGHVRGQTGKNLFAVAEYWKNDLGALENYLSKTNWTMSAFDVPLHYNLYQASNSSGNYDMRNLLNGTLVQRHPSHAVTFVDNHDTQPGEALESFVQGWFKPLAYATILTREQGYPQVFYGDYYGIPSDGVPSYRQQIDPLLKARQQYAYGRQHDYFDHWDVIGWTREGNASHPNSGLATIMSDGPGGSKWMYVGRQKAGEVWHDMTGNRRGTVTINQDGWGHFFVNGGSVSVWVKR

SEQ ID NO: 30769 - protein, 485 aa, Bacillus sp.
HHDGTNGTIMQYFEWNVPNDGQHWNRLHNNAQNLKNAGITAIWIPPAWKGTSQNDVGYGAYDLYDLGEFNQKGTVRTKYGTKAELERAIRSLKANGIQVYGDVVMNHKGGADFTERVQAVEVNPQNRNQEVSGTYQIEAWTGFNFPGRGNQHSSFKWRWYHFDGTDWDQSRQLANRIYKFRGDGKAWDWEVDTENGNYDYLMYADVDMDHPEVINELNRWGVWYANTLNLDGFRLDAVKHIKFSFMRDWLGHVRGQTGKNLFAVAEYWKNDLGALENYLSKTNWTMSAFDVPLHYNLYQASNSSGNYDMRNLLNGTLVQRHPSHAVTFVDNHDTQPGEALESFVQGWFKPLAYATILTREQGYPQVFYGDYYGIPPDGVPSYRQQIDPLLKARQQYAYGRQHDYFDHWDVIGWTREGNASHPNSGLATIMSDGPGGSKWMYVGRQKAGEVWHDMTGNRSGTVTINQDGWGHFFVNGGSVSVWVKR

SEQ ID NO: 30770 - protein, 485 aa, Bacillus sp.
HHDGTNGTIMQYFEWNVPNDGQHWNRLHNNAQNLKNAGITAIWIPPAWKGTSQNDVGYGAYDLYDLGEFNQKGTVRTKYGTKAELERAIRSLKANGIQVYGDVVMNHKGGADQTERVQAVEVNPQNRNQEVSGTYQIEAWTGFNFPGRGNQHSSFKWRWYHFDGTDWDQSRQLANRIYKFRGDGKAWDWEVDTENGNYDYLMYADVDMDHPEVINELNRWGVWYANTLNLDGFRLDAVKHIKFSFMRDWLGHVRGQTGKNLFAVAEYWKNDLGALENYLSKTNWTMSAFDVPLHYNLYQASNSSGNYDMRNLLNGTLVQRHPSHAVTFVDNHDTQPGEALESFVQGWFKPLAYATILTREQGYPQVFYGDYYGIPSDGVPSYRQQIDPLLKARQQYAYGRQHDYFDHWDVIGWTREGNASHPNSGLATIMSDGPGGSKWMYVGRQKAGEVWHDMTGNRSGTVTINQDGWGHFFVNGGSVSVWVKR

SEQ ID NO: 30771 - protein, 485 aa, Bacillus sp.
HHDGTNGTIMQYFEWNVPNDGQHWNRLHNNAQNLKNAGITAIWIPPAWKGTSQNDVGYGAYDLYDLGEFNQKGTVRTKYGTKAELERAIRSLKANGIQVYGDVVMNHKGGADFTERVQAVEVNPQNRNQEVSGTYQIEAWTGFNFPGRGNQHSSFKWRWYHFDGTDWDQSRQLSNRIYKFRGDGKAWDWEVDTENGNYDYLMYADVDMDHPEVINELNRWGVWYANTLNLDGFRLDAVKHIKFSFMRDWLGHVRGQTGKNLFAVAEYWKNDLGALENYLSKTNWTMSAFDVPLHYNLYQASNSSGNYDMRNLLNGTLVQRHPSHAVTFVDNHDTQPGEALESFVQGWFKPLAYATILTREQGYPQVFYGDYYGIPSDGVPSYRQQIDPLLKARQQYAYGRQHDYFDHWDVIGWTREGNASHPNSGLATIMSDGPGGSKWMYVGRQKAGEVWHDMTGNRSGTVTINQDGWGHFFVNGGSVSVWVKR

SEQ ID NO: 30772 - protein, 485 aa, Bacillus sp.
HHDGTNGTIMQYFEWNVPNDGQHWNRLHNNAQNLKNAGITAIWIPPAWKGTSQNDVGYGAYDLYDLGEFNQKGTVRTKYGTKAELERAIRSLKANGIQVYGDVVMNHKGGADFTERVQAVEVNPQNRNQEVSGTYQIEAWTAFNFPGRGNQHSSFKWRWYHFDGTDWDQSRQLANRIYKFRGDGKAWDWEVDTENGNYDYLMYADVDMDHPEVINELNRWGVWYANTLNLDGFRLDAVKHIKFSFMRDWLGHVRGQTGKNLFAVAEYWKNDLGALENYLSKTNWTMSAFDVPLHYNLYQASNSSGNYDMRNLLNGTLVQRHPSHAVTFVDNHDTQPGEALESFVQGWFKPLAYATILTREQGYPQVFYGDYYGIPSDGVPSYRQQIDPLLKARQQYAYGRQHDYFDHWDVIGWTREGNASHPNSGLATIMSDGPGGSKWMYVGRQKAGEVWHDMTGNRSGTVTINQDGWGHFFVNGGSVSVWVKR

SEQ ID NO: 30773 - protein, 485 aa, Bacillus sp.
HHDGTNGTIMQYFEWNVPNDGQHWNRLHNNAQNLKNAGITAIWIPPAWKGTSQNDVGYGAYDLYDLGEFNQKGTVRTKYGTKAELERAIRSLKANGIQVYGDVVMNHKGGADFTERVQAVEVNPQNRNQEVSGTYQIEAWTGFNFPGRGNQHSSFKWRWYHFDGTDWDQSRQLANRIYKFRGDGKAWDWEVDTENGNYDYLMYADVDMDHPEVINELNRWGVWYANTLNLDGFRLDAVKHIKFSFMRDWLGHVRGQTGKSLFAVAEYWKNDLGALENYLSKTNWTMSAFDVPLHYNLYQASNSSGNYDMRNLLNGTLVQRHPSHAVTFVDNHDTQPGEALESFVQGWFKPLAYATILTREQGYPQVFYGDYYGIPSDGVPSYRQQIDPLLKARQQYAYGRQHDYFDHWDVIGWTREGNASHPNSGLATIMSDGPGGSKWMYVGRQKAGEVWHDMTGNRSGTVTINQDGWGHFFVNGGSVSVWVKR

SEQ ID NO: 30774 - protein, 485 aa, Bacillus sp.
HHDGTNGTIMQYFEWNVPNDGQHWNRLHNNAQNLKNAGITAIWIPPAWKGTSQNDVGYGAYDLYDLGEFNQKGTVRTKYGTKAELERAIRSLKANGIQVYGDVVMNHKGGADFTERVQAVEVNPQNRNQEVSGTYQIEAWTGFNFPGRGNQHSSFKWRWYHFDGTDWDQSRQLANRIYKFRGDGKAWDWEVDTENGNYDYLMYADVDMDHPEVINELNRWGVWYANTLNLDGFRLDAVKHIKFSFMRDWLGHVRGQTGKNLFAVAEYWKNDLGALENYLSKTNWTMSAFDVPLHYNLYQASNSSGNYDMRNLLNGTLVQRHPSHAVTFVDNHDTQPGEALESFVQGWFKPLAYATILTREQGYPQVFYGDYYGIPSDGVPSYRQQIDPLLKARQQYAYGRQHDYFDHWDQIGWTREGNASHPNSGLATIMSDGPGGSKWMYVGRQKAGEVWHDMTGNRSGTVTINQDGWGHFFVNGGSVSVWVKR

SEQ ID NO: 30775 - protein, 485 aa, Bacillus sp.
HHDGTNGTIMQYFEWNVPNDGQHWNRLHNNAQNLKNAGITAIWIPPAWKGTSQNDVGYGAYDLYDLGEFNQKGTVRTKYGTKAELERAIRVLKANGIQVYGDVVMNHKGGADFTERVQAVEVNPQNRNQEVSGTYQIEAWTGFNFPGRGNQHSSFKWRWYHFDGTDWDQSRQLANRIYKFRGDGKAWDWEVDTENGNYDYLMYADVDMDHPEVINELNRWGVWYANTLNLDGFRLDAVKHIKFSFMRDWLGHVRGQTGKNLFAVAEYWKNDLGALENYLSKTNWTMSAFDVPLHYNLYQASNSSGNYDMRNLLNGTLVQRHPSHAVTFVDNHDTQPGEALESFVQGWFKPLAYATILTREQGYPQVFYGDYYGIPSDGVPSYRQQIDPLLKARQQYAYGRQHDYFDHWDVIGWTREGNASHPNSGLATIMSDGPGGSKWMYVGRQKAGEVWHDMTGNRSGTVTINQDGWGHFFVNGGSVSVWVKR

SEQ ID NO: 30776 - protein, 485 aa, Bacillus sp.
HHDGTNGTIMQYFEWNVPNDGQHWNRLHNNAQNLKNAGITAIWIPPAWKGTSQNDVGYGAYDLYDLGEFNQKGTVRTKYGTKAELERAIRSLKANGIQVYGDVVMNHKGGADFTERVQAVEVNPQNRNQEVSGTYQIEAWTGFNFPGRGNQHSSFKWRWYHFDGTDWDQSRQLANRIYKFRGDGKAWDWEVDTENGNYDYLMYADVDMDHPEVINELNRWGVWYANTLNLDGFRLDAVKHIKFSFMRDWLGHVRGQTGKNLFAVAEYWKNDLGALENYLSKTNWTMSAFDVPLHYNLYQASNSSGNYDMRNLLNGTLVQRHPSHAVTFVDNHDTQPGEALESFVQGWFKPLAYATILTREQGYPQVFYGDYYGIPSCGVPSYRQQIDPLLKARQQYAYGRQHDYFDHWDVIGWTREGNASHPNSGLATIMSDGPGGSKWMYVGRQKAGEVWHDMTGNRSGTVTINQDGWGHFFVNGGSVSVWVKR

SEQ ID NO: 30777 - protein, 485 aa, Bacillus sp.
HHDGTNGTIMQYFEWNVPNDGQHWNRLHNNAQNLKNAGITAIWIPPAWKGTSQNDVGYGAYDLYDLGEFNQKGTVRTKYGTKAELERAIRSLKANGIQVYGDVVMNHKGGADFTERVQAVEVNPQNRNQEVSGTYQIEAWTGFNFPGRGNQHSSFKWRWYHFDGTDWDQSRQLANRIYKFRGDGKAWDWEVDTENGNYDYLMYADVDMDHPEVINELNRWGVWYANTLNLDGFRLDAVKHIKFSFMRDWLGHVRGQTGKNLFAVAEYWKNDLGALENYLSKTNWTMSAFDVPLHYNLYQASNSSGNYDMRNLLNGTLVQRHPSHAVTFVDNHDTQPGEALESFVQGWFKPLAYATILTREQGYPQVFYGDYYGIPSDGVPSYRVQIDPLLKARQQYAYGRQHDYFDHWDVIGWTREGNASHPNSGLATIMSDGPGGSKWMYVGRQKAGEVWHDMTGNRSGTVTINQDGWGHFFVNGGSVSVWVKR

SEQ ID NO: 30778 - protein, 485 aa, Bacillus sp.
HHDGTNGTIMQYFEWNVPNDGQHWNRLHNNAQNLKNAGITAIWIPPAWKGTSQNDVGYGAYDLYDLGEFNQKGTVRTKYGTKAELERAIRSLKANGIQVYGDVVMNHKGGADFTERVQAVEVNPQNRNQEVSGTYQIEAWTDFNFPGRGNQHSSFKWRWYHFDGTDWDQSRQLANRIYKFRGDGKAWDWEVDTENGNYDYLMYADVDMDHPEVINELNRWGVWYANTLNLDGFRLDAVKHIKFSFMRDWLGHVRGQTGKNLFAVAEYWKNDLGALENYLSKTNWTMSAFDVPLHYNLYQASNSSGNYDMRNLLNGTLVQRHPSHAVTFVDNHDTQPGEALESFVQGWFKPLAYATILTREQGYPQVFYGDYYGIPSDGVPSYRQQIDPLLKARQQYAYGRQHDYFDHWDVIGWTREGNASHPNSGLATIMSDGPGGSKWMYVGRQKAGEVWHDMTGNRSGTVTINQDGWGHFFVNGGSVSVWVKR

SEQ ID NO: 30779 - protein, 485 aa, Bacillus sp.
HHDGTNGTIMQYFEWNVPNDGQHWNRLHNNAQNLKNAGITAIWIPPAWKGTSQNDVGYGAYDLYDLGEFNQKGTVRTKYGTKAELERAIRSLKANGIQVYGDVVMNHKGGADFTERVQAVEVNPQNRNQEVSGTYQIEAWTGFNFPGRGNQHSSFKWRWYHFDGTDWDQSRQLANRIYKFRGDGKAWDWEVDTENGNYDYLMYADVDMDHPEVINELNRWGVWYANTLNLDGFRLDAVKHIKFSFMRDWLGHVRGQTGKNLFAVAEYWKNDLGALENYLSKTNWTMSAFDVPLHYNLYQASNSAGNYDMRNLLNGTLVQRHPSHAVTFVDNHDTQPGEALESFVQGWFKPLAYATILTREQGYPQVFYGDYYGIPSDGVPSYRQQIDPLLKARQQYAYGRQHDYFDHWDVIGWTREGNASHPNSGLATIMSDGPGGSKWMYVGRQKAGEVWHDMTGNRSGTVTINQDGWGHFFVNGGSVSVWVKR

SEQ ID NO: 30780 - protein, 485 aa, Bacillus sp.
HHDGTNGTIMQYFEWNVPNDGQHWNRLHNNAQNLKNAGITAIWIPPAWKGTSQNDVGYGAYDLYDLGEFNQKGTVRTKYGTKAELERAIRSLKANGIQVYGDVVMNHKGGADFTERVQAVEVNPQNRNQEVSGTYQIEAWTGFNFPGRGNQHSSFKWRWYHFDGTDWDQSRQLANRIYKFRGDGKAWDWEVDTENGNYDYLMYADVDMDHPEVINELNRWGVWYANTLNLDGFRLDAVKHIKFSFMRDWLGHVRGQTGKNLFAVAEYWKNDLGALENYLSKTNWTMSAFDVPLHYNLYQASNSSGNYDMRNLLNGTLVQRHPSHAVTFVDNHDTQPGEALESFVQGWFKPLAYATILTREQGYPQVFYGDYYGIPSDGVPSYPQQIDPLLKARQQYAYGRQHDYFDHWDVIGWTREGNASHPNSGLATIMSDGPGGSKWMYVGRQKAGEVWHDMTGNRSGTVTINQDGWGHFFVNGGSVSVWVKR

SEQ ID NO: 30781 - protein, 485 aa, Bacillus sp.
HHNGTNGTMMQYFEWYLPNDGNHWNRLNSDASNLKSKGITAVWIPPAWKGASQNDVGYGAYDLYDLGEFNQKGTVRTKYGTRSQLQAAVTSLKNNGINVYGDVVMNHKGGADATEMVRAVEVNPNNRNQEVTGEYTIEAYTRFDFPGRGNTHSSFKWRWYHFDGVDWDQSRKLNNRIYKFRGHGKAWDWEVDTEFGNYDYLMYVDYDYDHPETTNEMRNWGVWYTNTLGLDGFRIDAVKHIKYSFTRDWINHVRIATGKNMFAVAEFWKNDLGAIENYLQKTNWNHSVFDVPLHYNLYNASKSGGNYDMRNIFNGTVVQAHPMHAVTFVDNHDSQPEEALESFVDEWFKPLAYALTLTREQGYPSVFYGDYYGIPTHGVPAMRSKIDPILEARQKYAYGPQHDYLDHPDVIGWTREGDSSHPKSGLATLITDGPGGSKRMYAGLKNAGETWYDITGNRSDTVKIGSDGWGEFHINDGSVSIYVQK

SEQ ID NO: 30782 - protein, 485 aa, Bacillus sp.
HHDGTNGTIMQYFEWNVPNDGQHWNRLHNNAQNLKNAGITAIWIPPAWKGTSQNDVGYGAYDLYDLGEFNQKGTVRTKYGTKAELERAIRSLKANGIQVYGDVVMNHKGGADFTERVQAVEVNPQNRNQEVSGTYQIEAWTGFNFPGRGNQHSSFKWRWYHFDGTDWDQSRQLANRIYKFRGDGKAWDWEVDTENGNYDYLMYADVDMDHPEVINELNRWGVWYANTLNLDGFRLDAVKHIKFSFMRDWLGHVRGQTGKNLFAVAEYWKNDLGALENYLSKTNWTMSAFDVPLHYNLYQASNSSGNYDMRNLLNGTLVQRHPSHAVTFVDNHDTQPGEALESFVQGWFKPLAYATILTREQGYPQVFYGDYYGIPSDGVPSYRQQIDPLLKARQQYAYGRQHDYFDHRDVIGWTREGNASHPNSGLATIMSDGPGGSKWMYVGRQKAGEVWHDMTGNRSGTVTINQDGWGHFFVNGGSVSVWVKR

SEQ ID NO: 30783 - protein, 483 aa, Bacillus sp.
HHNGTNGTMMQYFEWYLPNDGNHWNRLNSDASNLKSKGITAVWIPPAWKGASQNDVGYGAYDLYDLGEFNQKGTVRTKYGTRSQLQAAVTSLKNNGINVYGDVVMNHKGGADATEMVRAVEVNPNNRNQEVTGEYTIEAYTRFDFPGRGNTHSSFKWRWYHFDGVDWDQSRKLNNRIYKFRGKAWDWEVDTEFGNYDYLMYVDYDYDHPETTNEMRNWGVWYTNTLGLDGFRIDAVKHIKYSFTRDWINHVRIATGKNMFAVAEFWKNDLGAIENYLQKTNWNHSVFDVPLHYNLYNASKSGGNYDMRNIFNGTVVQAHPMHAVTFVDNHDSQPEEALESFVDEWFKPLAYALTLTREQGYPSVFYGDYYGIPTHGVPAMRSKIDPILEARQKYAYGPQHDYLDHPDVIGWTKEGDSSHPKSGLATLITDGPGGSKRMYAGLKNAGETWYDITGNRSDTVKIGSDGWGEFHVNDGSVSIYVQK

SEQ ID NO: 30784 - protein, 485 aa, Bacillus sp.
HHDGTNGTIMQYFEWNVPNDGQHWNRLHNNAGNLKNAGITAIWIPPAWKGTSQNDVGYGAYDLYDLGEFNQKGTVRTKYGTKAELERAIRSLKANGIQVYGDVVMNHKGGADFTERVQAVEVNPQNRNQEVSGTYQIEAWTGFNFPGRGNQHSSFKWRWYHFDGTDWDQSRQLANRIYKFRGDGKAWDWEVDTENGNYDYLMYADVDMDHPEVINELNRWGVWYANTLNLDGFRLDAVKHIKFSFMRDWLGHVRGQTGKNLFAVAEYWKNDLGALENYLSKTNWTMSAFDVPLHYNLYQASNSSGNYDMRNLLNGTLVQRHPSHAVTFVDNHDTQPGEALESFVQGWFKPLAYATILTREQGYPQVFYGDYYGIPSDGVPSYRQQIDPLLKARQQYAYGRQHDYFDHWDVIGWTREGNASHPNSGLATIMSDGPGGSKWMYVGRQKAGEVWHDMTGNRSGTVTINQDGWGHFFVNGGSVSVWVKR

SEQ ID NO: 30785 - protein, 485 aa, Bacillus sp.
HHDGTNGTIMQYFEWNVPNDGQHWNRLHNNAQNLKNAGITAIWIPPAWKGTSQNDVGYGAYDLYDLGEFNQKGTVRTKYGTKAELERAIRSLKANGIQVYGDVVMNHKGGADFTERVQAVEVNPQNRNQEVSGTYEIEAWTGFNFPGRGNQHSSFKWRWYHFDGTDWDQSRQLANRIYKFRGDGKAWDWEVDTENGNYDYLMYADVDMDHPEVINELNRWGVWYANTLNLDGFRLDAVKHIKFSFMRDWLGHVRGQTGKNLFAVAEYWKNDLGALENYLSKTNWTMSAFDVPLHYNLYQASNSSGNYDMRNLLNGTLVQRHPSHAVTFVDNHDTQPGEALESFVQGWFKPLAYATILTREQGYPQVFYGDYYGIPSDGVPSYRQQIDPLLKARQQYAYGRQHDYFDHWDVIGWTREGNASHPNSGLATIMSDGPGGSKWMYVGRQKAGEVWHDMTGNRSGTVTINQDGWGHFFVNGGSVSVWVKR

SEQ ID NO: 30786 - protein, 485 aa, Bacillus sp.
HHDGTNGTIMQYFEWNVPNDGQHWNRLHNNAQNLKNAGITAIWIPPAWKGTSQNDVGYGAYDLYDLGEFNQKGTVRTKYGTKAELERAIRSLKANGIQVYGDVVMNHKGGADFTERVQAVEVNPQNRNQEVSGTYQIEAWTGFNFPGRGNQHSSFKWRWYHFDGTDWDQSRQLANRIYKFRGDGKAWDWEVDTENGNYDYLMYADVDMDHPEVINELNRWGVWYANTLNLDGFRLDAVKHIKFSFMRDWLGHVRGQTGKNLFAVAEYWKNDLGALENYLSKTNWTMSAFDVPLHYNLYQASNSSGNYDMRNLLNGTLVQRHPSHAVTFVDNHDTQPGEALESFVQGWFKPLAYATILTREQGYPQVFYGDYYGIPSDGVPSYRSQIDPLLKARQQYAYGRQHDYFDHWDVIGWTREGNASHPNSGLATIMSDGPGGSKWMYVGRQKAGEVWHDMTGNRSGTVTINQDGWGHFFVNGGSVSVWVKR

SEQ ID NO: 30787 - protein, 483 aa, Bacillus sp. (in: firmicutes)
HHDGTNGTIMQYFEWNVPNDGQHWNRLHNNAQNLKNAGITAIWIPPAWKGTSQNDVGYGAYDLYDLGEFNQKGTVRTKYGTKAELERAIRSLKANGIQVYGDVVMNHKGGADFTERVQAVEVNPQNRNQEVSGTYQIEAWTGFNFPGRGNQHSSFKWRWYHFDGTDWDQSYQLANRIYKFRGKAWDWEVDTENGNYDYLMYADVDMDHPEVINELNRWGVWYANTLNLDGFRLDAVKHIKFSFLRDWLGHVRGQTGKNLFAVAEYWKNDLGALENYLSKTNWTMSAFDVPLHYNLYQASNSSGNYDMRNLLNGTLVQRHPSHAVTFVDNHDTQPGEALESFVQGWFKPLAYATILTREQGYPSVFYGDYYGIPSDGVPSYRQQIDPLLKARQQYAYGRQHDYFDHWDVIGWTREGNASHPNSGLATIMSDGPGGSKWMYVGRQKAGEVWHDMTGNRSGTVTINQDGWGHFFVNGGSVSVWVKR

SEQ ID NO: 30788 - protein, 485 aa, Bacillus sp.
HHDGTNGTIMQYFEWNVPNDGQHWNRLHNNAQNLKNAGITAIWIPPAWKGTSQNDVGYGAYDLYDLGEFNQKGTVRTKYGTKAELERAIRSLKANGIQVYGDVVMNHKGGADFTERVQAVEVNPQNRNQEVSGTYQIEAWTGFNFPGRGNIHSSFKWRWYHFDGTDWDQSRQLANRIYKFRGDGKAWDWEVDTENGNYDYLMYADVDMDHPEVINELNRWGVWYANTLNLDGFRLDAVKHIKFSFMRDWLGHVRGQTGKNLFAVAEYWKNDLGALENYLSKTNWTMSAFDVPLHYNLYQASNSSGNYDMRNLLNGTLVQRHPSHAVTFVDNHDTQPGEALESFVQGWFKPLAYATILTREQGYPQVFYGDYYGIPSDGVPSYRQQIDPLLKARQQYAYGRQHDYFDHWDVIGWTREGNASHPNSGLATIMSDGPGGSKWMYVGRQKAGEVWHDMTGNRSGTVTINQDGWGHFFVNGGSVSVWVKR

SEQ ID NO: 30789 - protein, 485 aa, Bacillus sp.
HHDGTNGTIMQYFEWNVPNDGQHWNRLHNNAQNLKNEGITAIWIPPAWKGTSQNDVGYGAYDLYDLGEFNQKGTVRTKYGTKAELERAIRSLKANGIQVYGDVVMNHKGGADFTERVQAVEVNPQNRNQEVSGTYQIEAWTGFNFPGRGNQHSSFKWRWYHFDGTDWDQSRQLANRIYKFRGDGKAWDWEVDTENGNYDYLMYADVDMDHPEVINELNRWGVWYANTLNLDGFRLDAVKHIKFSFMRDWLGHVRGQTGKNLFAVAEYWKNDLGALENYLSKTNWTMSAFDVPLHYNLYQASNSSGNYDMRNLLNGTLVQRHPSHAVTFVDNHDTQPGEALESFVQGWFKPLAYATILTREQGYPQVFYGDYYGIPSDGVPSYRQQIDPLLKARQQYAYGRQHDYFDHWDVIGWTREGNASHPNSGLATIMSDGPGGSKWMYVGRQKAGEVWHDMTGNRSGTVTINQDGWGHFFVNGGSVSVWVKR

SEQ ID NO: 30790 - protein, 485 aa, Bacillus sp.
HHDGTNGTIMQYFEWNVPNDGQHWNRLHNNAQNLKNAGITAIWIPPAWKGTSQNDVGYGAYDLYDLGEFNQKGTVRTKYGTKAELERAIRSLKANGIQVYGDVVMNHKGGADFTERVQAVEVNPQNRNQEVSGTYQIEAWTGFNFPGRGNQHSSFKWRWYHFDGTDWDQSRQLANRIYKFRGDGKAWDWEVDTENGNYDYLMYADVDMDHPEVINELNRWGVWYANTLNLDGFRLDAVKHIKFSFMRDWLGHVRGQTGKDLFAVAEYWKNDLGALENYLSKTNWTMSAFDVPLHYNLYQASNSSGNYDMRNLLNGTLVQRHPSHAVTFVDNHDTQPGEALESFVQGWFKPLAYATILTREQGYPQVFYGDYYGIPSDGVPSYRQQIDPLLKARQQYAYGRQHDYFDHWDVIGWTREGNASHPNSGLATIMSDGPGGSKWMYVGRQKAGEVWHDMTGNRSGTVTINQDGWGHFFVNGGSVSVWVKR

SEQ ID NO: 30791 - protein, 485 aa, Bacillus sp.
HHDGTNGTIMQYFEWNVPNDGQHWNRLHNNAQNLKNAGITAIWIPPAWKGTSQNDVGYGAYDLYDLGEFNQKGTVRTKYGTKAELERAIRSLKANGIQVYGDVVMNHKGGADFTERVQAVEVNPQNRNQEVSGTYQIEAWTGFNFPGRGNQHSSFKWRWYHFDGTDWDQSRQLANRIYKFRGDGKAWDWEVDTENGNYDYLMYADVDMDHPEVINELNRWGVWYANTLNLDGFRLDAVKHIKFSFMRDWLGHVRGQTGKNLFAVAEYWKNDLGALENYLSKTNWTMSAFDVPLHYNLYAASNSSGNYDMRNLLNGTLVQRHPSHAVTFVDNHDTQPGEALESFVQGWFKPLAYATILTREQGYPQVFYGDYYGIPSDGVPSYRQQIDPLLKARQQYAYGRQHDYFDHWDVIGWTREGNASHPNSGLATIMSDGPGGSKWMYVGRQKAGEVWHDMTGNRSGTVTINQDGWGHFFVNGGSVSVWVKR

SEQ ID NO: 30792 - protein, 485 aa, Bacillus sp.
HHDGTNGTIMQYFEWNVPNDGQHWNRLHNNAQNLKNAGITAIWIPPAWKGTSQNDVGYGAYDLYDLGEFNQKGTVRTKYGTKAELERAIRSLKANGIQVYGDVVMNHKGGADFTERVQAVEVNPQNRNQEVSGTYQIEAWTGFNFPGRGNQHSSFKWRWYHFDGTDWDQSRQLANRIYKFRGDGKAWDWEVDTENGNYDYLMYADVDMDHPEVINELNRWGVWYANTLNLDGFRLDAVKHIKFSFMRDWLGHVRGQTGKNLFAVAEYWKNDLGALENYLSKTNWTMSAFDVPLHYNLYQASNSSGNYDMRNLLNGTLVQRHPSHAVTFVDNHDTQPGEALESFVQGWFKPLAYATILTREQGYPQVFYGDYYGIPNDGVPSYRQQIDPLLKARQQYAYGRQHDYFDHWDVIGWTREGNASHPNSGLATIMSDGPGGSKWMYVGRQKAGEVWHDMTGNRSGTVTINQDGWGHFFVNGGSVSVWVKR

SEQ ID NO: 30793 - protein, 485 aa, Bacillus sp.
HHDGTNGTIMQYFEWNVPNDGQHWNRLHNNAQNLKNAGITAIWIPPAWKGTSQNDVGYGAYDLYDLGEFNQKGTVRTKYGTAAELERAIRSLKANGIQVYGDVVMNHKGGADFTERVQAVEVNPQNRNQEVSGTYQIEAWTGFNFPGRGNQHSSFKWRWYHFDGTDWDQSRQLANRIYKFRGDGKAWDWEVDTENGNYDYLMYADVDMDHPEVINELNRWGVWYANTLNLDGFRLDAVKHIKFSFMRDWLGHVRGQTGKNLFAVAEYWKNDLGALENYLSKTNWTMSAFDVPLHYNLYQASNSSGNYDMRNLLNGTLVQRHPSHAVTFVDNHDTQPGEALESFVQGWFKPLAYATILTREQGYPQVFYGDYYGIPSDGVPSYRQQIDPLLKARQQYAYGRQHDYFDHWDVIGWTREGNASHPNSGLATIMSDGPGGSKWMYVGRQKAGEVWHDMTGNRSGTVTINQDGWGHFFVNGGSVSVWVKR

SEQ ID NO: 30794 - protein, 485 aa, Bacillus sp.
HHDGTNGTIMQYFEWNVPNDGQHWNRLHNNAQNLKNAGITAIWIPPAWKGTSQNDVGYGAYDLYDLGEFNQKGTVRTKYGTKAELERAIRSLKANGIQVYGDVVMNHKGGADFTERVQAVEVNPQNRNQEVSGTYQIEAWTGFNFPGRGNQHSSFKWRWYHFDGTDWDQSRQLANRIYKFRGDGKAWDWEVDTENGNYDYLMYADVDMDHPEVINELNRWGVWYANTLNLDGFRLDAVKHIKFSFMRDWLGHVRGQTGKNLFAVAEYWKNDLGALENYLSKTNWTMSAFDVPLHYNLYQASNSSGNYDMRNLLNGTLVQRHPSHAVTFVDNHDTQPGEALESFVQGWFKPLAYATILTREQGYPQVFYGDYYGIPSDGVPSYRQQIDPLLKARQQYAYGKQHDYFDHWDVIGWTREGNASHPNSGLATIMSDGPGGSKWMYVGRQKAGEVWHDMTGNRSGTVTINQDGWGHFFVNGGSVSVWVKR

SEQ ID NO: 30795 - protein, 485 aa, Bacillus sp.
HHDGTNGTIMQYFEWNVPNDGQHWNRLHNNAQNLKNAGITAIWIPPAWKGTSQNDVGYGAYDLYDLGEFNQKGTVRTKYGTKAELERAIRSLKANGIQVYGDVVMNHKGGADFTEKVQAVEVNPQNRNQEVSGTYQIEAWTGFNFPGRGNQHSSFKWRWYHFDGTDWDQSRQLANRIYKFRGDGKAWDWEVDTENGNYDYLMYADVDMDHPEVINELNRWGVWYANTLNLDGFRLDAVKHIKFSFMRDWLGHVRGQTGKNLFAVAEYWKNDLGALENYLSKTNWTMSAFDVPLHYNLYQASNSSGNYDMRNLLNGTLVQRHPSHAVTFVDNHDTQPGEALESFVQGWFKPLAYATILTREQGYPQVFYGDYYGIPSDGVPSYRQQIDPLLKARQQYAYGRQHDYFDHWDVIGWTREGNASHPNSGLATIMSDGPGGSKWMYVGRQKAGEVWHDMTGNRSGTVTINQDGWGHFFVNGGSVSVWVKR

SEQ ID NO: 30796 - protein, 485 aa, Bacillus sp.
HHDGTNGTIMQYFEWNVPNDGQHWNRLHNNAQNLKNAGITAIWIPPAWKGTSQNDVGYGAYDLYDLGEFNQKGTVRTKYGTKAELERAIRSLKANGIQVYGDVVMNHKGGADFTERVQAVEVNPQNRNQEVSGTYQIEAWTGFNFPGRGNQHSSFKWRWYHFDGTDWDQSRQLANRIYKFRGDGKAWDWEVDTENGNYDYLMYADVDMDHPEVINELNRWGVWYANTLNLDGFRLDAVKHIKFSFVRDWLGHVRGQTGKNLFAVAEYWKNDLGALENYLSKTNWTMSAFDVPLHYNLYQASNSSGNYDMRNLLNGTLVQRHPSHAVTFVDNHDTQPGEALESFVQGWFKPLAYATILTREQGYPQVFYGDYYGIPSDGVPSYRQQIDPLLKARQQYAYGRQHDYFDHWDVIGWTREGNASHPNSGLATIMSDGPGGSKWMYVGRQKAGEVWHDMTGNRSGTVTINQDGWGHFFVNGGSVSVWVKR

SEQ ID NO: 30797 - protein, 485 aa, Bacillus sp.
HHDGTNGTIMQYFEWNVPNDGQHWNRLHNNAQNLKNAGITAIWIPPAWKGTSQNDVGYGAYDLYDLGEFNQKGTVRTKYGTKAELERAIRSLKANGIQVYGDVVMNHKGGADFTERVQAVEVNPQNRNQEVSGTYQIEAWTGFNFPGRGNQHSSFKWRWYHFDGTDWDQSRQLANRIYKFRGDGKAWDWEVDTENGNYDYLMYADVDMDHPEVINELNRWGVWYANTLNLDGFRLDAVKHIKFSFMRDWLGHVRGQTGKNLFAVAEYWKNDLGALENYLSKTNWTMSAFDVPLHYNLYQASNSSGNYDMRNLLNGTLVQRHPSHAVTFVDNHDTQPGEALESFVQGWFKPLAYATILTREQGYPQVFYGDYYGIPSDGVPSYRQQIDPLLKARQQYAYGRQHDYFDHWDVIGWTREGNASHPNSGLATIMSDGPGGSKWMYVGRQKAGEVWHDMTGNRSGTVTINQDGWGQFFVNGGSVSVWVKR

SEQ ID NO: 30798 - protein, 483 aa, Bacillus sp. (in: firmicutes)
HHDGTNGTMMQYFEWNVPNDGQHWNRLHNNAQNLKNAGITAIWIPPAWKGTSQNDVGYGAYDLYDLGEFNQKGTVRTKYGTKAELERAIRSLKANGIQVYGDVVMNHKGGADFTERVQAVEVNPQNNNQEVSGTYQIEAWTGFNFPGRGNQHSSFKWRWYHFDGTDWDQSRQLANRIYKFRGKAWDWEVDTEFGNYDYLMYADVDMDHPEVINELNRWGVWYANTLNLDGFRLDAVKHIKFSFMRDWLGHVRGQTGKNLFAVAEYWKNDLGALENYLSKTNWTMSAFDVPLHYNLYQASNSSGNYDMRNLLNGTLVQRHPSHAVTFVDNHDTQPGEALESFVQGWFKPLAYATILTREQGYPSVFYGDYYGIPSDGVPSYRQQIDPLLKARQQYAYGRQHDYFDHWDVIGWTREGNASHPNSGLATIMSDGPGGSKWMYVGRQKAGEVWHDMTGNRSGTVTINQDGWGHFFVNGGSVSVWVKR

SEQ ID NO: 30799 - protein, 485 aa, Bacillus sp.
HHDGTNGTIMQYFEWNEPNDGQHWNRLHNNAQNLKNAGITAIWIPPAWKGTSQNDVGYGAYDLYDLGEFNQKGTVRTKYGTKAELERAIRSLKANGIQVYGDVVMNHKGGADFTERVQAVEVNPQNRNQEVSGTYQIEAWTGFNFPGRGNQHSSFKWRWYHFDGTDWDQSRQLANRIYKFRGDGKAWDWEVDTENGNYDYLMYADVDMDHPEVINELNRWGVWYANTLNLDGFRLDAVKHIKFSFMRDWLGHVRGQTGKNLFAVAEYWKNDLGALENYLSKTNWTMSAFDVPLHYNLYQASNSSGNYDMRNLLNGTLVQRHPSHAVTFVDNHDTQPGEALESFVQGWFKPLAYATILTREQGYPQVFYGDYYGIPSDGVPSYRQQIDPLLKARQQYAYGRQHDYFDHWDVIGWTREGNASHPNSGLATIMSDGPGGSKWMYVGRQKAGEVWHDMTGNRSGTVTINQDGWGHFFVNGGSVSVWVKR

SEQ ID NO: 30800 - protein, 485 aa, Bacillus sp.
HHDGTNGTIMQYFEWNVPNDGQHWNRLHNNAQNLKNAGITAIWIPPAWKGTSQNDVGYGAYDLYDLGEFNQKGTVRTKYGTKAELERAIRSLKANGIQVYGDVVMNHKGGADFTERVQAVEVNPQNRNQEVSGTYQIEAWTGFNFPGRGNQHSSFKWRWYHFDGTDWDQSRQLANRIYKFRGDGKAWDWEVDTENGNYDYLMYADVDMDHPEVINELNRWGVWYANTLNLDGFRLDAVKHIKFSFMRDWLGHVRGQTGKNLFAVAEYWKNDLGALENYLSKTNWTMSAFDVPLHYNLYQASNSSGNYDMRNLLNGTLVQRHPSHAVTFVDNHDTQPGEALESFVQGWFKPLAYATILTREQGYPQVFYGDYYGIPSDGVPLYRQQIDPLLKARQQYAYGRQHDYFDHWDVIGWTREGNASHPNSGLATIMSDGPGGSKWMYVGRQKAGEVWHDMTGNRSGTVTINQDGWGHFFVNGGSVSVWVKR

SEQ ID NO: 30801 - protein, 485 aa, Bacillus sp.
HHDGTNGTIMQYFEWNVPNDGQHWNRLHNNAQNLKNAGITAIWIPPAWKGTSQNDVGYGAYDLYDLGEFNQKGTVRTKYGTKAELERAIRSLKANGIQVYGDVVMNHKGGADFTERVQAVEVNPQNRNQEVSGTYQIEAWTGFNFPGRGNQHSSFKWRWYHFDGTDWDQSRQLANRIYKFRGDGKAWDWEVDTENGNYDYLMYADVDMDHPEVINELNRWGVWYANTLNLDGFRLDAVKHIKFSFMRDWLGHVRGQTGKNLFAVAEYWKNDLGALENYLSKTNWTMSAFDVPLHYNLYQASNSSGNYDMRNLLNGTLVQRHPSHAVTFVDNHDTQPGEALESFVQGWFKPLAYATILTREQGYPQVFYGDYYGIPSDGVPSYRQQIDPLLKARQQYAYGRQHDYFDHWDVIGWTREGNASHPNSGLATIMSDGPGGQKWMYVGRQKAGEVWHDMTGNRSGTVTINQDGWGHFFVNGGSVSVWVKR

SEQ ID NO: 30802 - protein, 485 aa, Bacillus sp.
HHDGTNGTIMQYFEWNVPNDGQHWNRLHNNAQNLKNAGITAIWIPPAWKGTSQNDVGYGAYDLYDLGEFNQKGTVRTKYGTKAELERAIRSLKANGIQVYGDVVMNHKGGADFTERVQAVEVNPQNRNQEVSGTYQIEAWTGFNFPGRGNQHSSFKWRWYHFDGTDWDQSRQLANRIYKFRGDGKAWDWEVDTENGNYDYLMYADVDMDHPEVINELNRWGVWYANTLNLDGFRLDAVKHIKFSFMRDWLGHVRGQTGKNLFAVAEYWKNDLGALENYLSKTNWTMSAFDVPLHYNLYPASNSSGNYDMRNLLNGTLVQRHPSHAVTFVDNHDTQPGEALESFVQGWFKPLAYATILTREQGYPQVFYGDYYGIPSDGVPSYRQQIDPLLKARQQYAYGRQHDYFDHWDVIGWTREGNASHPNSGLATIMSDGPGGSKWMYVGRQKAGEVWHDMTGNRSGTVTINQDGWGHFFVNGGSVSVWVKR

SEQ ID NO: 30803 - protein, 485 aa, Bacillus sp.
HHDGTNGTIMQYFEWNVPNDGQHWNRLHANAQNLKNAGITAIWIPPAWKGTSQNDVGYGAYDLYDLGEFNQKGTVRTKYGTKAELERAIRSLKANGIQVYGDVVMNHKGGADFTERVQAVEVNPQNRNQEVSGTYQIEAWTGFNFPGRGNQHSSFKWRWYHFDGTDWDQSRQLANRIYKFRGDGKAWDWEVDTENGNYDYLMYADVDMDHPEVINELNRWGVWYANTLNLDGFRLDAVKHIKFSFMRDWLGHVRGQTGKNLFAVAEYWKNDLGALENYLSKTNWTMSAFDVPLHYNLYQASNSSGNYDMRNLLNGTLVQRHPSHAVTFVDNHDTQPGEALESFVQGWFKPLAYATILTREQGYPQVFYGDYYGIPSDGVPSYRQQIDPLLKARQQYAYGRQHDYFDHWDVIGWTREGNASHPNSGLATIMSDGPGGSKWMYVGRQKAGEVWHDMTGNRSGTVTINQDGWGHFFVNGGSVSVWVKR

SEQ ID NO: 30804 - protein, 485 aa, Bacillus sp.
HHDGTNGTIMQYFEWNVPNDGQHWNRLHNNAQNLKNAGITAIWIPPAWKGTSQNDVGYGAYDLYDLGEFNQKGTVRTKYGTKAELERAIRSLKANGIQVYGDVVMNHKGGADFTERVQAVEVNPQNRNQEVSGTYQIEAWTGFNFPGRGNQHSSFKWRWYHFDGTDWDQSRQLANRIYKFRGDGKAWDWEVDTENGNYDYLMYADVDMDHPEVINELNRWGVWYANTLNLDGFRLDAVKHIKFSFMRDWLGHVRGQTGKNLFAVAEYWKNDLGALENYLSKTNWTMSAFDVPLHYNLYQASNSSGNYDMRLLLNGTLVQRHPSHAVTFVDNHDTQPGEALESFVQGWFKPLAYATILTREQGYPQVFYGDYYGIPSDGVPSYRQQIDPLLKARQQYAYGRQHDYFDHWDVIGWTREGNASHPNSGLATIMSDGPGGSKWMYVGRQKAGEVWHDMTGNRSGTVTINQDGWGHFFVNGGSVSVWVKR

SEQ ID NO: 30805 - protein, 485 aa, Bacillus sp.
HHDGTNGTIMQYFEWNVPNDGQHWNRLHNNAQNLKNAGITAIWIPPAWKGTSQNDVGYGAYDLYDLGEFNQKGTVRTKYGTKAELERAIRSLKANGIQVYGDVVMNHKGGADFTERVQAVEVNPQNRNQEVSGTYQIEAWTGFNFPGRGNQHSSFKWRWYHFDGTDWDQSRQLANRIYKFRGDGKAWDWEVDTENGNYDYLMYADVDMDHPEVINELNRWGVWYANTLNLDGFRLDAVKHIKFSFMRDWLGHVRGQTGKNLFAVAEYWKNDLGALENYLSKTNWTMSAFDVPLHYNLYQASNSSGNYDMRNLLNGTLVQRHPSHAVTFVDNHDTQPGEALESFVQGWFKPLAYATILTREQGYPQVFYGDYYGIPSDGVPSYRQQIDPLLKARQQYAYGRQHDYFDHWDVIGWTREGNASHPNSGLATIMSDGPGGGKWMYVGRQKAGEVWHDMTGNRSGTVTINQDGWGHFFVNGGSVSVWVKR

SEQ ID NO: 30806 - protein, 483 aa, Bacillus sp.
HHNGTNGTMMQYFEWYLPNDGNHWNRLNSDASNLKSKGITAVWIPPAWKATSQNDVGYGAYDLYDLGEFNQKGTVRTKYGTRSQLQAAVTSLKNNGIQVYGDVVMNHKGGADATEMVRAVEVNPNNRNQEVTGEYTIEAWTRFDFPGRGNTHSSFKWRWYHFDGVDWDMSRELSNRIYKFRGKAWDWEVDTEFGNYDYLMYADYDYDHPESTNEMRNWGVWYTNTLGLDGFRIDAVKHIKYSFTRDWINHVRSATGKNMFAVAEFWKNDLGAIENYLQKTNWNHSVFDVPLHYNLYNASKSQGNYDMRNIFNGTVVQRHPSHAVTFVDNHDSQPEEALESFVDTWFKPLAYALTLTREQGYPSVFYGDYYGIPTHGVPAMRSKIDPILEARQKYAYGPQHDYLDHPDVIGWTREGDSSHPKSGLATLITDGPGGSKRMYAGLKNAGETWYDITGNRSDTVKIGSDGWGEFHVNGSSVSIYVQK

SEQ ID NO: 30807 - protein, 485 aa, Bacillus sp.
HHDGTNGTIMQYFEWNVPNDGQHWNRLHNNAQNLKNAGITAIWIPPAWKGTSQNDVGYGAYDLYDLGEFNQKGTVRTKYGTKAELERAIRSLKANGIQVYGDVVMNHKGGADFTEWVQAVEVNPQNRNQEVSGTYQIEAWTGFNFPGRGNQHSSFKWRWYHFDGTDWDQSRQLANRIYKFRGDGKAWDWEVDTENGNYDYLMYADVDMDHPEVINELNRWGVWYANTLNLDGFRLDAVKHIKFSFMRDWLGHVRGQTGKNLFAVAEYWKNDLGALENYLSKTNWTMSAFDVPLHYNLYQASNSSGNYDMRNLLNGTLVQRHPSHAVTFVDNHDTQPGEALESFVQGWFKPLAYATILTREQGYPQVFYGDYYGIPSDGVPSYRQQIDPLLKARQQYAYGRQHDYFDHWDVIGWTREGNASHPNSGLATIMSDGPGGSKWMYVGRQKAGEVWHDMTGNRSGTVTINQDGWGHFFVNGGSVSVWVKR

SEQ ID NO: 30808 - protein, 485 aa, Bacillus sp.
HHDGTNGTIMQYFEWNVPNDGQHWNRLHNNAQNLKNAGITAIWIPPAWKGTSQNDVGYGAYDLYDLGEFNQKGTVRTKYGTKAELERAIRSLKANGIQVYGDVVMNHKGGADFTERVQAVEVNPQNRNQEVSGTYQIEAWTGFNFPGRGNQHSSFKWRWYHFDGTDWDQSRQLANRIYKFRGDGKAWDWEVDTENGNYDYLMYADVDMDHPEVINELNRWGVWYANTLNLDGFRLDAVKHIKFSFMRDWLGHVRGQTGKNLFAVAEYWKNDLGALENYLSKTNWTMSAFDVPLHYNLYQASNSSGNYDMRNLLNGTLVQRHPSHAVTFVDNHDTQPGEALESFVQGWFKPLAYATILTREQGYPQVFYGDYYGIPSDGVPSYRQQIDPLLKARQVYAYGRQHDYFDHWDVIGWTREGNASHPNSGLATIMSDGPGGSKWMYVGRQKAGEVWHDMTGNRSGTVTINQDGWGHFFVNGGSVSVWVKR

SEQ ID NO: 30809 - protein, 483 aa, Bacillus sp.
HHNGTNGTMMQYFEWYLPNDGNHWNRLNSDASNLKSKGITAVWIPPAWKATSQNDVGYGAYDLYDLGEFNQKGTVRTKYGTRSQLQAAVTSLKNNGIQVYGDVVMNHKGGADATEMVRAVEVNPNNRNQEVTGEYTIEAWTRFDFPGRGNTHSSFKWRWYHFDGVDWDMSRELSNRIYKFRGKAWDWEVDTEFGNYDYLMYADYDYDHPETTNEMRNWGVWYTNTLGLDGFRIDAVKHIKYSFTRDWINHVRSATGKNMFAVAEFWKNDLGAIENYLQKTNWNHSVFDVPLHYNLYNASKSQGNYDMRNIFNGTVVQRHPSHAVTFVDNHDSQPEEALESFVDTWFKPLAYALTLTREQGYPSVFYGDYYGIPTHGVPAMRSKIDPILEARQKYAYGPQHDYLDHPDVIGWTREGDSSHPKSGLATLITDGPGGSKRMYAGLKNAGETWYDITGNRSDTVKIGSDGWGEFHVNGSSVSIYVQK

SEQ ID NO: 30810 - protein, 485 aa, Bacillus sp.
HHFGTNGTIMQYFEWNVPNDGQHWNRLHNNAQNLKNAGITAIWIPPAWKGTSQNDVGYGAYDLYDLGEFNQKGTVRTKYGTKAELERAIRSLKANGIQVYGDVVMNHKGGADFTERVQAVEVNPQNRNQEVSGTYQIEAWTGFNFPGRGNQHSSFKWRWYHFDGTDWDQSRQLANRIYKFRGDGKAWDWEVDTENGNYDYLMYADVDMDHPEVINELNRWGVWYANTLNLDGFRLDAVKHIKFSFMRDWLGHVRGQTGKNLFAVAEYWKNDLGALENYLSKTNWTMSAFDVPLHYNLYQASNSSGNYDMRNLLNGTLVQRHPSHAVTFVDNHDTQPGEALESFVQGWFKPLAYATILTREQGYPQVFYGDYYGIPSDGVPSYRQQIDPLLKARQQYAYGRQHDYFDHWDVIGWTREGNASHPNSGLATIMSDGPGGSKWMYVGRQKAGEVWHDMTGNRSGTVTINQDGWGHFFVNGGSVSVWVKR

SEQ ID NO: 30811 - protein, 485 aa, Bacillus sp.
HHDGTNGTIMQYFEWNVPNDGQHWNRLHNNAQNLKNAGITAIWIPPAWKGTSQNDVGYGAYDLYDLGEFNQKGTVRTKYGTKAELERAIRSLKANGIQVYGDVVMNHKGGADFTERVQAVEVNPQNRNQEVSGTYQIEAWTGFNFPGRGNQHSSFKWRWYHFDGTDWDQSRQLANRIYKFRGDVKAWDWEVDTENGNYDYLMYADVDMDHPEVINELNRWGVWYANTLNLDGFRLDAVKHIKFSFMRDWLGHVRGQTGKNLFAVAEYWKNDLGALENYLSKTNWTMSAFDVPLHYNLYQASNSSGNYDMRNLLNGTLVQRHPSHAVTFVDNHDTQPGEALESFVQGWFKPLAYATILTREQGYPQVFYGDYYGIPSDGVPSYRQQIDPLLKARQQYAYGRQHDYFDHWDVIGWTREGNASHPNSGLATIMSDGPGGSKWMYVGRQKAGEVWHDMTGNRSGTVTINQDGWGHFFVNGGSVSVWVKR

SEQ ID NO: 30812 - protein, 485 aa, Bacillus sp.
HHDGTNGTIMQYFEWNVPNDGQHWNRLHNNAQNLKNAGITAIWIPPAWKGTSQNDVGYGAYDLYDLGEFNQKGTVRTKYGTKAELERAIRSLKANGIQVYGDVVMNHKGGADFTERVQAVEVNPQNRNQEVSGTYQIEAWTGFNFPGRGNQHSSFKWRWYHFDGTDWDQSRQLANRIYKFRGDGKAWDWEVDTENGNYDYLMYADVDMDHPEVINELNRWGLWYANTLNLDGFRLDAVKHIKFSFMRDWLGHVRGQTGKNLFAVAEYWKNDLGALENYLSKTNWTMSAFDVPLHYNLYQASNSSGNYDMRNLLNGTLVQRHPSHAVTFVDNHDTQPGEALESFVQGWFKPLAYATILTREQGYPQVFYGDYYGIPSDGVPSYRQQIDPLLKARQQYAYGRQHDYFDHWDVIGWTREGNASHPNSGLATIMSDGPGGSKWMYVGRQKAGEVWHDMTGNRSGTVTINQDGWGHFFVNGGSVSVWVKR

SEQ ID NO: 30813 - protein, 485 aa, Bacillus sp.
HHDGTNGTIMQYFEWNVPNDGQHWNRLHNNAQNLKNAGITAIWIPPAWKGTSQNDVGYGAYDLYDLGEFNQKGTVRTKYGTKAELERAIRSLKANGIQVYGDVVMNHKGGADFTERVQAVEVNPQNRNQEVSGTYQIEAWTGFNFPGRGNQHSSFKWRWYHFDGTDWDQSRQLANRIYKFRGDGKAWDWEVDTENGNYDYLMYADVDMDHPEVINELNRWGVWYANTLNLDGFRLDAVKHIKFSFMRDWLGHVRGQTGKNLFAVAEYWKNDLGALENYLSKTNWTMSAFDVPLHYNLYQASNSFGNYDMRNLLNGTLVQRHPSHAVTFVDNHDTQPGEALESFVQGWFKPLAYATILTREQGYPQVFYGDYYGIPSDGVPSYRQQIDPLLKARQQYAYGRQHDYFDHWDVIGWTREGNASHPNSGLATIMSDGPGGSKWMYVGRQKAGEVWHDMTGNRSGTVTINQDGWGHFFVNGGSVSVWVKR

SEQ ID NO: 30814 - protein, 485 aa, Bacillus sp.
HHDGTNGTIMQYFEWNVPNDGQHWNRLHNNAQNLKNAGITAIWIPPAWKGTSQNDVGYGAYDLYDLGEFNQKGTVRTKYGTKAELERAIRSLKANGIQVYGDVVMNHKGGADFTERVQAVEVNPQNRNQEVSGTYQIEAWTGFNFPGRGNQHSSFKWRWYHFDGLDWDQSRQLANRIYKFRGDGKAWDWEVDTENGNYDYLMYADVDMDHPEVINELNRWGVWYANTLNLDGFRLDAVKHIKFSFMRDWLGHVRGQTGKNLFAVAEYWKNDLGALENYLSKTNWTMSAFDVPLHYNLYQASNSSGNYDMRNLLNGTLVQRHPSHAVTFVDNHDTQPGEALESFVQGWFKPLAYATILTREQGYPQVFYGDYYGIPSDGVPSYRQQIDPLLKARQQYAYGRQHDYFDHWDVIGWTREGNASHPNSGLATIMSDGPGGSKWMYVGRQKAGEVWHDMTGNRSGTVTINQDGWGHFFVNGGSVSVWVKR

SEQ ID NO: 30815 - protein, 485 aa, Bacillus sp.
HHDGTNGTIMQYFEWNVPNDGQHWNRLHNNAQNLKNAGITAIWIPPAWKGTSQNDVGYGAYDLYDLGEFNQKGTVRTKYGTKAELERAIRSLKANGIQVYGDVVMNHKGGADFTERVQAVEVNPQNRNQEVSGTYQIEAWTGFNFPGRGNQHSSFKWRWYHFDGTDWDQSRQLANRIYKFRGDGKAWDWEVDTENGNYDYLMYADVDMDHPEVINELNRWGVWYANTLNLDGFRLDAVKHIKFSFMRDWLGHVRGQTGKNLFAVAEYWKNDLGALENYLSKTNWTMSAFDVPLHYNLYQASNSSGNYDMRNLLNGTLVQRHPSHAVTFVDNHDTQPGEALESFVQGWFKPLAYATILTREQGYPQVFYGDYYGIPSDGVPSYRQQIDPLLKARQQYAYGRQHDYFDHWDVIGWTREGNASHPNSGLATIMSDGPGGSKWMYVGPQKAGEVWHDMTGNRSGTVTINQDGWGHFFVNGGSVSVWVKR

SEQ ID NO: 30816 - protein, 483 aa, Bacillus sp. (in: firmicutes)
HHDGTNGTIMQYFEWNVPNDGQHWNRLHNNAQNLKNAGITAIWIPPAWKGTSQNDVGYGAYDLYDLGEFNQKGTVRTKYGTKAELERAIRSLKANGIQVYGDVVMNHKGGADFTERVQAVEVNPQNLNQEVSGTYQIEAWTGFNFPGRGNQHSSFKWRWYHFDGTDWDQSRQLANRIYKFRGKAWDWEVDTENGNYDYLMYADVDMDHPEVINELNRWGVWYANTLNLDGFRLDAVKHIKFSFMRDWLGHVRGQTGKNLFAVAEYWKNDLGALENYLSKTNWTMSAFDVPLHYNLYQASNSSGNYDMRNLLNGTLVQRHPSHAVTFVDNHDTQPGEALESFVQGWFKPLAYATILTREQGYPSVFYGDYYGIPSDGVPSYRQQIDPLLKARQQYAYGRQHDYFDHWDVIGWTREGNASHPNSGLATIMSDGPGGSKWMYVGRQKAGEVWHDMTGNRSGTVTINQDGWGHFFVNGGSVSVWVKR

SEQ ID NO: 30817 - protein, 485 aa, Bacillus sp.
HHDGTNGTIMQYFEWNVPNDGQHWNRLHNNAQNLKNAGITAIWIPPAWKGTSQNDVGYGAYDLYDLGEFNQKGTVRTKYGTKAELERAIRSLKANGIQVYGDVVMNHKGGADFTERVQAVEVNPQNRNQEVSGTYQIEAWTGFNFPGRGNQHSSFKWRWYHFDGTDWDQSRQLANRIYKFRGDGKAWDWEVDTENGNYDYLMYADVDMDHPEVINELNRWGVWYANTLNLDGFRLDAVKHIKFSFMRDWLGHVRGQTGKNLFAVAEYWKNDLGALENYLSKTNWTMSAFDVPLHYNLYQASNSSGNYDMRNLLNGTLVQRHPSHAVTFVDNHDTQPGEALESFVQGWFKPLAYATILTREQGYPQVFYGDYYGIPSDGVPSYRQQIDPLLLARQQYAYGRQHDYFDHWDVIGWTREGNASHPNSGLATIMSDGPGGSKWMYVGRQKAGEVWHDMTGNRSGTVTINQDGWGHFFVNGGSVSVWVKR

SEQ ID NO: 30818 - protein, 485 aa, Bacillus sp.
HHDGTNGTIMQYFEWNVPNDGQHWNRLHNNAQNLKNAGITAIWIPPAWKGTSQNDVGYGAYDLYDLGEFNQKGTVRTKYGTKAELERAIRSLKANGIQVYGDVVMNHKGGADFTEDVQAVEVNPQNRNQEVSGTYQIEAWTGFNFPGRGNQHSSFKWRWYHFDGTDWDQSRQLANRIYKFRGDGKAWDWEVDTENGNYDYLMYADVDMDHPEVINELNRWGVWYANTLNLDGFRLDAVKHIKFSFMRDWLGHVRGQTGKNLFAVAEYWKNDLGALENYLSKTNWTMSAFDVPLHYNLYQASNSSGNYDMRNLLNGTLVQRHPSHAVTFVDNHDTQPGEALESFVQGWFKPLAYATILTREQGYPQVFYGDYYGIPSDGVPSYRQQIDPLLKARQQYAYGRQHDYFDHWDVIGWTREGNASHPNSGLATIMSDGPGGSKWMYVGRQKAGEVWHDMTGNRSGTVTINQDGWGHFFVNGGSVSVWVKR

SEQ ID NO: 30819 - protein, 485 aa, Bacillus sp.
HHDGTNGTIMQYFEWNVPNDGQHWNRLHNNAQNLKNAGITAIWIPPAWKGTSQNDVGYGAYDLYDLGEFNQKGTVRTKYGTKAELERAIRSLKANGIQVYGDVVMNHKGGADFTERVQAVEVNPQNRNQEVSGTYQIEAWTGFNFPGRGNQHSSFKWRWYHFDGTDWDQSRQLANRIYKFRGDGKAWDWEVDTENGNYDYLMYADVDMDHPEVINELNRWGVWYANTLNLDGFRLDAVKHIKFSFMRDWLGHVRGQTGKNLFAVAEYWKNDLGALENYLSKTNWTMSAFDVPLHYNLYQASNSSGNYDMRNLLNGTLVQRHPSHAVTFVDNHDTQPGEALESFVQGWFKPLAYATILTREQGYPQVFYGDYYGIPSDGVPSYRQQIDPLLKARQQYAYGRQHDYFDHDDVIGWTREGNASHPNSGLATIMSDGPGGSKWMYVGRQKAGEVWHDMTGNRSGTVTINQDGWGHFFVNGGSVSVWVKR

SEQ ID NO: 30820 - protein, 483 aa, Bacillus sp.
HHNGTNGTMMQYFEWYLPNDGNHWNRLNSDASNLKSKGITAVWIPPAWKAASQNDVGYGAYDLYDLGEFNQKGTVRTKYGTRSQLQAAVTSLKNNGIQVYGDVVMNHKGGADATEMVRAVEVNPNNRNQEVTGEYTIEAWTRFDFPGRGNTHSSFKWRWYHFDGVDWDQSRDLDNRIYKFRGKAWDWEVDTEFGNYDYLMYADYDYDHPESTNEMRNWGVWYTNTLGLDGFRIDAVKHIKYSFTRDWINHVRSATGKNMFAVAEFWKNDLGAIENYLQKTNWNHSVFDVPLHYNLYNASKSGGNYDMRNIFNGTVVQRHPSHAVTFVDNHDSQPEEALESFVETWFKPLAYALTLTREQGYPSVFYGDYYGIPTHGVPAMRSKIDPILEARQKYAYGPQHDYLDHPDVIGWTREGDSSHPKSGLATLITDGPGGSKRMYAGLKNAGETWYDITGNRSDTVKIGSDGWGEFHVNKASVSIYVQK

SEQ ID NO: 30821 - protein, 483 aa, Bacillus sp.
HHNGTNGTMMQYFEWYLPNDGNHWNRLNSDASNLKSKGIKAVWIPPAWKGASQNDVGYGAYDLYDLGEFNQRGTVRTKYGTRSQLQAAVTSLKNNGIQVYGDVVMNHKGGADATEMVRAVEVNPNNRNQEVTGEYTIEAWTRFDFPGRGNTHSSFKWRWYHFDGVDFDQSRRLNNRIYKFRGKAWDWEVDTEFGNYDYLMYADYDYDHPETTNEMRNWGVWYTNTLGLDGFRIDAVKHIKYSFTRDWINHVRSATGKNMFAVAEFWKNDLGAIENYLQKTNWNHSVFDVPLHYNLYNASKSGGNYDMRNIFNGTVVQRHPSHAVTFVDNHDSQPEEALESFVEEWFKPLAYALTLTREQGYPSVFYGDYYGIPTHGVPAMRSKIDPILEARQKYAYGPQHDYLDHPDVIGWTREGDSSHPKSGLATLITDGPGGSKRMYAGLKNAGETWYDITGNRSDTVKIGSDGWGEFHVNDGSVSIYVQK

SEQ ID NO: 30822 - protein, 485 aa, Bacillus sp.
HHDGTNGTIMQYFEWNVPNDGQHWNRLHNNAQNLKNAGITAIWIPPAWKGTSQNDVGYGAYDLYDLGEFNQKGTVRTKYGTKAELERAIRSLKANGIQVYGDVVMNHKGGADFTERVQAVEVNPQNRNQEVSGTYQIEAWTGFNFPGRGNQHSSFKWRWYHFDGTDWDQSRQLANRIYKFRGDGKAWDWEVDTENGNYDYLMYADVDMDHPEVINELNRWGVWYANTLNLDGFRLDAVKHIKFSFMRDWLGHVRGQTGKNLFAVAEYWKNDLGALENYLSKTNWTMSAFDVPLHYNLYQASNSSGNYDMRNLLNGTLVQRHPSHAVTFVDNHDTQPGEALESFVQGWFKPLAYATILTREQGYPQVFYGDYYGIPSDGVPSYRQQIDPLLKARQQYAYGCQHDYFDHWDVIGWTREGNASHPNSGLATIMSDGPGGSKWMYVGRQKAGEVWHDMTGNRSGTVTINQDGWGHFFVNGGSVSVWVKR

SEQ ID NO: 30823 - protein, 485 aa, Bacillus sp.
HHDGTNGTIMQYFEWNVPNDGQHWNRLHNNAQNLKNAGITAIWIPPAWKGTSQNDVGYGAYDLYDLGEFNQKGTVRTKYGTKAELERAIRSLKANGIQVYGDVVMNHKGGADFTERVQAVEVNPQNRNQEVSGTYQIEAWTGFNFPGRGNQHSSFKWRWYHFDGTDWDQSRQLANRIYKFRGDGKAWDWEVDTENGNYDYLMYADVDMDHPEVINELNRWGVWYANTLNLDGFRLDAVKHIKFSFMRDWLGHVRGQTGKNLFAVAEYWKNDLGALENYLDKTNWTMSAFDVPLHYNLYQASNSSGNYDMRNLLNGTLVQRHPSHAVTFVDNHDTQPGEALESFVQGWFKPLAYATILTREQGYPQVFYGDYYGIPSDGVPSYRQQIDPLLKARQQYAYGRQHDYFDHWDVIGWTREGNASHPNSGLATIMSDGPGGSKWMYVGRQKAGEVWHDMTGNRSGTVTINQDGWGHFFVNGGSVSVWVKR

SEQ ID NO: 30824 - protein, 485 aa, Homo sapiens
HHNGTNGTMMQYFEWYLPNDGNHWNRLNSDASNLKSKGITAVWIPPAWKATSQNDVGYGAYDLYDLGEFNQKGTVRTKYGTRSQLQAAVTSLKNNGIQVYGDVVMNHKGGADATEMVRAVEVNPNNRNQEVTGEYTIEAWTRFDFPGRGNTHSSFKWRWYHFDGVDWDMSRELSNRIYKFRGHGKAWDWEVDTEFGNYDYLMYADYDYDHPETTNEMRNWGVWYTNTLGLDGFRIDAVKHIKYSFTRDWINHVRSATGKNMFAVAEFWKNDLGAIENYLQKTNWNHSVFDVPLHYNLYNASKSQGNYDMRNIFNGTVVQRHPSHAVTFVDNHDSQPEEALESFVDTWFKPLAYALTLTREQGYPSVFYGDYYGIPTHGVPAMRSKIDPILEARQKYAYGPQHDYLDHPDVIGWTREGDSSHPKSGLATLITDGPGGSKRMYAGLKNAGETWYDITGNRSDTVKIGSDGWGEFHVNGSSVSIYVQK

SEQ ID NO: 30825 - protein, 485 aa, Bacillus sp.
HHDGTNGTIMQYFEWNVPNDGQHWNRLHNNAQNLKNAGITAIWIPPAWKGTSQNDVGYGAYDLYDLGEFNQKGTVRTKYGTKAELERAIRSLKANGIQVYGDVVMNHKGGADFTERVQAVEVNPQNRNQEVSGTYQIEAWTGFNFPGRGNQHSSFKWRWYHFDGTDWDQSRQLANRIYKFRGDGKAWDWEVDTENGNYDYLMYADVDMDHPEVINELNRWGVWYANTLNLDGFRLDAVKHIKFSFMRDWLGHVRGQTGKNLFAVAEYWKNDLGALENYLSKTNWTMSAFDVPLHYNLYQASNSSGNYDMRNLLNGTLVQRHPSHAVTFVDNHDTQPGEALESFVQGWFKPLAYATILTREQGYPQVFYGDYYGIPSDGVPSYRQQIDPLLKARQQYAYGRQHDYFDHWDVIGWTREGNASHPNSGLATIMSDGPGGSKWMYVGRQKAGEVWHDMTGNRSGTVTINQDGWGHFGVNGGSVSVWVKR

SEQ ID NO: 30826 - protein, 485 aa, Bacillus sp.
HHDGTNGTIMQYFEWNVPNDGQHWNRLHNNAQNLKNAGITAIWIPPAWKGTSQNDVGYGAYDLYDLGEFNQKGTVRTKYGTKAELERAIRSLKANGIQVYGDVVMNHKGGADFTERVQAVEVNPQNRNQEVSGTYQIEAWTGFNFPGRGNQHSSFKWRWYHFDGTDWDQSRQLMNRIYKFRGDGKAWDWEVDTENGNYDYLMYADVDMDHPEVINELNRWGVWYANTLNLDGFRLDAVKHIKFSFMRDWLGHVRGQTGKNLFAVAEYWKNDLGALENYLSKTNWTMSAFDVPLHYNLYQASNSSGNYDMRNLLNGTLVQRHPSHAVTFVDNHDTQPGEALESFVQGWFKPLAYATILTREQGYPQVFYGDYYGIPSDGVPSYRQQIDPLLKARQQYAYGRQHDYFDHWDVIGWTREGNASHPNSGLATIMSDGPGGSKWMYVGRQKAGEVWHDMTGNRSGTVTINQDGWGHFFVNGGSVSVWVKR

SEQ ID NO: 30827 - protein, 485 aa, Bacillus sp.
HHDGTNGTIMQYFEWNVPNDGQHWNRLHNNAQNLKNAGITAIWIPPAWKGTSQNDVGYGAYDLYDLGEFNQKGTVRTKYGTKEELERAIRSLKANGIQVYGDVVMNHKGGADFTERVQAVEVNPQNRNQEVSGTYQIEAWTGFNFPGRGNQHSSFKWRWYHFDGTDWDQSRQLANRIYKFRGDGKAWDWEVDTENGNYDYLMYADVDMDHPEVINELNRWGVWYANTLNLDGFRLDAVKHIKFSFMRDWLGHVRGQTGKNLFAVAEYWKNDLGALENYLSKTNWTMSAFDVPLHYNLYQASNSSGNYDMRNLLNGTLVQRHPSHAVTFVDNHDTQPGEALESFVQGWFKPLAYATILTREQGYPQVFYGDYYGIPSDGVPSYRQQIDPLLKARQQYAYGRQHDYFDHWDVIGWTREGNASHPNSGLATIMSDGPGGSKWMYVGRQKAGEVWHDMTGNRSGTVTINQDGWGHFFVNGGSVSVWVKR

SEQ ID NO: 30828 - protein, 483 aa, Bacillus sp. (in: firmicutes)
HHDGTNGTIMQYFEWNVPNDGQHWNRLHNNAQNLKNAGITAIWIPPAWKGTSQNDVGYGAYDLYDLGEFNQKGTVRTKYGTKAELERAIRSLKANGIQVYGDVVMNHKGGADFTERVQAVEVNPQNRNQEVSGTYQIEAWTGFNFPGRGNQHSSFKWRWYHFDGTDWDQSRQLANRIYKFRGKAWDWEVDTENGNYDYLMYADVDMDHPEVINELNRWGVWYANTLNLDGFRLDAVKHIKFSFMRDWLGHVRGQTGKNLFAIAEFWKNDLGALENYLSKTNWTMSAFDVPLHYNLYQASNSSGNYDMRNLLNGTLVQRHPSHAVTFVDNHDTQPGEALESFVQGWFKPLAYATILTREQGYPKVFYGDYYGIPSDGVPSYRQQIDPLLKARQQYAYGRQHDYFDHWDVIGWTREGNASHPNSGLATIMSDGPGGSKWMYVGRQKAGEVWHDMTGNRSGTVTINQDGWGHFFVNGGSVSVWVKR

SEQ ID NO: 30829 - protein, 485 aa, Bacillus sp.
HHDGTNGTIMQYFEWGVPNDGQHWNRLHNNAQNLKNAGITAIWIPPAWKGTSQNDVGYGAYDLYDLGEFNQKGTVRTKYGTKAELERAIRSLKANGIQVYGDVVMNHKGGADFTERVQAVEVNPQNRNQEVSGTYQIEAWTGFNFPGRGNQHSSFKWRWYHFDGTDWDQSRQLANRIYKFRGDGKAWDWEVDTENGNYDYLMYADVDMDHPEVINELNRWGVWYANTLNLDGFRLDAVKHIKFSFMRDWLGHVRGQTGKNLFAVAEYWKNDLGALENYLSKTNWTMSAFDVPLHYNLYQASNSSGNYDMRNLLNGTLVQRHPSHAVTFVDNHDTQPGEALESFVQGWFKPLAYATILTREQGYPQVFYGDYYGIPSDGVPSYRQQIDPLLKARQQYAYGRQHDYFDHWDVIGWTREGNASHPNSGLATIMSDGPGGSKWMYVGRQKAGEVWHDMTGNRSGTVTINQDGWGHFFVNGGSVSVWVKR

SEQ ID NO: 30830 - protein, 485 aa, Bacillus sp.
HHDGTNGTIMQYFEWNVPNDGQHWNRLHNNAQNLKNAGITAIWIPPAWKGTSQNDVGYGAYDLYDLGEFNQKGTVRTKYGTKAELERAIRSLKANGIQVYGDVVMNHKGGADFTERVQAVEVNPQNRNQEVSGTYQIEAWTGFNFPGRGNQHSSFKWRWYHFDGTDWDQSRQLANRIYKFRGDGKAWDWEVDTENGNYDYLMYADVDMDHPEVINELNRWGVWYANTLNLDGFRLDAVKHIKFSFMRDWLGHVRGQTGKNLFAVAEYWKNDLGALENYLSKTNWTMSAFDVPLHYNLYQASNSSGNYDMRNLLNGTLVQRHPSHAVTFVDNHDTQPGEALESFVQGWFKPLAYATILTREQGYPQVFYGDYYGIPSDGVPSYRQQIDPLLKARQQYAYGLQHDYFDHWDVIGWTREGNASHPNSGLATIMSDGPGGSKWMYVGRQKAGEVWHDMTGNRSGTVTINQDGWGHFFVNGGSVSVWVKR

SEQ ID NO: 30831 - protein, 485 aa, Bacillus sp.
HHDGTNGTIMQYFEWNDPNDGQHWNRLHNNAQNLKNAGITAIWIPPAWKGTSQNDVGYGAYDLYDLGEFNQKGTVRTKYGTKAELERAIRSLKANGIQVYGDVVMNHKGGADFTERVQAVEVNPQNRNQEVSGTYQIEAWTGFNFPGRGNQHSSFKWRWYHFDGTDWDQSRQLANRIYKFRGDGKAWDWEVDTENGNYDYLMYADVDMDHPEVINELNRWGVWYANTLNLDGFRLDAVKHIKFSFMRDWLGHVRGQTGKNLFAVAEYWKNDLGALENYLSKTNWTMSAFDVPLHYNLYQASNSSGNYDMRNLLNGTLVQRHPSHAVTFVDNHDTQPGEALESFVQGWFKPLAYATILTREQGYPQVFYGDYYGIPSDGVPSYRQQIDPLLKARQQYAYGRQHDYFDHWDVIGWTREGNASHPNSGLATIMSDGPGGSKWMYVGRQKAGEVWHDMTGNRSGTVTINQDGWGHFFVNGGSVSVWVKR

SEQ ID NO: 30832 - protein, 485 aa, Bacillus sp.
HHAGTNGTIMQYFEWNVPNDGQHWNRLHNNAQNLKNAGITAIWIPPAWKGTSQNDVGYGAYDLYDLGEFNQKGTVRTKYGTKAELERAIRSLKANGIQVYGDVVMNHKGGADFTERVQAVEVNPQNRNQEVSGTYQIEAWTGFNFPGRGNQHSSFKWRWYHFDGTDWDQSRQLANRIYKFRGDGKAWDWEVDTENGNYDYLMYADVDMDHPEVINELNRWGVWYANTLNLDGFRLDAVKHIKFSFMRDWLGHVRGQTGKNLFAVAEYWKNDLGALENYLSKTNWTMSAFDVPLHYNLYQASNSSGNYDMRNLLNGTLVQRHPSHAVTFVDNHDTQPGEALESFVQGWFKPLAYATILTREQGYPQVFYGDYYGIPSDGVPSYRQQIDPLLKARQQYAYGRQHDYFDHWDVIGWTREGNASHPNSGLATIMSDGPGGSKWMYVGRQKAGEVWHDMTGNRSGTVTINQDGWGHFFVNGGSVSVWVKR

SEQ ID NO: 30833 - protein, 483 aa, Bacillus sp. (in: firmicutes)
HHDGTNGTMMQYFEWNVPNDGQHWNRLHNNAQNLKNAGITAIWIPPAWKGTSQNDVGYGAYDLYDLGEFNQKGTVRTKYGTKAELERAIRSLKANGIQVYGDVVMNHKGGADFTERVQAVEVNPQNRNQEVSGTYQIEAWTGFNFPGRGNQHSSFKWRWYHFDGTDWDQSRQLANRIYKFRGKAWDWEVDTEFGNYDYLMYADVDMDHPEVINELNRWGVWYANTLNLDGFRLDAVKHIKFSFMRDWLGHVRGQTGKNLFAVAEYWKNDLGALENYLSKTNWTMSAFDAPLHYNLYQASNSSGNYDMRNLLNGTLVQRHPSHAVTFVDNHDTQPGEALESFVQGWFKPLAYATILTREQGYPSVFYGDYYGIPSDGVPSYRQQIDPLLKARQQYAYGRQHDYFDHWDVIGWTREGNASHPNSGLATIMSDGPGGSKWMYVGRQKAGEVWHDMTGNRSGTVTINQDGWGHFFVNGGSVSVWVKR

SEQ ID NO: 30834 - protein, 485 aa, Bacillus sp.
HHDGTNGTIMQYFEWNVPNDGQHWNRLHNNAQNLKNAGITAIWIPPAWKGTSQNDVGYGAYDLYDLGEFNQKGTVRTKYGTKAELERAIRSLKANGIQVYGDVVMNHKGGADFTERVQAVEVNPQNRNQEVSGTYQIEAWTGFNFPGRGNQHSSFKWRWYHFDGTDWDQSRQLANRIYKFRGDGKAWDWEVDTENGNYDYLMYADVDMDHPEVINELNRWGVWYANTLNLDGFRLDAVKHIKFSFMRDWLGHVRGQTGKNLFAVAEYWKNDLGALENYLSKTNWTMSAFDVPLHYNLYQASNSSGNYDMRNLLNGTLVQRHPSHAVTFVDNHDTQPGEALESFVQGWFKPLAYATILTREQGYPQVFYGDYYGIPSDGVPSYRQQIDPHLKARQQYAYGRQHDYFDHWDVIGWTREGNASHPNSGLATIMSDGPGGSKWMYVGRQKAGEVWHDMTGNRSGTVTINQDGWGHFFVNGGSVSVWVKR

SEQ ID NO: 30835 - protein, 485 aa, Bacillus sp.
HHDGTNGTIMQYFEWNVPNDGQHWNRLHNNAQNLKNAGITAIWIPPAWKGTSQNDVGYGAYDLYDLGEFNQKGTVRTKYGTKAELERAIRSLKANGIQVYGDVVMNHKGGADFTEQVQAVEVNPQNRNQEVSGTYQIEAWTGFNFPGRGNQHSSFKWRWYHFDGTDWDQSRQLANRIYKFRGDGKAWDWEVDTENGNYDYLMYADVDMDHPEVINELNRWGVWYANTLNLDGFRLDAVKHIKFSFMRDWLGHVRGQTGKNLFAVAEYWKNDLGALENYLSKTNWTMSAFDVPLHYNLYQASNSSGNYDMRNLLNGTLVQRHPSHAVTFVDNHDTQPGEALESFVQGWFKPLAYATILTREQGYPQVFYGDYYGIPSDGVPSYRQQIDPLLKARQQYAYGRQHDYFDHWDVIGWTREGNASHPNSGLATIMSDGPGGSKWMYVGRQKAGEVWHDMTGNRSGTVTINQDGWGHFFVNGGSVSVWVKR

SEQ ID NO: 30836 - protein, 483 aa, Bacillus sp. (in: firmicutes)
HHDGTNGTMMQYFEWNVPNDGQHWNRLHNNAQNLKNAGITAIWIPPAWKGTSQNDVGYGAYDLYDLGEFNQKGTVRTKYGTKAELERAIRSLKANGIQVYGDVVMNHKGGADFTERVQAVEVNPQNRNQEVSGTYQIEAWTGFNFPGRGNQHSSFKWRWYHFDGTDWDQSRQLANRIYKFRGKAWDWEVDTEFGNYDYLMYADVDMDHPEVINELNRWGVWYANTLNLDGFRLDAVKHIKFSFMRDWLGHVRGQTGKNLFAVAEYWKNDLGALENYLSKTNWTMSAFDVPLHYNLYQASNSSGNYDMRNLLNGTLVQRHPSHAVTFVDNHDTQPGEALESFVQGWFKPLAYATILTREQGYPCVFYGDYYGIPSDGVPSYRQQIDPLLKARQQYAYGRQHDYFDHWDVIGWTREGNASHPNSGLATIMSDGPGGSKWMYVGRQKAGEVWHDMTGNRSGTVTINQDGWGHFFVNGGSVSVWVKR

SEQ ID NO: 30837 - protein, 485 aa, Bacillus sp.
HHDGTNGTIMQYFEWNVPNDGQHWNRLHNNAQNLKNAGITAIWIPPAWKGTSQNDVGYGAYDLYDLGEFNQKGTVRTKYGTKAELERAIRSLKANGIQVYGDVVMNHKGGADFTERVQAVEVNPQNRNQEVSGTYQIEAWTGFNFPGRGNQHSSFKWRWYHFDGTDWDQSRQLANRIYKFRGDGKAWDWEVDTENGNYDYLMYADVDMDHPEVINELNRWGVWYANTLNLDGFRLDAVKHIKFSFMRDWLGHVRGQTGKNLFAVAEYWKNDLGALENYLSKTNWTMSAFDVPLHYNLYQASNSSGNYDMRNLLNGTLVQCHPSHAVTFVDNHDTQPGEALESFVQGWFKPLAYATILTREQGYPQVFYGDYYGIPSDGVPSYRQQIDPLLKARQQYAYGRQHDYFDHWDVIGWTREGNASHPNSGLATIMSDGPGGSKWMYVGRQKAGEVWHDMTGNRSGTVTINQDGWGHFFVNGGSVSVWVKR

SEQ ID NO: 30838 - protein, 485 aa, Bacillus sp.
HHDGTNGTIMQYFEWNVPNDGQHWNRLHNNAQNLKNAGITAIWIPPAWKGTSQNDVGYGAYDLYDLGEFNQKGTVRTKYGTKAELERAIRSLKANGIQVYGDVVMNHKGGADFTEFVQAVEVNPQNRNQEVSGTYQIEAWTGFNFPGRGNQHSSFKWRWYHFDGTDWDQSRQLANRIYKFRGDGKAWDWEVDTENGNYDYLMYADVDMDHPEVINELNRWGVWYANTLNLDGFRLDAVKHIKFSFMRDWLGHVRGQTGKNLFAVAEYWKNDLGALENYLSKTNWTMSAFDVPLHYNLYQASNSSGNYDMRNLLNGTLVQRHPSHAVTFVDNHDTQPGEALESFVQGWFKPLAYATILTREQGYPQVFYGDYYGIPSDGVPSYRQQIDPLLKARQQYAYGRQHDYFDHWDVIGWTREGNASHPNSGLATIMSDGPGGSKWMYVGRQKAGEVWHDMTGNRSGTVTINQDGWGHFFVNGGSVSVWVKR

SEQ ID NO: 30839 - protein, 485 aa, Bacillus sp.
HHDGTNGTIMQYFEWNVPNDGQHWNRLHNNAQNLKNAGITAIWIPPAWKGTSQNDVGYGAYDLYDLGEFNQKGTVRTKYGTKAELERAIRSLKANGIQVYGDVVMNHKGGADFTERVQAVEVNPQNRNQEVSGTYQIEAWTGFNFPGRGNQHSSFKWRWYHFDGTDWDQSRQLANRIYKFRGDGKAWDWEVDTENGNYDYLMYADVDMDHPEVINELNRWGVWYANTLNLDGFRLDAVKHIKFSFMRDWLGHVRGQTGKNLFAVAEYWKNDLGALENYLSKTNWTMSAFDVPLHYNLYQASNSSGNYDMRNLLNGTLVQRHPSHAVTFVDNHDTQPGEALESFVQGWFKPLAYATILTREQGYPQVFYGDYYGIPSLGVPSYRQQIDPLLKARQQYAYGRQHDYFDHWDVIGWTREGNASHPNSGLATIMSDGPGGSKWMYVGRQKAGEVWHDMTGNRSGTVTINQDGWGHFFVNGGSVSVWVKR

SEQ ID NO: 30840 - protein, 485 aa, Bacillus sp.
HHDGTNGTIMQYFEWNVPNDGQHWNRLHNNAQNLKNAGITAIWIPPAWKGTSQNDVGYGAYDLYDLGEFNQKGTVRTKYGTKAELERAIRSLKANGIQVYGDVVMNHKGGADFTERVQAVEVNPQNRNQEVSGTYQIEAWTGFNFPGRGNQHSSFKWRWYHFDGTDWDQSRQLANRIYKFRGDGKAWDWEVDTENGNYDYLMYADVDMDHPEVINELNRWGVWYANTLNLDGFRLDAVKHIKFSFMRDWLGHVRGQTGKNLFAVAEYWKNDLGALENYLSKTNWTMSAFDVPLHYNLYQASNSSGNYDMRNLLNGTLVQLHPSHAVTFVDNHDTQPGEALESFVQGWFKPLAYATILTREQGYPQVFYGDYYGIPSDGVPSYRQQIDPLLKARQQYAYGRQHDYFDHWDVIGWTREGNASHPNSGLATIMSDGPGGSKWMYVGRQKAGEVWHDMTGNRSGTVTINQDGWGHFFVNGGSVSVWVKR

SEQ ID NO: 30841 - protein, 483 aa, Bacillus sp. (in: firmicutes)
HHDGTNGTIMQYFEWNVPNDGQHWNRLHNNAQNLKNAGITAIWIPPAWKGTSQNDVGYGAYDLYDLGEFNQKGTVRTKYGTKAELERAIRSLKANGIQVYGDVVMNHKGGADFTERVQAVEVNPQNHNQEVSGTYQIEAWTGFNFPGRGNQHSSFKWRWYHFDGTDWDQSRQLANRIYKFRGKAWDWEVDTENGNYDYLMYADVDMDHPEVINELNRWGVWYANTLNLDGFRLDAVKHIKFSFTRDWLGHVRGQTGKNLFAVAEYWKNDLGAAENYLSKTNWTMSAFDVPLHYNLYQASNSSGNYDMRNLLNGTLVQRHPSHAVTFVDNHDTQPGEALESFVQGWFKPLAYATILTREQGYPSVFYGDYYGIPSDGVPSYRQQIDPLLKARQQYAYGRQHDYFDHWDVIGWTREGNASHPNSGLATIMSDGPGGSKWMYVGRQKAGEVWHDMTGNRSGTVTINQDGWGHFFVNGGSVSVWVKR

SEQ ID NO: 30842 - protein, 485 aa, Bacillus sp.
HHDGTNGTIMQYFEWNVPNDGQHWNRLHNNAQNLKNAGITAIWIPPAWKGTSQNDVGYGAYDLYDLGEFNQKGTVRTKYGTKAELERAIRSLKANGIQVYGDVVMNHKGGADFTERVQAVEVNPQNRNQEVSGTYQIEAWTGFNFPGRGNQHSSFKWRWYHFDGTDWDQSRQLANRIYKFRGDGKAWDWEVDTENGNYDYLMYADVDMDHPEVINELNRWGVWYANTLNLDGFRLDAVKHIKFSFMRDWLGHVRGQTGKNLFAVAEYWKNDLGALENYLSKTNWTMSAFDVPLHYNLYQASNSSGNYDMRNLLNGTLVQRHPSHAVTFVDNHDTQPGEALESFVQGWFKPLAYATILTREQGYPQVFYGDYYGIPRDGVPSYRQQIDPLLKARQQYAYGRQHDYFDHWDVIGWTREGNASHPNSGLATIMSDGPGGSKWMYVGRQKAGEVWHDMTGNRSGTVTINQDGWGHFFVNGGSVSVWVKR

SEQ ID NO: 30843 - protein, 485 aa, Bacillus sp.
HHDGTNGTIMQYFEWNVPNDGQHWNRLHNNAQNLKNAGITAIWIPPAWKGTSQNDVGYGAYDLYDLGEFNQKGTVRTKYGTKAELERAIRSLKANGIQVYGDVVMNHKGGADFTERVQAVEVNPQNRNQEVSGTYQIEAWTGFNFPGRGNQHSSFKWRWYHFDGTDWDQSRQLANRIYKFRGDGKAWDWEVDTENGNYDYLMYADVDMDHPEVINELNRWGVWYANTLNLDGFRLDAVKHIKFSFMRDWLGHVRGQTGKNLFAVAEYWKNDLGALENYLSKTNWTMSAFDVPLHYNLYQASNSSGNYDMRNLLNGTLVQRHPSHAVTFVDNHDTQPGEALESFVQGWFKPLAYATILTREQGYPQVFYGDYYGIPSDGVPSYRQQIDPLLAARQQYAYGRQHDYFDHWDVIGWTREGNASHPNSGLATIMSDGPGGSKWMYVGRQKAGEVWHDMTGNRSGTVTINQDGWGHFFVNGGSVSVWVKR

SEQ ID NO: 30844 - protein, 485 aa, Bacillus sp.
HHDGTNGTIMQYFEWNVPNDGQHWNRLHNNAQNLKNAGITAIWIPPAWKGTSQNDVGYGAYDLYDLGEFNQKGTVRTKYGTKAELERAIRSLKANGIQVYGDVVMNHKGGADFTERVQAVEVNPQNRNQEVSGTYQIEAWTGFNFPGRGNQHSSFKWRWYHFDGTDWDQSRQLANRIYKFRGDGKAWDWEVDTENGNYDYLMYADVDMDHPEVINELNRWGVWYANTLNLDGFRLDAVKHIKFSFMRDWLGHVRGQTGKNLFAVAEYWKNDLGALENYLSKTNWTMSAFDVPLHYNLYQASNSSGNYDMRNLLNGTLVQRHPSHAVTFVDNHDTQPGEALESFVQGWFKPLAYATILTREQGYPQVFYGDYYGIPSDGVPSYRQQIDPLLKARQQRAYGRQHDYFDHWDVIGWTREGNASHPNSGLATIMSDGPGGSKWMYVGRQKAGEVWHDMTGNRSGTVTINQDGWGHFFVNGGSVSVWVKR

SEQ ID NO: 30845 - protein, 485 aa, Bacillus sp.
HHDGTNGTIMQYFEWNVPNDGQHWNRLHNNAQNLKNAGITAIWIPPAWKGTSQNDVGYGAYDLYDLGEFNQKGTVRTKYGTKAELERAIRSLKANGIQVYGDVVMNHKGGADFTERVQAVEVNPQNRNQEVSGTYQIEAWTGFNFPGRGNQHSSFKWRWYHFDGTDWDQSRQLANRIYKFRGDGKAWDWEVDTENGNYDYLMYADVDMDHPEVINELMRWGVWYANTLNLDGFRLDAVKHIKFSFMRDWLGHVRGQTGKNLFAVAEYWKNDLGALENYLSKTNWTMSAFDVPLHYNLYQASNSSGNYDMRNLLNGTLVQRHPSHAVTFVDNHDTQPGEALESFVQGWFKPLAYATILTREQGYPQVFYGDYYGIPSDGVPSYRQQIDPLLKARQQYAYGRQHDYFDHWDVIGWTREGNASHPNSGLATIMSDGPGGSKWMYVGRQKAGEVWHDMTGNRSGTVTINQDGWGHFFVNGGSVSVWVKR

SEQ ID NO: 30846 - protein, 485 aa, Bacillus sp.
HHDGTNGTIMQYFEWNVPNDGQHWNRLHNNAQNLKNAGITAIWIPPAWKGTSQNDVGYGAYDLYDLGEFNQKGTVRTKYGTKAELERAIRSLKANGIQVYGDVVMNHKGGADFTERVQAVEVNPQNRNQEVSGTYQIEAWTGFNFPGRGNQHSSFKWRWYHFDGTDWDQSRQLANRIYKFRGDGKAWDWEVDTENGNYDYLMYADVDMDHPEVINELNRWGVWYANTLNLDGFRLDAVKHIKFSFMRDWLGHVRGQTGKNLFAVAEYWKNDLGALENYLSKTNWTMSAFDVPLHYNLYQASNSSGNYDMRNLLNGTLVQRHPSHAVTFVDNHDTQPGEALESFVQGWFKPLAYAAILTREQGYPQVFYGDYYGIPSDGVPSYRQQIDPLLKARQQYAYGRQHDYFDHWDVIGWTREGNASHPNSGLATIMSDGPGGSKWMYVGRQKAGEVWHDMTGNRSGTVTINQDGWGHFFVNGGSVSVWVKR

SEQ ID NO: 30847 - protein, 485 aa, Bacillus sp.
HHDGTNGTIMQYFEWNVPNDGQHWNRLHNNAQNLKNAGITAIWIPPAWKGTSQNDVGYGAYDLYDLGEFNQKGTVRTKYGTKAELERAIRSLKANGIQVYGDVVMNHKGGADFTERVQAVEVNPQNRNQEVSGTYQIEAWTGFNFPGRGNQHSSFKWRWYHFDGTDWDQSRQLANRIYKFRGDGKAWDWEVDTENGNYDYLMYADVDMDHPEVINELNRWGVWYANTLNLDGFRLDAVKHIKFSFMRDWLGHVRGQTGKNLFAVAEYWKNDLGALENYLSKTNWTMSAFDVPLHYNLYQASNSSGNYDMRNLLNGTLVQRHPSHAVTFVDNHDTQPGEALESFVQLWFKPLAYATILTREQGYPQVFYGDYYGIPSDGVPSYRQQIDPLLKARQQYAYGRQHDYFDHWDVIGWTREGNASHPNSGLATIMSDGPGGSKWMYVGRQKAGEVWHDMTGNRSGTVTINQDGWGHFFVNGGSVSVWVKR

SEQ ID NO: 30848 - protein, 485 aa, Bacillus sp.
HHDGTNGTIMQYFEWNVPNDGQHWNRLHNNAQNLKNAGITAIWIPPAWKGTSQNDVGYGAYDLYDLGEFNQKGTVRTKYGTKAELERAIRSLKANGIQVYGDVVMNHKGGADFTERVQAVEVNPQNRNQEVSGTYQIEAWTGFNFPGRGNQHSSFKWRWYHFDGTDWDQSRQLANRIYKFRGDGKAWDWEVDTENGNYDYLMYADVDMDHPEVINELNRWGVWYANTLNLDGFRLDAVKHIKFSFMRDWLGHVRGQTGKNLFAVAEYWKNDLGALENYLSKTNWTMSAFDVPLHYNLYQASNSSGNYDMRNLLNGTLVQRHPSHAVTFVDNHDTQPGEALESFVQGWFKPLAYATILTREQGYPQVFYGDYYGIPEDGVPSYRQQIDPLLKARQQYAYGRQHDYFDHWDVIGWTREGNASHPNSGLATIMSDGPGGSKWMYVGRQKAGEVWHDMTGNRSGTVTINQDGWGHFFVNGGSVSVWVKR

SEQ ID NO: 30849 - protein, 485 aa, Bacillus sp.
HHDGTNGTIMQYFEWNVPNDGQHWNRLHNNAQNLKNAGITAIWIPPAWKGTSQNDVGYGAYDLYDLGEFNQKGTVRTKYGTKAELERAIRSLKANGIQVYGDVVMNHKGGADFTERVQAVEVNPQNRNQEVSGTYQIEAWTGFNFPGRGNQHSSFKWRWYHFDGTDWDQSRQLANRIYKFRGDGKAWDWEVDTENGNYDYLMYADVDMDHPEVINELNRWGVWYANTLNLDGFRLDAVKHIKFSFMRDWLGHVRGQTGKNLFAVAEYWKNDLGALENYLSKTNWTMSAFDVPLHYNLYQASNSSGNYDMRNLLNGTLVQRHPSHAVTFVDNHDTQPGEALESFVQGWFKPLAYATILTREQGYPQVFYGDYYGIPSSGVPSYRQQIDPLLKARQQYAYGRQHDYFDHWDVIGWTREGNASHPNSGLATIMSDGPGGSKWMYVGRQKAGEVWHDMTGNRSGTVTINQDGWGHFFVNGGSVSVWVKR

SEQ ID NO: 30850 - protein, 485 aa, Bacillus sp.
HHDGTNGTIMQYFEWNVPNDGQHWNRLHNNAQNLKNAGITAIWIPPAWKGTSQNDVGYGAYDLYDLGEFNQKGTVRTKYGTKAELERAIRSLKANGIQVYGDVVMNHKGGADFTERVQAVEVNPQNRNQEVSGEYQIEAWTGFNFPGRGNQHSSFKWRWYHFDGTDWDQSRQLANRIYKFRGDGKAWDWEVDTENGNYDYLMYADVDMDHPEVINELNRWGVWYANTLNLDGFRLDAVKHIKFSFMRDWLGHVRGQTGKNLFAVAEYWKNDLGALENYLSKTNWTMSAFDVPLHYNLYQASNSSGNYDMRNLLNGTLVQRHPSHAVTFVDNHDTQPGEALESFVQGWFKPLAYATILTREQGYPQVFYGDYYGIPSDGVPSYRQQIDPLLKARQQYAYGRQHDYFDHWDVIGWTREGNASHPNSGLATIMSDGPGGSKWMYVGRQKAGEVWHDMTGNRSGTVTINQDGWGHFFVNGGSVSVWVKR

SEQ ID NO: 30851 - protein, 485 aa, Bacillus sp.
HHDGTNGTIMQYFEWNVPNDGQHWNRLHNNAQNLKNAGITAIWIPPAWKGTSQNDVGYGAYDLYDLGEFNQKGTVRTKYGTKAELERAIRSLKANGIQVYGDVVMNHKGGADFTERVQAVEVNPQNRNQEVSGTYQIEAWTGFNFPGRGNQHSSFKWRWYHFDGTDWDQSRQLANRIYKFRGDGKAWDWEVDTENGNYDYLMYADVDMDHPEVINELNRWGVWYANTLNLDGFRLDAVKHIKFSFMRDWLGHVRGQTGKNLFAVAEYWKNDLGALENYLSKTNWTMSAFDVPLHYNLYQASNSSGNYDMRRLLNGTLVQRHPSHAVTFVDNHDTQPGEALESFVQGWFKPLAYATILTREQGYPQVFYGDYYGIPSDGVPSYRQQIDPLLKARQQYAYGRQHDYFDHWDVIGWTREGNASHPNSGLATIMSDGPGGSKWMYVGRQKAGEVWHDMTGNRSGTVTINQDGWGHFFVNGGSVSVWVKR

SEQ ID NO: 30852 - protein, 483 aa, Bacillus sp. (in: firmicutes)
HHDGTNGTIMQYFEWNVPNDGQHWNRLHNNAQNLKNAGITAIWIPPAWKGTSQNDVGYGAYDLYDLGEFNQKGTVRTKYGTKAELERAIRSLKANGIQVYGDVVMNHKGGADFTENVQAVEVNPQNRNQEVMGTYRIEAWTGFNFPGRGNQHSSFKWRWYHFDGTDWDQSRQLANRIYKFRGKAWDWEVDTEFGNYDYLMYADVDMDHPEVINELNRWGVWYANTLNLDGFRLDAVKHIKFSFMRDWLGHVRGQTGKNLFAVAEYWKNDLGALENYLSKTNWTMSAFDVPLHYNLYQASNSSGNYDMRNLLNGTLVQRHPSHAVTFVDNHDTQPGEALESFVQGWFKPLAYATILTREQGYPSVFYGDYYGIPSDGVPSYRQQIDPLLKARQQYAYGRQHDYFDHWDVIGWTREGNASHPNSGLATIMSDGPGGSKWMYVGRQKAGEVWHDMTGNRSGTVTINQDGWGHFFVNGGSVSVWVKR

SEQ ID NO: 30853 - protein, 485 aa, Bacillus sp.
HHDGTNGTIMQYFEWNVPNDGQHWNRLHNNAQNLKNAGITAIWIPPAWKGTSQNDVGYGAYDLYDLGEFNQKGTVRTKYGTKAELERAIRSLKANGIQVYGDVVMNHKGGADFTERVQAVEVNPQNRNQEVSGTYQIEAWTGFNFPGRGNQHSSFKWRWYHFDGTDWDQSRQLANRIYKFRGDGKAWDWEVDTENGNYDYLMYADVDMDHPEVINELNRWGVWYANTLNLDGFRLDAVKHIKFSFMRDWLGHVRGQTGKNLFAVAEYWKNDLGALENYLSKTNWTMSAFDVPLHYNLYQASNSSGNYDMRNLLNGTLVQRHPSHAVTFVDNHDTQPGEALESFVQGWFKPLAYATILTREQGYPQVFYGDYYGIPSDGVPSYRQQIDPLLKARQQYAYGRQHDYFDHWGVIGWTREGNASHPNSGLATIMSDGPGGSKWMYVGRQKAGEVWHDMTGNRSGTVTINQDGWGHFFVNGGSVSVWVKR

SEQ ID NO: 30854 - protein, 485 aa, Bacillus sp.
HHDGTNGTIMQYFEWNVPNDGQHWNRLHNNAQNLKNAGITAIWIPPAWKGTSQNDVGYGAYDLYDLGEFNQKGTVRTKYGTKAELERAIRSLKANGIQVYGDVVMNHKGGADFTERVQAVEVNPQNRNQEVSGTYQIEAWTGFNFPGRGNQHSSFKWRWYHFDGTDWDQSRQLANRIYKFRGDGKAWDWEVDTENGNYDYLMYADVDMDHPEVINELSRWGVWYANTLNLDGFRLDAVKHIKFSFMRDWLGHVRGQTGKNLFAVAEYWKNDLGALENYLSKTNWTMSAFDVPLHYNLYQASNSSGNYDMRNLLNGTLVQRHPSHAVTFVDNHDTQPGEALESFVQGWFKPLAYATILTREQGYPQVFYGDYYGIPSDGVPSYRQQIDPLLKARQQYAYGRQHDYFDHWDVIGWTREGNASHPNSGLATIMSDGPGGSKWMYVGRQKAGEVWHDMTGNRSGTVTINQDGWGHFFVNGGSVSVWVKR

SEQ ID NO: 30855 - protein, 485 aa, Bacillus sp.
HHDGTNGTIMQYFEWNVPNDGEHWNRLHNNAQNLKNAGITAIWIPPAWKGTSQNDVGYGAYDLYDLGEFNQKGTVRTKYGTKAELERAIRSLKANGIQVYGDVVMNHKGGADFTERVQAVEVNPQNRNQEVSGTYQIEAWTGFNFPGRGNQHSSFKWRWYHFDGTDWDQSRQLANRIYKFRGDGKAWDWEVDTENGNYDYLMYADVDMDHPEVINELNRWGVWYANTLNLDGFRLDAVKHIKFSFMRDWLGHVRGQTGKNLFAVAEYWKNDLGALENYLSKTNWTMSAFDVPLHYNLYQASNSSGNYDMRNLLNGTLVQRHPSHAVTFVDNHDTQPGEALESFVQGWFKPLAYATILTREQGYPQVFYGDYYGIPSDGVPSYRQQIDPLLKARQQYAYGRQHDYFDHWDVIGWTREGNASHPNSGLATIMSDGPGGSKWMYVGRQKAGEVWHDMTGNRSGTVTINQDGWGHFFVNGGSVSVWVKR

SEQ ID NO: 30856 - protein, 485 aa, Bacillus sp.
HHDGTNGTIMQYFEWNVPNDGQHWNRLHNNAQNLKNAGITAIWIPPAWKGTSQNDVGYGAYDLYDLGEFNQKGTVRTKYGTKAELERAIRSLKANGIQVYGDVVMNHKGGADFTERVQAVEVNPQNRNQEVSGTYQIEAWTGFNFPGRGNQHSSFKWRWYHFDGTDWDQSRQLANRIYKFRGDGKAWDWEVDTENGNYDYLMYADVDMDHPEVINELNRWGVWYANTLNLDGFRLDAVKHIKFSFMRDWLGHVRGQTGKNLFAVAEYWKNDLGALENYLSKTNWTMSAFDVPLHYNLYQASNSSGNYDMRNLLNGTLVQVHPSHAVTFVDNHDTQPGEALESFVQGWFKPLAYATILTREQGYPQVFYGDYYGIPSDGVPSYRQQIDPLLKARQQYAYGRQHDYFDHWDVIGWTREGNASHPNSGLATIMSDGPGGSKWMYVGRQKAGEVWHDMTGNRSGTVTINQDGWGHFFVNGGSVSVWVKR

SEQ ID NO: 30857 - protein, 485 aa, Bacillus sp.
HHDGTNGTIMQYFEWNVPNDGQHWNRLHNNAQNLKNAGITAIWIPPAWKGTSQNDVGYGAYDLYDLGEFNQKGTVRTKYGTKAELERAIRSLKANGIQVYGDVVMNHKGGADFTERVQAVEVNPQNRNQEVSGTYQIEAWTGFNFPGRGNQHSSFKWRWYHFDGTDWDQSRQLANRIYKFRGDGKAWDWEVDTENGNYDYLMYADVDMDHPEVINELNRWGVWYANTLNLDGFRLDAVKHIKFSFMRDWLGHVRGQTGKNLFAVAEYWKNDLGALENYLSKTNWTMSAFDVPLHYNLYQASNSSGNYDMRNLLNGTLVQRHPSHAVTFVDNHDTQPGEALESFVQGWFKPLAYATILTREQGYPQVFYGDYYGIPSDGVPSYRLQIDPLLKARQQYAYGRQHDYFDHWDVIGWTREGNASHPNSGLATIMSDGPGGSKWMYVGRQKAGEVWHDMTGNRSGTVTINQDGWGHFFVNGGSVSVWVKR

SEQ ID NO: 30858 - protein, 485 aa, Bacillus sp.
HHDGTNGTIMQYFEWNVPNDGQHWNRLHNNAQNLKNAGITAIWIPPAWKGTSQNDVGYGAYDLYDLGEFNQKGTVRTKYGTKAELERAIRSLKANGIQVYGDVVMNHKGGADFTERVQAVEVNPQNRNQEVSGTYQIEAWTGFNFPGRGNQHSSFKWRWYHFDGTDWDQSRQLANRIYKFRGDGKAWDWEVDTENGNYDYLMYADVDMDHPEVINELNRWGVWYANTLNLDGFRLDAVKHIKFSFMRDWLGHVRGQTGKNLFAVAEYWKNDLGALENYLSKTNWTMSAFDVPLHYNLYLASNSSGNYDMRNLLNGTLVQRHPSHAVTFVDNHDTQPGEALESFVQGWFKPLAYATILTREQGYPQVFYGDYYGIPSDGVPSYRQQIDPLLKARQQYAYGRQHDYFDHWDVIGWTREGNASHPNSGLATIMSDGPGGSKWMYVGRQKAGEVWHDMTGNRSGTVTINQDGWGHFFVNGGSVSVWVKR

SEQ ID NO: 30859 - protein, 485 aa, Bacillus sp.
HHDGTNGTIMQYFEWNVPNDGQHWNRLHNNAQNLKNAGITAIWIPPAWKGTSQNDVGYGAYDLYDLGEFNQKGTVRTKYGTKAELERAIRSLKANGIQVYGDVVMNHKGGADFTERVQAVEVNPQNRNQEVSGTYQIEAWTGFNFPGRGNQHSSFKWRWYHFDGTDWDQSRQLANRIYKFRGDGKAWDWEVDTENGNYDYLMYADVDMDHPEVINELNRWGVWYANTLNLDGFRLDAVKHIKFSFMRDWLGHVRGQTGKNLFAVAEYWKNDLGALENYLSKTNWTMSYFDVPLHYNLYQASNSSGNYDMRNLLNGTLVQRHPSHAVTFVDNHDTQPGEALESFVQGWFKPLAYATILTREQGYPQVFYGDYYGIPSDGVPSYRQQIDPLLKARQQYAYGRQHDYFDHWDVIGWTREGNASHPNSGLATIMSDGPGGSKWMYVGRQKAGEVWHDMTGNRSGTVTINQDGWGHFFVNGGSVSVWVKR

SEQ ID NO: 30860 - protein, 485 aa, Bacillus sp.
HHDGTNGTIMQYFEWNVPNDGQHWNRLHNNAQNLKNAGITAIWIPPAWKGTSQNDVGYGAYDLYDLGEFNQKGTVRTKYGTKAELERAIRSLKANGIQVYGDVVMNHKGGADFTERVQAVEVNPQNRNQEVSGTYQIEAWTGFNFPGRGNQHSSFKWRWYHFDGTDWDQSRQLANRIYKFRGDGKAWDWEVDTENGNYDYLMYADVDMDHPEVINELNRWGVWYANTLNLDGFRLDAVKHIKFSFMRDWLGHVRGQTGKNLFAVAEYWKNDLGALENYLSKTNWTMSAFDVPLHYNLYQASNSSGNYDMRNLLNGTLVQRHPSHAVTFVDNHDTQPGEALESFVQGWFKPLAYATILTREQGYPQVFYGDYYGIPSDGVPSYRQQIDPLLKARQQYAYGRQHDYFDHWDVIGWTREGNASHPNSGLATIMSDGPGGSKWMYVGRSKAGEVWHDMTGNRSGTVTINQDGWGHFFVNGGSVSVWVKR

SEQ ID NO: 30861 - protein, 485 aa, Bacillus sp.
HHDGTNGTIMQYFEWNVPNDGQHWNRLHNNAANLKNAGITAIWIPPAWKGTSQNDVGYGAYDLYDLGEFNQKGTVRTKYGTKAELERAIRSLKANGIQVYGDVVMNHKGGADFTERVQAVEVNPQNRNQEVSGTYQIEAWTGFNFPGRGNQHSSFKWRWYHFDGTDWDQSRQLANRIYKFRGDGKAWDWEVDTENGNYDYLMYADVDMDHPEVINELNRWGVWYANTLNLDGFRLDAVKHIKFSFMRDWLGHVRGQTGKNLFAVAEYWKNDLGALENYLSKTNWTMSAFDVPLHYNLYQASNSSGNYDMRNLLNGTLVQRHPSHAVTFVDNHDTQPGEALESFVQGWFKPLAYATILTREQGYPQVFYGDYYGIPSDGVPSYRQQIDPLLKARQQYAYGRQHDYFDHWDVIGWTREGNASHPNSGLATIMSDGPGGSKWMYVGRQKAGEVWHDMTGNRSGTVTINQDGWGHFFVNGGSVSVWVKR

SEQ ID NO: 30862 - protein, 485 aa, Bacillus sp.
HHDGTNGTIMQYFEWNVPNDGQHWNRLHNNAQNLKNAGITAIWIPPAWKGTSQNDVGYGAYDLYDLGEFNQKGTVRTKYGTKAELERAIRSLKANGIQVYGDVVMNHKGGADFTERVQAVEVNPQNRNQEVSGTYQIEAWTGFNFPGRGNQHSSFKWRWYHFDGTDWDQSRQLANRIYKFRGDGKAWDWEVDTENGNYDYLMYADVDMDHPEVINELNRWGVWYANTLNLDGFRLDAVKHIKFSFMRDWLGHVRGQTGKNLFAVAEYWKNDLGALENYLSKTNWTMSAFDVPLHYNLYQASNSSGNYDMRNLLNGTLVQRHPSHAVTFVDNHDTQPGEALESFVQGWFKPLAYATILTREQGYPQVFYGDYYGIPSDGVPSYRQQIDPLLKARQQYAYGRQHDYFDHPDVIGWTREGNASHPNSGLATIMSDGPGGSKWMYVGRQKAGEVWHDMTGNRSGTVTINQDGWGHFFVNGGSVSVWVKR

SEQ ID NO: 30863 - protein, 485 aa, Bacillus sp.
HHDGTNGTIMQYFEWNVPNDGQHWNRLHNNAQNLKNAGITAIWIPPAWKGTSQNDVGYGAYDLYDLGEFNQKGTVRTKYGTKAELERAIRSLKANGIQVYGDVVMNHKGGADFTERVQAVEVNPTNRNQEVSGTYQIEAWTGFNFPGRGNQHSSFKWRWYHFDGTDWDQSRQLANRIYKFRGDGKAWDWEVDTENGNYDYLMYADVDMDHPEVINELNRWGVWYANTLNLDGFRLDAVKHIKFSFMRDWLGHVRGQTGKNLFAVAEYWKNDLGALENYLSKTNWTMSAFDVPLHYNLYQASNSSGNYDMRNLLNGTLVQRHPSHAVTFVDNHDTQPGEALESFVQGWFKPLAYATILTREQGYPQVFYGDYYGIPSDGVPSYRQQIDPLLKARQQYAYGRQHDYFDHWDVIGWTREGNASHPNSGLATIMSDGPGGSKWMYVGRQKAGEVWHDMTGNRSGTVTINQDGWGHFFVNGGSVSVWVKR

SEQ ID NO: 30864 - protein, 485 aa, Bacillus sp.
HHDGTNGTIMQYFEWNVPNDGQHWNRLHNNAQNLKNAGITAIWIPPAWKGTSQNDVGYGAYDLYDLGEFNQKGTVRTKYGTKAELERAIRSLKANGIQVYGDVVMNHKGGADFTERVQAVEVNPQNRNQEVSGTYQIEAWTGFNFPGRGNQHSSFKWRWYHFDGTDWDQSRQLANRIYKFRGDGKAWDWEVDTENGNYDYLMYADVDMDHPEVINELNRWGVWYANTLNLDGFRLDAVKHIKFSFMRDWLGHVRGQTGKNLFAVAEYWKNDLGALENYLSKTNWTMSAFDVPLHYNLYSASNSSGNYDMRNLLNGTLVQRHPSHAVTFVDNHDTQPGEALESFVQGWFKPLAYATILTREQGYPQVFYGDYYGIPSDGVPSYRQQIDPLLKARQQYAYGRQHDYFDHWDVIGWTREGNASHPNSGLATIMSDGPGGSKWMYVGRQKAGEVWHDMTGNRSGTVTINQDGWGHFFVNGGSVSVWVKR

SEQ ID NO: 30865 - protein, 485 aa, Bacillus sp.
HHDGTNGTIMQYFEWNVPNDGQHWNRLHNNAQNLKNAGITAIWIPPAWKGTSQNDVGYGAYDLYDLGEFNQKGTVRTKYGTKAELERAIRSLKANGIQVYGDVVMNHKGGADFTERVQAVEVNPQNRNQEVSGTYQIEAWTGFNFPGRGNQHSSFKWRWYHFDGTDWDQSRQLANRIYKFRGDGKAWDWEVDKENGNYDYLMYADVDMDHPEVINELNRWGVWYANTLNLDGFRLDAVKHIKFSFMRDWLGHVRGQTGKNLFAVAEYWKNDLGALENYLSKTNWTMSAFDVPLHYNLYQASNSSGNYDMRNLLNGTLVQRHPSHAVTFVDNHDTQPGEALESFVQGWFKPLAYATILTREQGYPQVFYGDYYGIPSDGVPSYRQQIDPLLKARQQYAYGRQHDYFDHWDVIGWTREGNASHPNSGLATIMSDGPGGSKWMYVGRQKAGEVWHDMTGNRSGTVTINQDGWGHFFVNGGSVSVWVKR

SEQ ID NO: 30866 - protein, 485 aa, Bacillus sp.
HHDGTNGTIMQYFEWNVPNDGQHWNRLHNNAQNLKNAGITAIWIPPAWKGTSQNDVGYGAYDLYDLGEFNQKGTVRTKYGTKAELERAIRSLKANGIQVYGDVVMNHKGGADFTERVQAVEVNPQNRNQEVSGTYQIEAWTGFNFPGRGNQHSSFKWRWYHFDGTDWDQSRQLANRIYKFRGDGKAWDWEVDTENGNYDYLMYADVDMDHPEVINELNRWGVWYANTLNLDGFRLDAVKHIKFSFMRDWLGHVRGQTGKNLFAVAEYWKNDLGALENYLSKTNWTMSAFDVPLHYNLYQASNSSGNYDMRNLLNGTLVQRHPSHAVTFVDNHDTQPGEALESFVQGWFKPLAYATILTREQGYPQVFYGDYYGIPSDGVPSYRQQIDPLLKARQQYAYGRQHDYFDHWDVIGWTREGNGSHPNSGLATIMSDGPGGSKWMYVGRQKAGEVWHDMTGNRSGTVTINQDGWGHFFVNGGSVSVWVKR

SEQ ID NO: 30867 - protein, 485 aa, Bacillus sp.
HHDGTNGTIMQYFEWNVPNDGQHWNRLHNNAQNLKNAGITAIWIPPAWKGTSQNDVGYGAYDLYDLGEFNQKGTVRTKYGTKAELERAIRSLKANGIQVYGDVVMNHKGGADFTERVQAVEVNPQNRNQEVSGTYQIEAWTGFNFPGRGNQHSSFKWRWYHFDGTDWDQSRQLANRIYKFRGDGKAWDWEVDTENGNYDYLMYADVDMDHPEVINELNRWGVWYANTLNLDGFRLDAVKHIKFSFMRDWLGHVRGQTGKNLFAVAEYWKNDLGALENYLSKTNWWMSAFDVPLHYNLYQASNSSGNYDMRNLLNGTLVQRHPSHAVTFVDNHDTQPGEALESFVQGWFKPLAYATILTREQGYPQVFYGDYYGIPSDGVPSYRQQIDPLLKARQQYAYGRQHDYFDHWDVIGWTREGNASHPNSGLATIMSDGPGGSKWMYVGRQKAGEVWHDMTGNRSGTVTINQDGWGHFFVNGGSVSVWVKR

SEQ ID NO: 30868 - protein, 483 aa, Bacillus sp. (in: firmicutes)
HHDGTNGTIMQYFEWNVPNDGQHWNRLHNNAQNLKNAGITAIWIPPAWKGTSQNDVGYGAYDLYDLGEFNQKGTVRTKYGTKAELERAIRSLKANGIQVYGDVVMNHKGGADFTERVQAVEVNPQNRNQEVSGTYQIEAWTGFNFPGRGNQHSSFKWRWYHFDGTDWDQSRQLANRIYKFRGKAWDWEVDTEFGNYDYLMYADVDMDHPEVINELNRWGVWYANTLNLDGFRLDAVKHIKFSFMRDWLGHVRGQTGKNLFAVAEYWKNDLGALENYLSKTNWTMSAFDVPLHYNLYQASNSSGNYDMRNLLNGTLVQRHPSHAVTFVDNHDTQPGEALESFVQGWFKPLAYATILTREQGYPSVFYGDYYGIPSDGVPSYRQQIDPLLKARQQYAYGRQHDYFDHWDVIGWTREGNASHPNSGLATIMSDGPGGSKWMYVGRQKAGEVWHDMTGNRSGTVTINQDGWGHFFVNGGSVSVWVKR

SEQ ID NO: 30869 - protein, 485 aa, Bacillus sp.
HHDGTNGTIMQYFEWNVPNDGQHWNRLHNNAQNLKNAGITAIWIPPAWKGTSQNDVGYGAYDLYDLGEFNQKGTVRTKYGTKAELERAIRSLKANGIQVYGDVVMNHKGGADFTERVQAVEVNPQNRNQEVSGTYQIEAWTGFNFPGRGNQHSSFKWRWYHFDGTDWDQSRQAANRIYKFRGDGKAWDWEVDTENGNYDYLMYADVDMDHPEVINELNRWGVWYANTLNLDGFRLDAVKHIKFSFMRDWLGHVRGQTGKNLFAVAEYWKNDLGALENYLSKTNWTMSAFDVPLHYNLYQASNSSGNYDMRNLLNGTLVQRHPSHAVTFVDNHDTQPGEALESFVQGWFKPLAYATILTREQGYPQVFYGDYYGIPSDGVPSYRQQIDPLLKARQQYAYGRQHDYFDHWDVIGWTREGNASHPNSGLATIMSDGPGGSKWMYVGRQKAGEVWHDMTGNRSGTVTINQDGWGHFFVNGGSVSVWVKR

SEQ ID NO: 30870 - protein, 485 aa, Bacillus sp.
HHDGTNGTIMQYFEWNVPNDGQHWNRLHNNAQNLKNAGITAIWIPPAWKGTSQNDVGYGAYDLYDLGEFNQKGTVRTKYGTKQELERAIRSLKANGIQVYGDVVMNHKGGADFTERVQAVEVNPQNRNQEVSGTYQIEAWTGFNFPGRGNQHSSFKWRWYHFDGTDWDQSRQLANRIYKFRGDGKAWDWEVDTENGNYDYLMYADVDMDHPEVINELNRWGVWYANTLNLDGFRLDAVKHIKFSFMRDWLGHVRGQTGKNLFAVAEYWKNDLGALENYLSKTNWTMSAFDVPLHYNLYQASNSSGNYDMRNLLNGTLVQRHPSHAVTFVDNHDTQPGEALESFVQGWFKPLAYATILTREQGYPQVFYGDYYGIPSDGVPSYRQQIDPLLKARQQYAYGRQHDYFDHWDVIGWTREGNASHPNSGLATIMSDGPGGSKWMYVGRQKAGEVWHDMTGNRSGTVTINQDGWGHFFVNGGSVSVWVKR

SEQ ID NO: 30871 - protein, 485 aa, Bacillus sp.
HHDGTNGTIMQYFEWNVPNDGQHWNRLHNNAQNLKNAGITAIWIPPAWKGTSQNDVGYGAYDLYDLGEFNQKGTVRTKYGTKAELERAIRSLKANGIQVYGDVVMNHKGGADFTERVQAVEVNPQNRNQEVSGTYQIEAWTGFNFPGRGNQHSSFKWRWYHFDGTDWDQSRQLANRIYKFRGDGKAWDWEVDTENGNYDYLMYADVDMDHPEVINELNRWGVWYANTLNLDGFRLDAVKHIKFSFMRDWLGHVRGQTGKNLFAVAEYWKNDLGALENYLSKTNWTMSAFDVPLHYNLYQASNSSGNYDMRNLLNGTLVQRHPSHAVTFVDNHDTQPGEALESFVQGWFKPLAYATILTREQGYPQVFYGDYYGIPSDGVPSYSQQIDPLLKARQQYAYGRQHDYFDHWDVIGWTREGNASHPNSGLATIMSDGPGGSKWMYVGRQKAGEVWHDMTGNRSGTVTINQDGWGHFFVNGGSVSVWVKR

SEQ ID NO: 30872 - protein, 485 aa, Bacillus sp.
HHDGTNGTIMQYFEWNVPNDGQHWNRLHNNAQNLKNAGITAIWIPPAWKGTSQNDVGYGAYDLYDLGEFNQKGTVRTKYGTKAELERAIRSLKANGIQVYGDVVMNHKGGADFTERVQAVEVNPQNRNQEVSGTYQIEAWTGFNFPGRGNQHSSFKWRWYHFDGTDWDQSRQLANRIYKFRGDGKAWDWEVDTENGNYDYLMYADVDMDHPEVINELNRWGVWYANTLNLDGFRLDAVKHIKFSFMRDWLGHVRGQTGKNLFAVAEYWKNDLGALENYLSKTNWTMSAFDVPLHYNLYQASNSSGNYDMRNLLNGTLVQRHPSHAVTFVDNHDTQPGEALESFVQGWFKPLAYATILTREQGYPQVFYGDYYGIPSDGVPSYRQQIDPLLKARQQYAYGRQHDYFDHWDVIGWTREGNASHPNSGLATIMSDGPGGSKWMYVGRQKAGEVWHDVTGNRSGTVTINQDGWGHFFVNGGSVSVWVKR

SEQ ID NO: 30873 - protein, 485 aa, Bacillus sp.
HHDGTNGTIMQYFEWNVPNDGQHWNRLHNNAQNLKNAGITAIWIPPAWKGTSQNDVGYGAYDLYDLGEFNQKGTVRTKYGTKAELERAIRSLKANGIQVYGDVVMNHKGGADFTERVQAVEVNPQNRNQEVSGTYQIEAWTGFNFPGRGNQHSSFKWRWYHFDGTDWDQSRQLANRIYKFRGDGKAWDWEVDTENGNYDYLMYADVDMDHPEVINELNRWGVWYANTLNLDGFRLDAVKHIKFSFMRDWLGHVRGQTGKNLFAVAEYWKNDLGALENYLSKTNWSMSAFDVPLHYNLYQASNSSGNYDMRNLLNGTLVQRHPSHAVTFVDNHDTQPGEALESFVQGWFKPLAYATILTREQGYPQVFYGDYYGIPSDGVPSYRQQIDPLLKARQQYAYGRQHDYFDHWDVIGWTREGNASHPNSGLATIMSDGPGGSKWMYVGRQKAGEVWHDMTGNRSGTVTINQDGWGHFFVNGGSVSVWVKR

SEQ ID NO: 30874 - protein, 485 aa, Bacillus sp.
HHNGTNGTMMQYFEWYLPNDGNHWNRLNSDASNLKSKGITAVWIPPAWKAASQNDVGYGAYDLYDLGEFNQKGTVRTKYGTRSQLQAAVTSLKNNGIQVYGDVVMNHKGGADATEMVRAVEVNPNNRNQEVTGEYTIEAWTRFDFPGRGNTHSSFKWRWYHFDGVDWDQSRDLDNRIYKFRGHGKAWDWEVDTEFGNYDYLMYADYDYDHPESTNEMRNWGVWYTNTLGLDGFRIDAVKHIKYSFTRDWINHVRSATGKNMFAVAEFWKNDLGAIENYLQKTNWNHSVFDVPLHYNLYNASKSGGNYDMRNIFNGTVVQRHPSHAVTFVDNHDSQPEEALESFVETWFKPLAYALTLTREQGYPSVFYGDYYGIPTHGVPAMRSKIDPILEARQKYAYGPQHDYLDHPDVIGWTREGDSSHPKSGLATLITDGPGGSKRMYAGLKNAGETWYDITGNRSDTVKIGSDGWGEFHVNKASVSIYVQK

SEQ ID NO: 30875 - protein, 485 aa, Bacillus sp.
HHDGTNGTIMQYFEWNVPNDGQHWNRLHNNAQNLKNAGITAIWIPPAWKGTSQNDVGYGAYDLYDLGEFNQKGTVRTKYGTKAELERAIRSLKANGIQVYGDVVMNHKGGADFTERVQAVEVNPQNRNQEVSGTYQIEAWTGFNFPGRGNQHSSFKWRWYHFDGTDWDQSRQLANRIYKFRGDGKAWDWEVDTENGNYDYLMYADVDMDHPEVINELNRWGVWYANTLNLDGFRLDAVKHIKFSFMRDWLGHVRGQTGKNLFAVAEYWKNDLGALENYLSKTNWTCSAFDVPLHYNLYQASNSSGNYDMRNLLNGTLVQRHPSHAVTFVDNHDTQPGEALESFVQGWFKPLAYATILTREQGYPQVFYGDYYGIPSDGVPSYRQQIDPLLKARQQYAYGRQHDYFDHWDVIGWTREGNASHPNSGLATIMSDGPGGSKWMYVGRQKAGEVWHDMTGNRSGTVTINQDGWGHFFVNGGSVSVWVKR

SEQ ID NO: 30876 - protein, 485 aa, Bacillus sp.
HHDGTNGTIMQYFEWNVPNDGQHWNRLHNNAQNLKNAGITAIWIPPAWKGTSQNDVGYGAYDLYDLGEFNQKGTVRTKYGTKAELERAIRSLKANGIQVYGDVVMNHKGGADFTERVQAVEVNPQNRNQEVSGTYQIEAWTGFNFPGRGNCHSSFKWRWYHFDGTDWDQSRQLANRIYKFRGDGKAWDWEVDTENGNYDYLMYADVDMDHPEVINELNRWGVWYANTLNLDGFRLDAVKHIKFSFMRDWLGHVRGQTGKNLFAVAEYWKNDLGALENYLSKTNWTMSAFDVPLHYNLYQASNSSGNYDMRNLLNGTLVQRHPSHAVTFVDNHDTQPGEALESFVQGWFKPLAYATILTREQGYPQVFYGDYYGIPSDGVPSYRQQIDPLLKARQQYAYGRQHDYFDHWDVIGWTREGNASHPNSGLATIMSDGPGGSKWMYVGRQKAGEVWHDMTGNRSGTVTINQDGWGHFFVNGGSVSVWVKR

SEQ ID NO: 30877 - protein, 485 aa, Bacillus sp.
HHDGTNGTIMQYFEWNVPNDGQHWNRLHNNAQNLKNAGITAIWIPPAWKGTSQNDVGYGAYDLYDLGEFNQKGTVRTKYGTKAELERAIRSLKANGIQVYGDVVMNHKGGADVTERVQAVEVNPQNRNQEVSGTYQIEAWTGFNFPGRGNQHSSFKWRWYHFDGTDWDQSRQLANRIYKFRGDGKAWDWEVDTENGNYDYLMYADVDMDHPEVINELNRWGVWYANTLNLDGFRLDAVKHIKFSFMRDWLGHVRGQTGKNLFAVAEYWKNDLGALENYLSKTNWTMSAFDVPLHYNLYQASNSSGNYDMRNLLNGTLVQRHPSHAVTFVDNHDTQPGEALESFVQGWFKPLAYATILTREQGYPQVFYGDYYGIPSDGVPSYRQQIDPLLKARQQYAYGRQHDYFDHWDVIGWTREGNASHPNSGLATIMSDGPGGSKWMYVGRQKAGEVWHDMTGNRSGTVTINQDGWGHFFVNGGSVSVWVKR

SEQ ID NO: 30878 - protein, 485 aa, Bacillus sp.
HHWGTNGTIMQYFEWNVPNDGQHWNRLHNNAQNLKNAGITAIWIPPAWKGTSQNDVGYGAYDLYDLGEFNQKGTVRTKYGTKAELERAIRSLKANGIQVYGDVVMNHKGGADFTERVQAVEVNPQNRNQEVSGTYQIEAWTGFNFPGRGNQHSSFKWRWYHFDGTDWDQSRQLANRIYKFRGDGKAWDWEVDTENGNYDYLMYADVDMDHPEVINELNRWGVWYANTLNLDGFRLDAVKHIKFSFMRDWLGHVRGQTGKNLFAVAEYWKNDLGALENYLSKTNWTMSAFDVPLHYNLYQASNSSGNYDMRNLLNGTLVQRHPSHAVTFVDNHDTQPGEALESFVQGWFKPLAYATILTREQGYPQVFYGDYYGIPSDGVPSYRQQIDPLLKARQQYAYGRQHDYFDHWDVIGWTREGNASHPNSGLATIMSDGPGGSKWMYVGRQKAGEVWHDMTGNRSGTVTINQDGWGHFFVNGGSVSVWVKR

SEQ ID NO: 30879 - protein, 485 aa, Bacillus sp.
HHDGTNGTIMQYFEWNVPNDGQHWNRLHNNAQNLKNAGITAIWIPPAWKGTSQNDVGYGAYDLYDLGEFNQKGTVRTKYGTKAELERAIRSLKANGIQVYGDVVMNHKGGADFTERVQAVEVNPQNRNQEVSGTYQIEAWTGFNFPGRGNQHSSFKWRWYHFDGTDWDQSRQLANRIYKFRGDGKAWDWEVDTENGNYDYLMYADVDMDHPEVINELNRWGVWYANTLNLDGFRLDAVKHIKFSFMRDWLGHVRGQTGKNLFAVAEYWKNDLGALENYLSKTNWTMSAFDVPLHYNLYQASNSSGNYDMRNLLNGTLVQRHPSHAVTFVDNHDTQPGEALESFVQGWFKPLAYATILTREQGYPQVFYGDYYGIPSDGVPSYRQQIDPLLKARQQYAYGRQHDYFDHWDVIGWTREGNASHPNSGLATIMSDGPGGSKWMYVGRQKAGEVWHDMTGNREGTVTINQDGWGHFFVNGGSVSVWVKR

SEQ ID NO: 30880 - protein, 485 aa, Bacillus sp.
HHDGTNGTIMQYFEWNVPNDGMHWNRLHNNAQNLKNAGITAIWIPPAWKGTSQNDVGYGAYDLYDLGEFNQKGTVRTKYGTKAELERAIRSLKANGIQVYGDVVMNHKGGADFTERVQAVEVNPQNRNQEVSGTYQIEAWTGFNFPGRGNQHSSFKWRWYHFDGTDWDQSRQLANRIYKFRGDGKAWDWEVDTENGNYDYLMYADVDMDHPEVINELNRWGVWYANTLNLDGFRLDAVKHIKFSFMRDWLGHVRGQTGKNLFAVAEYWKNDLGALENYLSKTNWTMSAFDVPLHYNLYQASNSSGNYDMRNLLNGTLVQRHPSHAVTFVDNHDTQPGEALESFVQGWFKPLAYATILTREQGYPQVFYGDYYGIPSDGVPSYRQQIDPLLKARQQYAYGRQHDYFDHWDVIGWTREGNASHPNSGLATIMSDGPGGSKWMYVGRQKAGEVWHDMTGNRSGTVTINQDGWGHFFVNGGSVSVWVKR

SEQ ID NO: 30881 - protein, 485 aa, Bacillus sp.
HHDGTNGTIMQYFEWNVPNDGQHWNRLHNNAQNLKNAGITAIWIPPAWKGTSQNDVGYGAYDLYDLGEFNQKGTVRTKYGTKAELERAIRSLKANGIQVYGDVVMNHKGGADFTERVQAVEVNPQNRNQEVSGTYQIEAWTGFNFPGRGNQHSSFKWRWYHFDGTDWDQSRQSANRIYKFRGDGKAWDWEVDTENGNYDYLMYADVDMDHPEVINELNRWGVWYANTLNLDGFRLDAVKHIKFSFMRDWLGHVRGQTGKNLFAVAEYWKNDLGALENYLSKTNWTMSAFDVPLHYNLYQASNSSGNYDMRNLLNGTLVQRHPSHAVTFVDNHDTQPGEALESFVQGWFKPLAYATILTREQGYPQVFYGDYYGIPSDGVPSYRQQIDPLLKARQQYAYGRQHDYFDHWDVIGWTREGNASHPNSGLATIMSDGPGGSKWMYVGRQKAGEVWHDMTGNRSGTVTINQDGWGHFFVNGGSVSVWVKR

SEQ ID NO: 30882 - protein, 485 aa, Bacillus sp.
HHDGTNGTIMQYFEWNVPNDGQHWNRLHNNAQNLKNAGITAIWIPPAWKGTSQNDVGYGAYDLYDLGEFNQKGTVRTKYGTKAELERAIRSLKANGIQVYGDVVMNHKGGADFTERVQAVEVNPQNRNQEVSGTYQIEAWTGFNFPGRGNQHSSFKWRWYHFDGTDWDQSRQLANRIYKFRGDGKAWDWEVDTENGNYDYLMYADVDMDHPEVINELNRWGVWYANTLNLDGFRLDAVKHIKFSFMRDWLGHVRGQTGKNLFAVAEYWKNDLGALENYLSKTNWTMSAFDVPLHYNLYQASNSSGNYDMRNLLNGTLVQRHPSHAVTFVDNHDTQPGEALESFVQGWFKPLAYATILTREQGYPQVFYGDYYGIPSDGVPSYRQQIDPLLKARQQYAYGRQHDYFDHGDVIGWTREGNASHPNSGLATIMSDGPGGSKWMYVGRQKAGEVWHDMTGNRSGTVTINQDGWGHFFVNGGSVSVWVKR

SEQ ID NO: 30883 - protein, 485 aa, Bacillus sp.
HHDGTNGTIMQYFEWNVPNDGQHWNRLHNNADNLKNAGITAIWIPPAWKGTSQNDVGYGAYDLYDLGEFNQKGTVRTKYGTKAELERAIRSLKANGIQVYGDVVMNHKGGADFTERVQAVEVNPQNRNQEVSGTYQIEAWTGFNFPGRGNQHSSFKWRWYHFDGTDWDQSRQLANRIYKFRGDGKAWDWEVDTENGNYDYLMYADVDMDHPEVINELNRWGVWYANTLNLDGFRLDAVKHIKFSFMRDWLGHVRGQTGKNLFAVAEYWKNDLGALENYLSKTNWTMSAFDVPLHYNLYQASNSSGNYDMRNLLNGTLVQRHPSHAVTFVDNHDTQPGEALESFVQGWFKPLAYATILTREQGYPQVFYGDYYGIPSDGVPSYRQQIDPLLKARQQYAYGRQHDYFDHWDVIGWTREGNASHPNSGLATIMSDGPGGSKWMYVGRQKAGEVWHDMTGNRSGTVTINQDGWGHFFVNGGSVSVWVKR

SEQ ID NO: 30884 - protein, 485 aa, Bacillus sp.
HHDGTNGTIMQYFEWNVPNDGQHWNRLHNNAQNLKNAGITAIWIPPAWKGTSQNDVGYGAYDLYDLGEFNQKGTVRTKYGTKAELERAIRSLKANGIQVYGDVVMNHKGGADFTERVQAVEVNPQNRNQEVSGTYQIEAWTGFNFPGRGNQHSSFKWRWYHFDGTDWDQSRQLANRIYKFRGDGKAWDWEVDTENGNYDYLMYADVDMDHPEVINELNRWGVWYANTLNLDGFRLDAVKHIKFSFMRDWLGHVRGQTGKNLFAVAEYWKNDLGALENYLSKTNWTDSAFDVPLHYNLYQASNSSGNYDMRNLLNGTLVQRHPSHAVTFVDNHDTQPGEALESFVQGWFKPLAYATILTREQGYPQVFYGDYYGIPSDGVPSYRQQIDPLLKARQQYAYGRQHDYFDHWDVIGWTREGNASHPNSGLATIMSDGPGGSKWMYVGRQKAGEVWHDMTGNRSGTVTINQDGWGHFFVNGGSVSVWVKR

SEQ ID NO: 30885 - protein, 485 aa, Bacillus sp.
HHDGTNGTIMQYFEWNVPNDGQHWNRLHNNAQNLKNAGITAIWIPPAWKGTSQNDVGYGAYDLYDLGEFNQKGTVRTKYGTKAELERAIRSLKANGIQVYGDVVMNHKGGADFTERVQAVEVNPQNRNQEVSGTYQIEAWTGFNFPGRGNQHSSFKWRWYHFDGTDWDQSRQLANRIYKFRGDGKAWDWEVDTENGNYDYLMYADVDMDHPEVINELNRWGVWYANTLNLDGFRLDAVKHIKFSFMRDWLGHVRGQTGKNLFAVAEYWKNDLGALENYLSKTNWTMSAFDVPLHYNLYQASNSSGNYDMRNLLNGTLVQRHPSHAVTFVDNHDTQPGEALESFVQGWFKPLAYATILTREQGYPQVFYGDYYGIPSDGVPSYRQQIDPLLKARQSYAYGRQHDYFDHWDVIGWTREGNASHPNSGLATIMSDGPGGSKWMYVGRQKAGEVWHDMTGNRSGTVTINQDGWGHFFVNGGSVSVWVKR

SEQ ID NO: 30886 - protein, 485 aa, Bacillus sp.
HHDGTNGTIMQYFEWNVPNDGQHWNRLHNNAQNLKNAGITAIWIPPAWKGTSQNDVGYGAYDLYDLGEFNQKGTVRTKYGTKAELERAIRSLKANGIQVYGDVVMNHKGGADFTERVQAVEVNPQNRNQEVSGTYQIEAWTGFNFPGRGNQHSSFKWRWYHFDGTDWDQSRQLANRIYKFRGDGKAWDWEVDTENGNYDYLMYADVDMDHPEVINELNRWGVWYANTLNLDGFRLDAVKHIKFSFMRDWLGHVRGQTGKNLFAVAEYWKNDLGALENYLEKTNWTMSAFDVPLHYNLYQASNSSGNYDMRNLLNGTLVQRHPSHAVTFVDNHDTQPGEALESFVQGWFKPLAYATILTREQGYPQVFYGDYYGIPSDGVPSYRQQIDPLLKARQQYAYGRQHDYFDHWDVIGWTREGNASHPNSGLATIMSDGPGGSKWMYVGRQKAGEVWHDMTGNRSGTVTINQDGWGHFFVNGGSVSVWVKR

SEQ ID NO: 30887 - protein, 485 aa, Bacillus sp.
HHDGTNGTIMQYFEWNVPNDGQHWNRLHNNAQNLKNAGITAIWIPPAWKGTSQNDVGYGAYDLYDLGEFNQKGTVRTKYGTKAELERAIRSLKANGIQVYGDVVMNHKGGADFTERVQAVEVNPQNRNQEVSGTYWIEAWTGFNFPGRGNQHSSFKWRWYHFDGTDWDQSRQLANRIYKFRGDGKAWDWEVDTENGNYDYLMYADVDMDHPEVINELNRWGVWYANTLNLDGFRLDAVKHIKFSFMRDWLGHVRGQTGKNLFAVAEYWKNDLGALENYLSKTNWTMSAFDVPLHYNLYQASNSSGNYDMRNLLNGTLVQRHPSHAVTFVDNHDTQPGEALESFVQGWFKPLAYATILTREQGYPQVFYGDYYGIPSDGVPSYRQQIDPLLKARQQYAYGRQHDYFDHWDVIGWTREGNASHPNSGLATIMSDGPGGSKWMYVGRQKAGEVWHDMTGNRSGTVTINQDGWGHFFVNGGSVSVWVKR

SEQ ID NO: 30888 - protein, 485 aa, Bacillus sp.
HHDGTNGTIMQYFEWNVPNDGQHWNRLHNNAQNLKNAGITAIWIPPAWKGTSQNDVGYGAYDLYDLGEFNQKGTVRTKYGTKAELERAIRSLKANGIQVYGDVVMNHKGGADFTERVQAVEVNPQNRNQEVSGTYQIEAWTGFNFPGRGNQHSSFKWRWYHFDGTDWDQSRQLANRIYKFRGDGKAWDWEVDTENGNYDYLMYADVDMDHPEVINELNRWGVWYANTLNLDGFRLDAVKHIKFSFMRDWLGHVRGQTGKNLFAVAEYWKNDLGALENYLSKTNWTMSAFDVPLHYNLYQASNSSGNYDMRNLLNGTLVQRHPSHAVTFVDNHDTQPGEALESFVQGWFKPLAYATILTREQGYPQVFYGDYYGIPSDGVPSLRQQIDPLLKARQQYAYGRQHDYFDHWDVIGWTREGNASHPNSGLATIMSDGPGGSKWMYVGRQKAGEVWHDMTGNRSGTVTINQDGWGHFFVNGGSVSVWVKR

SEQ ID NO: 30889 - protein, 485 aa, Bacillus sp.
HHDGTNGTIMQYFEWNVPNDGQHWNRLHNNAQNLKNAGITAIWIPPAWKGTSQNDVGYGAYDLYDLGEFNQKGTVRTKYGTKAELERAIRSLKANGIQVYGDVVMNHKGGADFTERVQAVEVNPQNRNQEVSGTYQIEAWTGFNFPGRGNQHSSFKWRWYHFDGTDWDQSRQLANRIYKFRGDGKAWDWEVDTENGNYDYLMYADVDMDHPEVINELNRWGVWYANTLNLDGFRLDAVKHIKFSFMRDWLGHVRGQTGKNLFAVAEYWKNDLGALENYLSKTNWTMSAFDVPLHYNLYQASNSSGNYDMRNLLNGTLVQRHPSHAVTFVDNHDTQPGEALESFVQGWFKPLAYATILTREQGYPQVFYGDYYGIPVDGVPSYRQQIDPLLKARQQYAYGRQHDYFDHWDVIGWTREGNASHPNSGLATIMSDGPGGSKWMYVGRQKAGEVWHDMTGNRSGTVTINQDGWGHFFVNGGSVSVWVKR

SEQ ID NO: 30890 - protein, 485 aa, Bacillus sp.
HHDGTNGTIMQYFEWNVPNDGQHWNRLHNNAQNLKNAGITAIWIPPAWKGTSQNDVGYGAYDLYDLGEFNQKGTVRTKYGTKAELERAIRSLKANGIQVYGDVVMNHKGGADFTERVQAVEVNPQNRNQEVSGTYQIEAWTGFNFPGRGNQHSSFKWRWYHFDGTDWDQSRQLANRIYKFRGDGKAWDWEVDTENGNYDYLMYADVDMDHPEVINELNRWGVWYANTLNLDGFRLDAVKHIKFSFMRDWLGHVRGQTGKNLFAVAEYWKNDLGALENYLSKTNWTMSAFDVPLHYNLYQASNSSGNYDMRNLLNGTLVQRHPSHAVTFVDNHDTQPGEALESFVQAWFKPLAYATILTREQGYPQVFYGDYYGIPSDGVPSYRQQIDPLLKARQQYAYGRQHDYFDHWDVIGWTREGNASHPNSGLATIMSDGPGGSKWMYVGRQKAGEVWHDMTGNRSGTVTINQDGWGHFFVNGGSVSVWVKR

SEQ ID NO: 30891 - protein, 485 aa, Bacillus sp.
HHSGTNGTIMQYFEWNVPNDGQHWNRLHNNAQNLKNAGITAIWIPPAWKGTSQNDVGYGAYDLYDLGEFNQKGTVRTKYGTKAELERAIRSLKANGIQVYGDVVMNHKGGADFTERVQAVEVNPQNRNQEVSGTYQIEAWTGFNFPGRGNQHSSFKWRWYHFDGTDWDQSRQLANRIYKFRGDGKAWDWEVDTENGNYDYLMYADVDMDHPEVINELNRWGVWYANTLNLDGFRLDAVKHIKFSFMRDWLGHVRGQTGKNLFAVAEYWKNDLGALENYLSKTNWTMSAFDVPLHYNLYQASNSSGNYDMRNLLNGTLVQRHPSHAVTFVDNHDTQPGEALESFVQGWFKPLAYATILTREQGYPQVFYGDYYGIPSDGVPSYRQQIDPLLKARQQYAYGRQHDYFDHWDVIGWTREGNASHPNSGLATIMSDGPGGSKWMYVGRQKAGEVWHDMTGNRSGTVTINQDGWGHFFVNGGSVSVWVKR

SEQ ID NO: 30892 - protein, 483 aa, Bacillus sp. (in: firmicutes)
HHDGTNGTMMQYFEWNVPNDGQHWNRLHNNAQNLKNAGITAIWIPPAWKGTSQNDVGYGAYDLYDLGEFNQKGTVRTKYGTKAELERAIRSLKANGIQVYGDVVMNHKGGADFTERVQAVEVNPQNRNQEVSGTYQIEAWTGFNFPGRGNQHSSFKWRWYHFDGTDWDQSRQLANRIYKFRGKAWDWEVDTEFGNYDYLMYADVDMDHPEVINELNRWGVWYANTLNLDGFRLDAVKHIKFSFMRDWLGHVRGQTGKNLFAVAEYWKNDLGALENYLSKTNWTMSAFDVPLHYNLYQASNSSGNYDMRNLLNGTLVQRHPSHAVTFVDNHDTQPGEALESFVQGWFKPLAYATILTREQGYPQVFYGDYYGIPSDGVPSYRQQIDPLLKARQQYAYGRQHDYFDHWDVIGWTREGNASHPNSGLATIMSDGPGGSKWMYVGRQKAGEVWHDMTGNRSGTVTINQDGWGHFFVNGGSVSVWVKR

SEQ ID NO: 30893 - protein, 485 aa, Bacillus sp.
HHNGTNGTMMQYFEWYLPNDGNHWNRLNSDASNLKSKGITAVWIPPAWKGASQNDVGYGAYDLYDLGEFNQKGTVRTKYGTRSQLQAAVTSLKNNGIQVYGDVVMNHKGGADATEMVRAVEVNPNNRNQEVTGEYTIEAWTRFDFPGRGNTHSSFKWRWYHFDGVDWDQSRELDNRIYKFRGHGKAWDWEVDTEFGNYDYLMYTDYDYDHPETTNEMRNWGVWYTNTLGLDGFRIDAVKHIKYSFTRDWINHVRSATGKNMFAVAEFWKNDLGAIENYLQKTNWNHSVFDVPLHYNLYNASKSQGNYDMRNIFNGTVVQRHPSHAVTFVDNHDSQPEEALESFVDTWFKPLAYALTLTREQGYPSVFYGDYYGIPTHGVPAMRSKIDPILEARQKYAYGPQHDYLDHPDVIGWTREGDSSHPKSGLATLITDGPGGSKRMYAGLKNAGETWYDITGNRSDTVKIGSDGWGEFHVNGSSVSIYVQK

SEQ ID NO: 30894 - protein, 485 aa, Bacillus sp.
HHDGTNGTIMQYFEWNVPNDGQHWNRLHNNAQNLKNAGITAIWIPPAWKGTSQNDVGYGAYDLYDLGEFNQKGTVRTKYGTKAELERAIRSLKANGIQVYGDVVMNHKGGADFTERVQAVEVNPQNRNQEVSGTYQIEAWTGFNFPGRGNQHSSFKWRWYHFDGTDWDQSRQLANRIYKFRGDGKAWDWEVDTENGNYDYLMYADVDMDHPEVINELNRWGVWYANTLNLDGFRLDAVKHIKFSFMRDWLGHVREQTGKNLFAVAEYWKNDLGALENYLSKTNWTMSAFDVPLHYNLYQASNSSGNYDMRNLLNGTLVQRHPSHAVTFVDNHDTQPGEALESFVQGWFKPLAYATILTREQGYPQVFYGDYYGIPSDGVPSYRQQIDPLLKARQQYAYGRQHDYFDHWDVIGWTREGNASHPNSGLATIMSDGPGGSKWMYVGRQKAGEVWHDMTGNRSGTVTINQDGWGHFFVNGGSVSVWVKR

SEQ ID NO: 30895 - protein, 485 aa, Bacillus sp.
HHDGTNGTIMQYFEWNVPNDGQHWNRLANNAQNLKNAGITAIWIPPAWKGTSQNDVGYGAYDLYDLGEFNQKGTVRTKYGTKAELERAIRSLKANGIQVYGDVVMNHKGGADFTERVQAVEVNPQNRNQEVSGTYQIEAWTGFNFPGRGNQHSSFKWRWYHFDGTDWDQSRQLANRIYKFRGDGKAWDWEVDTENGNYDYLMYADVDMDHPEVINELNRWGVWYANTLNLDGFRLDAVKHIKFSFMRDWLGHVRGQTGKNLFAVAEYWKNDLGALENYLSKTNWTMSAFDVPLHYNLYQASNSSGNYDMRNLLNGTLVQRHPSHAVTFVDNHDTQPGEALESFVQGWFKPLAYATILTREQGYPQVFYGDYYGIPSDGVPSYRQQIDPLLKARQQYAYGRQHDYFDHWDVIGWTREGNASHPNSGLATIMSDGPGGSKWMYVGRQKAGEVWHDMTGNRSGTVTINQDGWGHFFVNGGSVSVWVKR

SEQ ID NO: 30896 - protein, 485 aa, Bacillus sp.
HHDGTNGTIMQYFEWNVPNDGQHWNRLHNNAQNLKNAGITAIWIPPAWKGTSQNDVGYGAYDLYDLGEFNQKGTVRTKYGTKAELERAIRSLKANGIQVYGDVVMNHKGGADFTERVQAVEVNPQNRNQEVSGTYGIEAWTGFNFPGRGNQHSSFKWRWYHFDGTDWDQSRQLANRIYKFRGDGKAWDWEVDTENGNYDYLMYADVDMDHPEVINELNRWGVWYANTLNLDGFRLDAVKHIKFSFMRDWLGHVRGQTGKNLFAVAEYWKNDLGALENYLSKTNWTMSAFDVPLHYNLYQASNSSGNYDMRNLLNGTLVQRHPSHAVTFVDNHDTQPGEALESFVQGWFKPLAYATILTREQGYPQVFYGDYYGIPSDGVPSYRQQIDPLLKARQQYAYGRQHDYFDHWDVIGWTREGNASHPNSGLATIMSDGPGGSKWMYVGRQKAGEVWHDMTGNRSGTVTINQDGWGHFFVNGGSVSVWVKR

SEQ ID NO: 30897 - protein, 485 aa, Bacillus sp.
HHDGTNGTIMQYFEWNVPNDGQHWNRLHNNAQNLKNAGITAIWIPPAWKGTSQNDVGYGAYDLYDLGEFNQKGTVRTKYGTKAELERAIRSLKANGIQVYGDVVMNHKGGADFTERVQAVEVNPQNRNQEVSGTYQIEAWTGFNFPGRGNQHSSFKWRWYHFDGTDWDQSRQLANRIYKFRGDGKAWDWEVDTENGNYDYLMYADVDMDHPEVINELNRWGVWYANTLNLDGFRLDAVKHIKFSFMRDWLGHVRGQTGKNLFAVAEYWKNDLGALENYLSKTNWTMSAFDVPLHYNLYQASNSSGNYDMRNLLNGTLVQRHPSHAVTFVDNHDTQPGEALESFVQGWFKPLAYATILTREQGYPQVFYGDYYGIPSDGVPSYRQQIDPLLKARQQLAYGRQHDYFDHWDVIGWTREGNASHPNSGLATIMSDGPGGSKWMYVGRQKAGEVWHDMTGNRSGTVTINQDGWGHFFVNGGSVSVWVKR

SEQ ID NO: 30898 - protein, 485 aa, Bacillus sp.
HHDGTNGTIMQYFEWNVPNDGQHWNRLHNNAQNLKNAGITAIWIPPAWKGTSQNDVGYGAYDLYDLGEFNQKGTVRTKYGTKAELERAIRSLKANGIQVYGDVVMNHKGGADFTERVQAVEVNPQNRNQEVSGTYQIEAWTGFNFPGRGNQHSSFKWRWYHFDGTDWDQSRQLANRIYKFRGDGKAWDWEVDTENGNYDYLMYADVDMDHPEVINELNRWGVWYANTLNLDGFRLDAVKHIKFSFIRDWLGHVRGQTGKNLFAVAEYWKNDLGALENYLSKTNWTMSAFDVPLHYNLYQASNSSGNYDMRNLLNGTLVQRHPSHAVTFVDNHDTQPGEALESFVQGWFKPLAYATILTREQGYPQVFYGDYYGIPSDGVPSYRQQIDPLLKARQQYAYGRQHDYFDHWDVIGWTREGNASHPNSGLATIMSDGPGGSKWMYVGRQKAGEVWHDMTGNRSGTVTINQDGWGHFFVNGGSVSVWVKR

SEQ ID NO: 30899 - protein, 485 aa, Bacillus sp.
HHDGTNGTIMQYFEWNVPNDGQHWNRLHNNAQNLKNAGITAIWIPPAWKGTSQNDVGYGAYDLYDLGEFNQKGTVRTKYGTKAELERAIRSLKANGIQVYGDVVMNHKGGADFTERVFAVEVNPQNRNQEVSGTYQIEAWTGFNFPGRGNQHSSFKWRWYHFDGTDWDQSRQLANRIYKFRGDGKAWDWEVDTENGNYDYLMYADVDMDHPEVINELNRWGVWYANTLNLDGFRLDAVKHIKFSFMRDWLGHVRGQTGKNLFAVAEYWKNDLGALENYLSKTNWTMSAFDVPLHYNLYQASNSSGNYDMRNLLNGTLVQRHPSHAVTFVDNHDTQPGEALESFVQGWFKPLAYATILTREQGYPQVFYGDYYGIPSDGVPSYRQQIDPLLKARQQYAYGRQHDYFDHWDVIGWTREGNASHPNSGLATIMSDGPGGSKWMYVGRQKAGEVWHDMTGNRSGTVTINQDGWGHFFVNGGSVSVWVKR

SEQ ID NO: 30900 - protein, 485 aa, Bacillus sp.
HHDGTNGTIMQYFEWNVPNDGQHWNRLHNNAQNLKNAGITAIWIPPAWKGTSQNDVGYGAYDLYDLGEFNQKGTVRTKYGTKAELERAIRSLKANGIQVYGDVVMNHKGGADFTERVQAVEVNPQNRNQEVSGTYQIEAWTGFNFPGRGNQHSSFKWRWYHFDGTDWDQSRQLANRIYKFRGDGKAWDWEVDTENGNYDYLMYADVDMDHPEVINELNRWGVWYANTLNLDGFRLDAVKHIKFSFMRDWLGHVRGQTGKNLFAVAEYWKNDLGALENYLSKTNWTMSAFDVPLHYNLYQASNSSGNYDMRNLLNGTLVQRHPSHAVTFVDNHDTQPGEALESFVQGWFKPLAYATILTREQGYPQVFYGDYYGIPSDGVPSYRQQIDPLLKARQQYAYGRQHDYFDHWDVIGWTREGNRSHPNSGLATIMSDGPGGSKWMYVGRQKAGEVWHDMTGNRSGTVTINQDGWGHFFVNGGSVSVWVKR

SEQ ID NO: 30901 - protein, 485 aa, Bacillus sp.
HHDGTNGTIMQYFEWNVPNDGQHWNRLHNNAQNLKNAGITAIWIPPAWKGTSQNDVGYGAYDLYDLGEFNQKGTVRTKYGTKAELERAIRSLKANGIQVYGDVVMNHKGGADFTERVQAVEVNPQNRNQEVSGTYQIEAWTGFNFPGRGNQHSSFKWRWYHFDGTDWDQSRQLANRIYKFRGDGKAWDWEVDTENGNYDYLMYADVDMDHPEVINELNRWGVWYANTLNLDGFRLDAVKHIKFSFMRDWLGHVRGQTGKNLFAVAEYWKNDLGALENYLSKTNWTMSAFDVPLHYNLYQASNSSGNYDMRNLLNGTLVQRHPSHAVTFVDNHDTQPGEALESFVQGWFKPLAYATILTREQGYPQVFYGDYYGIPSDGVPSYRQQIDPLLKARQQYAYGRQHDYFDHWDVIGWTREGNASHPNSGLATIMSDGPGGSKWMYVGREKAGEVWHDMTGNRSGTVTINQDGWGHFFVNGGSVSVWVKR

SEQ ID NO: 30902 - protein, 485 aa, Bacillus sp.
HHDGTNGTIMQYFEWNVPNDGQHWNRLHNNAQNLKNAGITAIWIPPAWKGTSQNDVGYGAYDLYDLGEFNQKGTVRTKYGTKAELERAIRSLKANGIQVYGDVVMNHKGGADFTERVQAVEVNPQNRNQEVSGTYQIEAWTGFNFPGRGNQHSSFKWRWYHFDGTDWDQSRQLANRIYKFRGDGKAWDWEVDPENGNYDYLMYADVDMDHPEVINELNRWGVWYANTLNLDGFRLDAVKHIKFSFMRDWLGHVRGQTGKNLFAVAEYWKNDLGALENYLSKTNWTMSAFDVPLHYNLYQASNSSGNYDMRNLLNGTLVQRHPSHAVTFVDNHDTQPGEALESFVQGWFKPLAYATILTREQGYPQVFYGDYYGIPSDGVPSYRQQIDPLLKARQQYAYGRQHDYFDHWDVIGWTREGNASHPNSGLATIMSDGPGGSKWMYVGRQKAGEVWHDMTGNRSGTVTINQDGWGHFFVNGGSVSVWVKR

SEQ ID NO: 30903 - protein, 485 aa, Bacillus sp.
HHDGTNGTIMQYFEWNVPNDGQHWNRLWNNAQNLKNAGITAIWIPPAWKGTSQNDVGYGAYDLYDLGEFNQKGTVRTKYGTKAELERAIRSLKANGIQVYGDVVMNHKGGADFTERVQAVEVNPQNRNQEVSGTYQIEAWTGFNFPGRGNQHSSFKWRWYHFDGTDWDQSRQLANRIYKFRGDGKAWDWEVDTENGNYDYLMYADVDMDHPEVINELNRWGVWYANTLNLDGFRLDAVKHIKFSFMRDWLGHVRGQTGKNLFAVAEYWKNDLGALENYLSKTNWTMSAFDVPLHYNLYQASNSSGNYDMRNLLNGTLVQRHPSHAVTFVDNHDTQPGEALESFVQGWFKPLAYATILTREQGYPQVFYGDYYGIPSDGVPSYRQQIDPLLKARQQYAYGRQHDYFDHWDVIGWTREGNASHPNSGLATIMSDGPGGSKWMYVGRQKAGEVWHDMTGNRSGTVTINQDGWGHFFVNGGSVSVWVKR

SEQ ID NO: 30904 - protein, 483 aa, Bacillus sp.
HHNGTNGTMMQYFEWYLPNDGNHWNRLNSDASNLKSKGITAVWIPPAWKGASQNDVGYGAYDLYDLGEFNQKGTVRTKYGTRSQLQAAVTSLKNNGINVYGDVVMNHKGGADATEMVRAVEVNPNNRNQEVTGEYTIEAYTRFDFPGRGNTHSSFKWRWYHFDGVDFDQSRKLNNRIYKFRGKAWDWEVDTEFGNYDYLMYVDYDYDHPETTNEMRNWGVWYTNTLGLDGFRIDAVKHIKYSFTRDWINHVRIATGKNMFAVAEFWKNDLGAIENYLQKTNWNHSVFDVPLHYNLYNASKSGGNYDMRNIFNGTVVQAHPMHAVTFVDNHDSQPEEALESFVDEWFKPLAYALTLTREQGYPSVFYGDYYGIPTHGVPAMRSKIDPILEARQKYAYGPQHDYLDHPDVIGWTREGDSSHPKSGLATLITDGPGGSKRMYAGLKNAGETWYDITGNRSDTVKIGSDGWGEFHVNDGSVSIYVQK

SEQ ID NO: 30905 - protein, 485 aa, Bacillus sp.
HHDGTNGTIMQYFEWNVPNDGQHWNRLHNNAQNLKNAGITAIWIPPAWKGTSQNDVGYGAYDLYDLGEFNQKGTVRTKYGTKAELERAIRSLKANGIQVYGDVVMNHKGGADFTERVQAVEVNPQNRNQEVSGTYQIEAWTGFNFPGRGNQHSSFKWRWYHFDGTDWDQSRQLANRIYKFRGDGKAWDWEVDTENGNYDYLMYADVDMDHPEVINELNRWGVWYANTLNLDGFRLDAVKHIKFSFMRDWLGHVRGQTGKNLFAVAEYWKNDLGALENYLSKTNWTMSAFDVPLHYNLYQASNSSGNYDMRNLLNGTLVQRHPSHAVTFVDNHDTQPGEALESFVQHWFKPLAYATILTREQGYPQVFYGDYYGIPSDGVPSYRQQIDPLLKARQQYAYGRQHDYFDHWDVIGWTREGNASHPNSGLATIMSDGPGGSKWMYVGRQKAGEVWHDMTGNRSGTVTINQDGWGHFFVNGGSVSVWVKR

SEQ ID NO: 30906 - protein, 485 aa, Bacillus sp.
HHDGTNGTIMQYFEWNVPNDGQHWNRLHNNAQNLKNAGITAIWIPPAWKGTSQNDVGYGAYDLYDLGEFNQKGTVRTKYGTKAELERAIRSLKANGIQVYGDVVMNHKGGADFTERVQAVEVNPQNRNQEVSGTYQIEAWTGFNFPGRGNQHSSFKWRWYHFDGTDWDQSRQLANRIYKFRGDGKAWDWEVDVENGNYDYLMYADVDMDHPEVINELNRWGVWYANTLNLDGFRLDAVKHIKFSFMRDWLGHVRGQTGKNLFAVAEYWKNDLGALENYLSKTNWTMSAFDVPLHYNLYQASNSSGNYDMRNLLNGTLVQRHPSHAVTFVDNHDTQPGEALESFVQGWFKPLAYATILTREQGYPQVFYGDYYGIPSDGVPSYRQQIDPLLKARQQYAYGRQHDYFDHWDVIGWTREGNASHPNSGLATIMSDGPGGSKWMYVGRQKAGEVWHDMTGNRSGTVTINQDGWGHFFVNGGSVSVWVKR

SEQ ID NO: 30907 - protein, 485 aa, Bacillus sp.
HHDGTNGTIMQYFEWNVPNDGQHWNRLHNNAQNLKNAGITAIWIPPAWKGTSQNDVGYGAYDLYDLGEFNQKGTVRTKYGTKAELERAIRSLKANGIQVYGDVVMNHKGGADFTERVQAVEVNPQNRNQEVSGTYQIEAWTGFNFPGRGNQHSSFKWRWYHFDGTDWDQSRQLANRIYKFRGDGKAWDWEVDTENGNYDYLMYADVDMDHPEVINELNRWGVWYANTLNLDGFRLDAVKHIKFSFMRDWLGHVRGQTGKNLFAVAEYWKNDLGALENYLSKTNWTMSAFDVPLHYNLYQASNSSGNYDMRNLLNGTLVQRHPSHAVTFVDNHDTQPGEALESFVQGWFKPLAYATILTREQGYPQVFYGDYYGIPIDGVPSYRQQIDPLLKARQQYAYGRQHDYFDHWDVIGWTREGNASHPNSGLATIMSDGPGGSKWMYVGRQKAGEVWHDMTGNRSGTVTINQDGWGHFFVNGGSVSVWVKR

SEQ ID NO: 30908 - protein, 485 aa, Bacillus sp.
HHDGTNGTIMQYFEWNVPNDGQHWNRLHNNAQNLKNAGITAIWIPPAWKGTSQNDVGYGAYDLYDLGEFNQKGTVRTKYGTKAELERAIRSLKANGIQVYGDVVMNHKGGADFTERVQAVEVNPQNRNQEVSGTYQIEAWTGFNFPGRGNQHSSFKWRWYHFDGTDWDQSRQLANRIYKFRGTGKAWDWEVDTENGNYDYLMYADVDMDHPEVINELNRWGVWYANTLNLDGFRLDAVKHIKFSFMRDWLGHVRGQTGKNLFAVAEYWKNDLGALENYLSKTNWTMSAFDVPLHYNLYQASNSSGNYDMRNLLNGTLVQRHPSHAVTFVDNHDTQPGEALESFVQGWFKPLAYATILTREQGYPQVFYGDYYGIPSDGVPSYRQQIDPLLKARQQYAYGRQHDYFDHWDVIGWTREGNASHPNSGLATIMSDGPGGSKWMYVGRQKAGEVWHDMTGNRSGTVTINQDGWGHFFVNGGSVSVWVKR

SEQ ID NO: 30909 - protein, 485 aa, Bacillus sp.
HHDGTNGTIMQYFEWNVPNDGQHWNRLHNNAQNLKNAGITAIWIPPAWKGTSQNDVGYGAYDLYDLGEFNQKGTVRTKYGTKAELERAIRSLKANGIQVYGDVVMNHKGGADFTERVQAVEVNPQNRNQEVSGTYQIEAWTGFNFPGRGNQHSSFKWRWYHFDGTDWDQSRQLANRIYKFRGDGKAWDWEVDTENGNYDYLMYADVDMDHPEVINELNRWGVWYANTLNLDGFRLDAVKHIKFSFMRDWLGHVRGQTGKNLFAVAEYWKNDLGALENYLSKTNWTMSAFDVPLHYNLYQASNSSGNYDMRNLLNGTLVQRHPSHAVTFVDNHDTQPGEALESFVQGWFKPLAYATILTREQGYPQVFYGDYYGIPSDGVPSYRQQIDPLLKARQQYAYGRQHDYFDHCDVIGWTREGNASHPNSGLATIMSDGPGGSKWMYVGRQKAGEVWHDMTGNRSGTVTINQDGWGHFFVNGGSVSVWVKR

SEQ ID NO: 30910 - protein, 485 aa, Bacillus sp.
HHDGTNGTIMQYFEWNVPNDGQHWNRLHNNAQNLKNAGITAIWIPPAWKGTSQNDVGYGAYDLYDLGEFNQKGTVRTKYGTKAELERAIRSLKANGIQVYGDVVMNHKGGADFTERVQAVEVNPQNRNQEVSGTYQIEAWTGFNFPGRGNQHSSFKWRWYHFDGTDWDQSRQLANRIYKFRGDGKAWDWEVDTENGNYDYLMYADVDMDHPEVINELNRWGVWYANTLNLDGFRLDAVKHIKFSFMRDWLGHVRGQTGKNLFAVAEYWKNDLGALENYLCKTNWTMSAFDVPLHYNLYQASNSSGNYDMRNLLNGTLVQRHPSHAVTFVDNHDTQPGEALESFVQGWFKPLAYATILTREQGYPQVFYGDYYGIPSDGVPSYRQQIDPLLKARQQYAYGRQHDYFDHWDVIGWTREGNASHPNSGLATIMSDGPGGSKWMYVGRQKAGEVWHDMTGNRSGTVTINQDGWGHFFVNGGSVSVWVKR

SEQ ID NO: 30911 - protein, 485 aa, Bacillus sp.
HHDGTNGTIMQYFEWNVPNDGQHWNRLHNNAQNLKNAGITAIWIPPAWKGTSQNDVGYGAYDLYDLGEFNQKGTVRTKYGTKAELERAIRSLKANGIQVYGDVVMNHKGGADFTERVQAVEVNPQNRNQEVSGTYQIEAWTGFCFPGRGNQHSSFKWRWYHFDGTDWDQSRQLANRIYKFRGDGKAWDWEVDTENGNYDYLMYADVDMDHPEVINELNRWGVWYANTLNLDGFRLDAVKHIKFSFMRDWLGHVRGQTGKNLFAVAEYWKNDLGALENYLSKTNWTMSAFDVPLHYNLYQASNSSGNYDMRNLLNGTLVQRHPSHAVTFVDNHDTQPGEALESFVQGWFKPLAYATILTREQGYPQVFYGDYYGIPSDGVPSYRQQIDPLLKARQQYAYGRQHDYFDHWDVIGWTREGNASHPNSGLATIMSDGPGGSKWMYVGRQKAGEVWHDMTGNRSGTVTINQDGWGHFFVNGGSVSVWVKR

SEQ ID NO: 30912 - protein, 485 aa, Bacillus sp.
HHDGTNGTIMQYFEWNVPNDGQHWNRLHNNAQNLKNAGITAIWIPPAWKGTSQNDVGYGAYDLYDLGEFNQKGTVRTKYGTKAELERAIRSLKANGIQVYGDVVMNHKGGADFTERVQAVEVNPQNRNQEVSGTYQIEAWTGFNFPGRGNQHSSFKWRWYHFDGTDWDQSRQLANRIYKFRGDGKAWDWEVDTENGNYDYLMYADVDMDHPEVINELNRWGVWYANTLNLDGFRLDAVKHIKFSFMRDWLGHVRGQTGKNLFAVAELWKNDLGALENYLSKTNWTMSAFDVPLHYNLYQASNSSGNYDMRNLLNGTLVQRHPSHAVTFVDNHDTQPGEALESFVQGWFKPLAYATILTREQGYPQVFYGDYYGIPSDGVPSYRQQIDPLLKARQQYAYGRQHDYFDHWDVIGWTREGNASHPNSGLATIMSDGPGGSKWMYVGRQKAGEVWHDMTGNRSGTVTINQDGWGHFFVNGGSVSVWVKR

SEQ ID NO: 30913 - protein, 485 aa, Bacillus sp.
HHDGTNGTIMQYFEWNVPNDGQHWNRLHNNAQNLKNAGITAIWIPPAWKGTSQNDVGYGAYDLYDLGEFNQKGTVRTKYGTKAELERAIRSLKANGIQVYGDVVMNHKGGADFTERVQAVEVNPQNRNQEVSGTYQIEAWTGFNFPGRGNQHSAFKWRWYHFDGTDWDQSRQLANRIYKFRGDGKAWDWEVDTENGNYDYLMYADVDMDHPEVINELNRWGVWYANTLNLDGFRLDAVKHIKFSFMRDWLGHVRGQTGKNLFAVAEYWKNDLGALENYLSKTNWTMSAFDVPLHYNLYQASNSSGNYDMRNLLNGTLVQRHPSHAVTFVDNHDTQPGEALESFVQGWFKPLAYATILTREQGYPQVFYGDYYGIPSDGVPSYRQQIDPLLKARQQYAYGRQHDYFDHWDVIGWTREGNASHPNSGLATIMSDGPGGSKWMYVGRQKAGEVWHDMTGNRSGTVTINQDGWGHFFVNGGSVSVWVKR

SEQ ID NO: 30914 - protein, 485 aa, Bacillus sp.
HHDGTNGTIMQYFEWNVPNDGQHWNRLHNNAQNLKNAGITAIWIPPAWKGTSQNDVGYGAYDLYDLGEFNQKGTVRTKYGTKAELERAIRSLKANGIQVYGDVVMNHKGGADFTERVQAVEVNPQNRNQEVSGTYQIEAWTGFNFPGRGNQHSSFKWRWYHFDGTDWDQSRQLANRIYKFRGDGKAWDWEVDTENGNYDYLMYADVDMDHPEVINELNRWGVWYANTLNLDGFRLDAVKHIKFSFMRDWLGHVRGQTGKNLFAVAEYWKNDLGALENYLSKTNWTMSAFDVPLHYNLYQASNSSGNYDMRNLLNGTLVQRHPSHAVTFVDNHDTQPGEALESFVQGWFKPLAYATILTREQGYPQVFYGDYYGIPSDGVPSYRQQIDPLLKARQQYAYGRQHDYFDHWDVIGWTREGNASHPNSGLATIMSDGPGGSKWMYVGVQKAGEVWHDMTGNRSGTVTINQDGWGHFFVNGGSVSVWVKR

SEQ ID NO: 30915 - protein, 485 aa, Bacillus sp.
HHDGTNGTIMQYFEWNVPNDGQHWNRLHNNAQNLKNAGITAIWIPPAWKGTSQNDVGYGAYDLYDLGEFNQKGTVRTKYGTKAELERAIRSLKANGIQVYGDVVMNHKGGADFTERVQAVEVNPQNRNQEVSGTYQIEAWTGFNFPGRGNQHSSFKWRWYHFDGTDWDQSRQLANRIYKFRGDGKAWDWEVDTENGNYDYLMYADVDMDHPEVINELNRWGVWYANTLNLDGFRLDAVKHIKFSFMRDWLGHVRGQTGKNLFAVAEYWKNDLGALENYLSKTNWTMSAFDVPLHYNLYQASNSSGNYDMRNLLNGTLVQRHPSHAVTFVDNHDTQPGEALESFVQGWFKPLAYATILTREQGYPQVFYGDYYGIPSDGVPSYRQQIDPLLKARQQYAYGRQHDYFDHWDVIGWTREGNQSHPNSGLATIMSDGPGGSKWMYVGRQKAGEVWHDMTGNRSGTVTINQDGWGHFFVNGGSVSVWVKR

SEQ ID NO: 30916 - protein, 485 aa, Bacillus sp.
HHDGTNGTIMQYFEWNVPNDGQHWNRLHNNAQNLKNSGITAIWIPPAWKGTSQNDVGYGAYDLYDLGEFNQKGTVRTKYGTKAELERAIRSLKANGIQVYGDVVMNHKGGADFTERVQAVEVNPQNRNQEVSGTYQIEAWTGFNFPGRGNQHSSFKWRWYHFDGTDWDQSRQLANRIYKFRGDGKAWDWEVDTENGNYDYLMYADVDMDHPEVINELNRWGVWYANTLNLDGFRLDAVKHIKFSFMRDWLGHVRGQTGKNLFAVAEYWKNDLGALENYLSKTNWTMSAFDVPLHYNLYQASNSSGNYDMRNLLNGTLVQRHPSHAVTFVDNHDTQPGEALESFVQGWFKPLAYATILTREQGYPQVFYGDYYGIPSDGVPSYRQQIDPLLKARQQYAYGRQHDYFDHWDVIGWTREGNASHPNSGLATIMSDGPGGSKWMYVGRQKAGEVWHDMTGNRSGTVTINQDGWGHFFVNGGSVSVWVKR

SEQ ID NO: 30917 - protein, 485 aa, Bacillus sp.
HHDGTNGTIMQYFEWNVPNDGQHWNRLHNNAQNLKNAGITAIWIPPAWKGTSQNDVGYGAYDLYDLGEFNQKGTVRTKYGTKAELERAIRSLKANGIQVYGDVVMNHKGGADFTERVQAVEVNPQNRNQEVSGTYQIEAWTGFNFPGRGNQHSSFKWRWYHFDGTDWDQSRQLANRIYKFRGDGKAWDWEVDTENGNYDYLMYADVDMDHPEVINELNRWGCWYANTLNLDGFRLDAVKHIKFSFMRDWLGHVRGQTGKNLFAVAEYWKNDLGALENYLSKTNWTMSAFDVPLHYNLYQASNSSGNYDMRNLLNGTLVQRHPSHAVTFVDNHDTQPGEALESFVQGWFKPLAYATILTREQGYPQVFYGDYYGIPSDGVPSYRQQIDPLLKARQQYAYGRQHDYFDHWDVIGWTREGNASHPNSGLATIMSDGPGGSKWMYVGRQKAGEVWHDMTGNRSGTVTINQDGWGHFFVNGGSVSVWVKR

SEQ ID NO: 30918 - protein, 485 aa, Bacillus sp.
HHDGTNGTIMQYFEWNVPNDGQHWNRLHNNAQNLKNAGITAIWIPPAWKGTSQNDVGYGAYDLYDLGEFNQKGTVRTKYGTKAELERAIRSLKANGIQVYGDVVMNHKGGADDTERVQAVEVNPQNRNQEVSGTYQIEAWTGFNFPGRGNQHSSFKWRWYHFDGTDWDQSRQLANRIYKFRGDGKAWDWEVDTENGNYDYLMYADVDMDHPEVINELNRWGVWYANTLNLDGFRLDAVKHIKFSFMRDWLGHVRGQTGKNLFAVAEYWKNDLGALENYLSKTNWTMSAFDVPLHYNLYQASNSSGNYDMRNLLNGTLVQRHPSHAVTFVDNHDTQPGEALESFVQGWFKPLAYATILTREQGYPQVFYGDYYGIPSDGVPSYRQQIDPLLKARQQYAYGRQHDYFDHWDVIGWTREGNASHPNSGLATIMSDGPGGSKWMYVGRQKAGEVWHDMTGNRSGTVTINQDGWGHFFVNGGSVSVWVKR

SEQ ID NO: 30919 - protein, 485 aa, Bacillus sp.
HHDGTNGTIMQYFEWNVPNDGTHWNRLHNNAQNLKNAGITAIWIPPAWKGTSQNDVGYGAYDLYDLGEFNQKGTVRTKYGTKAELERAIRSLKANGIQVYGDVVMNHKGGADFTERVQAVEVNPQNRNQEVSGTYQIEAWTGFNFPGRGNQHSSFKWRWYHFDGTDWDQSRQLANRIYKFRGDGKAWDWEVDTENGNYDYLMYADVDMDHPEVINELNRWGVWYANTLNLDGFRLDAVKHIKFSFMRDWLGHVRGQTGKNLFAVAEYWKNDLGALENYLSKTNWTMSAFDVPLHYNLYQASNSSGNYDMRNLLNGTLVQRHPSHAVTFVDNHDTQPGEALESFVQGWFKPLAYATILTREQGYPQVFYGDYYGIPSDGVPSYRQQIDPLLKARQQYAYGRQHDYFDHWDVIGWTREGNASHPNSGLATIMSDGPGGSKWMYVGRQKAGEVWHDMTGNRSGTVTINQDGWGHFFVNGGSVSVWVKR

SEQ ID NO: 30920 - protein, 485 aa, Bacillus sp.
HHNGTNGTMMQYFEWYLPNDGNHWNRLNSDASNLKSKGITAVWIPPAWKGASQNDVGYGAYDLYDLGEFNQKGTVRTKYGTRSQLQAAVTSLKNNGINVYGDVVMNHKGGADATEMVRAVEVNPNNRNQEVTGEYTIEAYTRFDFPGRGNTHSSFKWRWYHFDGVDWDQSRKLNNRIYKFRGHGKAWDWEVDTEFGNYDYLMYVDYDYDHPETTNEMRNWGVWYTNTLGLDGFRIDAVKHIKYSFTRDWINHVRIATGKNMFAVAEFWKNDLGAIENYLQKTNWNHSVFDVPLHYNLYNASKSGGNYDMRNIFNGTVVQAHPMHAVTFVDNHDSQPEEALESFVDEWFKPLAYALTLTREQGYPSVFYGDYYGIPTHGVPAMRSKIDPILEARQKYAYGPQHDYLDHPDVIGWTKEGDSSHPKSGLATLITDGPGGSKRMYAGLKNAGETWYDITGNRSDTVKIGSDGWGEFHVNDGSVSIYVQK

SEQ ID NO: 30921 - protein, 485 aa, Bacillus sp.
HHDGTNGTIMQYFEWNVPNDGQHWNRLHNNAQNLKNAGITAIWIPPAWKGTSQNDVGYGAYDLYDLGEFNQKGTVRTKYGTKAELERAIRSLKANGIQVYGDVVMNHKGGADFTERVQAVEVNPQNRNQEVSGTYQIEAWTGFNFPGRGNQHSSFKWRWYHFDGTDWDQSRQLANRIYKFRGDGKAWDWEVDTENGNYDYLMYADVDMDHPEVINELNRWGVWYANTLNLDGFRLDAVKHIKFSFMRDWLGHVRGQTGKNLFAVAEYWKNDLGALENYLSKTNWTMSAFDVPLHYNLYQASNSSGNYDMRNLLNGTLVQRHPNHAVTFVDNHDTQPGEALESFVQGWFKPLAYATILTREQGYPQVFYGDYYGIPSDGVPSYRQQIDPLLKARQQYAYGRQHDYFDHWDVIGWTREGNASHPNSGLATIMSDGPGGSKWMYVGRQKAGEVWHDMTGNRSGTVTINQDGWGHFFVNGGSVSVWVKR

SEQ ID NO: 30922 - protein, 485 aa, Bacillus sp.
HHDGTNGTIMQYFEWNVPNDGQHWNRLHNNAQNLKNAGITAIWIPPAWKGTSQNDVGYGAYDLYDLGEFNQKGTVRTKYGTKAELERAIRSLKANGIQVYGDVVMNHKGGADFTERVQAVEVNPQNRNQEVSGTYQIEAWTGFNFPGRGNQHSSFKWRWYHFDGTDWDQSRQLANRIYKFRGDGKAWDWEVDTENGNYDYLMYADVDMDHPEVINELNRWGVWYANTLNLDGFRLDAVKHIKFSFMRDWLGHVRGQTGKNLFAVAEYWKNDLGALENYLSKTNWTMSAFDVPLHYNLYQASNSSGNYDMRNLLNGTLVQRHPSHAVTFVDNHDTQPGEALESFVQGWFKPLAYATILTREQGYPQVFYGDYYGIPSDGVPSYRQQIDPLLKARQQYAYGRQHDYFDHWDVIGWTREGNASHPNSGLATIMSDGPGGSKWMYVGRQKAGEVWHDMTGNRVGTVTINQDGWGHFFVNGGSVSVWVKR

SEQ ID NO: 30923 - protein, 485 aa, Bacillus sp.
HHDGTNGTIMQYFEWNVPNDGQHWNRLHNNAQNLKNAGITAIWIPPAWKGTSQNDVGYGAYDLYDLGEFNQKGTVRTKYGTKAELERAIRSLKANGIQVYGDVVMNHKGGADFTERVQAVEVNPQNRNQEVSGTYQIEAWTGFNFPGRGNQHSSFKWRWYHFDGTDWDQSRQLANRIYKFRGDGKAWDWEVDTENGNYDYLMYADVDMDHPEVINELNRWGVWYANTLNLDGFRLDAVKHIKFSFMRDWLGHVRGQTGKNLFAVAEYWKNDLGALENYLSKTNWTMSAFDVPLHYNLYQASNSSGNYDMRNLLNGTLVQRHPSHAVTFVDNHDTQPGEALESFVQGWFKPLAYATILTREQGYPQVFYGDYYGIPSDGVPSYRYQIDPLLKARQQYAYGRQHDYFDHWDVIGWTREGNASHPNSGLATIMSDGPGGSKWMYVGRQKAGEVWHDMTGNRSGTVTINQDGWGHFFVNGGSVSVWVKR

SEQ ID NO: 30924 - protein, 485 aa, Bacillus sp.
HHDGTNGTIMQYFEWNVPNDGQHWNRLHNNAQNLKNAGITAIWIPPAWKGTSQNDVGYGAYDLYDLGEFNQKGTVRTKYGTKAELERAIRSLKANGIQVYGDVVMNHKGGADFTERVQAVEVNPQNRNQEVSGTYQIEAWTGFNFPGRGNQHSSFKWRWYHFDGTDWDQSRQLANRIYKFRGDGKAWDWEVDTENGNYDYLMYADVDMDHPEVINELNRWGVWYANTLNLDGFRLDAVKHIKFSFMRDWLGHVRGQTGKNLFAVAEYWKNDLGALENYLSKTNWTMSAFDVPLHYNLYQASNSSGNYDMTNLLNGTLVQRHPSHAVTFVDNHDTQPGEALESFVQGWFKPLAYATILTREQGYPQVFYGDYYGIPSDGVPSYRQQIDPLLKARQQYAYGRQHDYFDHWDVIGWTREGNASHPNSGLATIMSDGPGGSKWMYVGRQKAGEVWHDMTGNRSGTVTINQDGWGHFFVNGGSVSVWVKR

SEQ ID NO: 30925 - protein, 485 aa, Bacillus sp.
HHDGTNGTIMQYFEWNVPNDGQHWNRLHNNAQNLKNAGITAIWIPPAWKGTSQNDVGYGAYDLYDLGEFNQKGTVRTKYGTKAELERAIRSLKANGIQVYGDVVMNHKGGADFTERVQAVEVNPQNRNQEVSGTYQIEAWTGFNFPGRGNQHSSFKWRWYHFDGTDWDQSRQLANRIYKFRGDGKAWDWEVDTENGNYDYLMYADVDMDHPEVINELNRWGVWYANTLNLDGFRLDAVKHIKFSFMRDWLGHVRGQTGKNLFAVAEYWKNDLGALENYLSKTNWTMSAFDVPLHYNLYQASNSSGNYDMRCLLNGTLVQRHPSHAVTFVDNHDTQPGEALESFVQGWFKPLAYATILTREQGYPQVFYGDYYGIPSDGVPSYRQQIDPLLKARQQYAYGRQHDYFDHWDVIGWTREGNASHPNSGLATIMSDGPGGSKWMYVGRQKAGEVWHDMTGNRSGTVTINQDGWGHFFVNGGSVSVWVKR

SEQ ID NO: 30926 - protein, 485 aa, Bacillus sp.
HHDGTNGTIMQYFEWNVPNDGQHWNRLHNNAQNLKNAGITAIWIPPAWKGTSQNDVGYGAYDLYDLGEFNQKGTVRTKYGTKAELERAIRSLKANGIQVYGDVVMNHKGGADFTERVQAVEVNPQNRNQEVSGTYQIEAWTGFNFPGRGNQHSSFKWRWYHFDGTDWDQSRQLANRIYKFRGDGKAWDWEVDTENGNYDYLMYADVDMDHPEVINELNRWGVWYANTLNLDGFRLDAVKHIKFSFMRDWLGHVRGQTGKNLFAVAEYWKNDLGALENYLSKTNWTMSAFDVPLHYNLYQASNSSGNYDMRNLLNGTLVQRHPSHAVTFVDNHDTQPGEALESFVQGWFKPLAYATILTREQGYPQVFYGDYYGIPSDGVPSARQQIDPLLKARQQYAYGRQHDYFDHWDVIGWTREGNASHPNSGLATIMSDGPGGSKWMYVGRQKAGEVWHDMTGNRSGTVTINQDGWGHFFVNGGSVSVWVKR

SEQ ID NO: 30927 - protein, 485 aa, Bacillus sp.
HHDGTNGTIMQYFEWNVPNDGQHWNRLHNNAQNLLNAGITAIWIPPAWKGTSQNDVGYGAYDLYDLGEFNQKGTVRTKYGTKAELERAIRSLKANGIQVYGDVVMNHKGGADFTERVQAVEVNPQNRNQEVSGTYQIEAWTGFNFPGRGNQHSSFKWRWYHFDGTDWDQSRQLANRIYKFRGDGKAWDWEVDTENGNYDYLMYADVDMDHPEVINELNRWGVWYANTLNLDGFRLDAVKHIKFSFMRDWLGHVRGQTGKNLFAVAEYWKNDLGALENYLSKTNWTMSAFDVPLHYNLYQASNSSGNYDMRNLLNGTLVQRHPSHAVTFVDNHDTQPGEALESFVQGWFKPLAYATILTREQGYPQVFYGDYYGIPSDGVPSYRQQIDPLLKARQQYAYGRQHDYFDHWDVIGWTREGNASHPNSGLATIMSDGPGGSKWMYVGRQKAGEVWHDMTGNRSGTVTINQDGWGHFFVNGGSVSVWVKR

SEQ ID NO: 30928 - protein, 485 aa, Bacillus sp.
HHDGTNGTIMQYFEWNVPNDGQHWNRLHNNAQNLKNAGITAIWIPPAWKGTSQNDVGYGAYDLYDLGEFNQKGTVRTKYGTKAELERAIRSLKANGIQVYGDVVMNHKGGADFTERVQAVEVNPQNRNQEVSGTYQIEAWTGFNFPGRGNQHSSFKWRWYHFDGTDWDQSRQLANRIYKFRGDGKAWDWEVDTENGNYDYLMYADVDMDHPEVINELNRWGVWYANTLNLDGFRLDAVKHIKFSFMRDWLGHVRGQTGKNLFAVAEYWKNDLGALENYLSKTNWTMSAFDVPLHYNLYQASNSSGNYDMRNLLNGTLVQRHPSHAVTFVDNHDTQPGEALESFVQGWFKPLAYATILTREQGYPQVFYGDYYGIPSDGVPSYRQQIDPLLKARQQYAYGIQHDYFDHWDVIGWTREGNASHPNSGLATIMSDGPGGSKWMYVGRQKAGEVWHDMTGNRSGTVTINQDGWGHFFVNGGSVSVWVKR

SEQ ID NO: 30929 - protein, 485 aa, Bacillus sp.
HHDGTNGTIMQYFEWNVPNDGQHWNRLHNNAQNLKNAGITAIWIPPAWKGTSQNDVGYGAYDLYDLGEFNQKGTVRTKYGTKAELERAIRSLKANGIQVYGDVVMNHKGGADFTERVQAVEVNPQNRNQEVSGTYQIEAWTGFNFPGRGNQHSSFKWRWYHFDGTDWDQSRQLANRIYKFRGDGKAWDWEVDCENGNYDYLMYADVDMDHPEVINELNRWGVWYANTLNLDGFRLDAVKHIKFSFMRDWLGHVRGQTGKNLFAVAEYWKNDLGALENYLSKTNWTMSAFDVPLHYNLYQASNSSGNYDMRNLLNGTLVQRHPSHAVTFVDNHDTQPGEALESFVQGWFKPLAYATILTREQGYPQVFYGDYYGIPSDGVPSYRQQIDPLLKARQQYAYGRQHDYFDHWDVIGWTREGNASHPNSGLATIMSDGPGGSKWMYVGRQKAGEVWHDMTGNRSGTVTINQDGWGHFFVNGGSVSVWVKR

SEQ ID NO: 30930 - protein, 485 aa, Bacillus sp.
HHDGTNGTIMQYFEWNVPNDGQHWNRLHNNAQNLKNAGITAIWIPPAWKGTSQNDVGYGAYDLYDLGEFNQKGTVRTKYGTKAELERAIRSLKANGIQVYGDVVMNHKGGADFTERVQAVEVNPQNRNQEVSGTYQIEAWTGFNFPGRGNQHSSFKWRWYHFDGTDWDQSRQLANRIYKFRGDGKAWDWEVDTENGNYDYLMYADVDMDHPEVINELNRWGVWYANTLNLDGFRLDAVKHIKFSFMRDWLGHVRGQTGKNLFAVAEYWKNDLGALENYLSKTNWTMSAFDVPLHYNLYQASNSSGNYDMRNLLNGTLVQRHPSHAVTFVDNHDTQPGEALESFVQGWFKPLAYATILTREQGYPLVFYGDYYGIPSDGVPSYRQQIDPLLKARQQYAYGRQHDYFDHWDVIGWTREGNASHPNSGLATIMSDGPGGSKWMYVGRQKAGEVWHDMTGNRSGTVTINQDGWGHFFVNGGSVSVWVKR

SEQ ID NO: 30931 - protein, 485 aa, Bacillus sp.
HHDGTNGTIMQYFEWNVPNDGQHWNRLHNNAQNLKNAGITAIWIPPAWKGTSQNDVGYGAYDLYDLGEFNQKGTVRTKYGTKAELERAIRSLKANGIQVYGDVVMNHKGGADFTERVQAVEVNPQNRNQEVSGTYQIEAWTGFNFPGRGNQHSSFKWRWYHFDGTDWDQSRQLANRIYKFRGDGKAWDWEVDTENGNYDYLMYADVDMDHPEVINELNRWGVWYANTLNLDGFRLDAVKHIKFSFMRDWLKHVRGQTGKNLFAVAEYWKNDLGALENYLSKTNWTMSAFDVPLHYNLYQASNSSGNYDMRNLLNGTLVQRHPSHAVTFVDNHDTQPGEALESFVQGWFKPLAYATILTREQGYPQVFYGDYYGIPSDGVPSYRQQIDPLLKARQQYAYGRQHDYFDHWDVIGWTREGNASHPNSGLATIMSDGPGGSKWMYVGRQKAGEVWHDMTGNRSGTVTINQDGWGHFFVNGGSVSVWVKR

SEQ ID NO: 30932 - protein, 485 aa, Bacillus sp.
HHDGTNGTIMQYFEWNVPNDGQHWNRLHNNAQNLKNAGITAIWIPPAWKGTSQNDVGYGAYDLYDLGEFNQKGTVRTKYGTKAELERAIRSLKANGIQVYGDVVMNHKGGADFTERVQAVEVNPQNRNQEVSGTYQIEAWTGFNFPGRGNQHSSFKWRWYHFDGTDWDQSRQLANRIYKFRGDGKAWDWEVDTENGNYDYLMYADVDMDHPEVINELNRWGVWYANTLNLDGFRLDAVKHIKFSFMRDWLGHVRGQTGKNLFAVAEYWKNDLGALENYLRKTNWTMSAFDVPLHYNLYQASNSSGNYDMRNLLNGTLVQRHPSHAVTFVDNHDTQPGEALESFVQGWFKPLAYATILTREQGYPQVFYGDYYGIPSDGVPSYRQQIDPLLKARQQYAYGRQHDYFDHWDVIGWTREGNASHPNSGLATIMSDGPGGSKWMYVGRQKAGEVWHDMTGNRSGTVTINQDGWGHFFVNGGSVSVWVKR

SEQ ID NO: 30933 - protein, 485 aa, Bacillus sp.
HHDGTNGTIMQYFEWNVPNDGQHWNRLHNNAQNLKNAGITAIWIPPAWKGTSQNDVGYGAYDLYDLGEFNQKGTVRTKYGTKAELERAIRSLKANGIQVYGDVVMNHKGGADFTERVQAVEVNPQNRNQEVSGTYQIEAWTGFNFPGRGNQHSSFKWRWYHFDGTDWDQSRQLANRIYKFRGDGKAWDWEVDTENGNYDYLMYADVDMDHPEVINELNRWGVWYANTLNLDGFRLDAVKHIKFSFMRDWLGHVRGQTGKNLFAVAEYWKNDLGALENYLSKTNWTMSAFDVPLHYNLYQASNSSGNYDMRNLLNGTLVQRHPSHAVTFVDNHDTQPGEALESFVQGWFKPLAYATILTREQGYPQVFYGDYYGIPSDGVPSVRQQIDPLLKARQQYAYGRQHDYFDHWDVIGWTREGNASHPNSGLATIMSDGPGGSKWMYVGRQKAGEVWHDMTGNRSGTVTINQDGWGHFFVNGGSVSVWVKR

SEQ ID NO: 30934 - protein, 485 aa, Bacillus sp.
HHDGTNGTIMQYFEWNVPNDGQHWNRLHNNAQNLKNAGITAIWIPPAWKGTSQNDVGYGAYDLYDLGEFNQKGTVRTKYGTKAELERAIRSLKANGIQVYGDVVMNHKGGADFTERVQAVEVNPQNRNQEVSGTYQIEAWTGFNFPGRGNQHSSFKWRWYHFDGTDWDQSRQLANRIYKFRGDGKAWDWEVDTENGNYDYLMYADVDMDHPEVINELNRWGVWYANTLNLDGFRLDAVKHIKFSFMRDWLGHVRGQTGKWLFAVAEYWKNDLGALENYLSKTNWTMSAFDVPLHYNLYQASNSSGNYDMRNLLNGTLVQRHPSHAVTFVDNHDTQPGEALESFVQGWFKPLAYATILTREQGYPQVFYGDYYGIPSDGVPSYRQQIDPLLKARQQYAYGRQHDYFDHWDVIGWTREGNASHPNSGLATIMSDGPGGSKWMYVGRQKAGEVWHDMTGNRSGTVTINQDGWGHFFVNGGSVSVWVKR

SEQ ID NO: 30935 - protein, 483 aa, Bacillus sp. (in: firmicutes)
HHDGTNGTIMQYFEWNVPNDGQHWNRLHNNAQNLKNAGITAIWIPPAWKGTSQNDVGYGAYDLYDLGEFNQKGTVRTKYGTKAELERAIRSLKANGIQVYGDVVMNHKGGADFTERVQAVEVNPQNNNQEVSGTYQIEAWTGFNFPGRGNQHSSFKWRWYHFDGTDWDQSRQLANRIYKFRGKAWDWEVDTENGNYDYLMYADVDMDHPEVINELNRWGVWYANTLNLDGFRLDAVKHIKFSFMRDWLGHVRGQTGKNLFAVAEYWKNDLGALENYLSKTNWTMSAFDVPLHYNLYQASNSSGNYDMRNLLNGTLVQRHPSHAVTFVDNHDTQPGEALESFVQGWFKPLAYATILTREQGYPSVFYGDYYGIPSDGVPSYRQQIDPLLKARQQYAYGRQHDYFDHWDVIGWTREGNASHPNSGLATIMSDGPGGSKWMYVGRQKAGEVWHDMTGNRSGTVTINQDGWGHFFVNGGSVSVWVKR

SEQ ID NO: 30936 - protein, 485 aa, Bacillus sp.
HHDGTNGTIMQYFEWNVPNDGQHWNRLHNNAQNLKNAGITAIWIPPAWKGTSQNDVGYGAYDLYDLGEFNQKGTVRTKYGTKAELERAIRSLKANGIQVYGDVVMNHKGGADFTERVQAVEVNPQNRNQEVSGTYQIEAWTGFNFPGRGNQHSSFKWRWYHFDGTDWDQSRQLANRIYKFRGDGKAWDWEVDTENGNYDYLMYADVDMDHPEVINELNRWGVWYANTLNLDGFRLDAVKHIKFSFMRDWLGHVRGQTGKNLFAVAEYWKNDLGALENYLSKTNWTMSAFDVPLHYNLYQASNSSGNYDMRNLLNGTLVQRHPSHAVTFVDNHDTQPGEALESFVQGWFKPLAYATILTREQGYPQVFYGDYYGIPSDGVPSYRPQIDPLLKARQQYAYGRQHDYFDHWDVIGWTREGNASHPNSGLATIMSDGPGGSKWMYVGRQKAGEVWHDMTGNRSGTVTINQDGWGHFFVNGGSVSVWVKR

SEQ ID NO: 30937 - protein, 485 aa, Bacillus sp.
HHDGTNGTIMQYFEWNVPNDGQHWNRLHNNAQNLKNAGITAIWIPPAWKGTSQNDVGYGAYDLYDLGEFNQKGTVRTKYGTKAELERAIRSLKANGIQVYGDVVMNHKGGADFTERVQAVEVNPQNRNQEVSGTYQIEAWTGFNFPGRGNQHSSFKWRWYHFDGTDWDQSRQLANRIYKFRGDGKAWDWEVDTENGNYDYLMYADVDMDHPEVINELNRWGVWYANTLNLDGFRLDAVKHIKFSFMRDWLGHVRGQTGKNLFAVAEYWKNDLGALENYLSKTNWTMSAFDVPLHYNLYQASNSSGNYDMRNLLNGTLVQRHPSHAVTFVDNHDTQPGEALESFVQGWFKPLAYATILTREQGYPQVFYGDYYGIPSDGVPSYRQQIDPMLKARQQYAYGRQHDYFDHWDVIGWTREGNASHPNSGLATIMSDGPGGSKWMYVGRQKAGEVWHDMTGNRSGTVTINQDGWGHFFVNGGSVSVWVKR

SEQ ID NO: 30938 - protein, 483 aa, Bacillus sp. (in: firmicutes)
HHDGTNGTMMQYFEWNVPNDGQHWNRLHNNAQNLKNAGITAIWIPPAWKGTSQNDVGFGAYDLYDLGEFNQKGTVRTKYGTKAELERAIRSLKANGIQVYGDVVMNHKGGADFTERVQAVEVNPQNRNQEVSGTYQIEAWTGFNFPGRGNQHSSFKWRWYHFDGTDWDQSRQLANRIYKFRGKAWDWEVDTEFGNYDYLMYADVDMDHPEVINELNRWGVWYANTLNLDGFRLDAVKHIKFSFMRDWLGHVRGQTGKNLFAVAEYWKNDLGALENYLSKTNWTMSAFDVPLHYNLYQASNSSGNYDMRNLLNGTLVQRHPSHAVTFVDNHDTQPGEALESFVQGWFKPLAYATILTREQGYPSVFYGDYYGIPSDGVPSYRQQIDPLLKARQQYAYGRQHDYFDHWDVIGWTREGNASHPNSGLATIMSDGPGGSKWMYVGRQKAGEVWHDMTGNRSGTVTINQDGWGHFFVNGGSVSVWVKR

SEQ ID NO: 30939 - protein, 485 aa, Bacillus sp.
HHDGTNGTIMQYFEWNVPNDGQHWNRLHNNAQNLKNAGITAIWIPPAWKGTSQNDVGYGAYDLYDLGEFNQKGTVRTKYGTKAELERAIRSLKANGIQVYGDVVMNHKGGADFTERVQAVEVNPQNRNQEVSGTYQIEAWTGFNFPGRGNQHSSFKWRWYHFDGTDWDQSRQLANRIYKFRGDGKAWDWEVDTENGNYDYLMYADVDMDHPEVINELNRWGVWYANTLNLDGFRLDAVKHIKFSFMRDWLGHVRGQTGKNLFAVAEYWKNDLGALENYLSKTNWTMSAFDVPLHYNLYQASNSSGNYDMRNLLNGTLVQRHPSHAVTFVDNHDTQPGEALESFVQGWFKPLAYATILTREQGYPQVFYGDYYGIPSDGVPSYRHQIDPLLKARQQYAYGRQHDYFDHWDVIGWTREGNASHPNSGLATIMSDGPGGSKWMYVGRQKAGEVWHDMTGNRSGTVTINQDGWGHFFVNGGSVSVWVKR

SEQ ID NO: 30940 - protein, 485 aa, Bacillus sp.
HHDGTNGTIMQYFEWNVPNDGQHWNRLHNNAQNLKNAGITAIWIPPAWKGTSQNDVGYGAYDLYDLGEFNQKGTVRTKYGTKAELERAIRSLKANGIQVYGDVVMNHKGGADFTERVQAVEVNPQNRNQEVSGTYQIEAWTGFNFPGRGNQHSSFKWRWYHFDGTDWDQSRQLANRIYKFRGDGKAWDWEVDTENGNYDYLMYADVDMDHPEVINELNRWGVWYANTLNLDGFRLDAVKHIKFSFMRDWLGHVRGQTGKNLFAVAEYWKNDLGALENYLSKTNWTMSAFDVPLHYNLYQASNSSGNYDMRNLLNGTLVQRHPSHAVTFVDNHDTQPGEALESFVQGWFKPLAYATILTREQGYPQVFYGDYYGIPSDGVPSYRQQIDPLLKARQQYAYGRQHDYFDHYDVIGWTREGNASHPNSGLATIMSDGPGGSKWMYVGRQKAGEVWHDMTGNRSGTVTINQDGWGHFFVNGGSVSVWVKR

SEQ ID NO: 30941 - protein, 485 aa, Bacillus sp.
HHDGTNGTIMQYFEWNVPNDGQHWNRLHNNAQNLKNAGITAIWIPPAWKGTSQNDVGYGAYDLYDLGEFNQKGTVRTKYGTKAELERAIRSLKANGIQVYGDVVMNHKGGADFTERVQAVEVNPQNRNQEVSGTYQIEAWTGFNFPGRGNQHSSFKWRWYHFDGTDWDQSRQLANRIYKFRGDGKAWDWEVDTENGNYDYLMYADVDMDHPEVINELNRWGVWYANTLNLDGFRLDAVKHIKFSFMRDWLGHVRGQTGKPLFAVAEYWKNDLGALENYLSKTNWTMSAFDVPLHYNLYQASNSKGNYDMRNLLNGTLVQRHPSHAVTFVDNHDTQPGEALESFVQGWFKPLAYATILTREQGYPQVFYGDYYGIPSDGVPSYRQQIDPLLKARQQYAYGRQHDYFDHWDVIGWTREGNASHPNSGLATIMSDGPGGSKWMYVGRQKAGEVWHDMTGNRSGTVTINQDGWGHFFVNGGSVSVWVKR

SEQ ID NO: 30942 - protein, 483 aa, Bacillus sp.
HHNGTNGTMMQYFEWYLPNDGNHWNRLNSDASNLKSKGIKAVWIPPAWKAVSQNDVGYGAYDLYDLGEFNQRGTVRTKYGTRSQLQAAVTSLKNNGIQVYGDVVMNHKGGADATEMVRAVEVNPNNRNQEVTGEYTIEAWTRFDFPGRGNTHSSFKWRWYHFDGVDFDQSREFTNRIYKFRGKAWDWEVDTEFGNYDYLMYADYDYDHPESTNEMRNWGVWYTNTLGLDGFRIDAVKHIKYSFTRDWINHVRSATGKNMFAVAEFWKNDLGAIENYLQKTNWNHSVFDVPLHYNLYNASKSGGNYDMRNIFNGTVVQRHPSHAVTFVDNHDSQPEEALESFVEEWFKPLAYALTLTREQGYPSVFYGDYYGIPTHGVPAMRSKIDPILEARQKYAYGPQHDYLDHPDVIGWTREGDSSHPKSGLATLITDGPGGSKRMYAGLKNAGETWYDITGNRSDTVKIGSDGWGEFHVNDGSVSIYVQK

SEQ ID NO: 30943 - protein, 485 aa, Bacillus sp.
HHDGTNGTIMQYFEWNVPNDGQHWNRLHNNAQNLKNAGITAIWIPPAWKGTSQNDVGYGAYDLYDLGEFNQKGTVRTKYGTKAELERAIRSLKANGIQVYGDVVMNHKGGADFTERVQAVEVNPQNRNQEVSGTYQIEAWTGFNFPGRGNQHSSFKWRWYHFDGTDWDQSRQLANRIYKFRGDGKAWDWEVDTENGNYDYLMYADVDMDHPEVINELNRWGVWYANTLNLDGFRLDAVKHIKFSFMRDWLGHVRGQTGKNLFAVAEYWKNDLGALENYLSKTNWTMSAFDVPLHYNLYQASNSSGNYDMRNLLNGTLVQRHPSHAVTFVDNHDTQPGEALESFVQGWFKPLAYATILTREQGYPQVFYGDYYGIPSDGVPSYVQQIDPLLKARQQYAYGRQHDYFDHWDVIGWTREGNASHPNSGLATIMSDGPGGSKWMYVGRQKAGEVWHDMTGNRSGTVTINQDGWGHFFVNGGSVSVWVKR

SEQ ID NO: 30944 - protein, 485 aa, Bacillus sp.
HHDGTNGTIMQYFEWNVPNDGQHWNRLHNNAQNLKNAGITAIWIPPAWKGTSQNDVGYGAYDLYDLGEFNQKGTVRTKYGTKAELERAIRSLKANGIQVYGDVVMNHKGGADFTERVQAVEVNPQNRNQEVSGTYQIEAWTGFNFPGRGNQHSSFKWRWYHFDGTDWDQSRQLANRIYKFRGDGKAWDWEVDTENGNYDYLMYADVDMDHPEVINELNRWGVWYANTLNLDGFRLDAVKHIKFSFMRDWLGHVRGQTGKNLFAVAEYWKNDLGALENYLSKTNWTMSAFDVPLHYNLYQASNSSGNYDMRNLLNGTLVQRHPSHAVTFVDNHDTQPGEALESFVQGWFKPLAYATILTREQGYPQVFYGDYYGIPSDGVPSYRQQIDPLLKARQQYAYGRQHDYFDHWDVIGWTREGNASHPNSGLATIMSDGPGGSKWMYVGAQKAGEVWHDMTGNRSGTVTINQDGWGHFFVNGGSVSVWVKR

SEQ ID NO: 30945 - protein, 485 aa, Bacillus sp.
HHDGTNGTIMQYFEWNVPNDGQHWNRLHNNAQNLKNAGITAIWIPPAWKGTSQNDVGYGAYDLYDLGEFNQKGTVRTKYGTKAELERAIRSLKANGIQVYGDVVMNHKGGADFTERVQAVEVNPQNRNQEVSGTYQIEAWTGFNFPGRGNQHSSFKWRWYHFDGTDWDQSRQLANRIYKFRGDGKAWDWEVDTENGNYDYLMYADVDMDHPEVINELNRWGFWYANTLNLDGFRLDAVKHIKFSFMRDWLGHVRGQTGKNLFAVAEYWKNDLGALENYLSKTNWTMSAFDVPLHYNLYQASNSSGNYDMRNLLNGTLVQRHPSHAVTFVDNHDTQPGEALESFVQGWFKPLAYATILTREQGYPQVFYGDYYGIPSDGVPSYRQQIDPLLKARQQYAYGRQHDYFDHWDVIGWTREGNASHPNSGLATIMSDGPGGSKWMYVGRQKAGEVWHDMTGNRSGTVTINQDGWGHFFVNGGSVSVWVKR

SEQ ID NO: 30946 - protein, 485 aa, Bacillus sp.
HHDGTNGTIMQYFEWNVPNDGQHWNRLHNNAQNLKNAGITAIWIPPAWKGTSQNDVGYGAYDLYDLGEFNQKGTVRTKYGTKAELERAIRSLKANGIQVYGDVVMNHKGGADFTERVQAVEVNPQNRNQEVSGTYQIEAWTGFNFPGRGNQHSSFKWRWYHFDGTDWDQSRQLANRIYKFRGDGKAWDWEVDTENGNYDYLMYADVDMDHPEVINELNRWGVWYANTLNLDGFRLDAVKHIKFSFMRDWLGHVRGQTGKNLFAVAEYWKNDLGALENYLSKTNWTMSAFDVPLHYNLYHASNSSGNYDMRNLLNGTLVQRHPSHAVTFVDNHDTQPGEALESFVQGWFKPLAYATILTREQGYPQVFYGDYYGIPSDGVPSYRQQIDPLLKARQQYAYGRQHDYFDHWDVIGWTREGNASHPNSGLATIMSDGPGGSKWMYVGRQKAGEVWHDMTGNRSGTVTINQDGWGHFFVNGGSVSVWVKR

SEQ ID NO: 30947 - protein, 485 aa, Bacillus sp.
HHDGTNGTIMQYFEWNGPNDGQHWNRLHNNAQNLKNAGITAIWIPPAWKGTSQNDVGYGAYDLYDLGEFNQKGTVRTKYGTKAELERAIRSLKANGIQVYGDVVMNHKGGADFTERVQAVEVNPQNRNQEVSGTYQIEAWTGFNFPGRGNQHSSFKWRWYHFDGTDWDQSRQLANRIYKFRGDGKAWDWEVDTENGNYDYLMYADVDMDHPEVINELNRWGVWYANTLNLDGFRLDAVKHIKFSFMRDWLGHVRGQTGKNLFAVAEYWKNDLGALENYLSKTNWTMSAFDVPLHYNLYQASNSSGNYDMRNLLNGTLVQRHPSHAVTFVDNHDTQPGEALESFVQGWFKPLAYATILTREQGYPQVFYGDYYGIPSDGVPSYRQQIDPLLKARQQYAYGRQHDYFDHWDVIGWTREGNASHPNSGLATIMSDGPGGSKWMYVGRQKAGEVWHDMTGNRSGTVTINQDGWGHFFVNGGSVSVWVKR

SEQ ID NO: 30948 - protein, 483 aa, Bacillus sp.
HHDGTNGTIMQYFEWNVPNDGQHWNRLHNNAQNLKNAGITAIWIPPAWKGTSQNDVGYGAYDLYDLGEFNQKGTVRTKYGTKAELERAIRSLKANGIQVYGDVVMNHKGGADFTERVQAVEVNPQNRNQEVSGTYQIEAWTGFNFPGRGNQHSSFKWRWYHFDGTDWDQSRQLANRIYKFRGKAWDWEVDTEFGNYDYLMYADYDMDHPEVINELNRWGVWYANTLNLDGFRLDAVKHIKFSFMRDWLGHVRGQTGKNLFAVAEYWKNDLGALENYLSKTNWTMSAFDVPLHYNLYQASNSSGNYDMRNLLNGTLVQKHPSHAVTFVDNHDTQPGEALESFVQGWFKPLAYATILTREQGYPQVFYGDYYGIPSDGVPSYRQQIDPLLKARQQYAYGRQHDYFDHWDVIGWTREGNASHPNSGLATIMSDGPGGSKWMYVGRQKAGEVWHDMTGNKSGTVTINQDGWGHFFVNGGSVSVWVKR

SEQ ID NO: 30949 - protein, 485 aa, Bacillus sp.
HHDGTNGTIMQYFEWNVPNDGQHWNRLHNNAQNLKNAGITAIWIPPAWKGTSQNDVGYGAYDLYDLGEFNQKGTVRTKYGTKAELERAIRSLKANGIQVYGDVVMNHKGGADFTERVQAVEVNPQNRNQEVSGTYQIEAWTGFNFPGRGNQHSSFKWRWYHFDGTDWDQSRQLANRIYKFRGDGKAWDWEVDTENGNYDYLMYADVDMDHPEVINELNRWGVWYANTLNLDGFRLDAVKHIKFSFMRDWLGHVRGQTGKNLFAVAEYWKNDLGALENYLSKTNWTMSAFDVPLHYNLYQASNSSGNYDMRNLLNGTLVQRHPSHAVTFVDNHDTQPGEALESFVQGWFKPLAYATILTREQGYPQVFYGDYYGIPSDGVPSYRQQIDPLLKARQQYAYGRQHDYFDHWDEIGWTREGNASHPNSGLATIMSDGPGGSKWMYVGRQKAGEVWHDMTGNRSGTVTINQDGWGHFFVNGGSVSVWVKR

SEQ ID NO: 30950 - protein, 485 aa, Bacillus sp.
HHDGTNGTIMQYFEWNVPNDGQHWNRLHNNAQNLKNAGITAIWIPPAWKGTSQNDVGYGAYDLYDLGEFNQKGTVRTKYGTKAELERAIRSLKANGIQVYGDVVMNHKGGADFTERVQAVEVNPQNRNQEVSGTYQIEAWTGFNFPGRGNQHSSFKWRWYHFDGTDWDQSRQLANRIYKFRGDGKAWDWEVDTENGNYDYLMYADVDMDHPEVINELNRWGVWYANTLNLDGFRLDAVKHIKFSFMRDWLGHVRGQTGKNDFAVAEYWKNDLGALENYLSKTNWTMSAFDVPLHYNLYQASNSSGNYDMRNLLNGTLVQRHPSHAVTFVDNHDTQPGEALESFVQGWFKPLAYATILTREQGYPQVFYGDYYGIPSDGVPSYRQQIDPLLKARQQYAYGRQHDYFDHWDVIGWTREGNASHPNSGLATIMSDGPGGSKWMYVGRQKAGEVWHDMTGNRSGTVTINQDGWGHFFVNGGSVSVWVKR

SEQ ID NO: 30951 - protein, 485 aa, Bacillus sp.
HHDGTNGTIMQYFEWNVPNDGQHWNRLHNNAQNLKNAGITAIWIPPAWKGTSQNDVGYGAYDLYDLGEFNQKGTVRTKYGTKAELERAIRSLKANGIQVYGDVVMNHKGGADFTERVQAVEVNPQNRNQEVSGTYQIEAWTGFNFPGRGNQHSSFKWRWYHFDGTDWDQSRQLANRIYKFRGDGKAWDWEVDTENGNYDYLMYADVDMDHPEVINELNRWGVWYANTLNLDGFRLDAVKHIKFSFMRDWLGHVRGQTGKNLFAVAEYWKNDLGALENYLSKTNWTMSAFDVPLHYNLYQASNSSGNYDMRNLLNGTLVQRHPSHAVTFVDNHDTQPGEALESFVQGWFKPLAYATILTREQGYPTVFYGDYYGIPSDGVPSYRQQIDPLLKARQQYAYGRQHDYFDHWDVIGWTREGNASHPNSGLATIMSDGPGGSKWMYVGRQKAGEVWHDMTGNRSGTVTINQDGWGHFFVNGGSVSVWVKR

SEQ ID NO: 30952 - protein, 485 aa, Bacillus sp.
HHDGTNGTIMQYFEWNVPNDGQHWNRLHNNAQNLKNAGITAIWIPPAWKGTSQNDVGYGAYDLYDLGEFNQKGTVRTKYGTKAELERAIRSLKANGIQVYGDVVMNHKGGADFTERVQAVEVNPQNRNQEVSGTYQIEAWTGFNFPGRGNQHSSFKWRWYHFDGTDWDQSRQLANRIYKFRGDGKAWDWEVDTENGNYDYLMYADVDMDHPEVINELNRWGVWYANTLNLDGFRLDAVKHIKFSFMRDWLGHVRGQTGKNLFAVAEYWKNDLGALENYLSKTNWTMSAFDVPLHYNLYQASNSSGNYDMRNLLNGTLVQRHPSHAVTFVDNHDTQPGEALESFVQGWFKPLAYATILTREQGYPQVFYGDYYGIPSDGVPSYRQQIDPLLKARQQYAYGRQHDYFDHWDVIGWTREGNASHPNSGLATIMSDGPGGSKWMYVGRQKAGEVWHDMTGNRSGTVTINQDGWGHFEVNGGSVSVWVKR

SEQ ID NO: 30953 - protein, 485 aa, Bacillus sp.
HHDGTNGTIMQYFEWNVPNDGQHWNRLHNNAQNLKNAGITAIWIPPAWKGTSQNDVGYGAYDLYDLGEFNQKGTVRTKYGTKAELERAIRSLKANGIQVYGDVVMNHKGGADFTERVQAVEVNPQNRNQEVSGTYQIEAWTGFNFPGRGNQHSSFKWRWYHFDGTDWDQSRQLANRIYKFRGDGKAWDWEVDTENGNYDYLMYADVDMDHPEVINELNRWGVWYANTLNLDGFRLDAVKHIKFSFMRDWLGHVRGQTGKNLFAVAEYWKNDLGALENYLSKTNWTMSAFDVPLHYNLYQASNSSGNYDMRNLLNGTLVQRHPSHAVTFVDNHDTQPGEALESFVQGWFKPLAYATILTREQGYPQVFYGDYYGIPSTGVPSYRQQIDPLLKARQQYAYGRQHDYFDHWDVIGWTREGNASHPNSGLATIMSDGPGGSKWMYVGRQKAGEVWHDMTGNRSGTVTINQDGWGHFFVNGGSVSVWVKR

SEQ ID NO: 30954 - protein, 485 aa, Bacillus sp.
HHDGTNGTIMQYFEWNVPNDGQHWNRLHNNAQNLKNAGITAIWIPPAWKGTSQNDVGYGAYDLYDLGEFNQKGTVRTKYGTKAELERAIRSLKANGIQVYGDVVMNHKGGADETERVQAVEVNPQNRNQEVSGTYQIEAWTGFNFPGRGNQHSSFKWRWYHFDGTDWDQSRQLANRIYKFRGDGKAWDWEVDTENGNYDYLMYADVDMDHPEVINELNRWGVWYANTLNLDGFRLDAVKHIKFSFMRDWLGHVRGQTGKNLFAVAEYWKNDLGALENYLSKTNWTMSAFDVPLHYNLYQASNSSGNYDMRNLLNGTLVQRHPSHAVTFVDNHDTQPGEALESFVQGWFKPLAYATILTREQGYPQVFYGDYYGIPSDGVPSYRQQIDPLLKARQQYAYGRQHDYFDHWDVIGWTREGNASHPNSGLATIMSDGPGGSKWMYVGRQKAGEVWHDMTGNRSGTVTINQDGWGHFFVNGGSVSVWVKR

SEQ ID NO: 30955 - protein, 485 aa, Bacillus sp.
HHNGTNGTMMQYFEWYLPNDGNHWNRLNSDASNLKSKGIKAVWIPPAWKGASQNDVGYGAYDLYDLGEFNQRGTVRTKYGTRSQLQAAVTSLKNNGIQVYGDVVMNHKGGADATEMVRAVEVNPNNRNQEVTGEYTIEAWTRFDFPGRGNTHSSFKWRWYHFDGVDFDQSRRLNNRIYKFRGHGKAWDWEVDTEFGNYDYLMYADYDYDHPETTNEMRNWGVWYTNTLGLDGFRIDAVKHIKYSFTRDWINHVRSATGKNMFAVAEFWKNDLGAIENYLQKTNWNHSVFDVPLHYNLYNASKSGGNYDMRNIFNGTVVQAHPNHAVTFVDNHDSQPEEALESFVEEWFKPLAYALTLTREQGYPSVFYGDYYGIPTHGVPAMRSKIDPILEARQKYAYGPQHDYLDHPDVIGWTREGDSSHPKSGLATLITDGPGGSKRMYAGLKNAGETWYDITGNRSDTVKIGSDGWGEFHVNDGSVSIYVQK

SEQ ID NO: 30956 - protein, 485 aa, Bacillus sp.
HHDGTNGTIMQYFEWNVPNDGQHWNRLHNNAQNLKNAGITAIWIPPAWKGTSQNDVGYGAYDLYDLGEFNQKGTVRTKYGTKAELERAIRSLKANGIQVYGDVVMNHKGGADFTERVQAVEVNPQNRNQEVSGTYQIEAWTGFNFPGRGNQHSSFKWRWYHFDGTDWDQSRQLANRIYKFRGDGKAWDWEVDTENGNYDYLMYADVDMDHPEVINELNRWGVWYANTLNLDGFRLDAVKHIKFSFMRDWLGHVRGQTGKNLFAVAEYWKNDLGALENYLSKTNWTMSAFDVPLHYNLYQASNSSGNYDMRNLLNGTLVQRHPSHAVTFVDNHDTQPGEALESFVQGWFKPLAYATILTREQGYPQVFYGDYYGIPSDGVPSYRQQIDPLLKARQEYAYGRQHDYFDHWDVIGWTREGNASHPNSGLATIMSDGPGGSKWMYVGRQKAGEVWHDMTGNRSGTVTINQDGWGHFFVNGGSVSVWVKR

SEQ ID NO: 30957 - protein, 485 aa, Bacillus sp.
HHDGTNGTIMQYFEWNVPNDGQHWNRLHNNAQNLKNAGITAIWIPPAWKGTSQNDVGYGAYDLYDLGEFNQKGTVRTKYGTKAELERAIRSLKANGIQVYGDVVMNHKGGADFTERVQAVEVNPQNRNQEVSGTYQIEAWTGFNFPGRGNQHSSFKWRWYHFDGTDWDQSRQLVNRIYKFRGDGKAWDWEVDTENGNYDYLMYADVDMDHPEVINELNRWGVWYANTLNLDGFRLDAVKHIKFSFMRDWLGHVRGQTGKNLFAVAEYWKNDLGALENYLSKTNWTMSAFDVPLHYNLYQASNSSGNYDMRNLLNGTLVQRHPSHAVTFVDNHDTQPGEALESFVQGWFKPLAYATILTREQGYPQVFYGDYYGIPSDGVPSYRQQIDPLLKARQQYAYGRQHDYFDHWDVIGWTREGNASHPNSGLATIMSDGPGGSKWMYVGRQKAGEVWHDMTGNRSGTVTINQDGWGHFFVNGGSVSVWVKR

SEQ ID NO: 30958 - protein, 485 aa, Bacillus sp.
HHDGTNGTIMQYFEWNVPNDGQHWNRLHNNAQNLKNAGITAIWIPPAWKGTSQNDVGYGAYDLYDLGEFNQKGTVRTKYGTKAELERAIRSLKANGIQVYGDVVMNHKGGADFTERVQAVEVNPQNRNQEVSGTYQIEAWTGFNFPGRGNQHSSFKWRWYHFDGTDWDQSRQLANRIYKFRGDGKAWDWEVDTENGNYDYLMYADVDMDHPEVINELNRWGVWYANTLNLDGFRLDAVKHIKFSFMRDWLGHVRGQTGKNLFAVAEYWKNDLGALENYLSKTNWTMSAFDVPLHYNLYQASNSSGNYDMRNLLNGTLVQRHPSHAVTFVDNHDTQPGEALESFVQGWFKPLAYATILTREQGYPQVFYGDYYGIPSGGVPSYRQQIDPLLKARQQYAYGRQHDYFDHWDVIGWTREGNASHPNSGLATIMSDGPGGSKWMYVGRQKAGEVWHDMTGNRSGTVTINQDGWGHFFVNGGSVSVWVKR

SEQ ID NO: 30959 - protein, 485 aa, Bacillus sp.
HHDGTNGTIMQYFEWNVPNDGQHWNRLHNNAQNLKNAGITAIWIPPAWKGTSQNDVGYGAYDLYDLGEFNQKGTVRTKYGTKAELERAIRSLKANGIQVYGDVVMNHKGGADFTERVQAVEVNPQNRNQEVSGTYQIEAWTGFNFPGRGNQHSSFKWRWYHFDGTDWDQSRQLKNRIYKFRGDGKAWDWEVDTENGNYDYLMYADVDMDHPEVINELNRWGVWYANTLNLDGFRLDAVKHIKFSFMRDWLGHVRGQTGKNLFAVAEYWKNDLGALENYLSKTNWTMSAFDVPLHYNLYQASNSSGNYDMRNLLNGTLVQRHPSHAVTFVDNHDTQPGEALESFVQGWFKPLAYATILTREQGYPQVFYGDYYGIPSDGVPSYRQQIDPLLKARQQYAYGRQHDYFDHWDVIGWTREGNASHPNSGLATIMSDGPGGSKWMYVGRQKAGEVWHDMTGNRSGTVTINQDGWGHFFVNGGSVSVWVKR

SEQ ID NO: 30960 - protein, 485 aa, Bacillus sp.
HHDGTNGTIMQYFEWNVPNDGQHWNRLHNNAQNLKNAGITAIWIPPAWKGTSQNDVGYGAYDLYDLGEFNQKGTVRTKYGTKAELERAILSLKANGIQVYGDVVMNHKGGADFTERVQAVEVNPQNRNQEVSGTYQIEAWTGFNFPGRGNQHSSFKWRWYHFDGTDWDQSRQLANRIYKFRGDGKAWDWEVDTENGNYDYLMYADVDMDHPEVINELNRWGVWYANTLNLDGFRLDAVKHIKFSFMRDWLGHVRGQTGKNLFAVAEYWKNDLGALENYLSKTNWTMSAFDVPLHYNLYQASNSSGNYDMRNLLNGTLVQRHPSHAVTFVDNHDTQPGEALESFVQGWFKPLAYATILTREQGYPQVFYGDYYGIPSDGVPSYRQQIDPLLKARQQYAYGRQHDYFDHWDVIGWTREGNASHPNSGLATIMSDGPGGSKWMYVGRQKAGEVWHDMTGNRSGTVTINQDGWGHFFVNGGSVSVWVKR

SEQ ID NO: 30961 - protein, 485 aa, Bacillus sp.
HHDGTNGTIMQYFEWNVPNDGQHWNRLHNNAQNLKNAGITAIWIPPAWKGTSQNDVGYGAYDLYDLGEFNQKGTVRTKYGTKAELERAIRSLKANGIQVYGDVVMNHKGGADFTERVQAVEVNPQNRNQEVSGTYQIEAWTGFNFPGRGNQHSSFKWRWYHFDGTDWDQSRQLANRIYKFRGDGKAWDWEVDTENGNYDYLMYADVDMDHPEVINELNRWGVWYANTLNLDGFRLDAVKHIKFSFMRDWLGHVRGQTGKRLFAVAEYWKNDLGALENYLSKTNWTMSAFDVPLHYNLYQASNSSGNYDMRNLLNGTLVQRHPSHAVTFVDNHDTQPGEALESFVQGWFKPLAYATILTREQGYPQVFYGDYYGIPSDGVPSYRQQIDPLLKARQQYAYGRQHDYFDHWDVIGWTREGNASHPNSGLATIMSDGPGGSKWMYVGRQKAGEVWHDMTGNRSGTVTINQDGWGHFFVNGGSVSVWVKR

SEQ ID NO: 30962 - protein, 485 aa, Bacillus sp.
HHDGTNGTIMQYFEWNVPNDGQHWNRLHNNAQNLKNAGITAIWIPPAWKGTSQNDVGYGAYDLYDLGEFNQKGTVRTKYGTKAELERAIRSLKANGIQVYGDVVMNHKGGADFTERVQAVEVNPQNRNQEVSGTYQIEAWTGFNFPGRGNQHSSFKWRWYHFDGTDWDQSRQLANRIYKFRGDGKAWDWEVDTENGNYDYLMYADVDMDHPEVINELNRWGVWYANTLNLDGFRLDAVKHIKFSFMRDWLGHVRGQTGKNLFAVAEYWKNDLGALENYLSKTNWTMSAFDVPLHYNLYQASNSSGNYDMRNLLNGTLVQRHPSHAVTFVDNHDTQPGEALESFVQGWFKPLAYATILTREQGYPQVFYGDYYGIPSDGVPSYRQQIDPLLKARQQYAYGRQHDYFDHWDVIGWTREGNASHPNSGLATIMSDGPGGSKWMYVGRQKAGEVWHDMTGNRQGTVTINQDGWGHFFVNGGSVSVWVKR

SEQ ID NO: 30963 - protein, 485 aa, Bacillus sp.
HHDGTNGTIMQYFEWNVPNDGQHWNRLHNNAQNLKNAGITAIWIPPAWKGTSQNDVGYGAYDLYDLGEFNQKGTVRTKYGTKAELERAIRSLKANGIQVYGDVVMNHKGGADFTERVQAVEVNPQNRNQEVSGTYQIEAWTGFNFPGRGNQHSSFKWRWYHFDGTDWDQSRQLANRIYKFRGDGKAWDWEVDTENGNYDYLMYADVDMDHPEVINELNRWGVWYANTLNLDGFRLDAVKHIKFSFMRDWLGHVRGQTGKNLFAVAEYWKNDLGALENYLSKTNWTMSAFDVPLHYNLYQASNSMGNYDMRNLLNGTLVQRHPSHAVTFVDNHDTQPGEALESFVQGWFKPLAYATILTREQGYPQVFYGDYYGIPSDGVPSYRQQIDPLLKARQQYAYGRQHDYFDHWDVIGWTREGNASHPNSGLATIMSDGPGGSKWMYVGRQKAGEVWHDMTGNRSGTVTINQDGWGHFFVNGGSVSVWVKR

SEQ ID NO: 30964 - protein, 485 aa, Bacillus sp.
HHDGTNGTIMQYFEWNVPNDGQHWNRLHNNAQNLKNAGITAIWIPPAWKGTSQNDVGYGAYDLYDLGEFNQKGTVRTKYGTKAELERAIRSLKANGIQVYGDVVMNHKGGADFTERVQAVEVNPQNRNQEVSGTYQIEAWTGFNFPGRGNQHSSFKWRWYHFDGTDWDQSRQLANRIYKFRGDGKAWDWEVDTENGNYDYLMYADVDMDHPEVINELNRWGVWYANTLNLDGFRLDAVKHIKFSFMRDWLGHVRGQTGKNLFAVAEYWKNDLGALENYLSKTNWTMSAFDVPLHYNLYQASNSSGNYDMRNLLNGTLVQRHPSHAVTFVDNHDTQPGEALESFVQGWFKPLAYATILTREQGYPQVFYGDYYGIPSDGVPSKRQQIDPLLKARQQYAYGRQHDYFDHWDVIGWTREGNASHPNSGLATIMSDGPGGSKWMYVGRQKAGEVWHDMTGNRSGTVTINQDGWGHFFVNGGSVSVWVKR

SEQ ID NO: 30965 - protein, 483 aa, Bacillus sp. (in: firmicutes)
HHDGTNGTIMQYFEWNVPNDGQHWNRLHNNAQNLKNAGITAIWIPPAWKGTSQNDVGYGAYDLYDLGEFNQKGTVRTKYGTKAELERAIRSLKANGIQVYGDVVMNHKGGADFTERVQAVEVNPQNLNQEVSGTYQIEAWTGFNFPGRGNQHSSFKWRWYHFDGTDWDQSRQLANRIYKFRGKAWDWEVDTENGNYDYLMYADVDMDHPEVINELNRWGVWYANTLNLDGFRIDAVKHIKFSFIRDWLGHVRGQTGKNLFAVAEYWKNDLGALENYLSKTNWTMSAFDVPLHYNLYQASNSSGNYDMRNLLNGTLVQRHPSHAVTFVDNHDTQPGEALESFVQGWFKPLAYATILTREQGYPCVFYGDYYGIPSDGVPSYRQQIDPLLKARQQYAYGRQHDYFDHWDVIGWTREGNASHPNSGLATIMSDGPGGSKWMYVGRQKAGEVWHDMTGNRSGTVTINQDGWGHFFVNGGSVSVWVKR

SEQ ID NO: 30966 - protein, 485 aa, Bacillus sp.
HHDGTNGTIMQYFEWNVPNDGQHWNRLHNNAQNLKNAGITAIWIPPAWKGTSQNDVGYGAYDLYDLGEFNQKGTVRTKYGTKAELERAIRSLKANGIQVYGDVVMNHKGGADFTERVQAVEVNPQNRNQEVSGTYQIEAWTGFNFPGRGNQHSSFKWRWYHFDGTDWDQSRQLANRIYKFRGDGKAWDWEVDTENGNYDYLMYADVDMDHPEVINELNRWGVWYANTLNLDGFRLDAVKHIKFSFMRDWLGHVRGQTGKNLFAVAEYWKNDLGALENYLSKTNWTMSAFDVPLHYNLYQASNSSGNYDMRNLLNGTLVQRHPSHAVTFVDNHDTQPGEALESFVQGWFKPLAYATILTREQGYPQVFYGDYYGIPSDGVPSERQQIDPLLKARQQYAYGRQHDYFDHWDVIGWTREGNASHPNSGLATIMSDGPGGSKWMYVGRQKAGEVWHDMTGNRSGTVTINQDGWGHFFVNGGSVSVWVKR

SEQ ID NO: 30967 - protein, 485 aa, Bacillus sp.
HHDGTNGTIMQYFEWNVPNDGQHWNRLHNNAQNLKNAGITAIWIPPAWKGTSQNDVGYGAYDLYDLGEFNQKGTVRTKYGTKAELERAIRSLKANGIQVYGDVVMNHKGGADFTERVQAVEVNPQNRNQELSGTYQIEAWTGFNFPGRGNQHSSFKWRWYHFDGTDWDQSRQLANRIYKFRGDGKAWDWEVDTENGNYDYLMYADVDMDHPEVINELNRWGVWYANTLNLDGFRLDAVKHIKFSFMRDWLGHVRGQTGKNLFAVAEYWKNDLGALENYLSKTNWTMSAFDVPLHYNLYQASNSSGNYDMRNLLNGTLVQRHPSHAVTFVDNHDTQPGEALESFVQGWFKPLAYATILTREQGYPQVFYGDYYGIPSDGVPSYRQQIDPLLKARQQYAYGRQHDYFDHWDVIGWTREGNASHPNSGLATIMSDGPGGSKWMYVGRQKAGEVWHDMTGNRSGTVTINQDGWGHFFVNGGSVSVWVKR

SEQ ID NO: 30968 - protein, 485 aa, Bacillus sp.
HHDGTNGTIMQYFEWNVPNDGQHWNRLHNNAQNLKNAGITAIWIPPAWKGTSQNDVGYGAYDLYDLGEFNQKGTVRTKYGTKAELERAIRSLKANGIQVYGDVVMNHKGGADFTERVVAVEVNPQNRNQEVSGTYQIEAWTGFNFPGRGNQHSSFKWRWYHFDGTDWDQSRQLANRIYKFRGDGKAWDWEVDTENGNYDYLMYADVDMDHPEVINELNRWGVWYANTLNLDGFRLDAVKHIKFSFMRDWLGHVRGQTGKNLFAVAEYWKNDLGALENYLSKTNWTMSAFDVPLHYNLYQASNSSGNYDMRNLLNGTLVQRHPSHAVTFVDNHDTQPGEALESFVQGWFKPLAYATILTREQGYPQVFYGDYYGIPSDGVPSYRQQIDPLLKARQQYAYGRQHDYFDHWDVIGWTREGNASHPNSGLATIMSDGPGGSKWMYVGRQKAGEVWHDMTGNRSGTVTINQDGWGHFFVNGGSVSVWVKR

SEQ ID NO: 30969 - protein, 485 aa, Bacillus sp.
HHDGTNGTIMQYFEWNVPNDGQHWNRLHNNAQNLKNAGITAIWIPPAWKGTSQNDVGYGAYDLYDLGEFNQKGTVRTKYGTKADLERAIRSLKANGIQVYGDVVMNHKGGADFTERVQAVEVNPQNRNQEVSGTYQIEAWTGFNFPGRGNQHSSFKWRWYHFDGTDWDQSRQLANRIYKFRGDGKAWDWEVDTENGNYDYLMYADVDMDHPEVINELNRWGVWYANTLNLDGFRLDAVKHIKFSFMRDWLGHVRGQTGKNLFAVAEYWKNDLGALENYLSKTNWTMSAFDVPLHYNLYQASNSSGNYDMRNLLNGTLVQRHPSHAVTFVDNHDTQPGEALESFVQGWFKPLAYATILTREQGYPQVFYGDYYGIPSDGVPSYRQQIDPLLKARQQYAYGRQHDYFDHWDVIGWTREGNASHPNSGLATIMSDGPGGSKWMYVGRQKAGEVWHDMTGNRSGTVTINQDGWGHFFVNGGSVSVWVKR

SEQ ID NO: 30970 - protein, 485 aa, Bacillus sp.
HHDGTNGTIMQYFEWNVPNDGQHWNRLHNNAQNLKNAGITAIWIPPAWKGTSQNDVGYGAYDLYDLGEFNQKGTVRTKYGTKAELERAIRSLKANGIQVYGDVVMNHKGGADFTELVQAVEVNPQNRNQEVSGTYQIEAWTGFNFPGRGNQHSSFKWRWYHFDGTDWDQSRQLANRIYKFRGDGKAWDWEVDTENGNYDYLMYADVDMDHPEVINELNRWGVWYANTLNLDGFRLDAVKHIKFSFMRDWLGHVRGQTGKNLFAVAEYWKNDLGALENYLSKTNWTMSAFDVPLHYNLYQASNSSGNYDMRNLLNGTLVQRHPSHAVTFVDNHDTQPGEALESFVQGWFKPLAYATILTREQGYPQVFYGDYYGIPSDGVPSYRQQIDPLLKARQQYAYGRQHDYFDHWDVIGWTREGNASHPNSGLATIMSDGPGGSKWMYVGRQKAGEVWHDMTGNRSGTVTINQDGWGHFFVNGGSVSVWVKR

SEQ ID NO: 30971 - protein, 483 aa, Bacillus sp. (in: firmicutes)
HHDGTNGTMMQYFEWNVPNDGQHWNRLHNNAQNLKNAGITAIWIPPAWKGTSQNDVGYGAYDLYDLGEFNQKGTVRTKYGTKAELERAIRSLKANGIQVYGDVVMNHKGGADFTERVQAVEVNPQNRNQEVSGTYQIEAWTGFNFPGRGNQHSSFKWRWYHFDGTDWDQSRQLANRIYKFRGKEWDWEVDTEFGNYDYLMYADVDMDHPEVINELNRWGVWYANTLNLDGFRLDAVKHIKFSFMRDWLGHVRGQTGKNLFAVAEYWKNDLGALENYLSKTNWTMSAFDVPLHYNLYQASNSSGNYDMRNLLNGTLVQRHPSHAVTFVDNHDTQPGEALESFVQGWFKPLAYATILTREQGYPSVFYGDYYGIPSDGVPSYRQQIDPLLKARQQYAYGRQHDYFDHWDVIGWTREGNASHPNSGLATIMSDGPGGSKWMYVGRQKAGEVWHDMTGNRSGTVTINQDGWGHFFVNGGSVSVWVKR

SEQ ID NO: 30972 - protein, 485 aa, Bacillus sp.
HHDGTNGTIMQYFEWNVPNDGQHWNRLHNNAQNLKNAGITAIWIPPAWKGTSQNDVGYGAYDLYDLGEFNQKGTVRTKYGTKAELERAIRSLKANGIQVYGDVVMNHKGGADFTERVQAVEVNPQNRNQEVSGTYQIEAWTGFNFPGRGNQHSSFKWRWYHFDGTDWDQSRQLANRIYKFRGDGKAWDWEVDTENGNYDYLMYADVDMDHPEVINELNRWGVWYANTLNLDGFRLDAVKHIKFSFMRDWLGHVRGQTGKNLFAVAEYWKNDLGALENYLSKTNWTMSAFDVPLHYNLYQASNSSGNYDMRNLLNGTLVQRHPSHAVTFVDNHDTQPGEALESFVQGWFKPLAYATILTREQGYPQVFYGDYYGIPSDGVPSYRQQIDPLLKARQLYAYGRQHDYFDHWDVIGWTREGNASHPNSGLATIMSDGPGGSKWMYVGRQKAGEVWHDMTGNRSGTVTINQDGWGHFFVNGGSVSVWVKR

SEQ ID NO: 30973 - protein, 485 aa, Bacillus sp.
HHDGTNGTIMQYFEWNVPNDGQHWNRLHNNAQNLKNAGITAIWIPPAWKGTSQNDVGYGAYDLYDLGEFNQKGTVRTKYGTKAELERAIRSLKANGIQVYGDVVMNHKGGADFTEVVQAVEVNPQNRNQEVSGTYQIEAWTGFNFPGRGNQHSSFKWRWYHFDGTDWDQSRQLANRIYKFRGDGKAWDWEVDTENGNYDYLMYADVDMDHPEVINELNRWGVWYANTLNLDGFRLDAVKHIKFSFMRDWLGHVRGQTGKNLFAVAEYWKNDLGALENYLSKTNWTMSAFDVPLHYNLYQASNSSGNYDMRNLLNGTLVQRHPSHAVTFVDNHDTQPGEALESFVQGWFKPLAYATILTREQGYPQVFYGDYYGIPSDGVPSYRQQIDPLLKARQQYAYGRQHDYFDHWDVIGWTREGNASHPNSGLATIMSDGPGGSKWMYVGRQKAGEVWHDMTGNRSGTVTINQDGWGHFFVNGGSVSVWVKR

SEQ ID NO: 30974 - protein, 485 aa, Bacillus sp.
HHDGTNGTIMQYFEWNVPNDGQHWNRLHNNAQNLKNAGITAIWIPPAWKGTSQNDVGYGAYDLYDLGEFNQKGTVRTKYGTKAELERAIRSLKANGIQVYGDVVMNHKGGADFTERVQAVEVNPQNRNQEVSGTYQIEAWTGFNFPGRGNQHSSFKWRWYHFDGTDWDQSRQLANRIYKFRGDGKAWDWEVDTENGNYDYLMYADVDMDHPEVINELNRWGVWYANTLNLDGFRLDAVKHIKFSFMRDWLGHVRGQTGKNLFAVAEYWKNDLGALENYLSKTNWTMSAFDVPLHYNLYQASNSSGNYDMRNLLNGTLVQRHPSHAVTFVDNHDTQPGEALESFVQGWFKPLAYATILTREQGYPQVFYGDYYGIPSDGVPSYRQQIDPVLKARQQYAYGRQHDYFDHWDVIGWTREGNASHPNSGLATIMSDGPGGSKWMYVGRQKAGEVWHDMTGNRSGTVTINQDGWGHFFVNGGSVSVWVKR

SEQ ID NO: 30975 - protein, 485 aa, Bacillus sp.
HHDGTNGTIMQYFEWNVPNDGQHWNRLHNNAQNLKNAGITAIWIPPAWKGTSQNDVGYGAYDLYDLGEFNQKGTVRTKYGTKAELERAIRSLKANGIQVYGDVVMNHKGGADFTEHVQAVEVNPQNRNQEVSGTYQIEAWTGFNFPGRGNQHSSFKWRWYHFDGTDWDQSRQLANRIYKFRGDGKAWDWEVDTENGNYDYLMYADVDMDHPEVINELNRWGVWYANTLNLDGFRLDAVKHIKFSFMRDWLGHVRGQTGKNLFAVAEYWKNDLGALENYLSKTNWTMSAFDVPLHYNLYQASNSSGNYDMRNLLNGTLVQRHPSHAVTFVDNHDTQPGEALESFVQGWFKPLAYATILTREQGYPQVFYGDYYGIPSDGVPSYRQQIDPLLKARQQYAYGRQHDYFDHWDVIGWTREGNASHPNSGLATIMSDGPGGSKWMYVGRQKAGEVWHDMTGNRSGTVTINQDGWGHFFVNGGSVSVWVKR

SEQ ID NO: 30976 - protein, 485 aa, Bacillus sp.
HHDGTNGTIMQYFEWNVPNDGQHWNRLHNNAQNLKNAGITAIWIPPAWKGTSQNDVGYGAYDLYDLGEFNQKGTVRTKYGTKAELERAIRSLKANGIQVYGDVVMNHKGGADFTERVQAVEVNPQNRNQEVSGTYQIEAWTGFNFPGRGNQHSSFKWRWYHFDGTDWDQSRQLANRIYKFRGDGKAWDWEVDTENGNYDYLMYADVDMDHPEVINELNRWGVWYANTLNLDGFRLDAVKHIKFSFMRDWLGHVRGQTGKNLFAVAEYWKNDLGALENYLSKTNWTMSAFDVPLHYNLYQASNSSGNYDMRNLLNGTLVQRHPSHAVTFVDNHDTQPGEALESFVQGWFKPLAYATILTREQGYPQVFYGDYYGIPSDGVPSYRQQIDPLLKARQQYAYGEQHDYFDHWDVIGWTREGNASHPNSGLATIMSDGPGGSKWMYVGRQKAGEVWHDMTGNRSGTVTINQDGWGHFFVNGGSVSVWVKR

SEQ ID NO: 30977 - protein, 485 aa, Bacillus sp.
HHDGTNGTIMQYFEWNVPNDGQHWNRLHNNAQNLKNAGITAIWIPPAWKGTSQNDVGYGAYDLYDLGEFNQKGTVRTKYGTKAELERAIRSLKANGIQVYGDVVMNHKGGADFTERVQAVEVNPQNRNQEVSGTYQIEAWTGFNFPGRGNQHSSFKWRWYHFDGEDWDQSRQLANRIYKFRGDGKAWDWEVDTENGNYDYLMYADVDMDHPEVINELNRWGVWYANTLNLDGFRLDAVKHIKFSFMRDWLGHVRGQTGKNLFAVAEYWKNDLGALENYLSKTNWTMSAFDVPLHYNLYQASNSSGNYDMRNLLNGTLVQRHPSHAVTFVDNHDTQPGEALESFVQGWFKPLAYATILTREQGYPQVFYGDYYGIPSDGVPSYRQQIDPLLKARQQYAYGRQHDYFDHWDVIGWTREGNASHPNSGLATIMSDGPGGSKWMYVGRQKAGEVWHDMTGNRSGTVTINQDGWGHFFVNGGSVSVWVKR

SEQ ID NO: 30978 - protein, 485 aa, Bacillus sp.
HHDGTNGTIMQYFEWNVPNDGQHWNRLHNNAQNLKNAGITAIWIPPAWKGTSQNDVGYGAYDLYDLGEFNQKGTVRTKYGTKAELERAIRSLKANGIQVYGDVVMNHKGGADFTERVQAVEVNPQNRNQEVSGTYQIEAWTGFNFPGRGNQHSSFKWRWYHFDGTDWDQSRQLANRIYKFRGDGKAWDWEVDTENGNYDYLMYADVDMDHPEVINELNRWGVWYANTLNLDGFRLDAVKHIKFSFMRDWLGHVRGQTGKNLFAVAEYWKNDLGALENYLSKTNWTMSAFDVPLHYNLYQASNSSGNYDMRNLLNGTLVQRHPSHAVTFVDNHDTQPGEALESFVQGWFKPLAYATILTREQGYPQVFYGDYYGIPADGVPSYRQQIDPLLKARQQYAYGRQHDYFDHWDVIGWTREGNASHPNSGLATIMSDGPGGSKWMYVGRQKAGEVWHDMTGNRSGTVTINQDGWGHFFVNGGSVSVWVKR

SEQ ID NO: 30979 - protein, 485 aa, Bacillus sp.
HHNGTNGTMMQYFEWYLPNDGNHWNRLNSDASNLKSKGIKAVWIPPAWKGASQNDVGYGAYDLYDLGEFNQRGTVRTKYGTRSQLQAAVTSLKNNGIQVYGDVVMNHKGGADATEMVPAVEVNPNNRNQEVTGEYTIEAWTRFDFPGRGNTHSSFKWRWYHFDGVDFDQSRRLNNRIYKFRGHSKAWDWEVDTEFGNYDYLMYADYDYDHPESTNEMRNWGVWYTNTLGLDGFRIDAVKHIKYSFTRDWINHVRSATGKNMFAVAEFWKNDLGAIENYLQKTNWNHSVFDVPLHYNLYNASKSGGNYDMRNIFNGTVVQRHPSHAVTFVDNHDSQPEEALESFVEEWFKPLAYALTLTREQGYPSVFYGDYYGIPTHGVPAMRSKIDPILEARQKYAYGPQHDYLDHPDVIGWTREGDSSHPKSGLATLITDGPGGSKRMYAGLKNAGETWYDITGNRSDTVKIGSDGWGEFHVNDGSVSIYVQK

SEQ ID NO: 30980 - protein, 485 aa, Bacillus sp.
HHDGTNGTIMQYFEWNVPNDGQHWNRLHNNAQNLKNAGITAIWIPPAWKGTSQNDVGYGAYDLYDLGEFNQKGTVRTKYGTKAELERAIRSLKANGIQVYGDVVMNHKGGADFTERVQAVEVNPQNRNQEVSGTYQIEAWTGFNFPGRGNQHSSFKWRWYHFDGTDWDQSRQLANRIYKFRGDGKAWDWEVDTENGNYDYLMYADVDMDHPEVINELNRWGVWYANTLNLDGFRLDAVKHIKFSFMRDWLGHVRGQTGKNLFAVAEYWKNDLGALENYLSKTNWTMSAFDVPLHYNLYRASNSSGNYDMRNLLNGTLVQRHPSHAVTFVDNHDTQPGEALESFVQGWFKPLAYATILTREQGYPQVFYGDYYGIPSDGVPSYRQQIDPLLKARQQYAYGRQHDYFDHWDVIGWTREGNASHPNSGLATIMSDGPGGSKWMYVGRQKAGEVWHDMTGNRSGTVTINQDGWGHFFVNGGSVSVWVKR

SEQ ID NO: 30981 - protein, 485 aa, Bacillus sp.
HHDGTNGTIMQYFEWNVPNDGQHWNRLHNNAQNLKNAGITAIWIPPAWKGTSQNDVGYGAYDLYDLGEFNQKGTVRTKYGTKAELERAIRSLKANGIQVYGDVVMNHKGGADKTERVQAVEVNPQNRNQEVSGTYQIEAWTGFNFPGRGNQHSSFKWRWYHFDGTDWDQSRQLANRIYKFRGDGKAWDWEVDTENGNYDYLMYADVDMDHPEVINELNRWGVWYANTLNLDGFRLDAVKHIKFSFMRDWLGHVRGQTGKNLFAVAEYWKNDLGALENYLSKTNWTMSAFDVPLHYNLYQASNSSGNYDMRNLLNGTLVQRHPSHAVTFVDNHDTQPGEALESFVQGWFKPLAYATILTREQGYPQVFYGDYYGIPSDGVPSYRQQIDPLLKARQQYAYGRQHDYFDHWDVIGWTREGNASHPNSGLATIMSDGPGGSKWMYVGRQKAGEVWHDMTGNRSGTVTINQDGWGHFFVNGGSVSVWVKR

SEQ ID NO: 30982 - protein, 485 aa, Bacillus sp.
HHDGTNGTIMQYFEWQVPNDGQHWNRLHNNAQNLKNAGITAIWIPPAWKGTSQNDVGYGAYDLYDLGEFNQKGTVRTKYGTKAELERAIRSLKANGIQVYGDVVMNHKGGADFTERVQAVEVNPQNRNQEVSGTYQIEAWTGFNFPGRGNQHSSFKWRWYHFDGTDWDQSRQLANRIYKFRGDGKAWDWEVDTENGNYDYLMYADVDMDHPEVINELNRWGVWYANTLNLDGFRLDAVKHIKFSFMRDWLGHVRGQTGKNLFAVAEYWKNDLGALENYLSKTNWTMSAFDVPLHYNLYQASNSSGNYDMRNLLNGTLVQRHPSHAVTFVDNHDTQPGEALESFVQGWFKPLAYATILTREQGYPQVFYGDYYGIPSDGVPSYRQQIDPLLKARQQYAYGRQHDYFDHWDVIGWTREGNASHPNSGLATIMSDGPGGSKWMYVGRQKAGEVWHDMTGNRSGTVTINQDGWGHFFVNGGSVSVWVKR

SEQ ID NO: 30983 - protein, 485 aa, Bacillus sp.
HHDGTNGTIMQYFEWNVPNDGQHWNRLMNNAQNLKNAGITAIWIPPAWKGTSQNDVGYGAYDLYDLGEFNQKGTVRTKYGTKAELERAIRSLKANGIQVYGDVVMNHKGGADFTERVQAVEVNPQNRNQEVSGTYQIEAWTGFNFPGRGNQHSSFKWRWYHFDGTDWDQSRQLANRIYKFRGDGKAWDWEVDTENGNYDYLMYADVDMDHPEVINELNRWGVWYANTLNLDGFRLDAVKHIKFSFMRDWLGHVRGQTGKNLFAVAEYWKNDLGALENYLSKTNWTMSAFDVPLHYNLYQASNSSGNYDMRNLLNGTLVQRHPSHAVTFVDNHDTQPGEALESFVQGWFKPLAYATILTREQGYPQVFYGDYYGIPSDGVPSYRQQIDPLLKARQQYAYGRQHDYFDHWDVIGWTREGNASHPNSGLATIMSDGPGGSKWMYVGRQKAGEVWHDMTGNRSGTVTINQDGWGHFFVNGGSVSVWVKR

SEQ ID NO: 30984 - protein, 485 aa, Bacillus sp.
HHNGTNGTMMQYFEWYLPNDGNHWNRLNSDASNLKSKGITAVWIPPAWKGASQNDVGYGAYDLYDLGEFNQKGTVRTKYGTRSQLQAAVTSLKNNGINVYGDVVMNHKGGADATEMVRAVEVNPNNRNQEVTGEYTIEAYTRFDFPGRGNTHSSFKWRWYHFDGVDFDQSRKLNNRIYKFRGHGKAWDWEVDTEFGNYDYLMYVDYDYDHPETTNEMRNWGVWYTNTLGLDGFRIDAVKHIKYSFTRDWINHVRIATGKNMFAVAEFWKNDLGAIENYLQKTNWNHSVFDVPLHYNLYNASKSGGNYDMRNIFNGTVVQAHPMHAVTFVDNHDSQPEEALESFVDEWFKPLAYALTLTREQGYPSVFYGDYYGIPTHGVPAMRSKIDPILEARQKYAYGPQHDYLDHPDVIGWTREGDSSHPKSGLATLITDGPGGSKRMYAGLKNAGETWYDITGNRSDTVKIGSDGWGEFHVNDGSVSIYVQK

SEQ ID NO: 30985 - protein, 485 aa, Bacillus sp.
HHDGTNGTIMQYFEWNVPNDGQHWNRLHNNAQNLKNAGITAIWIPPAWKGTSQNDVGYGAYDLYDLGEFNQKGTVRTKYGTKFELERAIRSLKANGIQVYGDVVMNHKGGADFTERVQAVEVNPQNRNQEVSGTYQIEAWTGFNFPGRGNQHSSFKWRWYHFDGTDWDQSRQLANRIYKFRGDGKAWDWEVDTENGNYDYLMYADVDMDHPEVINELNRWGVWYANTLNLDGFRLDAVKHIKFSFMRDWLGHVRGQTGKNLFAVAEYWKNDLGALENYLSKTNWTMSAFDVPLHYNLYQASNSSGNYDMRNLLNGTLVQRHPSHAVTFVDNHDTQPGEALESFVQGWFKPLAYATILTREQGYPQVFYGDYYGIPSDGVPSYRQQIDPLLKARQQYAYGRQHDYFDHWDVIGWTREGNASHPNSGLATIMSDGPGGSKWMYVGRQKAGEVWHDMTGNRSGTVTINQDGWGHFFVNGGSVSVWVKR

SEQ ID NO: 30986 - protein, 485 aa, Bacillus sp.
HHDGTNGTIMQYFEWNVPNDGQHWNRLHNNAQNLKNAGITAIWIPPAWKGTSQNDVGYGAYDLYDLGEFNQKGTVRTKYGTKAELERAIRSLKANGIQVYGDVVMNHKGGADFTERVQAVEVNPQNRNQEVSGTYQIEAWTGFNFPGRGNQHSSFKWRWYHFDGTDWDQSRQLANRIYKFRGDGKAWDWEVDTENGNYDYLMYADVDMDHPEVINELNRWGVWYANTLNLDGFRLDAVKHIKFSFMRDWLGHVRGQTGKCLFAVAEYWKNDLGALENYLSKTNWTMSAFDVPLHYNLYQASNSSGNYDMRNLLNGTLVQRHPSHAVTFVDNHDTQPGEALESFVQGWFKPLAYATILTREQGYPQVFYGDYYGIPSDGVPSYRQQIDPLLKARQQYAYGRQHDYFDHWDVIGWTREGNASHPNSGLATIMSDGPGGSKWMYVGRQKAGEVWHDMTGNRSGTVTINQDGWGHFFVNGGSVSVWVKR

SEQ ID NO: 30987 - protein, 485 aa, Bacillus sp.
HHDGTNGTIMQYFEWNVPNDGQHWNRLHNNAQNLKNAGITAIWIPPAWKGTSQNDVGYGAYDLYDLGEFNQKGTVRTKYGTKAELERAIRSLKANGIQVYGDVVMNHKGGADFTERVQAVEVNPQNRNQEVSGTYQIEAWTGFNFPGRGNQHSSFKWRWYHFDGTDWDQSRQLANRIYKFRGDGKAWDWEVDTENGNYDYLMYADVDMDHPEVINELNRWGVWYANTLNLDGFRLDAVKHIKFSFMRDWLGHVRGQTGKNLFAVAEYWKNDLGALENYLSKTNWTMSAFDVPLHYNLYQASNSSGNYDMRNLLNGTLVQRHPSHAVTFVDNHDTQPGEALESFVQGWFKPLAYAFILTREQGYPQVFYGDYYGIPSDGVPSYRQQIDPLLKARQQYAYGRQHDYFDHWDVIGWTREGNASHPNSGLATIMSDGPGGSKWMYVGRQKAGEVWHDMTGNRSGTVTINQDGWGHFFVNGGSVSVWVKR

SEQ ID NO: 30988 - protein, 485 aa, Bacillus sp.
HHDGTNGTIMQYFEWNVPNDGQHWNRLHNNAQNLKNAGITAIWIPPAWKGTSQNDVGYGAYDLYDLGEFNQKGTVRTKYGTKAELERAIRSLKANGIQVYGDVVMNHKGGADFTERVQAVEVNPQNRNQEVSGTYQIEAWTGFNFPGRGNQHSSFKWRWYHFDGTDWDQSRQLANRIYKFRGDGKAWDWEVDTENGNYDYLMYADVDMDHPEVINELNRWGVWYANTLNLDGFRLDAVKHIKFSFMRDWLGHVRGQTGKNLFAVAEYWKNDLGALENYLSKTNWTMSAFDVPLHYNLYQASNSSGNYDMRNLLNGTLVQRHPSHAVTFVDNHDTQPGEALESFVQQWFKPLAYATILTREQGYPQVFYGDYYGIPSDGVPSYRQQIDPLLKARQQYAYGRQHDYFDHWDVIGWTREGNASHPNSGLATIMSDGPGGSKWMYVGRQKAGEVWHDMTGNRSGTVTINQDGWGHFFVNGGSVSVWVKR

SEQ ID NO: 30989 - protein, 485 aa, Bacillus sp.
HHDGTNGTIMQYFEWNVPNDGQHWNRLHNNAQNLKNAGITAIWIPPAWKGTSQNDVGYGAYDLYDLGEFNQKGTVRTKYGTKAELERAIRSLKANGIQVYGDVVMNHKGGADFTERVQAVEVNPQNRNQEVSGTYQIEAWTGFNFPGRGNQHSSFKWRWYHFDGTDWDQSRQLANRIYKFRGDGKAWDWEVDRENGNYDYLMYADVDMDHPEVINELNRWGVWYANTLNLDGFRLDAVKHIKFSFMRDWLGHVRGQTGKNLFAVAEYWKNDLGALENYLSKTNWTMSAFDVPLHYNLYQASNSSGNYDMRNLLNGTLVQRHPSHAVTFVDNHDTQPGEALESFVQGWFKPLAYATILTREQGYPQVFYGDYYGIPSDGVPSYRQQIDPLLKARQQYAYGRQHDYFDHWDVIGWTREGNASHPNSGLATIMSDGPGGSKWMYVGRQKAGEVWHDMTGNRSGTVTINQDGWGHFFVNGGSVSVWVKR

SEQ ID NO: 30990 - protein, 483 aa, Bacillus sp. (in: firmicutes)
HHDGTNGTIMQYFEWNVPNDGQHWNRLHNNAQNLKNAGITAIWIPPAWKGTSQNDVGYGAYDLYDLGEFNQKGTVRTKYGTKAELERAIQSLKANGIQVYGDVVMNHKGGADFTERVQAVEVNPQNRNQEVSGTYQIEAWTGFNFPGRGNQHSSFKWRWYHFDGTDWDQSRQLANRIYKFRGKAWDWEVDTENGNYDYLMYADVDMDHPEVINELNRWGVWYANTLNLDGFRLDAVKHIKFSFMRDWLGHVRGQTGKNLFAVAEYWKNDLGALENYLSKTNWTMSAFDVPLHYNLYQASNSSGNYDMRNLLNGTLVQRHPSHAVTFVDNHDTQPGEALESFVQGWFKPLAYATILTREQGYPQVFYGDYYGIPSDGVPSYRQQIDPLLKARQQYAYGRQHDYFDHWDVIGWTREGNASHPNSGLATIMSDGPGGSKWMYVGRQKAGEVWHDMTGNRSGTVTINQDGWGHFFVNGGSVSVWVKR

SEQ ID NO: 30991 - protein, 485 aa, Bacillus sp.
HHDGTNGTIMQYFEWNVPNDGQHWNRLHNNAQNLKNAGITAIWIPPAWKGTSQNDVGYGAYDLYDLGEFNQKGTVRTKYGTKAELERAIRSLKANGIQVYGDVVMNHKGGADFTERVQAVEVNPQNRNQEVSGTYQIEAWTGFNFPGRGNQHSSFKWRWYHFDGTDWDQSRQLANRIYKFRGDGKAWDWEVDTENGNYDYLMYADVDMDHPEVINELNRWGVWYANTLNLDGFRLDAVKHIKFSFMRDWLGHVRGQTGKNLFAVAEYWKNDLGALENYLSKTNWTMSAFDVPLHYNLYQASNSSGNYDMRNLLNGTLVQRHPSHAVTFVDNHDTQPGEALESFVQGWFKPLAYATILTREQGYPQVFYGDYYGIPSDGVPSYRRQIDPLLKARQQYAYGRQHDYFDHWDVIGWTREGNASHPNSGLATIMSDGPGGSKWMYVGRQKAGEVWHDMTGNRSGTVTINQDGWGHFFVNGGSVSVWVKR

SEQ ID NO: 30992 - protein, 485 aa, Bacillus sp.
HHDGTNGTIMQYFEWNVPNDGQHWNRLHNNAQNLKNAGITAIWIPPAWKGTSQNDVGYGAYDLYDLGEFNQKGTVRTKYGTKAELERAIRSLKANGIQVYGDVVMNHKGGADFTERVQAVEVNPQNRNQEVSGTYQIEAWTGFNFPGRGNQHSSFKWRWYHFDGTDWDQSRQLANRIYKFRGDGKAWDWEVDTENGNYDYLMYADVDMDHPEVINELNRWGVWYANTLNLDGFRLDAVKHIKFSFMRDWLGHVRLQTGKNLFAVAEYWKNDLGALENYLSKTNWTMSAFDVPLHYNLYQASNSSGNYDMRNLLNGTLVQRHPSHAVTFVDNHDTQPGEALESFVQGWFKPLAYATILTREQGYPQVFYGDYYGIPSDGVPSYRQQIDPLLKARQQYAYGRQHDYFDHWDVIGWTREGNASHPNSGLATIMSDGPGGSKWMYVGRQKAGEVWHDMTGNRSGTVTINQDGWGHFFVNGGSVSVWVKR

SEQ ID NO: 30993 - protein, 485 aa, Bacillus sp.
HHDGTNGTIMQYFEWNVPNDGQHWNRLHNNAQNLKNAGITAIWIPPAWKGTSQNDVGYGAYDLYDLGEFNQKGTVRTKYGTKAELERAIRSLKANGIQVYGDVVMNHKGGADFTERVQAVEVNPQNRNQEVSGTYQIEAWTGFNFPGRGNQHSSFKWRWYHFDGTDWDQSRQLANRIYKFRGDGKAWDWEVDTENGNYDYLMYADVDMDHPEVINELNRWGVWYANTLNLDGFRLDAVKHIKFSFMRDWLGHVRGQTGKNLFAVAEYWKNDLGALENYLSKTNWTMSAFDVPLHYNLYQASNSSGNYDMRNLLNGTLVQRHPSHAVTFVDNHDTQPGEALESFVQGWFKPLAYATILTREQGYPQVFYGDYYGIPSDGVPSYRQQIDPLLKARQMYAYGRQHDYFDHWDVIGWTREGNASHPNSGLATIMSDGPGGSKWMYVGRQKAGEVWHDMTGNRSGTVTINQDGWGHFFVNGGSVSVWVKR

SEQ ID NO: 30994 - protein, 485 aa, Bacillus sp.
HHDGTNGTIMQYFEWNVPNDGQHWNRLHNNAQNLKNAGITAIWIPPAWKGTSQNDVGYGAYDLYDLGEFNQKGTVRTKYGTKAELERAIRSLKANGIQVYGDVVMNHKGGADLTERVQAVEVNPQNRNQEVSGTYQIEAWTGFNFPGRGNQHSSFKWRWYHFDGTDWDQSRQLANRIYKFRGDGKAWDWEVDTENGNYDYLMYADVDMDHPEVINELNRWGVWYANTLNLDGFRLDAVKHIKFSFMRDWLGHVRGQTGKNLFAVAEYWKNDLGALENYLSKTNWTMSAFDVPLHYNLYQASNSSGNYDMRNLLNGTLVQRHPSHAVTFVDNHDTQPGEALESFVQGWFKPLAYATILTREQGYPQVFYGDYYGIPSDGVPSYRQQIDPLLKARQQYAYGRQHDYFDHWDVIGWTREGNASHPNSGLATIMSDGPGGSKWMYVGRQKAGEVWHDMTGNRSGTVTINQDGWGHFFVNGGSVSVWVKR

SEQ ID NO: 30995 - protein, 485 aa, Bacillus sp.
HHDGTNGTIMQYFEWNVPNDGQHWNRLHNNAQNLKNAGITAIWIPPAWKGTSQNDVGYGAYDLYDLGEFNQKGTVRTKYGTKAELERAIRSLKANGIQVYGDVVMNHKGGADFTECVQAVEVNPQNRNQEVSGTYQIEAWTGFNFPGRGNQHSSFKWRWYHFDGTDWDQSRQLANRIYKFRGDGKAWDWEVDTENGNYDYLMYADVDMDHPEVINELNRWGVWYANTLNLDGFRLDAVKHIKFSFMRDWLGHVRGQTGKNLFAVAEYWKNDLGALENYLSKTNWTMSAFDVPLHYNLYQASNSSGNYDMRNLLNGTLVQRHPSHAVTFVDNHDTQPGEALESFVQGWFKPLAYATILTREQGYPQVFYGDYYGIPSDGVPSYRQQIDPLLKARQQYAYGRQHDYFDHWDVIGWTREGNASHPNSGLATIMSDGPGGSKWMYVGRQKAGEVWHDMTGNRSGTVTINQDGWGHFFVNGGSVSVWVKR

SEQ ID NO: 30996 - protein, 485 aa, Bacillus sp.
HHDGTNGTIMQYFEWNVPNDGQHWNRLHNNAQNLKNAGITAIWIPPAWKGTSQNDVGYGAYDLYDLGEFNQKGTVRTKYGTKAELERAIRSLKANGIQVYGDVVMNHKGGADFTERVQAVEVNPQNRNQEVSGTYQIEAWTGFNFPGRGNQHSSFKWRWYHFDGTDWDQSRQLANRIYKFRGDGKAWDWEVDTENGNYDYLMYADVDMDHPEVINELNRWGVWYANTLNLDGFRLDAVKHIKFSFMRDWLGHVRGQTGKNLFAVAEYWKNDLGALENYLSKTNWTMSAFDVPLHYNLYQASNSSGNYDMRNLLNGTLVQRHPSHAVTFVDNHDTQPGEALESFVQGWFKPLAYATILTREQGYPQVFYGDYYGIPSDGVPSYRQQIDPLLKARQQYAYGRQHDYFDHWDVIGWTREGNASHPNSGLATIMSDGPGGSKWMYVGRQKAGEVWHDSTGNRSGTVTINQDGWGHFFVNGGSVSVWVKR

SEQ ID NO: 30997 - protein, 483 aa, Bacillus sp. (in: firmicutes)
HHDGTNGTIMQYFEWNVPNDGQHWNRLHNNAQNLKNAGITAIWIPPAWKGTSQNDVGYGAYDLYDLGEFNQKGTVRTKYGTKAELERAIRSLKANGIQVYGDVVMNHKGGADFTERVQAVEVNPQNRNQEVSGTYQIEAWTGFNFPGRGNQHSSFKWRWYHFDGTDWDQSRQLANRIYKFRGKAWDWEVDTENGNYDYLMYADVDMDHPEVINELNRWGVWYANTLNLDGFRLDAVKHIKFSFLRDWLGHVRGQTGKNLFAVAEYWKNDLGAVENYLSKTNWTMSAFDVPLHYNLYQASNSSGNYDMRNLLNGTLVQRHPSHAVTFVDNHDTQPGEALESFVQGWFKPLAYATILTREQGYPSVFYGDYYGIPSDGVPSYRQQIDPLLKARQQYAYGRQHDYFDHWDVIGWTREGNASHPNSGLATIMSDGPGGSKWMYVGRQKAGEVWHDMTGNRSGTVTINQDGWGHFFVNGGSVSVWVKR

SEQ ID NO: 30998 - protein, 485 aa, Bacillus sp.
HHNGTNGTMMQYFEWYLPNDGNHWNRLNSDASNLKSKGIKAVWIPPAWKAVSQNDVGYGAYDLYDLGEFNQRGTVRTKYGTRSQLQAAVTSLKNNGIQVYGDVVMNHKGGADATEMVRAVEVNPNNRNQEVTGEYTIEAWTRFDFPGRGNTHSSFKWRWYHFDGVDFDQSREFTNRIYKFRGHGKAWDWEVDTEFGNYDYLMYADYDYDHPESTNEMRNWGVWYTNTLGLDGFRIDAVKHIKYSFTRDWINHVRSATGKNMFAVAEFWKNDLGAIENYLQKTNWNHSVFDVPLHYNLYNASKSGGNYDMRNIFNGTVVQRHPSHAVTFVDNHDSQPEEALESFVEEWFKPLAYALTLTREQGYPSVFYGDYYGIPTHGVPAMRSKIDPILEARQKYAYGPQHDYLDHPDVIGWTREGDSSHPKSGLATLITDGPGGSKRMYAGLKNAGETWYDITGNRSDTVKIGSDGWGEFHVNDGSVSIYVQK

SEQ ID NO: 30999 - protein, 483 aa, Bacillus sp. (in: firmicutes)
HHDGTNGTIMQYFEWNVPNDGQHWNRLHNNAQNLKNAGITAIWIPPAWKGTSQNDVGYGAYDLYDLGEFNQKGTVRTKYGTKAELERAIRSLKANGIQVYGDVVMNHKGGADFTERVQAVEVNPQNLNQEVSGTYQIEAWTGFNFPGRGNQHSSFKWRWYHFDGTDWDQSRQLANRIYKFRGKAWDWEVDTENGNYDYLMYADVDMDHPEVINELNRWGVWYANTLNLDGFRLDAVKHIKFSFVRDWLGHVRGQTGKNLFAVAEYWKNDLGALENYLSKTNWTMSAFDVPLHYNLYQASNSSGNYDMRNLLNGTLVQRHPSHAVTFVDNHDTQPGEALESFVQGWFKPLAYATILTREQGYPSVFYGDYYGIPSDGVPSYRQQIDPLLKARQQYAYGRQHDYFDHWDVIGWTREGNASHPNSGLATIMSDGPGGSKWMYVGRQKAGEVWHDMTGNRSGTVTINQDGWGHFFVNGGSVSVWVKR

SEQ ID NO: 31000 - protein, 485 aa, Bacillus sp.
HHNGTNGTMMQYFEWYLPNDGNHWNRLNSDASNLKSKGIKAVWIPPAWKGASQNDVGYGAYDLYDLGEFNQRGTVRTKYGTRSQLQAAVTSLKNNGIQVYGDVVMNHKGGADATEMVRAVEVNPNNRNQEVTGEYTIEAWTRFDFPGRGNTHSSFKWRWYHFDGVDFDQSRRLNNRIYKFRGHGKAWDWEVDTEFGNYDYLMYADYDYDHPETTNEMRNWGVWYTNTLGLDGFRIDAVKHIKYSFTRDWINHVRSATGKNMFAVAEFWKNDLGAIENYLQKTNWNHSVFDVPLHYNLYNASKSGGNYDMRNIFNGTVVQRHPSHAVTFVDNHDSQPEEALESFVEEWFKPLAYALTLTREQGYPSVFYGDYYGIPTHGVPAMRSKIDPILEARQKYAYGPQHDYLDHPDVIGWTREGDSSHPKSGLATLITDGPGGSKRMYAGLKNAGETWYDITGNRSDTVKIGSDGWGEFHVNDGSVSIYVQK

SEQ ID NO: 31001 - protein, 485 aa, Bacillus sp.
HHDGTNGTIMQYFEWNVPNDGQHWNRLHNNAQNLKNAGITAIWIPPAWKGTSQNDVGYGAYDLYDLGEFNQKGTVRTKYGTKAELERAIRSLKANGIQVYGDVVMNHKGGADFTERVQAVEVNPQNRNQEVSGTYQIEAWTGFNFPGRGNQHSSFKWRWYHFDGTDWDQSRQLLNRIYKFRGDGKAWDWEVDTENGNYDYLMYADVDMDHPEVINELNRWGVWYANTLNLDGFRLDAVKHIKFSFMRDWLGHVRGQTGKNLFAVAEYWKNDLGALENYLSKTNWTMSAFDVPLHYNLYQASNSSGNYDMRNLLNGTLVQRHPSHAVTFVDNHDTQPGEALESFVQGWFKPLAYATILTREQGYPQVFYGDYYGIPSDGVPSYRQQIDPLLKARQQYAYGRQHDYFDHWDVIGWTREGNASHPNSGLATIMSDGPGGSKWMYVGRQKAGEVWHDMTGNRSGTVTINQDGWGHFFVNGGSVSVWVKR

SEQ ID NO: 31002 - protein, 485 aa, Bacillus sp.
HHDGTNGTIMQYFEWNVPNDGQHWNRLHNNAQNLKNAGITAIWIPPAWKGTSQNDVGYGAYDLYDLGEFNQKGTVRTKYGTKAELERAIRSLKANGIQVYGDVVMNHKGGADFTERVQAVEVNPQNRNQEVSGTYQIEAWTGFNFPGRGNQHSSFKWRWYHFDGTDWDQSRQLANRIYKFRGDGKAWDWEVDTENGNYDYLMYADVDMDHPEVINELNRWGVWYANTLNLDGFRLDAVKHIKFSFMRDWLGHVRGQTGKNLFAVAEYWKNDLGALENYLSKTNWTMSAFDVPLHYNLYQASNSSGNYDMRNLLNGTLVQRHPSHAVTFVDNHDTQPGEALESFVQVWFKPLAYATILTREQGYPQVFYGDYYGIPSDGVPSYRQQIDPLLKARQQYAYGRQHDYFDHWDVIGWTREGNASHPNSGLATIMSDGPGGSKWMYVGRQKAGEVWHDMTGNRSGTVTINQDGWGHFFVNGGSVSVWVKR

SEQ ID NO: 31003 - protein, 485 aa, Bacillus sp.
HHDGTNGTIMQYFEWNVPNDGQHWNRLHNNAQNLKNAGITAIWIPPAWKGTSQNDVGYGAYDLYDLGEFNQKGTVRTKYGTKAELERAIRSLKANGIQVYGDVVMNHKGGADFTERVQAVEVNPQNRNQEVSGTYQIEAWTGFNFPGRGNQHSSFKWRWYHFDGTDWDQSRQLANRIYKFRGDGKAWDWEVDTENGNYDYLMYADVDMDHPEVINELNRWGVWYANTLNLDGFRLDAVKHIKFSFMRDWLGHVRGQTGKNLFAVAEYWKNDLGALENYLSKTNWTMSAFDVPLHYNLYQASNSSGNYDMRNLLNGTLVQRHPSHAVTFVDNHDTQPGEALESFVQGWFKPLAYATILTREQGYPCVFYGDYYGIPSDGVPSYRQQIDPLLKARQQYAYGRQHDYFDHWDVIGWTREGNASHPNSGLATIMSDGPGGSKWMYVGRQKAGEVWHDMTGNRSGTVTINQDGWGHFFVNGGSVSVWVKR

SEQ ID NO: 31004 - protein, 485 aa, Bacillus sp.
HHDGTNGTIMQYFEWNVPNDGQHWNRLHNNAQNLKNAGITAIWIPPAWKGTSQNDVGYGAYDLYDLGEFNQKGTVRTKYGTKAELERAIRSLKANGIQVYGDVVMNHKGGADFTERVQAVEVNPQNRNQEVSGTYQIEAWTGFNFPGRGNQHSSFKWRWYHFDGTDWDQSRQLANRIYKFRGDGKAWDWEVDTENGNYDYLMYADVDMDHPEVINELNRWGVWYANTLNLDGFRLDAVKHIKFSFMRDWLGHVRGQTGKNLFAVAEYWKNDLGALENYLSKTNWEMSAFDVPLHYNLYQASNSSGNYDMRNLLNGTLVQRHPSHAVTFVDNHDTQPGEALESFVQGWFKPLAYATILTREQGYPQVFYGDYYGIPSDGVPSYRQQIDPLLKARQQYAYGRQHDYFDHWDVIGWTREGNASHPNSGLATIMSDGPGGSKWMYVGRQKAGEVWHDMTGNRSGTVTINQDGWGHFFVNGGSVSVWVKR

SEQ ID NO: 31005 - protein, 485 aa, Bacillus sp.
HHDGTNGTIMQYFEWNVPNDGQHWNRLHNNAQNLKNAGITAIWIPPAWKGTSQNDVGYGAYDLYDLGEFNQKGTVRTKYGTKAELERAIRSLKANGIQVYGDVVMNHKGGADFTERVQAVEVNPQNRNQEVSGTYQIEAWTGFNFPGRGNQHSSFKWRWYHFDGTDWDQSRQLANRIYKFRGDGKAWDWEVDTENGNYDYLMYADVDMDHPEVINELNRWGVWYANTLNLDGFRLDAVKHIKFSFMRDWLGHVRGQTGKNLFAVAEYWKNDLGALENYLSKTNWTMSAFDVPLHYNLYQASNSSGNYDMRNLLNGTLVQRHPSHAVTFVDNHDTQPGEALESFVQGWFKPLAYATILTREQGYPQVFYGDYYGIPSDGVPSYGQQIDPLLKARQQYAYGRQHDYFDHWDVIGWTREGNASHPNSGLATIMSDGPGGSKWMYVGRQKAGEVWHDMTGNRSGTVTINQDGWGHFFVNGGSVSVWVKR

SEQ ID NO: 31006 - protein, 485 aa, Bacillus sp.
HHDGTNGTIMQYFEWNVPNDGQHWNRLHNNAQNLKNAGITAIWIPPAWKGTSQNDVGYGAYDLYDLGEFNQKGTVRTKYGTKAELERAIRSLKANGIQVYGDVVMNHKGGADFTERVQAVEVNPQNRNQEVSGTYQIEAWTGFGFPGRGNQHSSFKWRWYHFDGTDWDQSRQLANRIYKFRGDGKAWDWEVDTENGNYDYLMYADVDMDHPEVINELNRWGVWYANTLNLDGFRLDAVKHIKFSFMRDWLGHVRGQTGKNLFAVAEYWKNDLGALENYLSKTNWTMSAFDVPLHYNLYQASNSSGNYDMRNLLNGTLVQRHPSHAVTFVDNHDTQPGEALESFVQGWFKPLAYATILTREQGYPQVFYGDYYGIPSDGVPSYRQQIDPLLKARQQYAYGRQHDYFDHWDVIGWTREGNASHPNSGLATIMSDGPGGSKWMYVGRQKAGEVWHDMTGNRSGTVTINQDGWGHFFVNGGSVSVWVKR

SEQ ID NO: 31007 - protein, 485 aa, Bacillus sp.
HHDGTNGTIMQYFEWNVPNDGQHWNRLHNNAQNLKNAGITAIWIPPAWKGTSQNDVGYGAYDLYDLGEFNQKGTVRTKYGTKAMLERAIRSLKANGIQVYGDVVMNHKGGADFTERVQAVEVNPQNRNQEVSGTYQIEAWTGFNFPGRGNQHSSFKWRWYHFDGTDWDQSRQLANRIYKFRGDGKAWDWEVDTENGNYDYLMYADVDMDHPEVINELNRWGVWYANTLNLDGFRLDAVKHIKFSFMRDWLGHVRGQTGKNLFAVAEYWKNDLGALENYLSKTNWTMSAFDVPLHYNLYQASNSSGNYDMRNLLNGTLVQRHPSHAVTFVDNHDTQPGEALESFVQGWFKPLAYATILTREQGYPQVFYGDYYGIPSDGVPSYRQQIDPLLKARQQYAYGRQHDYFDHWDVIGWTREGNASHPNSGLATIMSDGPGGSKWMYVGRQKAGEVWHDMTGNRSGTVTINQDGWGHFFVNGGSVSVWVKR

SEQ ID NO: 31008 - protein, 485 aa, Bacillus sp.
HHNGTNGTMMQYFEWYLPNDGNHWNRLNSDASNLKSKGITAVWIPPAWKGASQNDVGYGAYDLYDLGEFNQKGTVRTKYGTRSQLQAAVTSLKNNGIQVYGDVVMNHKGGADATEMVRAVEVNPNNRNQEVTGEYTIEAWTRFDFPGRGNTHSSFKWRWYHFDGVDWDQSRELDNRIYKFRGHGKAWDWEVDTEFGNYDYLMYTDYDYDHPESTNEMRNWGVWYTNTLGLDGFRIDAVKHIKYSFTRDWINHVRSATGKNMFAVAEFWKNDLGAIENYLQKTNWNHSVFDVPLHYNLYNASKSQGNYDMRNIFNGTVVQRHPSHAVTFVDNHDSQPEEALESFVDTWFKPLAYALTLTREQGYPSVFYGDYYGIPTHGVPAMRSKIDPILEARQKYAYGPQHDYLDHPDVIGWTREGDSSHPKSGLATLITDGPGGSKRMYAGLKNAGETWYDITGNRSDTVKIGSDGWGEFHVNGSSVSIYVQK

SEQ ID NO: 31009 - protein, 485 aa, Bacillus sp.
HHDGTNGTIMQYFEWNVPNDGQHWNRLHNNAQNLKNAGITAIWIPPAWKGTSQNDVGYGAYDLYDLGEFNQKGTVRTKYGTKAELERAIRSLKANGIQVYGDVVMNHKGGADFTEIVQAVEVNPQNRNQEVSGTYQIEAWTGFNFPGRGNQHSSFKWRWYHFDGTDWDQSRQLANRIYKFRGDGKAWDWEVDTENGNYDYLMYADVDMDHPEVINELNRWGVWYANTLNLDGFRLDAVKHIKFSFMRDWLGHVRGQTGKNLFAVAEYWKNDLGALENYLSKTNWTMSAFDVPLHYNLYQASNSSGNYDMRNLLNGTLVQRHPSHAVTFVDNHDTQPGEALESFVQGWFKPLAYATILTREQGYPQVFYGDYYGIPSDGVPSYRQQIDPLLKARQQYAYGRQHDYFDHWDVIGWTREGNASHPNSGLATIMSDGPGGSKWMYVGRQKAGEVWHDMTGNRSGTVTINQDGWGHFFVNGGSVSVWVKR

SEQ ID NO: 31010 - protein, 485 aa, Bacillus sp.
HHDGTNGTIMQYFEWNVPNDGQHWNRLHNNAQNLKNAGITAIWIPPAWKGTSQNDVGYGAYDLYDLGEFNQKGTVRTKYGTKAFLERAIRSLKANGIQVYGDVVMNHKGGADFTERVQAVEVNPQNRNQEVSGTYQIEAWTGFNFPGRGNQHSSFKWRWYHFDGTDWDQSRQLANRIYKFRGDGKAWDWEVDTENGNYDYLMYADVDMDHPEVINELNRWGVWYANTLNLDGFRLDAVKHIKFSFMRDWLGHVRGQTGKNLFAVAEYWKNDLGALENYLSKTNWTMSAFDVPLHYNLYQASNSSGNYDMRNLLNGTLVQRHPSHAVTFVDNHDTQPGEALESFVQGWFKPLAYATILTREQGYPQVFYGDYYGIPSDGVPSYRQQIDPLLKARQQYAYGRQHDYFDHWDVIGWTREGNASHPNSGLATIMSDGPGGSKWMYVGRQKAGEVWHDMTGNRSGTVTINQDGWGHFFVNGGSVSVWVKR

SEQ ID NO: 31011 - protein, 485 aa, Bacillus sp.
HHCGTNGTIMQYFEWNVPNDGQHWNRLHNNAQNLKNAGITAIWIPPAWKGTSQNDVGYGAYDLYDLGEFNQKGTVRTKYGTKAELERAIRSLKANGIQVYGDVVMNHKGGADFTERVQAVEVNPQNRNQEVSGTYQIEAWTGFNFPGRGNQHSSFKWRWYHFDGTDWDQSRQLANRIYKFRGDGKAWDWEVDTENGNYDYLMYADVDMDHPEVINELNRWGVWYANTLNLDGFRLDAVKHIKFSFMRDWLGHVRGQTGKNLFAVAEYWKNDLGALENYLSKTNWTMSAFDVPLHYNLYQASNSSGNYDMRNLLNGTLVQRHPSHAVTFVDNHDTQPGEALESFVQGWFKPLAYATILTREQGYPQVFYGDYYGIPSDGVPSYRQQIDPLLKARQQYAYGRQHDYFDHWDVIGWTREGNASHPNSGLATIMSDGPGGSKWMYVGRQKAGEVWHDMTGNRSGTVTINQDGWGHFFVNGGSVSVWVKR

SEQ ID NO: 31012 - protein, 485 aa, Bacillus sp.
HHDGTNGTIMQYFEWNVPNDGQHWNRLHNNAQNLKNAGITAIWIPPAWKGTSQNDVGYGAYDLYDLGEFNQKGTVRTKYGTKAELERAIRSLKANGIQVYGDVVMNHKGGADFTERVQAVEVNPQNRNQEVSGTYQIEAWTGFNFPGRGNQHSSFKWRWYHFDGTDWDQSRQLANRIYKFRGDGKAWDWEVDTENGNYDYLMYADVDMDHPEVINELNRWGVWYANTLNLDGFRLDAVKHIKFSFMRDWLGHVRGQTGKNLFAVAEYWKNDLGALENYLSKTNWTMSAFDVPLHYNLYQASNSSGNYDMRNLLNGTLVQRHPSHAVTFVDNHDTQPGEALESFVQGWFKPLAYATILTREQGYPQVFYGDYYGIPSVGVPSYRQQIDPLLKARQQYAYGRQHDYFDHWDVIGWTREGNASHPNSGLATIMSDGPGGSKWMYVGRQKAGEVWHDMTGNRSGTVTINQDGWGHFFVNGGSVSVWVKR

SEQ ID NO: 31013 - protein, 485 aa, Bacillus sp.
HHDGTNGTIMQYFEWNVPNDGQHWNRLHNNAQNLKNAGITAIWIPPAWKGTSQNDVGYGAYDLYDLGEFNQKGTVRTKYGTKAELERAIRSLKANGIQVYGDVVMNHKGGADFTERVQAVEVNPQNRNQEVSGTYQIEAWTGFNFPGRGNQHSSFKWRWYHFDGTDWDQSRQLANRIYKFRGDLKAWDWEVDTENGNYDYLMYADVDMDHPEVINELNRWGVWYANTLNLDGFRLDAVKHIKFSFMRDWLGHVRGQTGKNLFAVAEYWKNDLGALENYLSKTNWTMSAFDVPLHYNLYQASNSSGNYDMRNLLNGTLVQRHPSHAVTFVDNHDTQPGEALESFVQGWFKPLAYATILTREQGYPQVFYGDYYGIPSDGVPSYRQQIDPLLKARQQYAYGRQHDYFDHWDVIGWTREGNASHPNSGLATIMSDGPGGSKWMYVGRQKAGEVWHDMTGNRSGTVTINQDGWGHFFVNGGSVSVWVKR

SEQ ID NO: 31014 - protein, 485 aa, Bacillus sp.
HHDGTNGTIMQYFEWNVPNDGQHWNRLHNNAQNLKNAGITAIWIPPAWKGTSQNDVGYGAYDLYDLGEFNQKGTVRTKYGTKAELERAIRSLKANGIQVYGDVVMNHKGGADFTERVQAVEVNPQNRNQEVSGTYQIEAWTGFNFPGRGNQHSSFKWRWYHFDGTDWDQSRQLANRIYKFRGDGKAWDWEVDTENGNYDYLMYADVDMDHPEVINELNRWGVWYANTLNLDGFRLDAVKHIKFSFMRDWLGHVRGQTGKNLFAVAEYWKNDLGALENYLSKTNWTMSAFDVPLHYNLYQASNSSGNYDMRNLLNGTLVQRHPSHAVTFVDNHDTQPGEALESFVQGWFKPLAYATILTREQGYPQVFYGDYYGIPSDGVPSYRQQIDPLLKARQQYAYGRQHDYFDHWDVIGWTREGNASHPNSGLATIMSDGPGGSKWMYVGRQKAGEVWHDMTGNRTGTVTINQDGWGHFFVNGGSVSVWVKR

SEQ ID NO: 31015 - protein, 485 aa, Bacillus sp.
HHDGTNGTIMQYFEWNTPNDGQHWNRLHNNAQNLKNAGITAIWIPPAWKGTSQNDVGYGAYDLYDLGEFNQKGTVRTKYGTKAELERAIRSLKANGIQVYGDVVMNHKGGADFTERVQAVEVNPQNRNQEVSGTYQIEAWTGFNFPGRGNQHSSFKWRWYHFDGTDWDQSRQLANRIYKFRGDGKAWDWEVDTENGNYDYLMYADVDMDHPEVINELNRWGVWYANTLNLDGFRLDAVKHIKFSFMRDWLGHVRGQTGKNLFAVAEYWKNDLGALENYLSKTNWTMSAFDVPLHYNLYQASNSSGNYDMRNLLNGTLVQRHPSHAVTFVDNHDTQPGEALESFVQGWFKPLAYATILTREQGYPQVFYGDYYGIPSDGVPSYRQQIDPLLKARQQYAYGRQHDYFDHWDVIGWTREGNASHPNSGLATIMSDGPGGSKWMYVGRQKAGEVWHDMTGNRSGTVTINQDGWGHFFVNGGSVSVWVKR

SEQ ID NO: 31016 - protein, 485 aa, Bacillus sp.
HHDGTNGTIMQYFEWNVPNDGQHWNRLHNNAQNLKNAGITAIWIPPAWKGTSQNDVGYGAYDLYDLGEFNQKGTVRTKYGTKAELERAIRSLKANGIQVYGDVVMNHKGGADFTERVQAVEVNPQNRNQEVSGTYQIEAWTGFNFPGRGNQHSSFKWRWYHFDGTDWDQSRQLANRIYKFRGDGKAWDWEVDTENGNYDYLMYADVDMDHPEVINELNRWGVWYANTLNLDGFRLDAVKHIKFSFMRDWLGHVRGQTGKNLFAVAEYWKNDLGALENYLSKTNWTMSAFDVPLHYNLYQASNSSGNYDMRNLLNGTLVQRHPSHAVTFVDNHDTQPGEALESFVQGWFKPLAYATILTREQGYPQVFYGDYYGIPSDGVPSYRQQIDPLLKARQQYAYGRQHDYFDHWDVIGWTREGNAEHPNSGLATIMSDGPGGSKWMYVGRQKAGEVWHDMTGNRSGTVTINQDGWGHFFVNGGSVSVWVKR

SEQ ID NO: 31017 - protein, 485 aa, Bacillus sp.
HHDGTNGTIMQYFEWNVPNDGQHWNRLHNRAQNLKNAGITAIWIPPAWKGTSQNDVGYGAYDLYDLGEFNQKGTVRTKYGTKAELERAIRSLKANGIQVYGDVVMNHKGGADFTERVQAVEVNPQNRNQEVSGTYQIEAWTGFNFPGRGNQHSSFKWRWYHFDGTDWDQSRQLANRIYKFRGDGKAWDWEVDTENGNYDYLMYADVDMDHPEVINELNRWGVWYANTLNLDGFRLDAVKHIKFSFMRDWLGHVRGQTGKNLFAVAEYWKNDLGALENYLSKTNWTMSAFDVPLHYNLYQASNSSGNYDMRNLLNGTLVQRHPSHAVTFVDNHDTQPGEALESFVQGWFKPLAYATILTREQGYPQVFYGDYYGIPSDGVPSYRQQIDPLLKARQQYAYGRQHDYFDHWDVIGWTREGNASHPNSGLATIMSDGPGGSKWMYVGRQKAGEVWHDMTGNRSGTVTINQDGWGHFFVNGGSVSVWVKR

SEQ ID NO: 31018 - protein, 485 aa, Bacillus sp.
HHDGTNGTIMQYFEWNVPNDGQHWNRLHNNAQNLKNAGITAIWIPPAWKGTSQNDVGYGAYDLYDLGEFNQKGTVRTKYGTKAELERAIRSLKANGIQVYGDVVMNHKGGADFTERVQAVEVNPQNRNQEVSGTYQIEAWTGFNFPGRGNQHSSFKWRWYHFDGTDWDQSRQLANRIYKFRGDGKAWDWEVDDENGNYDYLMYADVDMDHPEVINELNRWGVWYANTLNLDGFRLDAVKHIKFSFMRDWLGHVRGQTGKNLFAVAEYWKNDLGALENYLSKTNWTMSAFDVPLHYNLYQASNSSGNYDMRNLLNGTLVQRHPSHAVTFVDNHDTQPGEALESFVQGWFKPLAYATILTREQGYPQVFYGDYYGIPSDGVPSYRQQIDPLLKARQQYAYGRQHDYFDHWDVIGWTREGNASHPNSGLATIMSDGPGGSKWMYVGRQKAGEVWHDMTGNRSGTVTINQDGWGHFFVNGGSVSVWVKR

SEQ ID NO: 31019 - protein, 485 aa, Bacillus sp.
HHNGTNGTMMQYFEWYLPNDGNHWNRLNSDASNLKSKGITAVWIPPAWKATSQNDVGYGAYDLYDLGEFNQKGTVRTKYGTRSQLQAAVTSLKNNGIQVYGDVVMNHKGGADATEMVRAVEVNPNNRNQEVTGEYTIEAWTRFDFPGRGNTHSSFKWRWYHFDGVDWDMSRELSNRIYKFRGHGKAWDWEVDTEFGNYDYLMYADYDYDHPESTNEMRNWGVWYTNTLGLDGFRIDAVKHIKYSFTRDWINHVRSATGKNMFAVAEFWKNDLGAIENYLQKTNWNHSVFDVPLHYNLYNASKSQGNYDMRNIFNGTVVQRHPSHAVTFVDNHDSQPEEALESFVDTWFKPLAYALTLTREQGYPSVFYGDYYGIPTHGVPAMRSKIDPILEARQKYAYGPQHDYLDHPDVIGWTREGDSSHPKSGLATLITDGPGGSKRMYAGLKNAGETWYDITGNRSDTVKIGSDGWGEFHVNGSSVSIYVQK

SEQ ID NO: 31020 - protein, 485 aa, Bacillus sp.
HHDGTNGTIMQYFEWNVPNDGQHWNRLHNNAQNLKNAGITAIWIPPAWKGTSQNDVGYGAYDLYDLGEFNQKGTVRTKYGTKAELERAIRSLKANGIQVYGDVVMNHKGGADFTERVQAVEVNPQNRNQEVSGTYQIEAWTGFNFPGRGNQHSSFKWRWYHFDGTDWDQSRQLANRIYKFRGDGKAWDWEVDTENGNYDYLMYADVDMDHPEVINELNRWGVWYANTLNLDGFRLDAVKHIKFSFMRDWLGHVRGQTGKNGFAVAEYWKNDLGALENYLSKTNWTMSAFDVPLHYNLYQASNSSGNYDMRNLLNGTLVQRHPSHAVTFVDNHDTQPGEALESFVQGWFKPLAYATILTREQGYPQVFYGDYYGIPSDGVPSYRQQIDPLLKARQQYAYGRQHDYFDHWDVIGWTREGNASHPNSGLATIMSDGPGGSKWMYVGRQKAGEVWHDMTGNRSGTVTINQDGWGHFFVNGGSVSVWVKR

SEQ ID NO: 31021 - protein, 485 aa, Bacillus sp.
HHDGTNGTIMQYFEWNVPNDGQHWNRLHNNAQNLKNAGITAIWIPPAWKGTSQNDVGYGAYDLYDLGEFNQKGTVRTKYGTKAELERAIRSLKANGIQVYGDVVMNHKGGADCTERVQAVEVNPQNRNQEVSGTYQIEAWTGFNFPGRGNQHSSFKWRWYHFDGTDWDQSRQLANRIYKFRGDGKAWDWEVDTENGNYDYLMYADVDMDHPEVINELNRWGVWYANTLNLDGFRLDAVKHIKFSFMRDWLGHVRGQTGKNLFAVAEYWKNDLGALENYLSKTNWTMSAFDVPLHYNLYQASNSSGNYDMRNLLNGTLVQRHPSHAVTFVDNHDTQPGEALESFVQGWFKPLAYATILTREQGYPQVFYGDYYGIPSDGVPSYRQQIDPLLKARQQYAYGRQHDYFDHWDVIGWTREGNASHPNSGLATIMSDGPGGSKWMYVGRQKAGEVWHDMTGNRSGTVTINQDGWGHFFVNGGSVSVWVKR

SEQ ID NO: 31022 - protein, 485 aa, Bacillus sp.
HHDGTNGTIMQYFEWNVPNDGQHWNRLHNNAQNLKNAGITAIWIPPAWKGTSQNDVGYGAYDLYDLGEFNQKGTVRTKYGTKAELERAIRSLKANGIQVYGDVVMNHKGGADFTERVQAVEVNPQNRNQEVSGTYQIEAWTGFNFPGRGNQHSSFKWRWYHFDGTDWDQSRQLANRIYKFRGDGKAWDWEVDTENGNYDYLMYADVDMDHPEVINELNRWGVWYANTLNLDGFRLDAVKHIKFSFMRDWLGHVRGQTGKNLFAVAEYWKNDLGALENYLSKTNWTMSAFDVPLHYNLYQASNSSGNYDMRNLLNGTLVQRHPSHAVTFVDNHDTQPGEALESFVQGWFKPLAYATILTREQGYPQVFYGDYYGIPSDGVPSYRQQIDPLLKARQWYAYGRQHDYFDHWDVIGWTREGNASHPNSGLATIMSDGPGGSKWMYVGRQKAGEVWHDMTGNRSGTVTINQDGWGHFFVNGGSVSVWVKR

SEQ ID NO: 31023 - protein, 485 aa, Bacillus sp.
HHDGTNGTIMQYFEWNVPNDGQHWNRLHNNAQNLKNAGITAIWIPPAWKGTSQNDVGYGAYDLYDLGEFNQKGTVRTKYGTKAELERAIRSLKANGIQVYGDVVMNHKGGADFTEGVQAVEVNPQNRNQEVSGTYQIEAWTGFNFPGRGNQHSSFKWRWYHFDGTDWDQSRQLANRIYKFRGDGKAWDWEVDTENGNYDYLMYADVDMDHPEVINELNRWGVWYANTLNLDGFRLDAVKHIKFSFMRDWLGHVRGQTGKNLFAVAEYWKNDLGALENYLSKTNWTMSAFDVPLHYNLYQASNSSGNYDMRNLLNGTLVQRHPSHAVTFVDNHDTQPGEALESFVQGWFKPLAYATILTREQGYPQVFYGDYYGIPSDGVPSYRQQIDPLLKARQQYAYGRQHDYFDHWDVIGWTREGNASHPNSGLATIMSDGPGGSKWMYVGRQKAGEVWHDMTGNRSGTVTINQDGWGHFFVNGGSVSVWVKR

SEQ ID NO: 31024 - protein, 485 aa, Bacillus sp.
HHDGTNGTIMQYFEWNVPNDGQHWNRLHNNAQNLKNAGITAIWIPPAWKGTSQNDVGYGAYDLYDLGEFNQKGTVRTKYGTKAELERAIRSLKANGIQVYGDVVMNHKGGADFTERVQAVEVNPQNRNQEVSGTYQIEAWTGFNFPGRGNQHSSFKWRWYHFDGTDWDQSRQLANRIYKFRGDGKAWDWEVDTENGNYDYLMYADVDMDHPEVINELNRWGVWYANTLNLDGFRLDAVKHIKFSFMRDWLGHVRGQTGKNLFAVAEYWKNDLGALENYLSKTNWTMSAFDVPLHYNLYQASNSSGNYDMRNLLNGTLVQRHPSHAVTFVDNHDTQPGEALESFVQRWFKPLAYATILTREQGYPQVFYGDYYGIPSDGVPSYRQQIDPLLKARQQYAYGRQHDYFDHWDVIGWTREGNASHPNSGLATIMSDGPGGSKWMYVGRQKAGEVWHDMTGNRSGTVTINQDGWGHFFVNGGSVSVWVKR

SEQ ID NO: 31025 - protein, 485 aa, Bacillus sp.
HHDGTNGTIMQYFEWNVPNDGQHWNRLHNNAQNLKNAGITAIWIPPAWKGTSQNDVGYGAYDLYDLGEFNQKGTVRTKYGTKAELERAIRSLKANGIQVYGDVVMNHKGGADYTERVQAVEVNPQNRNQEVSGTYQIEAWTGFNFPGRGNQHSSFKWRWYHFDGTDWDQSRQLANRIYKFRGDGKAWDWEVDTENGNYDYLMYADVDMDHPEVINELNRWGVWYANTLNLDGFRLDAVKHIKFSFMRDWLGHVRGQTGKNLFAVAEYWKNDLGALENYLSKTNWTMSAFDVPLHYNLYQASNSSGNYDMRNLLNGTLVQRHPSHAVTFVDNHDTQPGEALESFVQGWFKPLAYATILTREQGYPQVFYGDYYGIPSDGVPSYRQQIDPLLKARQQYAYGRQHDYFDHWDVIGWTREGNASHPNSGLATIMSDGPGGSKWMYVGRQKAGEVWHDMTGNRSGTVTINQDGWGHFFVNGGSVSVWVKR

SEQ ID NO: 31026 - protein, 485 aa, Bacillus sp.
HHDGTNGTIMQYFEWNVPNDGQHWNRLHNNAQNLKNAGITAIWIPPAWKGTSQNDVGYGAYDLYDLGEFNQKGTVRTKYGTKVELERAIRSLKANGIQVYGDVVMNHKGGADFTERVQAVEVNPQNRNQEVSGTYQIEAWTGFNFPGRGNQHSSFKWRWYHFDGTDWDQSRQLANRIYKFRGDGKAWDWEVDTENGNYDYLMYADVDMDHPEVINELNRWGVWYANTLNLDGFRLDAVKHIKFSFMRDWLGHVRGQTGKNLFAVAEYWKNDLGALENYLSKTNWTMSAFDVPLHYNLYQASNSSGNYDMRNLLNGTLVQRHPSHAVTFVDNHDTQPGEALESFVQGWFKPLAYATILTREQGYPQVFYGDYYGIPSDGVPSYRQQIDPLLKARQQYAYGRQHDYFDHWDVIGWTREGNASHPNSGLATIMSDGPGGSKWMYVGRQKAGEVWHDMTGNRSGTVTINQDGWGHFFVNGGSVSVWVKR

SEQ ID NO: 31027 - protein, 483 aa, Bacillus sp. (in: firmicutes)
HHDGTNGTMMQYFEWNVPNDGQHWNRLHNNAQNLKNAGITAIWIPPAWKGTSQNDVGYGAYDLYDLGEFNQKGTVRTKYGTKAELERAIRSLKANGIQVYGDVVMNHKGGADFTERVQAVEVNPQNRNQEVSGTYQIEAWTGFNFPGRGNQHSSFKWRWYHFDGTDWDQSLQLANRIYKFRGKAWDWEVDTEFGNYDYLMYADVDMDHPEVINELNRWGVWYANTLNLDGFRLDAVKHIKFSFMRDWLGHVRGQTGKNLFAVAEYWKNDLGALENYLSKTNWTMSAFDVPLHYNLYQASNSSGNYDMRNLLNGTLVQRHPSHAVTFVDNHDTQPGEALESFVQGWFKPLAYATILTREQGYPSVFYGDYYGIPSDGVPSYRQQIDPLLKARQQYAYGRQHDYFDHWDVIGWTREGNASHPNSGLATIMSDGPGGSKWMYVGRQKAGEVWHDMTGNRSGTVTINQDGWGHFFVNGGSVSVWVKR

SEQ ID NO: 31028 - protein, 485 aa, Bacillus sp.
HHDGTNGTCMQYFEWNVPNDGQHWNRLHNNAQNLKNAGITAIWIPPAWKGTSQNDVGYGAYDLYDLGEFNQKGTVRTKYGTKAELERAIRSLKANGIQVYGDVVMNHKGGADFTERVQAVEVNPQNRNQEVSGTYQIEAWTGFNFPGRGNQHSSFKWRWYHFDGTDWDQSRQLANRIYKFRGDGKAWDWEVDTENGNYDYLMYADVDMDHPEVINELNRWGVWYANTLNLDGFRLDAVKHIKFSFMRDWLGHVRGQTGKNLFAVAEYWKNDLGALENYLSKTNWTMSAFDVPLHYNLYQASNSSGNYDMRNLLNGTLVQRHPSHAVTFVDNHDTQPGEALESFVQGWFKPLAYATILTREQGYPQVFYGDYYGIPSDGVPSYRQQIDPLLKARQQYAYGRQHDYFDHWDVIGWTREGNASHPNSGLATIMSDGPGGSKWMYVGRQKAGEVWHDMTGNRSGTVTINQDGWGHFFVNGGSVSVWVKR

SEQ ID NO: 31029 - protein, 485 aa, Bacillus sp.
HHDGTNGTIMQYFEWNVPNDGQHWNRLHNNAQNLKNAGITAIWIPPAWKGTSQNDVGYGAYDLYDLGEFNQKGTVRTKYGTKAELERAIRSLKANGIQVYGDVVMNHKGGADFTERVQAVEVNPQNRNQEVSGTYQIEAWTGFNFPGRGNQHSSFKWRWYHFDGTDWDQSRQLANRIYKFRGDGKAWDWEVDTENGNYDYLMYADVDMDHPEVINELNRWGVWYANTLNLDGFRLDAVKHIKFSFMRDWLGHVRGQTGKNLFAVAEYWKNDLGALENYLSKTNWTMSAFDVPLHYNLYQASNSSGNYDMRNLLNGTLVQRHPSHAVTFVDNHDTQPGEALESFVQGWFKPLAYATILTREQGYPQVFYGDYYGIPSDGVPSYRQQIDPLLKARQQYAYGRQHDYFDHWDVIGWTREGNASHPNSGLATIMSDGPGGSKWMYVGRQKAGEVWHDMTGNRSGTVTINQDGWGHFFVNGGSVSQWVKR

SEQ ID NO: 31030 - protein, 485 aa, Bacillus sp.
HHNGTNGTMMQYFEWYLPNDGNHWNRLNSDASNLKSKGIKAVWIPPAWKGASQNDVGYGAYDLYDLGEFNQKGTVRTKYGTRSQLQAAVTSLKNNGINVYGDVVMNHKGGADATEMVRAVEVNPNNRNQEVTGEYTIEAWTRFDFPGRGNTHSSFKWRWYHFDGVDFDQSRKLNNRIYKFRGHGKAWDWEVDTEFGNYDYLMYVDYDYDHPETTNEMRNWGVWYTNTLGLDGFRIDAVKHIKYSFTRDWINHVRIATGKNMFAVAEFWKNDLGAIENYLQKTNWNHSVFDVPLHYNLYNASKSGGNYDMRNIFNGTVVQAHPMHAVTFVDNHDSQPEEALESFVDEWFKPLAYALTLTREQGYPSVFYGDYYGIPTHGVPAMRSKIDPILEARQKYAYGPQHDYLDHPDVIGWTREGDSSHPKSGLATLIPDGPGGSKRMYAGLKNAGETWYDITGNRSDTVKIGSDGWGEFHVNDGSVSIYVQK

SEQ ID NO: 31031 - protein, 482 aa, Bacillus sp.
HHDGTNGTIMQYFEWNVPNDGQHWNRLHNNAQNLKNAGITAIWIPPAWKGTSQNDVGYGAYDLYDLGEFNQKGTVRTKYGTKAELERAIRSLKANGIQVYGDVVMNHKGGADFTERVQAVEVNPQNRNQEVSGTYQIEAWTGFNFPGRGNQHSSFKWRWYHFDGTDWDQSRQLARIYKFRGKAWDWEVDTENGNYDYLMYADVDMDHPEVINELNRWGVWYANTLNLDGFRLDAVKHIKFSFMRDWLGHVRGQTGKNLFAVAEYWKNDLGALENYLSKTNWTMSAFDVPLHYNLYQASNSSGNYDMRNLLNGTLVQRHPSHAVTFVDNHDTQPGEALESFVQGWFKPLAYATILTREQGYPQVFYGDYYGIPSDGVPSYRQQIDPLLKARQQYAYGRQHDYFDHWDVIGWTREGNASHPNSGLATIMSDGPGGSKWMYVGRQKAGEVWHDMTGNRSGTVTINQDGWGHFFVNGGSVSVWVKR

SEQ ID NO: 31032 - protein, 482 aa, Bacillus sp.
HHNGTNGTLMQYFEWYLPNDGNHWNRLNSDASNLKSKGITAVWIPPAWKGASQNDVGYGAYDLYDLGEFNQKGTVRTKYGTRSQLQAAVTSLKNNGIQVYGDVVMNHKGGADATEMVRAVEVNPNNRNQEVTGEYTIEAWTRFDFPGRANTHSSFKWRWYHFDGVDWDQSRRLNNRIYKFRTKAWDWEVDTENGNYDYLLYADIDMDHPEVVNELRNWGVWYTNTLGLDGFRIDAVKHIKYSFTRDWINHVRSAGKNMFAVAEFWKNDLGAIENYLQKTNWNHSVFDVPLHFNLYYASKSGGNYDMRNIFNGTVVQRHPSHAVTFVDNHDSQPEESLESFVREWFKPLAYALTLTREQGYPSVFYGDYYGIPTHGVPAMRSKIDPILEARQKYAYGPQHDYIDHPDVIGWTREGDSSAAKSGLAALITDGPGGSKRMYAGLKNAGETWYDITGNRSDTVKIGSDGWGEFHVNDGSVSIYVQK

SEQ ID NO: 31033 - protein, 482 aa, Bacillus sp.
HHNGTNGTLMQYFEWYLPNDGNHWNRLNSDASNLKSKGITAVWIPPAWKGASQNDVGYGAYDLYDLGEFNQKGTVRTKYGTRSQLQAAVTSLKNNGIQVYGDVVMNHKGGADATEMVKAVEVNPNNRNQEVTGEYTIEAWTRFDFPGRANTHSSFKWRWYHFDGVDWDQSRRLNNRIYKFRTKAWDWEVDTEFGNYDYLMYADIDMDHPEVVNELRNWGVWYTNTLGLDGFRIDAVKHIKYSFVRDWINHVRSAGKNMFAVAEFWKNDLGAIENYLQKTNWNHSVFDVPLHFNLYYASKSGGNYDMRNIFNGTVVQRHPSHAVTFVDNHDSQPEESLESFVREWFKPLAYALTLTREQGYPSVFYGDYYGIPTHGVPAMRSKIDPILEARQKYAYGPQHDYIDHPDVIGWTREGDSSAAKSGLAALITDGPGGSKRMYAGLKNAGETWYDITGNKSDTVKIGSDGWGEFHVNDGSVSIYVQK

SEQ ID NO: 31034 - protein, 482 aa, Bacillus sp.
HHNGTNGTLMQYFEWYLPNDGNHWNRLNSDASNLKSKGITAVWIPPAWKGASQNDVGYGAYDLYDLGEFNQKGTVRTKYGTRSQLQAAVTSLKNNGIQVYGDVVMNHKGGADATEMVKAVEVNPNNRNQEVTGEYTIEAWTRFDFPGRANTHSSFKWRWYHFDGVDWDQSRRLNNRIYKFRTKAWDWEVDTEFGNYDYLLYADIDMDHPEVVNELRNWGVWYTNTLGLDGFRIDAVKHIKYSFTRDWINHVRSAGKNMFAVAEFWKNDLGAIENYLQKTNWNHSVFDVPLHFNLYYASKSGGNYDMRNIFNGTVVQRHPSHAVTFVDNHDSQPEESLESFVREWFKPLAYALTLTREQGYPSVFYGDYYGIPTHGVPAMRSKIDPILEARQKYAYGPQHDYIDHPDVIGWTREGDSSAAKSGLAALITDGPGGSKRMYAGLKNAGETWYDITGNKSDTVKIGSDGWGEFHVNDGSVSIYVQK

SEQ ID NO: 31035 - protein, 482 aa, Bacillus sp. (in: firmicutes)
HHDGTNGTIMQYFEWNVPNDGQHWNRLHNNAQNLKNAGITAIWIPPAWKGTSQNDVGYGAYDLYDLGEFNQKGTVRTKYGTKAELERAIRSLKANGIQVYGDVVMNHKGGADFTERVQAVEVNPQNRNQEVSGTYQIEAWTGFNFPGRGNQHSSFKWRWYHFDGTDWDQSRQLANRIYKFRGKAWDWEVDTENGNYDYLMYADVDMDHPEVINELNRWGVWYANTLNLDGFRLDAVKHIKFSFMRDWLGHVRGQTGKNLFAIAEYWKNDLGALENYLSKTNWTMSAFDPLHYNLYQASNSSGNYDMRNLLNGTLVQRHPSHAVTFVDNHDTQPGEALESFVQGWFKPLAYATILTREQGYPSVFYGDYYGIPSDGVPSYRQQIDPLLKARQQYAYGRQHDYFDHWDVIGWTREGNASHPNSGLATIMSDGPGGSKWMYVGRQKAGEVWHDMTGNRSGTVTINQDGWGHFFVNGGSVSVWVKR

SEQ ID NO: 31036 - protein, 482 aa, Bacillus sp. (in: firmicutes)
HHDGTNGTIMQYFEWNVPNDGQHWNRLHNNAQNLKNAGITAIWIPPAWKGTSQNDVGYGAYDLYDLGEFNQKGTVRTKYGTKAELERAIRSLKANGIQVYGDVVMNHKGGADFTERVQAVEVNPQNRNQEVSGTYQIEAWTGFNFPGRGNQHSSFKWRWYHFDGTDWDQSRQLANRIYKFRGKAWDWEVDTENGNYDYLMYADVDMDHPEVINELNRWGVWYANTLNLDGFRLDAVKHIKFSFMRDWLGHVRGQTGKNLFAGEFWKNDLGALENYLSKTNWTMSAFDVPLHYNLYQASNSSGNYDMRNLLNGTLVQRHPSHAVTLVDNHDTQPGEALESFVQGWFKPLAYATILTREQGYPSVFYGDYYGIPSDGVPSYRQQIDPLLKARQKYAYGRQHDYFDHWDVIGWTREGNASHPNSGLATIMSDGPGGSKWMYVGRQKAGEVWHDMTGNRSGTVTINQDGWGHFFVNGGSVSVWVKR

SEQ ID NO: 31037 - protein, 484 aa, Bacillus sp.
HDGTNGTIMQYFEWNVPNDGQHWNRLHNNAQNLKNAGITAIWIPPAWKGTSQNDVGYGAYDLYDLGEFNQKGTVRTKYGTKAELERAIRSLKANGIQVYGDVVMNHKGGADFTERVQAVEVNPQNRNQEVSGTYQIEAWTGFNFPGRGNQHSSFKWRWYHFDGTDWDQSRQLANRIYKFRGDGKAWDWEVDTENGNYDYLMYADVDMDHPEVINELNRWGVWYANTLNLDGFRLDAVKHIKFSFMRDWLGHVRGQTGKNLFAVAEYWKNDLGALENYLSKTNWTMSAFDVPLHYNLYQASNSSGNYDMRNLLNGTLVQRHPSHAVTFVDNHDTQPGEALESFVQGWFKPLAYATILTREQGYPQVFYGDYYGIPSDGVPSYRQQIDPLLKARQQYAYGRQHDYFDHWDVIGWTREGNASHPNSGLATIMSDGPGGSKWMYVGRQKAGEVWHDMTGNRSGTVTINQDGWGHFFVNGGSVSVWVKR

SEQ ID NO: 31038 - protein, 484 aa, Synthetic construct
HHDGTNGTIMQYFEWNVPNDGQHWNRLHNNAQNLKNAGITAIWIPPAWKGTSQNDVGYGAYDLYDLGEFNQKGTVRTKYGTKAELERAIRSLKANGIQVYGDVVMDHKGGADGTEWVDAVEVNPSDRNQEISGTYQIQAWTKFDFPGRGNTYSSFKWRWYHFDGVDWDESRKLSRIYKFRGIGKAWDWEVDTENGNYDYLMYADLDMDHPEVINELNRWGVWYANTLNLDGFRLDAVKHIKFSFMRDWLGHVRGQTGKNLFAVAEYWKNDLGALENYLSKTNWTMSAFDVPLHYNLYQASNSSGNYDMRNLLNGTLVQRHPSHAVTFVDNHDTQPGEALESFVQGWFKPLAYATILTREQGYPQVFYGDYYGIPSDGVPSYRQQIDPLLKARQQYAYGRQHDYFDHWDVIGWTREGNASHPNSGLATIMSDGPGGSKWMYVGRQKAGEVWHDMTGNRSGTVTINQDGWGHFFVNGGSVSVWVKR

SEQ ID NO: 31039 - protein, 484 aa, Synthetic construct
HHDGTNGTIMQYFEWNVPNDGQHWNRLHNNAQNLKNAGITAIWIPPAWKGTSQNDVGYGAYDLYDLGEFNQKGTVRTKYGTKAELERAIRSLKANGIQVYGDVVMNHKAGADGTELVDAVEVNPSDRNQEISGTYQIQAWTKFDFPGRGNTYSSFKWRWYHFDGTDWDESRKLNRIYKFRGTGKAWDWEVDTENGNYDYLMYADLDMDHPEVINELNRWGVWYANTLNLDGFRLDAVKHIKFSFMRDWLGHVRGQTGKNLFAVAEYWKNDLGALENYLSKTNWTMSAFDVPLHYNLYQASNSSGNYDMRNLLNGTLVQRHPSHAVTFVDNHDTQPGEALESFVQGWFKPLAYATILTREQGYPQVFYGDYYGIPSDGVPSYRQQIDPLLKARQQYAYGRQHDYFDHWDVIGWTREGNASHPNSGLATIMSDGPGGSKWMYVGRQKAGEVWHDMTGNRSGTVTINQDGWGHFFVNGGSVSVWVKR

SEQ ID NO: 31040 - protein, 476 aa, Bacillus sp.
HHDGTNGTIMQYFEWNVPNDGQHWNRLHNNAQNLKNAGITAIWIPPAWKGTSQNDVGYGAYDLYDLGEFNQKGTVRTKYGTKAELERAIRSLKANGIQVYGDVVMNHKGGADFTERVQAVEVNPQNRNQEVSGTYQIEAWTGFNFPGRGNQHSSFKWRWYHFDGTDDNRIYKFRGKAWDWEVDTENGNYDYLMYADVDMDHPEVINELNRWGVWYANTLNLDGFRLDAVKHIKFSFMRDWLGHVRGQTGKNLFAVAEYWKNDLGALENYLSKTNWTMSAFDVPLHYNLYQASNSSGNYDMRNLLNGTLVQRHPSHAVTFVDNHDTQPGEALESFVQGWFKPLAYATILTREQGYPQVFYGDYYGIPSDGVPSYRQQIDPLLKARQQYAYGRQHDYFDHWDVIGWTREGNASHPNSGLATIMSDGPGGSKWMYVGRQKAGEVWHDMTGNRSGTVTINQDGWGHFFVNGGSVSVWVKR

SEQ ID NO: 31041 - protein, 481 aa, Bacillus sp.
HHDGTNGTIMQYFEWNVPNDGQHWNRLHNNAQNLKNAGITAIWIPPAWKGTSQNDVGYGAYDLYDLGEFNQKGTVRTKYGTKAELERAIRSLKANGIQVYGDVVMNHKGGADFTERVQAVEVNPQNRNQEVSGTYQIEAWTGFNFPGRGNQHSSFKWRWYHFDGTDWDQSRQLRIFKFRGKAWDWEVDTENGNYDYLMYADVDMDHPEVINELNRWGVWYANTLNLDGFRLDAVKHIKFSFMRDWLGHVRGQTGKNLFAVAEYWKNDLGALENYLSKTNWTMSAFDVPLHYNLYQASNSSGNYDMRNLLNGTLVQRHPSHAVTFVDNHDTQPGEALESFVQGWFKPLAYATILTREQGYPQVFYGDYYGIPSDGVPSYRQQIDPLLKARQQYAYGRQHDYFDHWDVIGWTREGNASHPNSGLATIMSDGPGGSKWMYVGRQKAGEVWHDMTGNRSGTVTINQDGWGHFFVNGGSVSVWVKR

SEQ ID NO: 31042 - protein, 481 aa, Bacillus licheniformis
VNGTLMQYFEWYTPNDGQHWKRLQNDAEHLSDIGITAVWIPPAYKAISQADVGYGAYDLYDLGEFHQKGTVRTKYGTKGELQSAIKSLHSRDINVYGDVVINHKAGADATEDVTAVEVDPADRNRVISGEHLIKAWTHFHFPGRGSTYSDFKWYWYHFDGTDWDESRKLNRIYLFQGKTWDWEVSNEFGNYDYLMYADYDYDYPDVVAEITRWGTWYANELQLDGFRLDAVKHIKFSFLRDWVNHVREKTGKPMFTVAEYWSNDLGALENYLNKTNFNHSVFDVPLHYQFHAASTQGGGYDMRKLLNGTVVSCHPLKSVTFVDNHDTQPGQSLESTVQTWFKPLAYAFILTRESGYPSVFYGDMYGTKGDSQREIPALKHKIEPILKARKQYAYGAQHDYFDHHDIVGWTREGVSSVANSGLAALITDGPGGAKWMYVGRQNAGETWHDITGNRSEPVVINSEGWGEFHVNGGSVSIYVQR

SEQ ID NO: 31043 - protein, 481 aa, Bacillus licheniformis
VNGTLMQYFEWYTPNDGQHWKRLQNDAEHLSDIGITAVWIPPAYKAISQADVGYGAYDLYDLGEFHQKGTVRTKYGTKGELQSAIKSLHSRDINVYGDVVINHKAGADATEDVTAVEVDPADRNRVISGEHLIKAWTHFHFPGRGSTYSDFKWYWYHFDGTDWDESRKLNRIYLFQGKTWDWEVSNEFGNYDYLMYADYDYDYPDVVAEITRWGTWYANELQLDGFRLDAVKHIKFSFLRDWVNHVREKTGKPMFTVAEYWSNDLGALENYLNKTNFNHSVFDVPLHYQFHAASTQGGGYDMRKLLNGTVVSFHPLKSVTFVDNHDTQPGQSLESTVQTWFKPLAYAFILTRESGYPSVFYGDMYGTKGDSQREIPALKHKIEPILKARKQYAYGAQHDYFDHHDIVGWTREGVSSVANSGLAALITDGPGGAKWMYVGRQNAGETWHDITGNRSEPVVINSEGWGEFHVNGGSVSIYVQR

SEQ ID NO: 31044 - protein, 481 aa, Bacillus licheniformis
VNGTLMQYFEWYTPNDGQHWKRLQNDAEHLSDIGITAVWIPPAYKAISQADVGYGAYDLYDLGEFHQKGTVRTKYGTKGELQSAIKSLHSRDINVYGDVVINHKAGADATEDVTAVEVDPADRNRVISGEHLIKAWTHFHFPGRGSTYSDFKWYWYHFDGTDWDESRKLNRIYLFQGKTWDWEVSNEFGNYDYLMYADYDYDYPDVVAEITRWGTWYANELQLDGFRLDAVKHIKFSFLRDWVNHVREKTGKPMFTVAEYWSNDLGALENYLNKTNFNHSVFDVPLHYQFHAASTQGGGYDMRKLLNGTVVSYHPLKSVTFVDNHDTQPGQSLESTVQTWFKPLAYAFILTRESGYPSVFYGDMYGTKGDSQREIPALKHKIEPILKARKQYAYGAQHDYFDHHDIVGWTREGVSSVANSGLAALITDGPGGAKWMYVGRQNAGETWHDITGNRSEPVVINSEGWGEFHVNGGSVSIYVQR

SEQ ID NO: 31045 - protein, 481 aa, Bacillus amyloliquefaciens
VNGTLMQYFEWYTPNDGQHWKRLQNDAEHLSDIGITAVWIPPAYKAISQADVGYGAYDLYDLGEFHQKGTVRTKYGTKGELQSAIKSLHSRDINVYGDVVINHKAGADATEDVTAVEVDPADRNRVISGEHLIKAWTHFHFPGRGSTYSDFKWYWYHFDGTDWDESRKLNRIYLFQGKTWDWEVSNEFGNYDYLMYADYDYDYPDVVAEITRWGTWYANELQLDGFRLDAVKHIKFSFLRDWVNHVREKTGKEMFTVAEYWSNDLGALENYLNKTNFNHSVFDVPLHYQFHAASTQGGGYDMRKLLNGTVVSKWPLKSVTFVDNHDTQPGQSLESTVQTWFKPLAYAFILTRESGYPSVFYGDMYGTKGDSQREIPALKHKIEPILKARKQYAYGAQHDYFDHHDIVGWTREGVSSVANSGLAALITDGPGGAKWMYVGRQNAGETWHDITGNRSEPVVINSEGWGEFHVNGGSVSIYVQR

SEQ ID NO: 31046 - protein, 481 aa, Bacillus licheniformis
VNGTLMQYFEWYTPNDGQHWKRLQNDAEHLSDIGITAVWIPPAYKAISQADVGYGAYDLYDLGEFHQKGTVRTKYGTKGELQSAIKSLHSRDINVYGDVVINHKAGADATEDVTAVEVDPADRNRVISGEHLIKAWTHFHFPGRGSTYSDFKWYWYHFDGTDWDESRKLNRIYLFQGKTWDWEVSNEFGNYDYLMYADYDYDYPDVVAEITRWGTWYANELQLDGFRLDAVKHIKFSFLRDWVNHVREKTGKPMFTVAEYWSNDLGALENYLNKTNFNHSVFDVPLHYQFHAASTQGGGYDMRKLLNGTVVSKHPLKSVTFVDNHDTQPGQSLESTVQTWFKPLAYAFILTRESGYPSVFYGDMYGTKGDSQREIPALKHKIEPILKARKQYAYGAQHDYFDHHDIVGWTREGVSSVANSGLAALITDGPGGAKWMYVGRQNAGETWHDITGNRSEPVVINSEGWGEFHVNGGSVSIYVQR

SEQ ID NO: 31047 - protein, 481 aa, Bacillus licheniformis
VNGTLMQYFEWYTPNDGQHWKRLQNDAEHLSDIGITAVWIPPAYKAISQADVGYGAYDLYDLGEFHQKGTVRTKYGTKGELQSAIKSLHSRDINVYGDVVINHKAGADATEDVTAVEVDPADRNRVISGEHLIKAWTHFHFPGRGSTYSDFKWYWYHFDGTDWDESRKLNRIYLFQGKTWDWEVSNEFGNYDYLMYADYDYDYPDVVAEITRWGTWYANELQLDGFRLDAVKHIKFSFLRDWVNHVREKTGKPMFTVAEYWSNDLGALENYLNKTNFNHSVFDVPLHYQFHAASTQGGGYDMRKLLNGTVVSAHPLKSVTFVDNHDTQPGQSLESTVQTWFKPLAYAFILTRESGYPSVFYGDMYGTKGDSQREIPALKHKIEPILKARKQYAYGAQHDYFDHHDIVGWTREGVSSVANSGLAALITDGPGGAKWMYVGRQNAGETWHDITGNRSEPVVINSEGWGEFHVNGGSVSIYVQR

SEQ ID NO: 31048 - protein, 481 aa, Bacillus amyloliquefaciens
VNGTLMQYFEWYTPNDGQHWKRLQNDAEHLSDIGITAVWIPPAYKAISQADVGYGAYDLYDLGEFHQKGTVRTKYGTKGELQSAIKSLHSRDINVYGDVVINHKAGADATEDVTAVEVDPADRNRVISGEHLIKAWTHFHFPGRGSTYSDFKWYWYHFDGTDWDESRKLNRIYLFQGKTWDWPVSNEFGNYDYLMYADYDYDYPDVVAEITRWGTWYANELQLDGFRLDAVKHIKFSFLRDWVNHVREKTGKEMFTVAEYWSNDLGALENYLNKTNFNHSVFDVPLHYQFHAASTQGGGYDMRKLLNGTVVSKHPLKSVTFVDNHDTQPGQSLESTVQTWFKPLAYAFILTRESGYPSVFYGDMYGTKGDSQREIPALKHKIEPILKARKQYAYGAQHDYFDHHDIVGWTREGVSSVANSGLAALITDGPGGAKWMYVGRQNAGETWHDITGNRSEPVVINSEGWGEFHVNGGSVSIYVQR

SEQ ID NO: 31049 - protein, 481 aa, Bacillus licheniformis
VNGTLMQYFEWYTPNDGQHWKRLQNDAEHLSDIGITAVWIPPAYKAISQADVGYGAYDLYDLGEFHQKGTVRTKYGTKGELQSAIKSLHSRDINVYGDVVINHKAGADATEDVTAVEVDPADRNRVISGEHLIKAWTHFHFPGRGSTYSDFKWYWYHFDGTDWDESRKLNRIYLFQGKTWDWEVSNEFGNYDYLMYADYDYDYPDVVAEITRWGTWYANELQLDGFRLDAVKHIKFSFLRDWVNHVREKTGKPMFTVAEYWSNDLGALENYLNKTNFNHSVFDVPLHYQFHAASTQGGGYDMRKLLNGTVVSWHPLKSVTFVDNHDTQPGQSLESTVQTWFKPLAYAFILTRESGYPSVFYGDMYGTKGDSQREIPALKHKIEPILKARKQYAYGAQHDYFDHHDIVGWTREGVSSVANSGLAALITDGPGGAKWMYVGRQNAGETWHDITGNRSEPVVINSEGWGEFHVNGGSVSIYVQR

SEQ ID NO: 31050 - protein, 481 aa, Bacillus licheniformis
VNGTLMQYFEWYTPNDGQHWKRLQNDAEHLSDIGITAVWIPPAYKAISQADVGYGAYDLYDLGEFHQKGTVRTKYGTKGELQSAIKSLHSRDINVYGDVVINHKAGADATEDVTAVEVDPADRNRVISGEHLIKAWTHFHFPGRGSTYSDFKWYWYHFDGTDWDESRKLNRIYLFQGKTWDWEVSNEFGNYDYLMYADYDYDYPDVVAEITRWGTWYANELQLDGFRLDAVKHIKFSFLRDWVNHVREKTGKPMFTVAEYWSNDLGALENYLNKTNFNHSVFDVPLHYQFHAASTQGGGYDMRKLLNGTVVSLHPLKSVTFVDNHDTQPGQSLESTVQTWFKPLAYAFILTRESGYPSVFYGDMYGTKGDSQREIPALKHKIEPILKARKQYAYGAQHDYFDHHDIVGWTREGVSSVANSGLAALITDGPGGAKWMYVGRQNAGETWHDITGNRSEPVVINSEGWGEFHVNGGSVSIYVQR

SEQ ID NO: 31051 - protein, 481 aa, Bacillus licheniformis
VNGTLMQYFEWYTPNDGQHWKRLQNDAEHLSDIGITAVWIPPAYKAISQADVGYGAYDLYDLGEFHQKGTVRTKYGTKGELQSAIKSLHSRDINVYGDVVINHKAGADATEDVTAVEVDPADRNRVISGEHLIKAWTHFHFPGRGSTYSDFKWYWYHFDGTDWDESRKLNRIYLFQGKTWDWEVSNEFGNYDYLMYADYDYDYPDVVAEITRWGTWYANELQLDGFRLDAVKHIKFSFLRDWVNHVREKTGKPMFTVAEYWSNDLGALENYLNKTNFNHSVFDVPLHYQFHAASTQGGGYDMRMLLNGTVVSKHPLKSVTFVDNHDTQPGQSLESTVQTWFKPLAYAFILTRESGYPSVFYGDMYGTKGDSQREIPALKHKIEPILKARKQYAYGAQHDYFDHHDIVGWTREGVSSVANSGLAALITDGPGGAKWMYVGRQNAGETWHDITGNRSEPVVINSEGWGEFHVNGGSVSIYVQR

SEQ ID NO: 31052 - protein, 481 aa, Bacillus licheniformis
VNGTLMQYFEWYTPNDGQHWKRLQNDAEHLSDIGITAVWIPPAYKAISQADVGYGAYDLYDLGEFHQKGTVRTKYGTKGELQSAIKSLHSRDINVYGDVVINHKAGADATEDVTAVEVDPADRNRVISGEYLIRAWTHFHFPGRGSTYSDFKWYWYHFDGTDWDESRKLNRIYLFQGKTWDWEVSNEFGNYDYLMYADYDYDYPDVVAEITRWGTWYANELQLDGFRLDAVKHIKFSFLRDWVNHVREKTGKPMFTVAEYWSNDLGALENYLNKTNFNHSVFDVPLHYQFHAASTQGGGYDMRKLLNGTVVSKHPLKSVTFVDNHDTQPGQSLESTVQTWFKPLAYAFILTRESGYPSVFYGDMYGTKGDSQREIPALKHKIEPILKARKQYAYGAQHDYFDHHDIVGWTREGVSSVANSGLAALITDGPGGAKWMYVGRQNAGETWHDITGNRSEPVVINSEGWGEFHVNGGSVSIYVQR

SEQ ID NO: 31053 - protein, 481 aa, Bacillus licheniformis
VNGTLMQYFEWYTPNDGQHWKRLQNDAEHLSDIGITAVWIPPAYKAISQADVGYGAYDLYDLGEFHQKGTVRTKYGTKGELQSAIKSLHSRDINVYGDVVINHKAGADATEDVTAVEVDPADRNRVISGEHLIKAWTHFWFPGRGSTYSDFKWYWYHFDGTDWDESRKLNRIYLFQGKTWDWPVSNEFGNYDYLMYADYDYDYPDVVAEITRWGTWYANELQLDGFRLDAVKHIKFSFLRDWVNHVREKTGKEMFTVAEYWSNDLGALENYLNKTNFNHSVFDVPLHYQFHAASTQGGGYDMRKLLNGTVVSKHPLKSVTFVDNHDTQPGQSLESTVQTWFKPLAYAFILTRESGYPSVFYGDMYGTKGDSQREIPALKHKIEPILKARKQYAYGAQHDYFDHHDIVGWTREGVSSVANSGLAALITDGPGGAKWMYVGRQNAGETWHDITGNRSEPVVINSEGWGEFHVNGGSVSIYVQR

SEQ ID NO: 31054 - protein, 481 aa, Bacillus licheniformis
VNGTLMQYFEWYTPNDGQHWKRLQNDAEHLSDIGITAVWIPPAYKAISQADVGYGAYDLYDLGEFHQKGTVRTKYGTKGELQSAIKSLHSRDINVYGDVVINHKAGADATEDVTAVEVDPADRNRVISGEHLIKAWTHFHFPGRGSTYSDFKWYWYHFDGTDWDESRKLNRIYLFQGKTWDWEVSNEFGNYDYLMYADYDYDYPDVVAEITRWGTWYANELQLDGFRLDAVKHIKFSFLRDWVNHVREKTGKPMFTVAEYWSNDLGALENYLNKTNFNHSVFDVPLHYQFHAASTQGGGYDMRKLLNGTVVSPHPLKSVTFVDNHDTQPGQSLESTVQTWFKPLAYAFILTRESGYPSVFYGDMYGTKGDSQREIPALKHKIEPILKARKQYAYGAQHDYFDHHDIVGWTREGVSSVANSGLAALITDGPGGAKWMYVGRQNAGETWHDITGNRSEPVVINSEGWGEFHVNGGSVSIYVQR

SEQ ID NO: 31055 - protein, 481 aa, Bacillus amyloliquefaciens
VNGTLMQYFEWYTPNDGQHWKRLQNDAEHLSDIGITAVWIPPAYKAISQADVGYGAYDLYDLGEFHQKGTVRTKYGTKGELQSAIKSLHSRDINVYGDVVINHKAGADATEDVTAVEVDPADRNRVISGEHLIKAWTHFHFPGRGSTYSDFKWYWYHFDGTDWDESRKLNRIYLFQGKTWDWEVSNEFGNYDYLMYADYDYDYPDVVAEITRWGTWYANELQLDGFRLDAVKHIKFQFLRDWVNHVREKTGKEMFTVAEYWSNDLGALENYLNKTNFNHSVFDVPLHYQFHAASTQGGGYDMRKLLNGTVVSKHPLKSVTFVDNHDTQPGQSLESTVQTWFKPLAYAFILTRESGYPSVFYGDMYGTKGDSQREIPALKHKIEPILKARKQYAYGAQHDYFDHHDIVGWTREGVSSVANSGLAALITDGPGGAKWMYVGRQNAGETWHDITGNRSEPVVINSEGWGEFHVNGGSVSIYVQR

SEQ ID NO: 31056 - protein, 481 aa, Bacillus licheniformis
VNGTLMQYFEWYTPNDGQHWKRLQNDAEHLSDIGITAVWIPPAYKAISQADVGYGAYDLYDLGEFHQKGTVRTKYGTKGELQSAIKSLHSRDINVYGDVVINHKAGADATEDVTAVEVDPADRNRVISGEHLIKAWTHFHFPGRGSTYSDFKWYWYHFDGTDWDESRKLNRIYLFQGKTWDWEVSNEFGNYDYLMYADYDYDYPDVVAEITRWGTWYANELQLDGFRLDAVKHIKFSFLRDWVNHVREKTGKPMFTVAEYWSNDLGALENYLNKTNFNHSVFDVPLHYQFHAASTQGGGYDMRKLLNGTVVSNHPLKSVTFVDNHDTQPGQSLESTVQTWFKPLAYAFILTRESGYPSVFYGDMYGTKGDSQREIPALKHKIEPILKARKQYAYGAQHDYFDHHDIVGWTREGVSSVANSGLAALITDGPGGAKWMYVGRQNAGETWHDITGNRSEPVVINSEGWGEFHVNGGSVSIYVQR

SEQ ID NO: 31057 - protein, 481 aa, Bacillus amyloliquefaciens
VNGTLMQYFEWYTPNDGQHWKRLQNDAEHLSDIGITAVWIPPAYKAISQADVGYGAYDLYDLGEFWQKGTVRTKYGTKGELQSAIKSLHSRDINVYGDVVINHKAGADATEDVTAVEVDPADRNRVISGEHLIKAWTHFHFPGRGSTYSDFKWYWYHFDGTDWDESRKLNRIYLFQGKTWDWPVSNEFGNYDYLMYADYDYDYPDVVAEITRWGTWYANELQLDGFRLDAVKHIKFSFLRDWVNHVREKTGKEMFTVAEYWSNDLGALENYLNKTNFNHSVFDVPLHYQFHAASTQGGGYDMRKLLNGTVVSKHPLKSVTFVDNHDTQPGQSLESTVQTWFKPLAYAFILTRESGYPSVFYGDMYGTKGDSQREIPALKHKIEPILKARKQYAYGAQHDYFDHHDIVGWTREGVSSVANSGLAALITDGPGGAKWMYVGRQNAGETWHDITGNRSEPVVINSEGWGEFHVNGGSVSIYVQR

SEQ ID NO: 31058 - protein, 481 aa, Bacillus licheniformis
VNGTLMQYFEWYTPNDGQHWKRLQNDAEHLSDIGITAVWIPPAYKAISQADVGYGAYDLYDLGEFHQKGTVRTKYGTKGELQSAIKSLHSRDINVYGDVVINHKAGADATEDVTAVEVDPADRWRVISGEHLIKAWTHFHFPGRGSTYSDFKWYWYHFDGTDWDESRKLNRIYLFQGKTWDWEVSNEFGNYDYLMYADYDYDYPDVVAEITRWGTWYANELQLDGFRLDAVKHIKFSFLRDWVNHVREKTGKEMFTVAEYWSNDLGALENYLNKTNFNHSVFDVPLHYQFHAASTQGGGYDMRKLLNGTVVSKHPLKSVTFVDNHDTQPGQSLESTVQTWFKPLAYAFILTRESGYPSVFYGDMYGTKGDSQREIPALKHKIEPILKARKQYAYGAQHDYFDHHDIVGWTREGVSSVANSGLAALITDGPGGAKWMYVGRQNAGETWHDITGNRSEPVVINSEGWGEFHVNGGSVSIYVQR

SEQ ID NO: 31059 - protein, 481 aa, Bacillus licheniformis
VNGTLMQYFEWYTPNDGQHWKRLQNDAEHLSDIGITAVWIPPAYKAISQADVGYGAYDLYDLGEFHQKGTVRTKYGTKGELQSAIKSLHSRDINVYGDVVINHKAGADATEDVTAVEVDPADRNRVISGEHLIKAWTHFHFPGRGSTYSDFKWYWYHFDGTDWDESRKLNRIYLFQGKTWDWEVSNEFGNYDYLMYADYDYDYPDVVAEITRWGTWYANELQLDGFRLDAVKHIKFSFLRDWVNHVREQTGKPMFTVAEYWSNDLGALENYLNKTNFNHSVFDVPLHYQFHAASTQGGGYDMRKLLNGTVVSKHPLKSVTFVDNHDTQPGQSLESTVQTWFKPLAYAFILTRESGYPSVFYGDMYGTKGDSQREIPALKHKIEPILKARKQYAYGAQHDYFDHHDIVGWTREGVSSVANSGLAALITDGPGGAKWMYVGRQNAGETWHDITGNRSEPVVINSEGWGEFHVNGGSVSIYVQR

SEQ ID NO: 31060 - protein, 481 aa, Bacillus licheniformis
VNGTLMQYFEWYTPNDGQHWKRLQNDAEHLSDIGITAVWIPPAYKAISQADVGYGAYDLYDLGEFHQKGTVRTKYGTKGELQSAIKSLHSRDINVYGDVVINHKAGADATEDVTAVEVDPADRNRVISGEHLIKAWTHFHFPGRGSTYSDFKWYWYHFDGTDWDESRKLNRIYLFQGKTWDWEVSNEFGNYDYLMYADYDYDYPDVVAEITRWGTWYANELQLDGFRLDAVKHIKFSFLRDWVNHVREKTGKPMFTVAEYWSNDLGALENYLNKTNFNHSVFDVPLHYQFHAASTQGGGYDMRKLLNGTVVSMHPLKSVTFVDNHDTQPGQSLESTVQTWFKPLAYAFILTRESGYPSVFYGDMYGTKGDSQREIPALKHKIEPILKARKQYAYGAQHDYFDHHDIVGWTREGVSSVANSGLAALITDGPGGAKWMYVGRQNAGETWHDITGNRSEPVVINSEGWGEFHVNGGSVSIYVQR

SEQ ID NO: 31061 - protein, 481 aa, Bacillus licheniformis
VNGTLMQYFEWYTPNDGQHWKRLQNDAEHLSDIGITAVWIPPAYKAISQADVGYGAYDLYDLGEFHQKGTVRTKYGTKGELQSAIKSLHSRDINVYGDVVINHKAGADATEDVTAVEVDPADRNRVISGEHLIKAWTHFHFPGRGSTYSDFKWYWYHFDGTDWDESRKLNRIYLFQGKTWDWEVSNEFGNYDYLMYADYDYDYPDVVAEITRWGTWYANELQLDGFRLDAVKHIKFSFLRDWVNHVREKTGKPMFTVAEYWSNDLGALENYLNKTNFNHSVFDVPLHYQFHAASTQGGGYDMRKLLNGTVVSIHPLKSVTFVDNHDTQPGQSLESTVQTWFKPLAYAFILTRESGYPSVFYGDMYGTKGDSQREIPALKHKIEPILKARKQYAYGAQHDYFDHHDIVGWTREGVSSVANSGLAALITDGPGGAKWMYVGRQNAGETWHDITGNRSEPVVINSEGWGEFHVNGGSVSIYVQR

SEQ ID NO: 31062 - protein, 481 aa, Bacillus licheniformis
VNGTLMQYFEWYTPNDGQHWKRLQNDAEHLSDIGITAVWIPPAYKAISQADVGYGAYDLYDLGEFHQKGTVRTKYGTKGELQSAIKSLHSRDINVYGDVVINHKAGADATEDVTAVEVDPADRNRVISGEHLIKAWTHFHFPGRGSTYSDFKWYWYHFDGTDWDESRKLNRIYLFQGKTWDWEVSNEFGNYDYLMYADYDYDYPDVVAEITRWGTWYANELQLDGFRLDAVKHIKFSFLRDWVNHVREKTGKPMFTVAEYWSNDLGALENYLNKTNFNHSVFDVPLHYQFHAASTQGGGYDMRKLLNGTVVSTHPLKSVTFVDNHDTQPGQSLESTVQTWFKPLAYAFILTRESGYPSVFYGDMYGTKGDSQREIPALKHKIEPILKARKQYAYGAQHDYFDHHDIVGWTREGVSSVANSGLAALITDGPGGAKWMYVGRQNAGETWHDITGNRSEPVVINSEGWGEFHVNGGSVSIYVQR

SEQ ID NO: 31063 - protein, 481 aa, Bacillus licheniformis
VNGTLMQYFEWYTPNDGQHWKRLQNDAEHLSDIGITAVWIPPAYKAISQADVGYGAYDLYDLGEFHQKGTVRTKYGTKGELQSAIKSLHSRDINVYGDVVINHKAGADATEDVTAVEVDPADRNRVISGEHLIKAWTHFHFPGRGSTYSDFKWYWYHFDGTDWDESRKLNRIYLFQGKTWDWEVSNEFGNYDYLMYADYDYDYPDVVAEITRWGTWYANELQLDGFRLDAVKHIKFSFLRDWVNHVREKTGKPMFTVAEYWSNDLGALENYLNKTNFNHSVFDVPLHYQFHAASTQGGGYDMRKLLNGTVVSHHPLKSVTFVDNHDTQPGQSLESTVQTWFKPLAYAFILTRESGYPSVFYGDMYGTKGDSQREIPALKHKIEPILKARKQYAYGAQHDYFDHHDIVGWTREGVSSVANSGLAALITDGPGGAKWMYVGRQNAGETWHDITGNRSEPVVINSEGWGEFHVNGGSVSIYVQR

SEQ ID NO: 31064 - protein, 481 aa, Bacillus licheniformis
VNGTLMQYFEWYTPNDGQHWKRLQNDAEHLSDIGITAVWIPPAYKAISQADVGYGAYDLYDLGEFHQKGTVRTKYGTKGELQSAIKSLHSRDINVYGDVVINHKAGADATEDVTAVEVDPADRNRVISGEHLIKAWTHFHFPGRGSTYSDFKWYWWHFDGTDWDESRKLNRIYLFQGKTWDWEVSNEFGNYDYLMYADYDYDYPDVVAEITRWGTWYANELQLDGFRLDAVKHIKFSFLRDWVNHVREKTGKEMFTVAEYWSNDLGALENYLNKTNFNHSVFDVPLHYQFHAASTQGGGYDMRKLLNGTVVSKHPLKSVTFVDNHDTQPGQSLESTVQTWFKPLAYAFILTRESGYPSVFYGDMYGTKGDSQREIPALKHKIEPILKARKQYAYGAQHDYFDHHDIVGWTREGVSSVANSGLAALITDGPGGAKWMYVGRQNAGETWHDITGNRSEPVVINSEGWGEFHVNGGSVSIYVQR

SEQ ID NO: 31065 - protein, 481 aa, Bacillus licheniformis
VNGTLMQYFEWYTPNDGQHWKRLQNDAEHLSDIGITAVWIPPAYKAISQADVGYGAYDLYDLGEFHQKGTVRTKYGTKGELQSAIKSLHSRDINVYGDVVINHKAGADATEDVTAVEVDPADRNRVISGEHLIKAWTHFHFPGRGSTYSDFKWYWYHFDGTDWDESRKLNRIYLFQGKTWDWEVSNEFGNYDYLMYADYDYDYPDVVAEITRWGTWYANELQLDGFRLDAVKHIKFSFLRDWVNHVREKTGKPMFTVAEYWSNDLGALENYLNKTNFNHSVFDVPLHYQFHAASTQGGGYDMRKLLNGTVVSGHPLKSVTFVDNHDTQPGQSLESTVQTWFKPLAYAFILTRESGYPSVFYGDMYGTKGDSQREIPALKHKIEPILKARKQYAYGAQHDYFDHHDIVGWTREGVSSVANSGLAALITDGPGGAKWMYVGRQNAGETWHDITGNRSEPVVINSEGWGEFHVNGGSVSIYVQR

SEQ ID NO: 31066 - protein, 481 aa, Bacillus licheniformis
VNGTLMQYFEWYTPNDGQHWKRLQNDAEHLSDIGITAVWIPPAYKAISQADVGYGAYDLYDLGEFHQKGTVRTKYGTKGELQSAIKSLHSRDINVYGDVVINHKAGADATEDVTAVEVDPADRNRVISGEHLIKAWTHFHFPGRGSTYSDFKWYWYHFDGTDWDESRKLNRIYLFQGKTWDWEVSNEFGNYDYLMYADYDYDYPDVVAEITRWGTWYANELQLDGFRLDAVKHIKFSFLRDWVNHVREKTGKPMFTVAEYWSNDLGALENYLNKTNFNHSVFDVPLHYQFHAASTQGGGYDMRKLLNGTVVSQHPLKSVTFVDNHDTQPGQSLESTVQTWFKPLAYAFILTRESGYPSVFYGDMYGTKGDSQREIPALKHKIEPILKARKQYAYGAQHDYFDHHDIVGWTREGVSSVANSGLAALITDGPGGAKWMYVGRQNAGETWHDITGNRSEPVVINSEGWGEFHVNGGSVSIYVQR

SEQ ID NO: 31067 - protein, 481 aa, Bacillus licheniformis
VNGTLMQYFEWYTPNDGQHWKRLQNDAEHLSDIGITAVWIPPAYKAISQADVGYGAYDLYDLGEFHQKGTVRTKYGTKGELQSAIKSLHSRDINVYGDVVINHKAGADATEDVTAVEVDPADRNRVISGEHLIKAWTHFHFPGRGSTYSDFKWYWYHFDGTDWDESRKLNRIYLFQGKTWDWEVSNEFGNYDYLMYADYDYDYPDVVAEITRWGTWYANELQLDGFRLDAVKHIKFSFLRDWVNHVREKTGKPMFTVAEYWSNDLGALENYLNKTNFNHSVFDVPLHYQFHAASTQGGGYDMRKLLNGTVVSSHPLKSVTFVDNHDTQPGQSLESTVQTWFKPLAYAFILTRESGYPSVFYGDMYGTKGDSQREIPALKHKIEPILKARKQYAYGAQHDYFDHHDIVGWTREGVSSVANSGLAALITDGPGGAKWMYVGRQNAGETWHDITGNRSEPVVINSEGWGEFHVNGGSVSIYVQR

SEQ ID NO: 31068 - protein, 481 aa, Bacillus licheniformis
VNGTLMQYFEWYTPNDGQHWKRLQNDAEHLSDIGITAVWIPPAYKAISQADVGYGAYDLYDLGEFHQKGTVRTKYGTKGELQSAIKSLHSRDINVYGDVVINHKAGADATEDVTAVEVDPADRNRVISGEHLIKAWTHFHFPGRGSTYSDFKWYWYHFDGTDWDESRKLNRIYLFQGKTWDWEVSNEFGNYDYLMYADYDYDYPDVVAEITRWGTWYANELQLDGFRLDAVKHIKFSFLRDWVNHVREKTGKPMFTVAEYWSNDLGALENYLNKTNFNHSVFDVPLHYQFHAASTQGGGYDMRKLLNGTVVSVHPLKSVTFVDNHDTQPGQSLESTVQTWFKPLAYAFILTRESGYPSVFYGDMYGTKGDSQREIPALKHKIEPILKARKQYAYGAQHDYFDHHDIVGWTREGVSSVANSGLAALITDGPGGAKWMYVGRQNAGETWHDITGNRSEPVVINSEGWGEFHVNGGSVSIYVQR

SEQ ID NO: 31069 - protein, 481 aa, Bacillus licheniformis
VNGTLMQYFEWYTPNDGQHWKRLQNDAEHLSDIGITAVWIPPAYKAISQADVGYGAYDLYDLGEFHQKGTVRTKYGTKGELQSAIKSLHSRDINVYGDVVINHKAGADATEDVTAVEVDPADRNRVISGEYLIKAWTHFHFPGRGSTYSDFKWYWWHFDGTDWDESRKLNRIYLFQGKTWDWPVSNEFGNYDYLMYADYDYDYPDVVAEITRWGTWYANELQLDGFRLDAVKHIKFSFLRDWVNHVREKTGKEMFTVAEYWSNDLGALENYLNKTNFNHSVFDVPLHYQFHAASTQGGGYDMRKLLNGTVVSKHPLKSVTFVDNHDTQPGQSLESTVQTWFKPLAYAFILTRESGYPSVFYGDMYGTKGDSQREIPALKHKIEPILKARKQYAYGAQHDYFDHHDIVGWTREGVSSVANSGLAALITDGPGGAKWMYVGRQNAGETWHDITGNRSEPVVINSEGWGEFHVNGGSVSIYVQR

SEQ ID NO: 31070 - protein, 481 aa, Bacillus licheniformis
VNGTLMQYFEWYTPNDGQHWKRLQNDAEHLSDIGITAVWIPPAYKAISQADVGYGAYDLYDLGEFHQKGTVRTKYGTKGELQSAIKSLHSRDINVYGDVVINHKAGADATEDVTAVEVDPADRNRVISGEHLIKAWTHFHFPGRGSTYSDFKWYWYHFDGTDWDESRKLNRIYLFQGKTWDWEVSNEFGNYDYLMYADYDYDYPDVVAEITRWGTWYANELQLDGFRLDAVKHIKFSFLRDWVNHVREKTGKPMFTVAEYWSNDLGALENYLNKTNFNHSVFDVPLHYQFHAASTQGGGYDMRKLLNGTVVSEHPLKSVTFVDNHDTQPGQSLESTVQTWFKPLAYAFILTRESGYPSVFYGDMYGTKGDSQREIPALKHKIEPILKARKQYAYGAQHDYFDHHDIVGWTREGVSSVANSGLAALITDGPGGAKWMYVGRQNAGETWHDITGNRSEPVVINSEGWGEFHVNGGSVSIYVQR

SEQ ID NO: 31071 - protein, 481 aa, Bacillus licheniformis
VNGTLMQYFEWYTPNDGQHWKRLQNDAEHLSDIGITAVWIPPAYKAISQADVGYGAYDLYDLGEFHQKGTVRTKYGTKGELQSAIKSLHSRDINVYGDVVINHKAGADATEDVTAVEVDPADRNRVISGEHLIKAWTHFHFPGRGSTYSDFKWYWWHFDGTDWDESRKLNRIYLFQGKTWDWPVSNEFGNYDYLMYADYDYDYPVVDAEIKRWGTWYANELQLDGFRLDAVKHIKFSFLRDWVNHVREKTGKEMFTVAEYWSNDLGALENYLNKTNFNHSVFDVPLHYQFHAASTQGGGYDMRKLLNGTVVSKWPLKSVTFVDNHDTQPGQSLESTVQTWFKPLAYAFILTRESGYPQVFYGDMYGTKGDSQREIPALKHKIEPILKARKQYAYGAQHDYFDHHDIVGWTREGDSSVANSGLAALITDGPGGAKRMYVGRQNAGETWHDITGNRSEPVVINSEGWGEFHVNGGSVSIYVQR

SEQ ID NO: 31072 - protein, 481 aa, Synthetic construct
LNGTLMQYFEWYMPNDGQHWRRLQNDSAYLAEHGITAVWIPPAYKGTSQADVGYGAYDLYDLGEFHQKGTVRTKYGTKGELQSAIKSLHSRDINVYGDVVINHKGGADATEDVTAVEVDPADRNRVISGEHLIKAWTHFHFPGRGSTYSDFKWHWYHFDGTDWDESRKLNRIYKFQGKAWDWEVSNENGNYDYLMYADIDYDHPDVAAEIKRWGTWYANELQLDGFRLDAVKHIKFSFLRDWVNHVREKTGKEMFTVAEYWQNDLGALENYLNKTNFNHSVFDVPLHYQFHAASTQGGGYDMRKLLNGTVVSKHPLKSVTFVDNHDTQPGQSLESTVQTWFKPLAYAFILTRESGYPQVFYGDMYGTKGDSQREIPALKHKIEPILKARKQYAYGAQHDYFDHHDIVGWTREGDSSVANSGLAALITDGPGGAKRMYVGRQNAGETWHDITGNRSEPVVINSEGWGEFHVLGGSVSIYVQR

SEQ ID NO: 31073 - protein, 481 aa, Bacillus licheniformis
LNGTLMQYFEWYMPNDGQHWRRLQNDSAYLAEHGITAVWIPPAYKGTSQADVGYGAYDLYDLGEFHQKGTVRTKYGTKGELQSAIKSLHSRDINVYGDVVINHKGGADATEDVTAVEVDPADRNRVISGEHLIKAWTHFHFPGRGSTYSDFKWHWYHFDGTDWDESRKLNRIYKFQGKAWDWEVSNENGNYDYLMYADIDYDHPDVAAEIKRWGTWYANELQLDGFRLDAVKHIKFYFLRDWVNHVREKTGKEMFTVAEYWQNDLGALENYLNKTNFNHSVFDVPLHYQFHAASTQGGGYDMRKLLNGTVVSKHPLKSVTFVDNHDTQPGQSLESTVQTWFKPLAYAFILTRESGYPQVFYGDMYGTKGDSQREIPALKHKIEPILKARKQYAYGAQHDYFDHHDIVGWTREGDSSVANSGLAALITDGPGGAKRMYVGRQNAGETWHDITGNRSEPVVINSEGWGEFHVNGGSVSIYVQR

SEQ ID NO: 31074 - protein, 481 aa, Synthetic construct
LNGTLMQYFEWYMPNDGQHWRRLQNDSAYLAEHGITAVWIPPAYKGTSQADVGYGAYDLYDLGEFHQKGTVRTKYGTKGELQSAIKSLHSRDINVYGDVVINHKGGADATEDVTAVEVDPADRNRVISGEHLIKAWTHFHFPGRGSTYSDFKWHWYHFDGTDWDESRKLNRIYKFQGKAWDWEVSNENGNYDYLMYADIDYDHPDVAAEIKRWGTWYANELQLDGFRLDAVKHIKFSFLRDWVNHVREKTGKEMFTVAEYWQNDLGALENYLNKTNFNHSVFDVPLHYQFHAASTQGGGYDMRKLLNGTVVSKHPLKSVTFVDNHDTQPGQSLESTVQTWFKPLAYAFILTRESGYPQVFYGDMYGTKGDSQREIPALKHKIEPILKARKQYAYGAQHDYFDHHDIVGWTREGDSSVANSGLAALITDGPGGAKRMYVGRQNAGETWHDITGNRSEPVVINSEGWGEFHVSGGSVSIYVQR

SEQ ID NO: 31075 - protein, 481 aa, Synthetic construct
LNGTLMQYFEWYMPNDGQHWRRLQNDSAYLAEHGITAVWIPPAYKGTSQADVGYGAYDLYDLGEFHQKGTVRTKYGTKGELQSAIKSLHSRDINVYGDVVINHKGGADATEDVTAVEVDPADRNRVISGEHLIKAWTHFHFPGRGSTYSDFKWHWYHFDGTDWDESRKLNRIYKFQGKAWDWEVSNENGNYDYLMYADIDYDHPDVAAEIKRWGTWYANELQLDGFRLDAVKHIKFSFLRDWVNHVREKTGKEMFTVAEYWQNDLGALENYLNKTNFNHSVFDVPLHYQFHAASTQGGGYDMRKLLNGTVVSKHPLKSVTFVDNHDTQPGQSLESTVQTWFKPLAYAFILTRESGYPQVFYGDMYGTKGDSQREIPALKHKIEPILKARKQYAYGAQHDYFDHHDIVGWTREGDSSVANSGLAALITDGPGGAKRMYVGRQNAGETWHDITGNRSEPVVINSEGWGEFHVHGGSVSIYVQR

SEQ ID NO: 31076 - protein, 481 aa, Bacillus licheniformis
LNGTLMQYFEWYMPNDGQHWRRLQNDSAYLAEHGITAVWIPPAYKGTSQADVGYGAYDLYDLGEFHQKGTVRTKYGTKGELQSAIKSLHSRDINVYGDVVINHKGGADATEDVTAVEVDPADRNRVISGEHLIKAWTHFHFPGRGSTYSDFKWHWYHFDGTDWDESRKLNRIYKFQGKAWDWEVSNENGNYDYLMYADIDYDHPDVAAEIKRWGTWYANELQLDGFRLDAVKHIKFSFLRDWVNHVREKTGKEMFTVAEYWXNDLGALENYLNKTNFNHSVFDVPLHYQFHAASTQGGGYDMRKLLNGTVVSKHPLKSVTFVDNHDTQPGQSLESTVQTWFKPLAYAFILTRESGYPQVFYGDMYGTKGDSQREIPALKHKIEPILKARKQYAYGAQHDYFDHHDIVGWTREGDSSVANSGLAALITDGPGGAKRMYVGRQNAGETWHDITGNRSEPVVINSEGWGEFHVNGGSVSIYVQR

SEQ ID NO: 31077 - protein, 481 aa, Bacillus licheniformis
LNGTLMQYFEWYMPNDGQHWRRLQNDSAYLAEHGITAVWIPPAYKGTSQADVGYGAYDLYDLGEFHQKGTVRTKYGTKGELQSAIKSLHSRDINVYGDVVINHKGGADATEDVTAVEVDPADRNRVISGEHLIKAWTHFHFPGRGSTYSDFKWHWYHFDGTDWDESRKLNRIYKFQGKAWDWEVSNENGNYDYLMYADIDYDHPDVAAEIKRWGTWYANELQLDGFRLDAVKHIKFSFLRDWVNHVREKTGKEMFTVAEYWQNDLGALENYLNYTNFNHSVFDVPLHYQFHAASTQGGGYDMRKLLNGTVVSKHPLKSVTFVDNHDTQPGQSLESTVQTWFKPLAYAFILTRESGYPQVFYGDMYGTKGDSQREIPALKHKIEPILKARKQYAYGAQHDYFDHHDIVGWTREGDSSVANSGLAALITDGPGGAKRMYVGRQNAGETWHDITGNRSEPVVINSEGWGEFHVNGGSVSIYVQR

SEQ ID NO: 31078 - protein, 485 aa, Bacillus licheniformis
LNGTLMQYFEWYMPNDGQHWRRLQNDSAYLAEHGITAVWIPPAYKGTSQADVGYGAYDLYDLGEFHQKGTVRTKYGTKGELQSAIKSLHSRDINVYGDVVINHKGGADATEDVTAVEVDPADRNRVISGEHLIKAWTHFHFPGRGSTYSDFKWHWYHFDGTDWDESRKLNRIYKFQGKAWDWEVSNGASTVNGNYDYLMYADIDYDHPDVAAEIKRWGTWYANELQLDGFRLDAVKHIKFSFLRDWVNHVREKTGKEMFTVAEYWQNDLGALENYLNKTNFNHSVFDVPLHYQFHAASTQGGGYDMRKLLNGTVVSKHPLKSVTFVDNHDTQPGQSLESTVQTWFKPLAYAFILTRESGYPQVFYGDMYGTKGDSQREIPALKHKIEPILKARKQYAYGAQHDYFDHHDIVGWTREGDSSVANSGLAALITDGPGGAKRMYVGRQNAGETWHDITGNRSEPVVINSEGWGEFHVNGGSVSIYVQR

SEQ ID NO: 31079 - protein, 485 aa, Bacillus licheniformis
LNGTLMQYFEWYMPNDGQHWRRLQNDSAYLAEHGITAVWIPPAYKGTSQADVGYGAYDLYDLGEFHQKGTVRTKYGTKGELQSAIKSLHSRDINVYGDVVINHKGGADATEDVTAVEVDPADRNRVISGEHLIKAWTHFHFPGRGSTYSDFKWHWYHFDGTDWDESRKLNRIYKFQGKAWDWEVSNENGNYDYLMYADIDYDHPDVAAEIKRWGTWYANELQLDGFRLDAVKHIKFSFLRDWVNHVREKTGKEMFTVAEYGASTVQNDLGALENYLNKTNFNHSVFDVPLHYQFHAASTQGGGYDMRKLLNGTVVSKHPLKSVTFVDNHDTQPGQSLESTVQTWFKPLAYAFILTRESGYPQVFYGDMYGTKGDSQREIPALKHKIEPILKARKQYAYGAQHDYFDHHDIVGWTREGDSSVANSGLAALITDGPGGAKRMYVGRQNAGETWHDITGNRSEPVVINSEGWGEFHVNGGSVSIYVQR

SEQ ID NO: 31080 - protein, 481 aa, Bacillus licheniformis
LNGTLMQYFEWYMPNDGQHWRRLQNDSAYLAEHGITAVWIPPAYKGTSQADVGYGAYDLYDLGEFHQKGTVRTKYGTKGELQSAIKSLHSRDINVYGDVVINHKGGADATEDVTAVEVDPADRNRVISGEHLIKAWTHFHFPGRGSTYSDFKWHWYHFDGTDWDESRKLNRIYKFQGKAWDWEVSNENGNYDYLMYADIDYDHPDVAAEIKRWGTWYANELQLDGFRLDAVKHIKFSFLRDWVNHVREKTGKEMFTVAEYWQNDLGALENYLNKTNFNHSVFDXPLHYQFHAASTQGGGYDMRKLLNGTVVSKHPLKSVTFVDNHDTQPGQSLESTVQTWFKPLAYAFILTRESGYPQVFYGDMYGTKGDSQREIPALKHKIEPILKARKQYAYGAQHDYFDHHDIVGWTREGDSSVANSGLAALITDGPGGAKRMYVGRQNAGETWHDITGNRSEPVVINSEGWGEFHVNGGSVSIYVQR

SEQ ID NO: 31081 - protein, 481 aa, Bacillus licheniformis
LNGTLMQYFEWYMPNDGQHWRRLQNDSAYLAEHGITAVWIPPAYKGTSQADVGYGAYDLYDLGEFHQKGTVRTKYGTKGELQSAIKSLHSRDINVYGDVVINHKGGADATEDVTAVEVDPADRNRVISGEHLIKAWTHFHFPGRGSTYSDFKWHWYHFDGTDWDESRKLNRIYKFQGKAWDWEVSNENGNYDYLMYADIDYDHPDVAAEIKRWGTWYANELQLDGFRLDAVKHIKFSFLRDWVNHVREKTGKEMFTVAEYWQNDLGALENYLNKTNFNHSVFDVPLHYQFHAASTQGGGYDMRKLLNGTVVSKHPLKSVTFVDNHDTQPGQSLESTVQTWFKPLAYAFILTRESGYPQVFYGDMYGTKGDSRREIPALKHKIVPILKARKRYAYGAQHDYFDHHDIVGWTREGDSSVANSGLAALITDGPGGAKRMYVGRQNAGETWHDITGNRSEPVVINSEGWGEFHVNGGSVSIYVQR

SEQ ID NO: 31082 - protein, 481 aa, Bacillus licheniformis
LNGTLMQYFEWYMPNDGQHWRRLQNDSAYLAEHGITAVWIPPAYKGTSQADVGYGAYDLYDLGEFHQKGTVRTKYGTKGELQSAIKSLHSRDINVYGDVVINHKGGADATEDVTAVEVDPADRNRVISGEHLIKAWTHFHFPGRGSTYSDFKWHWYHFDGTDWDESRKLNRIYKFQGKAWDWEVSNEFGNYDYLMYADIDYDHPDVVAEIKRWGTWYANELQLDGFRLDAVKHIKFSFLRDWVNHVREKTGKEMFTVAEYWSNDLGALENYLNKTNFNHSVFDVPLHYQFHAASTQGGGYDMRKLLNGTVVSKHPLKSVTFVDNHDTQPGQSLESTVQTWFKPLAYAFILTRESGYPQVFYGDMYGTKGDSQREIPALKHKIEPILKARKQYAYGAQHDYFDHHDIVGWTREGDSSVANSGLAALITDGPGGAKRMYVGRQNAGETWHDITGNRSEPVVINSEGWGEFHVNGGSVSIYVQR

SEQ ID NO: 31083 - protein, 481 aa, Bacillus licheniformis
LNGTLMQYFEWYMPNDGQHWRRLQNDSAYLAEHGITAVWIPPAYKGTSQADVGYGAYDLYDLGEFHQKGTVRTKYGTKGELQSAIKSLHSRDINVYGDVVINHKGGADATEDVTAVEVDPADRNRVISGEHLIKAWTHFHFPGRGSTYSDFKWHWYHFDGTDWDESRKLNRIYKFQGKAWDWEVSNENGNYDYLMYADIDYDHPDVAAEIKRWGTWYANELQLDGFRLDAVKHIKFHFLRDWVNHVREKTGKEMFTVAEYWQNDLGALENYLNKTNFNHSVFDVPLHYQFHAASTQGGGYDMRKLLNGTVVSKHPLKSVTFVDNHDTQPGQSLESTVQTWFKPLAYAFILTRESGYPQVFYGDMYGTKGDSQREIPALKHKIEPILKARKQYAYGAQHDYFDHHDIVGWTREGDSSVANSGLAALITDGPGGAKRMYVGRQNAGETWHDITGNRSEPVVINSEGWGEFHVNGGSVSIYVQR

SEQ ID NO: 31084 - protein, 481 aa, Bacillus licheniformis
LNGTLMQYFEWYMPNDGQHWKRLQNDSAYLAEHGITAVWIPPAYKAISQADVGYGAYDLYDLGEFHQKGTVRTKYGTKGELQSAIKSLHSRDINVYGDVVINHKAGADATEDVTAVEVDPADRNRVISGEHLIKAWTHFHFPGRGSTYSDFKWYWYHFDGTDWDESRKLNRIYKFQGKTWDWEVSFENGNYDYLMYADFDYDHPDVVAEIKRWGTWYANELQLDGFRLDAVKHIKFSFLRDWVNHVREKTGKEMFTVAEYWSNDLGALENYLNKTNFNHSVFDVPLHYQFHAASTQGGGYDMRKLLNGTVVSKHPLKSVTFVDNHDTQPGQSLESTVQTWFKPLAYAFILTRESGYPQVFYGDMYGTKGDSQREIPALKHKIEPILKARKQYAYGAQHDYFDHHDIVGWTREGDSSVANSGLAALITDGPGGAKRMYVGRQNAGETWHDITGNRSEPVVINSEGWGEFHVNGGSVSIYVQR

SEQ ID NO: 31085 - protein, 481 aa, Bacillus licheniformis
LNGTLMQYFEWYMPNDGQHWRRLQNDSAYLAEHGITAVWIPPAYKGTSQADVGYGAYDLYDLGEFHQKGTVRTKYGTKGELQSAIKSLHSRDINVYGDVVINHKGGADATEDVTAVEVDPADRNRVISGEHLIKAWTHFHFPGRGSTYSDFKWHWYHFDGTDWDESRKLNRIYKFQGKAWDWPVSNENGNYDYLMYADIDYDHPDVAAEIKRWGTWYANELQLDGFRLDAVKHIKFSFLRDWVNHVREKTGKEMFTVAEYWQNDLGALENYLNKTNFNHSVFDVPLHYQFHAASTQGGGYDMRKLLNGTVVSKHPLKSVTFVDNHDTQPGQSLESTVQTWFKPLAYAFILTRESGYPQVFYGDMYGTKGDSQREIPALKHKIEPILKARKQYAYGAQHDYFDHHDIVGWTREGDSSVANSGLAALITDGPGGAKRMYVGRQNAGETWHDITGNRSEPVVINSEGWGEFHVNGGSVSIYVQR

SEQ ID NO: 31086 - protein, 481 aa, Bacillus licheniformis
LNGTLMQYFEWYMPNDGQHWRRLQNDSAYLAEHGITAVWIPPAYKGTSQADVGYGAYDLYDLGEFHQKGTVRTKYGTKGELQSAIKSLHSRDINVYGDVVINHKGGADATEDVTAVEVDPTDRNRVISGEHLIKAWTHFHFPGRGSTYSDFKWHWYHFDGTDWDESRKLNRIYKFQGKAWDWEVSNENGNYDYLMYADIDYDHPDVAAEIKRWGTWYANELQLDGFRLDAVKHIKFSFLRDWVNHVREKTGKEMFTVAEYWQNDLGALENYLNKTNFNHSVFDVPLHYQFHAASTQGGGYDMRKLLNGTVVSKHPLKSVTFVDNHDTQPGQSLESTVQTWFKPLAYAFILTRESGYPQVFYGDMYGTKGDSQREIPALKHKIEPILKARKQYAYGAQHDYFDHHDIVGWTREGDSSVANSGLAALITDGPGGAKRMYVGRQNAGETWHDITGNRSEPVVINSEGWGEFHVNGGSVSIYVQR

SEQ ID NO: 31087 - protein, 481 aa, Bacillus licheniformis
LNGTLMQYFEWYMPNDGQHWRRLQNDSAYLAEHGITAVWIPPAYKGTSQADVGYGAYDLYDLGEFHQKGTVRTKYGTKGELQSAIKSLHSRDINVYGDVVINHKGGADATEDVTAVEVDPADRNRVISGEHLIKAWTHFHFPGRGSTYSDFKWHWYHFDGTDWDESRKLNRIYKFQGKAWDWPVSNENGNYDYLMYADYDYDHPDVAAEIKRWGTWYANELQLDGFRLDAVKHIKFSFLRDWVNHVREKTGKEMFTVAEYWQNDLGALENYLNKTNFNHSVFDVPLHYQFHAASTQGGGYDMRKLLNGTVVSKHPLKSVTFVDNHDTQPGQSLESTVQTWFKPLAYAFILTRESGYPQVFYGDMYGTKGDSQREIPALKHKIEPILKARKQYAYGAQHDYFDHHDIVGWTREGDSSVANSGLAALITDGPGGAKRMYVGRQNAGETWHDITGNRSEPVVINSEGWGEFHVNGGSVSIYVQR

SEQ ID NO: 31088 - protein, 481 aa, Bacillus licheniformis
LNGTLMQYFEWYMPNDGQHWRRLQNDSAYLAEHGITAVWIPPAYKGTSQADVGYGAYDLYDLGEFHQKGTVRTKYGTKGELQSAIKSLHSRDINVYGDVVINHKGGADATEDVTAVEVDPADRNRVISGEHLIKAWTHFHFPGRGSTYSDFKWHWYHFDGTDWDESRKLNRIYKFQGKAWDWEVSNENGNYDYLMYADIDYDHPDVAAEIKRWGTWYANELQLDGFRLDAVKHIKFSFLRDWVNHVREKTGKEMFTVAEYWQNDLGALENYLNWTNFNHSVFDVPLHYQFHAASTQGGGYDMRKLLNGTVVSKHPLKSVTFVDNHDTQPGQSLESTVQTWFKPLAYAFILTRESGYPQVFYGDMYGTKGDSQREIPALKHKIEPILKARKQYAYGAQHDYFDHHDIVGWTREGDSSVANSGLAALITDGPGGAKRMYVGRQNAGETWHDITGNRSEPVVINSEGWGEFHVNGGSVSIYVQR

SEQ ID NO: 31089 - protein, 481 aa, Bacillus licheniformis
LNGTLMQYFEWYMPNDGQHWRRLQNDSAYLAEHGITAVWIPPAYKGTSQADVGYGAYDLYDLGEFHQKGTVRTKYGTKGELQSAIKSLHSRDINVYGDVVINHKGGADATEDVQAVEVDPADRNRVISGEHLIKAWTHFHFPGRGSTYSDFKWHWYHFDGTDWDESRKLNRIYKFQGKAWDWEVSNENGNYDYLMYADIDYDHPDVAAEIKRWGTWYANELQLDGFRLDAVKHIKFSFLRDWVNHVREKTGKEMFTVAEYWQNDLGALENYLNKTNFNHSVFDVPLHYQFHAASTQGGGYDMRKLLNGTVVSKHPLKSVTFVDNHDTQPGQSLESTVQTWFKPLAYAFILTRESGYPQVFYGDMYGTKGDSQREIPALKHKIEPILKARKQYAYGAQHDYFDHHDIVGWTREGDSSVANSGLAALITDGPGGAKRMYVGRQNAGETWHDITGNRSEPVVINSEGWGEFHVNGGSVSIYVQR

SEQ ID NO: 31090 - protein, 481 aa, Unidentified
LNGTLMQYFEWYMPNDGQHWKRLQNDSAYLAEHGITAVWIPPAYKGTSQADVGYGAYDLYDLGEFHQKGTVRTKYGTKGELQSAIKSLHSRDINVYGDVVINHKGGADATEDVTAVEVDPADRNRVISGEHLIKAWTHFHFPGAGSTYSDFKWHWYHFDGTDWDESRKLNRIYKFQGKAWDWEVSNENGNYDYLMYADIDYDHPDVAAEIKRWGTWYANELQLDGNRLDAVKHIKFSFLRDWVNHVREKTGKEMFTVAEYWQNDLGALENYLNKTNFNHSVFDVPLHYQFHAASTQGGGYDMRKLLNGTVVSKHPLKSVTFVDNHDTQPGQSLESTVQTWFKPLAYAFILTRESGYPQVFYGDMYGTKGDSQREIPALKHKIEPILKARKQYAYGAQHDYFDHHDIVGWTREGDSSVANSGLAALITDGPGGAKRMYVGRQNAGETWHDITGNRSEPVVINSEGWGEFHVNGGSVSIYVQR

SEQ ID NO: 31091 - protein, 481 aa, Bacillus sp.
LNGTLMQYFEWYMPNDGQHWKRLQNDSAYLAEHGITAVWIPPAYKGTSQADVGYGAYDLYDLGEFHQKGTVRTKYGTKGELQSAIKSLHSRDINVYGDVVINHKGGADTTEDVTAVEVDPADRNRVISGEHLIKAWTHFHFPGRGSIYSDFKWHWYHFDGTDWDESRKLNRIYKFQGKAWDWEVSNENGNYDYLMYADIDYDHPDVAAEIKRWGTWYANELQLDGFRLDAVKHIKFSFLRDWVNHVREKTGKEMFTVAEYWQNDLGALENYLNKTNFNHSVFDVPLHYQFHAASTQGGGYDMRKLLNGTVVSKHPLKSVTFVDNHDTQPGQSLESTVQTWFKPLAYAFILTRESGYPQVFYGDMYGTKGDSQREIPALKHKIEPILKARKQYAYGAQHDYFDHHDIVGWTREGDSSVANSGLAALITDGPGGAKRMYVGRQNAGETWHDITGNRSEPVVINSEGWGEFHVNGGSVSIYVQR

SEQ ID NO: 31092 - protein, 481 aa, Synthetic construct
LNGTLMQYFEWYMPNDGQHWRRLQNDSAYLAEHGITAVWIPPAYKGTSQADVGYGAYDLYDLGEFHQKGTVRTKYGTKGELQSAIKSLHSRDINVYGDVVINHKGGADATEDVTAVEVDPADRNRVISGEHLIKAWTHFHFPGRGSTYSDFKWHWYHFDGTDWDESRKLNRIYKFQGKAWDWEVSNENGNYDYLMYADIDYDHPDVAAEIKRWGTWYANELQLDGFRLDAVKHIKFSFLRDWVNHVREKTGKEMFTVAEYWQNDLGALENYLNKTNFNHSVFDVPLHYQFHAASTQGGGYDMRKLLNGTVVSKHPLKSVTFVDNHDTQPGQSLESTVQTWFKPLAYAFILTRESGYPQVFYGDMYGTKGDSQREIPALKHKIEPILKARKQYAYGAQHDYFDHHDIVGWTREGDSSVANSGLAALITDGPGGAKRMYVGRQNAGETWHDITGNRSEPVVINSEGWGEFHVVGGSVSIYVQR

SEQ ID NO: 31093 - protein, 481 aa, Bacillus licheniformis
LNGTLMQYFEWYSPNDGQHWKRLQNDSAYLAEHGITAVWIPPAYKGTSQADVGYGAYDLYDLGEFHQKGTVRTKYGTKGELQSAIKSLHSRDINVYGDVVINHKGGADATEDVTAVEVDPADRNRVISGEHLIKAYTHFHFPGRGSTYSDFKWHWYHFDGTDWDESRKLNRIYKFQGKAWDWEVSNENGNYDYLTYADIDYDHPDVAAEIKRWGTWYANELQLDGFRLDAVKHIKFSFLRDWVNHVREKTGKEMFTVAEYWQNDLGALENYLNKTNFNHSVFDVPLHYQFHAASTQGGGYDMRKLLNGTVVSKHPLKSVTFVDNHDTQPGQSLESTVQTWFKPLAYAFILTRESGYPQVFYGDMYGTKGDSQREIPALKHKIEPILKARKQYAYGAQHDYFDHHDIVGWTREGDSSVANSGLAALITDGPGGAKRMYVGRQNAGETWHDITGNRSEPVVINSEGWGEFHVNGGSVSIYVQR

SEQ ID NO: 31094 - protein, 481 aa, Bacillus licheniformis
LNGTLMQYFEWYMPNDGQHWRRLQNDSAYLAEHGITAVWIPPAYKGTSQADVGYGAYDLYDLGEFHQKGTVRTKYGTKGELQSAIKSLHSRDINVYGDVVINHKGGADATEDVTAVEVDPADRNRVISGEHLIKAWTHFHFPGRGSTYSDFKWHWYHFDGTDWDESRKLNRIYKFQGKAWDWEVSNENGNYDYLMYADIDYDHPDVAAEIKRWYTWYANELQLDGFRLDAVKHIKFSFLRDWVNHVREKTGKEMFTVAEYWQNDLGALENYLNKTNFNHSVFDVPLHYQFHAASTQGGGYDMRKLLNGTVVSKHPLKSVTFVDNHDTQPGQSLESTVQTWFKPLAYAFILTRESGYPQVFYGDMYGTKGDSQREIPALKHKIEPILKARKQYAYGAQHDYFDHHDIVGWTREGDSSVANSGLAALITDGPGGAKRMYVGRQNAGETWHDITGNRSEPVVINSEGWGEFHVNGGSVSIYVQR

SEQ ID NO: 31095 - protein, 481 aa, Bacillus licheniformis
LNGTLMQYFEWYMPNDGQHWRRLQNDSAYLAEHGITAVWIPPAYKGTSQADVGYGAYDLYDLGEFHQKGTVRTKYGTKGELQSAIKSLHSRDINVYGDVVINHKGGADATEDVTAVEVDPADRNRVISGEHLIKAWTHFHFPGRGSTYSDFKWHWYHFDGTDWDESRKLNRIYKFQGKAWDWEVSNENGNYDYDMYADIDYDHPDVAAEIKRWGTWYANELQLDGFRLDAVKHIKFSFLRDWVNHVREKTGKEMFTVAEYWQNDLGALENYLNKTNFNHSVFDVPLHYQFHAASTQGGGYDMRKLLNGTVVSKHPLKSVTFVDNHDTQPGQSLESTVQTWFKPLAYAFILTRESGYPQVFYGDMYGTKGDSQREIPALKHKIEPILKARKQYAYGAQHDYFDHHDIVGWTREGDSSVANSGLAALITDGPGGAKRMYVGRQNAGETWHDITGNRSEPVVINSEGWGEFHVNGGSVSIYVQR

SEQ ID NO: 31096 - protein, 481 aa, Bacillus licheniformis
LNGTLMQYFEWYMPNDGQHWRRLQNDSAYLAEHGITAVWIPPAYKGTSQADVGYGAYDLYDLGEFHQKGTVRTKYGTKGELQSAIKSLHSRDINVYGDVVINHKGGADATEDVTAVEVDPADRNRVISGEHLIKAWTHFHFPGRGSTYSDFKWHWYHFDGTDWDESRKLNRIYKFQGKAWDWEVSNENGNYDYLMYADIDYDHPDVAAEIKRWGTWYANELQLDGFRLDAVKHIKFSFLRDWVNHVREKTGKEMFTVAEYWQNDLGALENYLNKTNFNHSVFDVPLHYQFHAASTQGGGYDMRKLLNGTVVSKHPLKSVTFVDNHDTQPGQSLESTVQTWFKPLAYAFILTREAGYPQVFYGDMYGTKGDSQREIPALKHKIEPILKARKQYAYGAQHDYFDHHDIVGWTREGDSSVANSGLAALITDGPGGAKRMYVGRQNAGETWHDITGNRSEPVVINSEGWGEFHVNGGSVSIYVQR

SEQ ID NO: 31097 - protein, 481 aa, Bacillus licheniformis
LNGTLMQYFEWYMPNDGQHWKRLQNDSAYLAEHGITAVWIPPAYKGTSQADVGYGAYDLYDLGEFHQKGTVRTKYGTKGELQSAIKSLHSRDINVYGDVVINHKGGADATEDVTAVEVDPADRNRVISGEHLIKAYTHFHFPGRGSTYSDFKWHWYHFDGTDWDESRKLNRIYKFQGKAWDWEVSNENGNYDYLTYADIDYDHPDVAAEIKRWGTWYANELQLDGFRLDAVKHIKFSFLRDWVNHVREKTGKEMFTVAEYWQNDLGALENYLNKTNFNHSVFDVPLHYQFHAASTQGGGYDMRKLLNGTVVSKHPLKSVTFVDNHDTQPGQSLESTVQTWFKPLAYAFILTRESGYPQVFYGDMYGTKGDSQREIPALKHKIEPILKARKQYAYGAQHDYFDHHDIVGWTREGDSSVANSGLAALITDGPGGAKRMYVGRQNAGETWHDITGNRSEPVVINSEGWGEFHVNGGSVSIYVQR

SEQ ID NO: 31098 - protein, 481 aa, Bacillus licheniformis
LNGTLMQYFEWYMPNDGQHWRRLQNDSAYLAEHGITAVWIPPAYKGTSQADVGYGAYDLYDLGEFHQKGTVRTKYGTKGELQSAIKSLHSRDINVYGDVVINHKGGADATEDVTAVEVDPADRNRVISGEHLIKAWTHFHFPGRGSTYSDFKWHWYHFDGTDWDESRKLNRIYKFQGKAWDWEVSNENGNYDYLMYADIDYDHPDVAAEIKRWGTWYANELQLDGFRLDAVKHIKFSFLRDWVNHVREKTGKEMFTVAEYWQNDLGALENYLNFTNFNHSVFDVPLHYQFHAASTQGGGYDMRKLLNGTVVSKHPLKSVTFVDNHDTQPGQSLESTVQTWFKPLAYAFILTRESGYPQVFYGDMYGTKGDSQREIPALKHKIEPILKARKQYAYGAQHDYFDHHDIVGWTREGDSSVANSGLAALITDGPGGAKRMYVGRQNAGETWHDITGNRSEPVVINSEGWGEFHVNGGSVSIYVQR

SEQ ID NO: 31099 - protein, 481 aa, Bacillus licheniformis
LNGTLMQYFEWYMPNDGQHWRRLQNDSAYLAEHGITAVWIPPAYKGTSQADVGYGAYDLYDLGEFHQKGTVRTKYGTKGELQSAIKSLHSRDINVYGDVVINHKGGADATEDVTAVEVDPADRNRVISGEHLIKAWTHFHFPGRGSTYSDFKWHWYHFDGTDWDESRKLNRIYKFQGKAWDWEVSNENGNYDYLMYADIDYDHPDVAAEIKRWGTWYANELQLDGFRLDAVKHIKFSFLRDWVNHVREKTGKEMFTVAEYWQXDLGALENYLNKTNFNHSVFDVPLHYQFHAASTQGGGYDMRKLLNGTVVSKHPLKSVTFVDNHDTQPGQSLESTVQTWFKPLAYAFILTRESGYPQVFYGDMYGTKGDSQREIPALKHKIEPILKARKQYAYGAQHDYFDHHDIVGWTREGDSSVANSGLAALITDGPGGAKRMYVGRQNAGETWHDITGNRSEPVVINSEGWGEFHVNGGSVSIYVQR

SEQ ID NO: 31100 - protein, 481 aa, Synthetic construct
LNGTLMQYFEWYMPNDGQHWRRLQNDSAYLAEHGITAVWIPPAYKGTSQADVGYGAYDLYDLGEFHQKGTVRTKYGTKGELQSAIKSLHSRDINVYGDVVINHKGGADATEDVTAVEVDPADRNRVISGEHLIKAWTHFHFPGRGSTYSDFKWHWYHFDGTDWDESRKLNRIYKFQGKAWDWEVSNENGNYDYLMYADIDYDHPDVAAEIKRWGTWYANELQLDGFRLDAVKHIKFSFLRDWVNHVREKTGKEMFTVAEYWQNDLGALENYLNKTNFNHSVFDVPLHYQFHAASTQGGGYDMRKLLNGTVVSKHPLKSVTFVDNHDTQPGQSLESTVQTWFKPLAYAFILTRESGYPQVFYGDMYGTKGDSQREIPALKHKIEPILKARKQYAYGAQHDYFDHHDIVGWTREGDSSVANSGLAALITDGPGGAKRMYVGRQNAGETWHDITGNRSEPVVINSEGWGEFHVYGGSVSIYVQR

SEQ ID NO: 31101 - protein, 481 aa, Bacillus licheniformis
LNGTLMQYFEWYMPNDGQHWRRLQNDSAYLAEHGITAVWIPPAYKGTSQADVGYGAYDLYDLGEFHQKGTVRTKYGTKGELQSAIKSLHSRDINVYGDVVINHKGGADATEDVTAVEVDPADRNRVISGEHLIKAWTHFHFPGRGSTYSDFKWHWYHFDGTDWDESRKLNRIYKFQGKAWDWEVSNENGNYDYLMYADIDYDHPDVAAEIKRWGTWYANELQLDGFRLDAVKHIKFSFLRDWVNHVREKTGKEMFTVAEYWQNDLGALENYLNKTNFNHSVFDVPLHYQFHAASTQGGGYDMRKLLNGTVVSKHPLKSVTFVDNHDTQPGQSLESTVQTWFKPLAYAFILTRESGFPQVFYGDMYGTKGDSQREIPALKHKIEPILKARKQYAYGAQHDYFDHHDIVGWTREGDSSVANSGLAALITDGPGGAKRMYVGRQNAGETWHDITGNRSEPVVINSEGWGEFHVNGGSVSIYVQR

SEQ ID NO: 31102 - protein, 481 aa, Bacillus licheniformis
LNGTLMQYFEWYMPNDGQHWRRLQNDSAYLAEHGITAVWIPPAYKGTSQADVGYGAYDLYDLGEFHQKGTVRTKYGTKGELQSAIKSLHSRDINVYGDVVINHKGGADATEDVTAVEVDPADRNRVISGEHLIKAWTHFHFPGRGSTYSDFKWHWYHFDGTDWDESRKLNRIYKFQGKAWDWEVSNENGNYDYLMYADIDYDHPDVAAEIKRWGTWYANELQLDGFRLDAVKHIKFSFLRDWVNHVREKTGKEMFTVAEYWQNDLGALENYLNKTNFNHSVFDVPLHYQFHAASTQGGGYDMRKLLNGTVVSKHPLKSVTFVDNHDTQPGQSLESTVQTWFKPLAYAFILTRESGYPQVFYGDMYGTKGDSQRKIPALKHKIEPILKARKQYAYGAQHDYFDHHDIVGWTREGDSSVANSGLAALITDGPGGAKRMYVGRQNAGETWHDITGNRSEPVVINSEGWGEFHVNGGSVSIYVQR

SEQ ID NO: 31103 - protein, 481 aa, Synthetic construct
LNGTLMQYFEWYMPNDGQHWRRLQNDSAYLAEHGITAVWIPPAYKGTSQADVGYGAYDLYDLGEFHQKGTVRTKYGTKGELQSAIKSLHSRDINVYGDVVINHKGGADATEDVTAVEVDPADRNRVISGEHLIKAWTHFHFPGRGSTYSDFKWHWYHFDGTDWDESRKLNRIYKFQGKAWDWEVSNENGNYDYLMYADIDYDHPDVAAEIKRWGTWYANELQLDGFRLDAVKHIKFSFLRDWVNHVREKTGKEMFTVAEYWQNDLGALENYLNKTNFNHSVFDVPLHYQFHAASTQGGGYDMRKLLNGTVVSKHPLKSVTFVDNHDTQPGQSLESTVQTWFKPLAYAFILTRESGYPQVFYGDMYGTKGDSQREIPALKHKIEPILKARKQYAYGAQHDYFDHHDIVGWTREGDSSVANSGLAALITDGPGGAKRMYVGRQNAGETWHDITGNRSEPVVINSEGWGEFHVKGGSVSIYVQR

SEQ ID NO: 31104 - protein, 481 aa, Bacillus licheniformis
LNGTLMQYFEWYMPNDGQHWRRLQNDSAYLAEHGITAVWIPPAYKGTSQADVGYGAYDLYDLGEFHQKGTVRTKYGTKGELQSAIKSLHSRDINVYGDVVINHKGGADATEDVTAVEVDPADRNRVISGEHLIKAWTHFHFPGRGSTYSDFKWHWYHFDGTDWDESRKLNRIYKFQGKAWDWEVSNENGNYDYLMYADIDYDHPDVAAEIKRWGTWYANELQLDGFRLDAVKHIKFSFLRDWVNHVREKTGKEMFTVAEYWQNDLGALENYLNKTNFNHSVFDVPLHYQFHAASTQGGGYDMRKLLNGTVVSKHPLKSVTFVDNHDTQPGLSLESTVQTWFKPLAYAFILTRESGYPQVFYGDMYGTKGDSQREIPALKHKIEPILKARKQYAYGAQHDYFDHHDIVGWTREGDSSVANSGLAALITDGPGGAKRMYVGRQNAGETWHDITGNRSEPVVINSEGWGEFHVNGGSVSIYVQR

SEQ ID NO: 31105 - protein, 481 aa, Synthetic construct
LNGTLMQYFEWYMPNDGQHWRRLQNDSAYLAEHGITAVWIPPAYKGTSQADVGYGAYDLYDLGEFHQKGTVRTKYGTKGELQSAIKSLHSRDINVYGDVVINHKGGADATEDVTAVEVDPADRNRVISGEHLIKAWTHFHFPGRGSTYSDFKWHWYHFDGTDWDESRKLNRIYKFQGKAWDWEVSNENGNYDYLMYADIDYDHPDVAAEIKRWGTWYANELQLDGFRLDAVKHIKFSFLRDWVNHVREKTGKEMFTVAEYWQNDLGALENYLNKTNFNHSVFDVPLHYQFHAASTQGGGYDMRKLLNGTVVSKHPLKSVTFVDNHDTQPGQSLESTVQTWFKPLAYAFILTRESGYPQVFYGDMYGTKGDSQREIPALKHKIEPILKARKQYAYGAQHDYFDHHDIVGWTREGDSSVANSGLAALITDGPGGAKRMYVGRQNAGETWHDITGNRSEPVVINSEGWGEFHVEGGSVSIYVQR

SEQ ID NO: 31106 - protein, 481 aa, Bacillus licheniformis
LNGTLMQYFEWYMPNDGQHWRRLQNDSAYLAEHGITAVWIPPAYKGTSQADVGYGAYDLYDLGEFHQKGTVRTKYGTKGELQSAIKSLHSRDINVYGDVVINHKGGADATEDVTAVEVDPADRNRVISGEHLIKAWTHFHFPGRGSTYSDFKWHWYHFDGTDWDESRKLNRIYKFQGKAWDWEVSNENGNYDYLMYADIDYDHPDVAAEIKRWGTWYANELQLDGFRLDAVKHIKFSFLRDWVNHVREKTGKEMFTVAEYWQNDLGALENYLNITNFNHSVFDVPLHYQFHAASTQGGGYDMRKLLNGTVVSKHPLKSVTFVDNHDTQPGQSLESTVQTWFKPLAYAFILTRESGYPQVFYGDMYGTKGDSQREIPALKHKIEPILKARKQYAYGAQHDYFDHHDIVGWTREGDSSVANSGLAALITDGPGGAKRMYVGRQNAGETWHDITGNRSEPVVINSEGWGEFHVNGGSVSIYVQR

SEQ ID NO: 31107 - protein, 481 aa, Bacillus licheniformis
LNGTLMQYFEWYMPNDGQHWRRLQNDSAYLAEHGITAVWIPPAYKAISQADVGYGAYDLYDLGEFHQKGTVRTKYGTKGELQSAIKSLHSRDINVYGDVVINHKGGADATEDVTAVEVDPADRNRVISGEHLIKAWTHFHFPGRGSTYSDFKWHWYHFDGTDWDESRKLNRIYKFQGKAWDWEVSNENGNYDYLMYADIDYDHPDVAAEIKRWGTWYANELQLDGFRLDAVKHIKFSFLRDWVNHVREKTGKEMFTVAEYWQNDLGALENYLNKTNFNHSVFDVPLHYQFHAASTQGGGYDMRKLLNGTVVSKHPLKSVTFVDNHDTQPGQSLESTVQTWFKPLAYAFILTRESGYPQVFYGDMYGTKGDSQREIPALKHKIEPILKARKQYAYGAQHDYFDHHDIVGWTREGDSSVANSGLAALITDGPGGAKRMYVGRQNAGETWHDITGNRSEPVVINSEGWGEFHVNGGSVSIYVQR

SEQ ID NO: 31108 - protein, 481 aa, Synthetic construct
LNGTLMQYFEWYMPNDGQHWRRLQNDSAYLAEHGITAVWIPPAYKGTSQADVGYGAYDLYDLGEFHQKGTVRTKYGTKGELQSAIKSLHSRDINVYGDVVINHKGGADATEDVTAVEVDPADRNRVISGEHLIKAWTHFHFPGRGSTYSDFKWHWYHFDGTDWDESRKLNRIYKFQGKAWDWEVSNENGNYDYLMYADIDYDHPDVAAEIKRWGTWYANELQLDGFRLDAVKHIKFSFLRDWVNHVREKTGKEMFTVAEYWQNDLGALENYLNKTNFNHSVFDVPLHYQFHAASTQGGGYDMRKLLNGTVVSKHPLKSVTFVDNHDTQPGQSLESTVQTWFKPLAYAFILTRESGYPQVFYGDMYGTKGDSQREIPALKHKIEPILKARKQYAYGAQHDYFDHHDIVGWTREGDSSVANSGLAALITDGPGGAKRMYVGRQNAGETWHDITGNRSEPVVINSEGWGEFHVIGGSVSIYVQR

SEQ ID NO: 31109 - protein, 481 aa, Bacillus licheniformis
LNGTLMQYFEWYMPNDGQHWRRLQNDSAYLAEHGITAVWIPPAYKGTSQADVGYGAYDLYDLGEFHQKGTVRTKYGTKGELQSAIKSLHSRDINVYGDVVINHKGGADATEDVTAVEVDPADRNRVISGEHLIKAWTHFHFPGRGSTYSDFKWHWYHFDGTDWDESRKLNRIYKFQGKAWDWEVSNENGNYDYLMYADIDYDHPDVAAEIKRWGTWYANELQLDGFRLDAVKHIKFFFLRDWVNHVREKTGKEMFTVAEYWQNDLGALENYLNKTNFNHSVFDVPLHYQFHAASTQGGGYDMRKLLNGTVVSKHPLKSVTFVDNHDTQPGQSLESTVQTWFKPLAYAFILTRESGYPQVFYGDMYGTKGDSQREIPALKHKIEPILKARKQYAYGAQHDYFDHHDIVGWTREGDSSVANSGLAALITDGPGGAKRMYVGRQNAGETWHDITGNRSEPVVINSEGWGEFHVNGGSVSIYVQR

SEQ ID NO: 31110 - protein, 481 aa, Bacillus licheniformis
LNGTLMQYFEWYMPNDGQHWRRLQNDSAYLAEHGITAVWIPPAYKGTSQADVGYGAYDLYDLGEFHQKGTVRTKYGTKGELQSAIKSLHSRDINVYGDVVINHKGGADATEDVYAVEVDPADRNRVISGEHLIKAWTHFHFPGRGSTYSDFKWHWYHFDGTDWDESRKLNRIYKFQGKAWDWEVSNENGNYDYLMYADIDYDHPDVAAEIKRWGTWYANELQLDGFRLDAVKHIKFSFLRDWVNHVREKTGKEMFTVAEYWQNDLGALENYLNKTNFNHSVFDVPLHYQFHAASTQGGGYDMRKLLNGTVVSKHPLKSVTFVDNHDTQPGQSLESTVQTWFKPLAYAFILTRESGYPQVFYGDMYGTKGDSQREIPALKHKIEPILKARKQYAYGAQHDYFDHHDIVGWTREGDSSVANSGLAALITDGPGGAKRMYVGRQNAGETWHDITGNRSEPVVINSEGWGEFHVNGGSVSIYVQR

SEQ ID NO: 31111 - protein, 481 aa, Bacillus licheniformis
LNGTLMQYFEWYMPNDGQHWRRLQNDSAYLAEHGITAVWIPPAYKGTSQADVGYGAYDLYDLGEFHQKGTVRTKYGTKGELQSAIKSLHSRDINVYGDVVINHKGGADATEDVTAVEVDPADRNRVISGEHLIKAWTHFHFPGRGSTYSDFKWHWYHFDGTDWDESRKLNRIYKFQGKAWDWEVSNENGNYDYLMYADIDYDHPDVAAEIKRWGTWYANELQLDGFRLDAVKHIKFWFLRDWVNHVREKTGKEMFTVAEYWQNDLGALENYLNKTNFNHSVFDVPLHYQFHAASTQGGGYDMRKLLNGTVVSKHPLKSVTFVDNHDTQPGQSLESTVQTWFKPLAYAFILTRESGYPQVFYGDMYGTKGDSQREIPALKHKIEPILKARKQYAYGAQHDYFDHHDIVGWTREGDSSVANSGLAALITDGPGGAKRMYVGRQNAGETWHDITGNRSEPVVINSEGWGEFHVNGGSVSIYVQR

SEQ ID NO: 31112 - protein, 481 aa, Bacillus licheniformis
LNGTLMQYFEWYMPNDGQHWRRLQNDSAYLAEHGITAVWIPPAYKGTSQADVGYGAYDLYDLGEFHQKGTVRTKYGTKGELQSAIKSLHSRDINVYGDVVINHKGGADATEDVTAVEVDPADRNRVISGEHLIKAWTHFHFPGRGSTYSDFKWHWYHFDGTDWDESRKLNRIYKFQGKAWDWEVSNENGNYDYLMYADIDYDHPDVAAEIKRWGTWYANELQLDGFRLDAVKHIKFSFLRDWVNHVREKTGKEMFTVAEYXQNDLGALENYLNKTNFNHSVFDVPLHYQFHAASTQGGGYDMRKLLNGTVVSKHPLKSVTFVDNHDTQPGQSLESTVQTWFKPLAYAFILTRESGYPQVFYGDMYGTKGDSQREIPALKHKIEPILKARKQYAYGAQHDYFDHHDIVGWTREGDSSVANSGLAALITDGPGGAKRMYVGRQNAGETWHDITGNRSEPVVINSEGWGEFHVNGGSVSIYVQR

SEQ ID NO: 31113 - protein, 485 aa, Bacillus licheniformis
LNGTLMQYFEWYMPNDGQHWRRLQNDSAYLAEHGITAVWIPPAYKGTSQADVGYGAYDLYDLGEFHQKGTVRTKYGTKGELQSAIKSLHSRDINVYGDVVINHKGGADATEDVTAVEVDPADRNRVISGEHLIKAWTHFHFPGRGSTYSDFKWHWYHFDGTDWDESRKLNRIYKFQGKAWDWEVSNENGNYDYLMYADIDYDHPDVAAEIKRWGTWYANELQLDGFRLDAVKHIKFSFLRDWVNHVREKTGKEMFTVAEYWQNDLGALENYLNKTNFNHSVFDVPLHYQFHAASTQGGGYDMRKLLNGTVVSKHPLKSVTFVDNHDTQPGQSGASTVESTVQTWFKPLAYAFILTRESGYPQVFYGDMYGTKGDSQREIPALKHKIEPILKARKQYAYGAQHDYFDHHDIVGWTREGDSSVANSGLAALITDGPGGAKRMYVGRQNAGETWHDITGNRSEPVVINSEGWGEFHVNGGSVSIYVQR

SEQ ID NO: 31114 - protein, 481 aa, Bacillus licheniformis
LNGTLMQYFEWYMPNDGQHWRRLQNDSAYLAEHGITAVWIPPAYKAISQADVGYGAYDLYDLGEFHQKGTVRTKYGTKGELQSAIKSLHSRDINVYGDVVINHKGGADATEDVTAVEVDPADRNRVISGEHLIKAWTHFHFPGRGSTYSDFKWHWYHFDGTDWDESRKLNRIYKFQGKAWDWEVSNENGNYDYLMYADFDYDHPDVAAEIKRWGTWYANELQLDGFRLDAVKHIKFSFLRDWVNHVREKTGKEMFTVAEYWQNDLGALENYLNKTNFNHSVFDVPLHYQFHAASTQGGGYDMRKLLNGTVVSKHPLKSVTFVDNHDTQPGQSLESTVQTWFKPLAYAFILTRESGYPQVFYGDMYGTKGDSQREIPALKHKIEPILKARKQYAYGAQHDYFDHHDIVGWTREGDSSVANSGLAALITDGPGGAKRMYVGRQNAGETWHDITGNRSEPVVINSEGWGEFHVNGGSVSIYVQR

SEQ ID NO: 31115 - protein, 481 aa, Bacillus licheniformis
LNGTLMQYFEWYMPNDGQHWRRLQNDSAYLAEHGITAVWIPPAYKGTSQADVGYGAYDLYDLGEFHQKGTVRTKYGTKGELQSAIKSLHSRDINVYGDVVINHKGGADATEDVTAVEVDPADRNRVISGEHLIKAWTHFHFPGRGSTYSDFKWHWYHFDGTDWDESRKLNRIYKFQGKAWDWEVSNENGNYDYLMYADIDYDHPDVAAEIKRWGTWYANELQLDGFRLDAVKHIKFSFLRDWVNHVREKTGKEMFTVAEYWQNDLGALENYLNKTNFNHSVFDVPLHYQFHAASTQGGGYDMRKLLNGTVVSKHPLKSVTFVDNHDTQPGQSXESTVQTWFKPLAYAFILTRESGYPQVFYGDMYGTKGDSQREIPALKHKIEPILKARKQYAYGAQHDYFDHHDIVGWTREGDSSVANSGLAALITDGPGGAKRMYVGRQNAGETWHDITGNRSEPVVINSEGWGEFHVNGGSVSIYVQR

SEQ ID NO: 31116 - protein, 481 aa, Bacillus licheniformis
LNGTLMQYFEWYMPNDGQHWRRLQNDSAYLAEHGITAVWIPPAYKGTSQADVGYGAYDLYDLGEFHQKGTVRTKYGTKGELQSAIKSLHSRDINVYGDVVINHKGGADATEDVTAVEVDPADRNRVISGEHLIKAWTHFHFPGRGSTYSDFKWHWYHFDGTDWDESRKLNRIYKFQGKAWDWEVSNENGNYDYLMYADIDYDHPDVAAEIKRWGTWYANELQLDGFRLDAVXHIKFSFLRDWVNHVREKTGKEMFTVAEYWQNDLGALENYLNKTNFNHSVFDVPLHYQFHAASTQGGGYDMRKLLNGTVVSKHPLKSVTFVDNHDTQPGQSLESTVQTWFKPLAYAFILTRESGYPQVFYGDMYGTKGDSQREIPALKHKIEPILKARKQYAYGAQHDYFDHHDIVGWTREGDSSVANSGLAALITDGPGGAKRMYVGRQNAGETWHDITGNRSEPVVINSEGWGEFHVNGGSVSIYVQR

SEQ ID NO: 31117 - protein, 481 aa, Bacillus licheniformis
LNGTLMQYFEWYMPNDGQHWRRLQNDSAYLAEHGITAVWIPPAYKGTSQADVGYGAYDLYDLGEFHQKGTVRTKYGTKGELQSAIKSLHSRDINVYGDVVINHKGGADATEDVTAVEVDPADRNRVISGEHLIKAWTHFHFPGRGSTYSDFKWHWYHFDGTDWDESRKLNRIYKFQGKAWDWEVSNENGNYDYLMYADIDYDHPDVAAEIKRWGTWYANELQLDGFRLDAVKHIKFSFLRDWVNHVREKTGKEMFTVAEYWQNDLGALENYLNHTNFNHSVFDVPLHYQFHAASTQGGGYDMRKLLNGTVVSKHPLKSVTFVDNHDTQPGQSLESTVQTWFKPLAYAFILTRESGYPQVFYGDMYGTKGDSQREIPALKHKIEPILKARKQYAYGAQHDYFDHHDIVGWTREGDSSVANSGLAALITDGPGGAKRMYVGRQNAGETWHDITGNRSEPVVINSEGWGEFHVNGGSVSIYVQR

SEQ ID NO: 31118 - protein, 481 aa, Synthetic construct
LNGTLMQYFEWYMPNDGQHWRRLQNDSAYLAEHGITAVWIPPAYKGTSQADVGYGAYDLYDLGEFHQKGTVRTKYGTKGELQSAIKSLHSRDINVYGDVVINHKGGADATEDVTAVEVDPADRNRVISGEHLIKAWTHFHFPGRGSTYSDFKWHWYHFDGTDWDESRKLNRIYKFQGKAWDWEVSNENGNYDYLMYADIDYDHPDVAAEIKRWGTWYANELQLDGFRLDAVKHIKFSFLRDWVNHVREKTGKEMFTVAEYWQNDLGALENYLNKTNFNHSVFDVPLHYQFHAASTQGGGYDMRKLLNGTVVSKHPLKSVTFVDNHDTQPGQSLESTVQTWFKPLAYAFILTRESGYPQVFYGDMYGTKGDSQREIPALKHKIEPILKARKQYAYGAQHDYFDHHDIVGWTREGDSSVANSGLAALITDGPGGAKRMYVGRQNAGETWHDITGNRSEPVVINSEGWGEFHVFGGSVSIYVQR

SEQ ID NO: 31119 - protein, 481 aa, Bacillus licheniformis
LNGTLMQYFEWYMPNDGQHWRRLQNDSAYLAEHGITAVWIPPAYKGTSQADVGYGAYDLYDLGEFHQKGTVRTKYGTKGELQSAIKSLHSRDINVYGDVVINHKGGADATEDVTAVEVDPADRNRVISGEHLIKAWTHFHFPGRGSTYSDFKWHWYHFDGTDWDESRKLNRIYKFQGKAWDWEVSNENGNYDYLMYADIDYDHPVVAAEIKRWGTWYANELQLDGFRLDAVKHIKFSFLRDWVNHVREKTGKEMFTVAEYWQNDLGALENYLNKTNFNHSVFDVPLHYQFHAASTQGGGYDMRKLLNGTVVSKHPMKSVTFVDNHDTQPGQSLESTVQTWFKPLAYAFILTRESGYPQVFYGDMYGTKGDSQREIPALKHKIEPILKARKQYAYGAQHDYFDHHDIVGWTREGDSSVANSGLAALITDGPGGAKRMYVGRQNAGETWHDITGNRSEPVVINSEGWGEFHVNGGSVSIYVQR

SEQ ID NO: 31120 - protein, 481 aa, Synthetic construct
LNGTLMQYFEWYMPNDGQHWRRLQNDSAYLAEHGITAVWIPPAYKGTSQADVGYGAYDLYDLGEFHQKGTVRTKYGTKGELQSAIKSLHSRDINVYGDVVINHKGGADATEDVTAVEVDPADRNRVISGEHLIKAWTHFHFPGRGSTYSDFKWHWYHFDGTDWDESRKLNRIYKFQGKAWDWEVSNENGNYDYLMYADIDYDHPDVAAEIKRWGTWYANELQLDGFRLDAVKHIKFSFLRDWVNHVREKTGKEMFTVAEYWQNDLGALENYLNKTNFNHSVFDVPLHYQFHAASTQGGGYDMRKLLNGTVVSKHPLKSVTFVDNHDTQPGQSLESTVQTWFKPLAYAFILTRESGYPQVFYGDMYGTKGDSQREIPALKHKIEPILKARKQYAYGAQHDYFDHHDIVGWTREGDSSVANSGLAALITDGPGGAKRMYVGRQNAGETWHDITGNRSEPVVINSEGWGEFHVDGGSVSIYVQR

SEQ ID NO: 31121 - protein, 481 aa, Synthetic construct
LNGTLMQYFEWYMPNDGQHWRRLQNDSAYLAEHGITAVWIPPAYKGTSQADVGYGAYDLYDLGEFHQKGTVRTKYGTKGELQSAIKSLHSRDINVYGDVVINHKGGADATEDVTAVEVDPADRNRVISGEHLIKAWTHFHFPGRGSTYSDFKWHWYHFDGTDWDESRKLNRIYKFQGKAWDWEVSNENGNYDYLMYADIDYDHPDVAAEIKRWGTWYANELQLDGFRLDAVKHIKFSFLRDWVNHVREKTGKEMFTVAEYWQNDLGALENYLNKTNFNHSVFDVPLHYQFHAASTQGGGYDMRKLLNGTVVSKHPLKSVTFVDNHDTQPGQSLESTVQTWFKPLAYAFILTRESGYPQVFYGDMYGTKGDSQREIPALKHKIEPILKARKQYAYGAQHDYFDHHDIVGWTREGDSSVANSGLAALITDGPGGAKRMYVGRQNAGETWHDITGNRSEPVVINSEGWGEFHVPGGSVSIYVQR

SEQ ID NO: 31122 - protein, 481 aa, Synthetic construct
LNGTLMQYFEWYMPNDGQHWRRLQNDSAYLAEHGITAVWIPPAYKGTSQADVGYGAYDLYDLGEFHQKGTVRTKYGTKGELQSAIKSLHSRDINVYGDVVINHKGGADATEDVTAVEVDPADRNRVISGEHLIKAWTHFHFPGRGSTYSDFKWHWYHFDGTDWDESRKLNRIYKFQGKAWDWEVSNENGNYDYLMYADIDYDHPDVAAEIKRWGTWYANELQLDGFRLDAVKHIKFSFLRDWVNHVREKTGKEMFTVAEYWQNDLGALENYLNKTNFNHSVFDVPLHYQFHAASTQGGGYDMRKLLNGTVVSKHPLKSVTFVDNHDTQPGQSLESTVQTWFKPLAYAFILTRESGYPQVFYGDMYGTKGDSQREIPALKHKIEPILKARKQYAYGAQHDYFDHHDIVGWTREGDSSVANSGLAALITDGPGGAKRMYVGRQNAGETWHDITGNRSEPVVINSEGWGEFHVTGGSVSIYVQR

SEQ ID NO: 31123 - protein, 481 aa, Bacillus licheniformis
LNGTLMQYFEWYMPNDGQHWRRLQNDSAYLAEHGITAVWIPPAYKGTSQADVGYGAYDLYDLGEFHQKGTVRTKYGTKGELQSAIKSLHSRDINVYGDVVINHKGGADATEDVTAVEVDPADRNRVISGEHLIKAWTHFHFPGRGSTYSDFKWHWYHFDGTDWDESRKLNRIYKFQGKAWDWEVSNENGNYDYLMYADIDYDHPDVAAEIKRWGTWYANELQLDGFRLDAVKHIKFSFLRDWVNHVREKTGKEMFTVAEYWQNDLGALENYLNKTNFNHSVFDVPLHYQFHAASTQGGGYDMRKLLNGTVVSKHPLKSVTFVDNHDTQPGQSLESTVQTWFKPLAYAFILTRESGYPQVFYGDMYGTKGDSQREIPALKHKIEPILKARKQYAYGAQHDYFDHWDIVGWTREGDSSVANSGLAALITNGPGGAKRMYVGRQNAGETWHDITGNRSEPVVINSEGWGEFHVNGGSVSIYVQR

SEQ ID NO: 31124 - protein, 481 aa, Bacillus licheniformis
LNGTLMQYFEWYXPNDGQHWKRLQNDSAYLAEHGITAVWIPPAYKGTSQADVGYGAYDLYDLGEFHQKGTVRTKYGTKGELQSAIKSLHSRDINVYGDVVINHKGGADATEDVTAVEVDPADRNRVISGEHLIKAXTHFHFPGRGSTYSDFKWHWYHFDGTDWDESRKLNRIYKFQGKAWDWEVSNENGNYDYLXYADIDYDHPDVAAEIKRWGTWYANELQLDGFRLDAVKHIKFSFLRDWVNHVREKTGKEMFTVAEYWQNDLGALENYLNKTNFNHSVFDVPLHYQFHAASTQGGGYDMRKLLNGTVVSKHPLKSVTFVDNHDTQPGQSLESTVQTWFKPLAYAFILTRESGYPQVFYGDMYGTKGDSQREIPALKHKIEPILKARKQYAYGAQHDYFDHHDIVGWTREGDSSVANSGLAALITDGPGGAKRMYVGRQNAGETWHDITGNRSEPVVINSEGWGEFHVNGGSVSIYVQR

SEQ ID NO: 31125 - protein, 481 aa, Bacillus licheniformis
LNGTLMQYFEWYMPNDGQHWRRLQNDSAYLAEHGITAVWIPPAYKGTSQADVGYGAYDLYDLGEFHQKGTVRTKYGTKGELQSAIKSLHSRDINVYGDVVINHKGGADATEDVEAVEVDPADRNRVISGEHLIKAWTHFHFPGRGSTYSDFKWHWYHFDGTDWDESRKLNRIYKFQGKAWDWEVSNENGNYDYLMYADIDYDHPDVAAEIKRWGTWYANELQLDGFRLDAVKHIKFSFLRDWVNHVREKTGKEMFTVAEYWQNDLGALENYLNKTNFNHSVFDVPLHYQFHAASTQGGGYDMRKLLNGTVVSKHPLKSVTFVDNHDTQPGQSLESTVQTWFKPLAYAFILTRESGYPQVFYGDMYGTKGDSQREIPALKHKIEPILKARKQYAYGAQHDYFDHHDIVGWTREGDSSVANSGLAALITDGPGGAKRMYVGRQNAGETWHDITGNRSEPVVINSEGWGEFHVNGGSVSIYVQR

SEQ ID NO: 31126 - protein, 481 aa, Synthetic construct
LNGTLMQYFEWYMPNDGQHWRRLQNDSAYLAEHGITAVWIPPAYKGTSQADVGYGAYDLYDLGEFHQKGTVRTKYGTKGELQSAIKSLHSRDINVYGDVVINHKGGADATEDVTAVEVDPADRNRVISGEHLIKAWTHFHFPGRGSTYSDFKWHWYHFDGTDWDESRKLNRIYKFQGKAWDWEVSNENGNYDYLMYADIDYDHPDVAAEIKRWGTWYANELQLDGFRLDAVKHIKFSFLRDWVNHVREKTGKEMFTVAEYWQNDLGALENYLNKTNFNHSVFDVPLHYQFHAASTQGGGYDMRKLLNGTVVSKHPLKSVTFVDNHDTQPGQSLESTVQTWFKPLAYAFILTRESGYPQVFYGDMYGTKGDSQREIPALKHKIEPILKARKQYAYGAQHDYFDHHDIVGWTREGDSSVANSGLAALITDGPGGAKRMYVGRQNAGETWHDITGNRSEPVVINSEGWGEFHVGGGSVSIYVQR

SEQ ID NO: 31127 - protein, 481 aa, Bacillus sp. SCSIO 15121
LNGTLMQYFEWYMPNDGQHWKRLQNDSAYLAEHGITAVWIPPAYKGTSQDDVGYGAYDLYDLGEFHQKGTVRTKYGTKGELQSAINSLHSRDINVYGDVVINHKGGADATEDVTAVEVDPADRNRVTSGEQRIKAWTHFQFPGRGSTYSDFKWHWYHFDGTDWDESRKLNRIYKFQGKAWDWEVSNENGNYDYLMYADIDYDHPDVTAEIKRWGTWYANELQLDGFRLDAVKHIKFSFLRDWVNHVREKTGKEMFTVAEYWQNDLGALENYLNKTNFNHSVFDVPLHYQFHAASTQGGGYDMRKLLNGTVVSKHPVKAVTFVDNHDTQPGQSLESTVQTWFKPLAYAFILTREAGYPQIFYGDMYGTKGASQREIPALKHKIEPILKARKQYAYGAQHDYFDHHNIVGWTREGDSSVANSGLAALITDGPSGTKRMYVGRQNAGETWHDITGNRSDSVVINAEGWGEFHVNGGSVSIYVQR

SEQ ID NO: 31128 - protein, 481 aa, Synthetic construct
LNGTLMQYFEWYMPNDGQHWRRLQNDSAYLAEHGITAVWIPPAYKGTSQADVGYGAYDLYDLGEFHQKGTVRTKYGTKGELQSAIKSLHSRDINVYGDVVINHKGGADATEDVTAVEVDPADRNRVISGEHLIKAWTHFHFPGRGSTYSDFKWHWYHFDGTDWDESRKLNRIYKFQGKAWDWEVSNENGNYDYLMYADIDYDHPDVAAEIKRWGTWYANELQLDGFRLDAVKHIKFSFLRDWVNHVREKTGKEMFTVAEYWQNDLGALENYLNKTNFNHSVFDVPLHYQFHAASTQGGGYDMRKLLNGTVVSKHPLKSVTFVDNHDTQPGQSLESTVQTWFKPLAYAFILTRESGYPQVFYGDMYGTKGDSQREIPALKHKIEPILKARKQYAYGAQHDYFDHHDIVGWTREGDSSVANSGLAALITDGPGGAKRMYVGRQNAGETWHDITGNRSEPVVINSEGWGEFHVRGGSVSIYVQR

SEQ ID NO: 31129 - protein, 481 aa, Bacillus licheniformis
LNGTLMQYFEWYMPNDGQHWRRLQNDSAYLAEHGITAVWIPPAYKGTSQADVGYGAYDLYDLGEFHQKGTVRTKYGTKGELQSAIKSLHSRDINVYGDVVINHKGGADATEDVTAVEVDPADRNRVISGEHLIKAWTHFHFPGRGSTYSDFKWHWYHFDGTDWDESRKLNRIYKFQGKAWDWEVSNENGNYDYLMYADIDYDHPDVAAEIKRWGTWYANELQLDGFRLDAVKHIKFSFLRDWVNHVREKTGKEMFTVAEYWKNDLGALENYLNKTNFNHSVFDVPLHYQFHAASTQGGGYDMRKLLNGTVVSKHPLKSVTFVDNHDTQPGQSLESTVQTWFKPLAYAFILTRESGYPQVFYGDMYGTKGDSQREIPALKHKIEPILKARKQYAYGAQHDYFDHHDIVGWTREGDSSVANSGLAALITDGPGGAKRMYVGRQNAGETWHDITGNRSEPVVINSEGWGEFHVNGGSVSIYVQR

SEQ ID NO: 31130 - protein, 481 aa, Bacillus licheniformis
LNGTLMQYFEWYMPNDGQHWRRLQNDSAYLAEHGITAVWIPPAYKGTSQADVGYGAYDLYDLGEFHQKGTVRTKYGTKGELQSAIKSLHSRDINVYGDVVINHKGGADATEDVTAVEVDPADRNRVISGEHLIKAWTHFHFPGRGSTYSDFKWHWYHFDGTDWDESRKLNRIYKFQGKAWDWEVSNENGNYDYLMYADIDYDHPDVAAEIKRWGTWYANELQLDGFRLDAVKHIKFQFLRDWVNHVREKTGKEMFTVAEYWQNDLGALENYLNKTNFNHSVFDVPLHYQFHAASTQGGGYDMRKLLNGTVVSKHPLKSVTFVDNHDTQPGQSLESTVQTWFKPLAYAFILTRESGYPQVFYGDMYGTKGDSQREIPALKHKIEPILKARKQYAYGAQHDYFDHHDIVGWTREGDSSVANSGLAALITDGPGGAKRMYVGRQNAGETWHDITGNRSEPVVINSEGWGEFHVNGGSVSIYVQR

SEQ ID NO: 31131 - protein, 481 aa, Bacillus licheniformis
LNGTLMQYFEWYMPNDGQHWRRLQNDSAYLAEHGITAVWIPPAYKGTSQADVGYGAYDLYDLGEFHQKGTVRTKYGTKGELQSAIKSLHSRDINVYGDVVINHKGGADATEDVTAVEVDPADRNRVISGEHLIKAWTHFHFPGRGSTYSDFKWHWYHFDGTDWDESRKLNRIYKFQGKAWDWEVSNENGNYDYLMYADIDYDHPDVAAEIKRWGTWYANELQLDGFRLDAVKHIKFSFLRDWVNHVREKTGKEMFTVAEYWQNDLGALENYLNKTNFNHSVFDVPLHYQFHAASTQGGGYDMRKLLNGTVVSKHPLKSVTFVDNHDTQPGQSLESTVQTWFKPLAYAFILTRESGYPQVFYGDMYGTKGDSQREIPALKHKIEPILKARKQYAYGAQHDYFDHHDIVGWTREGDSSVANSGLAALITDGPGGAKWMYVGRQNAGETWHDITGNRSEPVVINSEGWGEFHVNGGSVSIYVQR

SEQ ID NO: 31132 - protein, 481 aa, Synthetic construct
LNGTLMQYFEWYMPNDGQHWRRLQNDSAYLAEHGITAVWIPPAYKGTSQADVGYGAYDLYDLGEFHQKGTVRTKYGTKGELQSAIKSLHSRDINVYGDVVINHKGGADATEDVTAVEVDPADRNRVISGEHLIKAWTHFHFPGRGSTYSDFKWHWYHFDGTDWDESRKLNRIYKFQGKAWDWEVSNENGNYDYLMYADIDYDHPDVAAEIKRWGTWYANELQLDGFRLDAVKHIKFSFLRDWVNHVREKTGKEMFTVAEYWQNDLGALENYLNKTNFNHSVFDVPLHYQFHAASTQGGGYDMRKLLNGTVVSKHPLKSVTFVDNHDTQPGQSLESTVQTWFKPLAYAFILTRESGYPQVFYGDMYGTKGDSQREIPALKHKIEPILKARKQYAYGAQHDYFDHHDIVGWTREGDSSVANSGLAALITDGPGGAKRMYVGRQNAGETWHDITGNRSEPVVINSEGWGEFHVAGGSVSIYVQR

SEQ ID NO: 31133 - protein, 481 aa, Bacillus licheniformis
LNGTLMQYFEWYMPNDGQHWRRLQNDSAYLAEHGITAVWIPPAYKGTSQADVGYGAYDLYDLGEFHQKGTVRTKYGTKGELQSAIKSLHSRDINVYGDVVINHKGGADATEDVTAVEVDPADRNRVISGEHLIKAWTHFHFPGRGSTYSDFKWHWYHFDGTDWDESRKLNRIYKFQGKAWDWEVSNENGNYDYLMYADIDYDHPDVAAEIKRWGTWYANELQLDGFRLDAVKHIKFSFLRDWVNHVREKTGKEMFTVAEYWQNDLGALENYLNKTNFNHSVFDVPLHYQFHAASTQGGGYDMRKLLNGTVVSKHPLKSVTFVDNHDTQPGQSLESTVQTWFKPLAYAFILTRESGYPQVFYGDMYGTKGDSQREIPALKHKIEPILKARKQYAYGAQHDYFDHHDIVGWTREGDSSVXNSGLAALITDGPGGAKRMYVGRQNAGETWHDITGNRSEPVVINSEGWGEFHVNGGSVSIYVQR

SEQ ID NO: 31134 - protein, 481 aa, Bacillus licheniformis
LNGTLMQYFEWYMPNDGQHWRRLQNDSAYLAEHGITAVWIPPAYKGTSQADVGYGAYDLYDLGEFHQKGTVRTKYGTKGELQSAIKSLHSRDINVYGDVVINHKGGADATEDVTAVEVDPADRNRVISGEHLIKAWTHFHFPGRGSTYSDFKWHWYHFDGTDWDESRKLNRIYKFQGKAWDWEVSNENGNYDYLMYADIDYDHPDVAAEIKRWGTWYANELQLDGFRLDAVKHIKFSFLRDWVNHVREKTGKEMFTVAEYWQNDLGALENYLNLTNFNHSVFDVPLHYQFHAASTQGGGYDMRKLLNGTVVSKHPLKSVTFVDNHDTQPGQSLESTVQTWFKPLAYAFILTRESGYPQVFYGDMYGTKGDSQREIPALKHKIEPILKARKQYAYGAQHDYFDHHDIVGWTREGDSSVANSGLAALITDGPGGAKRMYVGRQNAGETWHDITGNRSEPVVINSEGWGEFHVNGGSVSIYVQR

SEQ ID NO: 31135 - protein, 481 aa, Synthetic construct
LNGTLMQYFEWYMPNDGQHWRRLQNDSAYLAEHGITAVWIPPAYKGTSQADVGYGAYDLYDLGEFHQKGTVRTKYGTKGELQSAIKSLHSRDINVYGDVVINHKGGADATEDVTAVEVDPADRNRVISGEHLIKAWTHFHFPGRGSTYSDFKWHWYHFDGTDWDESRKLNRIYKFQGKAWDWEVSNENGNYDYLMYADIDYDHPDVAAEIKRWGTWYANELQLDGFRLDAVKHIKFSFLRDWVNHVREKTGKEMFTVAEYWQNDLGALENYLNKTNFNHSVFDVPLHYQFHAASTQGGGYDMRKLLXGTVVSKHPLKSVTFVDNHDTQPGQSLESTVQTWFKPLAYAFILTRESGYPQVFYGDMYGTKGDSQREIPALKHKIEPILKARKQYAYGAQHDYFDHHDIVGWTREGDSSVANSGLAALITDGPGGAKRMYVGRQNAGETWHDITGNRSEPVVINSEGWGEFHVXGGSVSIYVQR

SEQ ID NO: 31136 - protein, 481 aa, Bacillus licheniformis
LNGTLMQYFEWYMPNDGQHWRRLQNDSAYLAEHGITAVWIPPAYKGTSQADVGYGAYDLYDLGEFHQKGTVRTKYGTKGELQSAIKSLHSRDINVYGDVVINHKGGADATEDVDAVEVDPADRNRVISGEHLIKAWTHFHFPGRGSTYSDFKWHWYHFDGTDWDESRKLNRIYKFQGKAWDWEVSNENGNYDYLMYADIDYDHPDVAAEIKRWGTWYANELQLDGFRLDAVKHIKFSFLRDWVNHVREKTGKEMFTVAEYWQNDLGALENYLNKTNFNHSVFDVPLHYQFHAASTQGGGYDMRKLLNGTVVSKHPLKSVTFVDNHDTQPGQSLESTVQTWFKPLAYAFILTRESGYPQVFYGDMYGTKGDSQREIPALKHKIEPILKARKQYAYGAQHDYFDHHDIVGWTREGDSSVANSGLAALITDGPGGAKRMYVGRQNAGETWHDITGNRSEPVVINSEGWGEFHVNGGSVSIYVQR

SEQ ID NO: 31137 - protein, 481 aa, Synthetic construct
LNGTLMQYFEWYMPNDGQHWRRLQNDSAYLAEHGITAVWIPPAYKGTSQADVGYGAYDLYDLGEFHQKGTVRTKYGTKGELQSAIKSLHSRDINVYGDVVINHKGGADATEDVTAVEVDPADRNRVISGEHLIKAWTHFHFPGRGSTYSDFKWHWYHFDGTDWDESRKLNRIYKFQGKAWDWEVSNENGNYDYLMYADIDYDHPDVAAEIKRWGTWYANELQLDGFRLDAVKHIKFSFLRDWVNHVREKTGKEMFTVAEYWQNDLGALENYLNKTNFNHSVFDVPLHYQFHAASTQGGGYDMRKLLNGTVVSKHPLKSVTFVDNHDTQPGQSLESTVQTWFKPLAYAFILTRESGYPQVFYGDMYGTKGDSQREIPALKHKIEPILKARKQYAYGAQHDYFDHHDIVGWTREGDSSVANSGLAALITDGPGGAKRMYVGRQNAGETWHDITGNRSEPVVINSEGWGEFHVWGGSVSIYVQR

SEQ ID NO: 31138 - protein, 475 aa, Bacillus sp.
HHDGTNGTIMQYFEWNVPNDGQHWNRLHNNAQNLKNAGITAIWIPPAWKGTSQNDVGYGAYDLYDLGEFNQKGTVRTKYGTKAELERAIRSLKANGIQVYGDVVMNHKGGADFTERVQAVEVNPQNRNQEVSGTYQIEAWTGFNFPGRGNQHSSFKWRWYHFDGTDDRIYKFRGKAWDWEVDTENGNYDYLMYADVDMDHPEVINELNRWGVWYANTLNLDGFRLDAVKHIKFSFMRDWLGHVRGQTGKNLFAVAEYWKNDLGALENYLSKTNWTMSAFDVPLHYNLYQASNSSGNYDMRNLLNGTLVQRHPSHAVTFVDNHDTQPGEALESFVQGWFKPLAYATILTREQGYPQVFYGDYYGIPSDGVPSYRQQIDPLLKARQQYAYGRQHDYFDHWDVIGWTREGNASHPNSGLATIMSDGPGGSKWMYVGRQKAGEVWHDMTGNRSGTVTINQDGWGHFFVNGGSVSVWVKR

SEQ ID NO: 31139 - protein, 480 aa, Bacillus sp. (in: firmicutes)
HHDGTNGTIMQYFEWNVPNDGQHWNRLHNNAQNLKNAGITAIWIPPAWKGTSQNDVGYGAYDLYDLGEFNQKGTVRTKYGTKAELERAIRSLKANGIQVYGDVVMNHKGGADFTERVQAVEVNPQNRNQEVSGTYQIEAWTGFNFPGRGNQHSSFKWRWYHFDGTDWDQQLNRIYKFRGKAWDWEVDTENGNYDYLMYADVDMDHPEVINELNRWGVWYANTLNLDGFRLDAVKHIKFSFMRDWLGHVRGQTGKNLFAVAEYWKNDLGALENYLSKTNWTMSAFDVPLHYNLYQASNSSGNYDMRNLLNGTLVQRHPSHAVTFVDNHDTQPGEALESFVQGWFKPLAYATILTREQGYPQVFYGDYYGIPSDGVPSYRQQIDPLLKARQQYAYGRQHDYFDHWDVIGWTREGNASHPNSGLATIMSDGPGGSKWMYVGRQKAGEVWHDMTGNRSGTVTINQDGWGHFFVNGGSVSVWVKR

SEQ ID NO: 31140 - protein, 480 aa, Bacillus sp.
APINETMMQYFEWDLPNDGTLWNRLHNNAQNLKNAGITALWLPPAYKGTSQSDVGYGVYDLYDLGEFNQKGTIRTKYGTKTQYIQAIQAAKAAGMQVYADVVFNHKAGADQTEFVDAVEVDPSNRNQEVSGTYQIEAWTKFDFPGRGNTYSSFKWRWYHFDGTDWDESRKLNRIYKFRGKAWDWEVDTENGNYDYLMFADLDMDHPEVVTELKNWGTWYVNTTNIDGFRLDAVKHIKFSFMRDWLTYVRNQTGKNLFAVGEFWKNDLGALENYITKTNGSMSLFDAPLHNNFYTASKSSGYFDMRNLLNGTLVQRHPSHAVTLVDNHDTQPGQSLQSWVEPWFKPLAYAFILTRQEGYPCVFYGDYYGIPSDGVPGLKSKIDPLLIARRDYAYGTQRDYIDHQDIIGWTREGIDTKPNSGLAALITDGPGGSKWMYVGKKHAGKVFYDLTGNRSDTVTINADGWGEFKVNGGSVSIWVAK

SEQ ID NO: 31141 - protein, 480 aa, Bacillus sp.
APINETMMQYFEWDLPNDGTLWNRLHNNAQNLKNAGITALWLPPAYKGTSQSDVGYGVYDLYDLGEFNQKGTIRTKYGTKTQYIQAIQAAKAAGMQVYADVVFNHKAGADGTEFVDAVEVDPSNRNQEVSGTYQIEAWTKFDFPGRGNTYSSFKWRWYHFDGTDWDESRKLNRIYKFRGKAWDWEVDTENGNYDYLMFADLDMDHPEVVTELKNWGTWYVNTTNIDGFRLDAVKHIKFSFMRDWLGHVRGQTGKNLFAVGEFWKNDLGALENYITKTNGSMSLFDAPLHNNFYTASKSSGYFDMRNLLNGTLVQRHPSHAVTLVDNHDTQPGQSLQSWVEPWFKPLAYAFILTRQEGYPCVFYGDYYGIPSDGVPGLKSKIDPLLIARRDYAYGTQRDYIDHQDIIGWTREGIDTKPNSGLAALITDGPGGSKWMYVGKKHAGKVFYDLTGNRSDTVTINADGWGEFKVNGGSVSIWVAK

SEQ ID NO: 31142 - protein, 486 aa, Geobacillus stearothermophilus
AXXNGTMMQYFEWYLPNDGQHWXRLXNDAXNLSSXGITALWIPPAYKGTSQSDVGYGAYDLYDLGEFNQKGTVRTKYGTKAQLXXAIXALHAXGIQVYGDVVMNHKGGADGTEXVXAVEVNPSDRNQEISGXYXIXAWTKFDFPGRGNTYSXFKWRWYHFDGVDWDESRKLNXRIYKFRGXGKAWDWEVDTENGNYDYLMYADIDMDHPEVVXELKNWGXWYXNTLNLDGFRLDAVKHIKFSFXXDWLSHVRSXTGKXLFTVGEYWXXDIGALENYLXKTNWXMSLFDVPLHYNFYXASKSGGAYDMRXLLXGTLVXXHPXXAVTFVDNHDTQPGQALESWVDXWFKPLAYAFILTREXGYPXVFYGDYYGIPQYNXXXIPSLKSKIDPLLXARRXYAYGTQHDYLDHXDIIGWTREGXTSKPNSGLAALITDGPGGSKWMYVGKQXAGXVWYDLTGNRSDTVTINSDGWGEFXVNGGSVSVWVXR

SEQ ID NO: 31143 - protein, 485 aa, Bacillus sp.
HHDGTNGTIMQYFEWNVPNDGQHWNRLHNNAQNLKNAGITAIWIPPAWKGTSQNDVGYGAYDLYDLGEFNQKGTVRTKYGTKAELERAIRSLKANGIQVYGDVVMNHKGGADFTERVQAVEVNPQNRNQEVSGTYQIEAWTGFNFPGRGNQHSSFKWRWYHFDGTDWDQSRQLANRIYKFRGDGKAWDWEVDTENGNYDALMYADVDMDHPEVINELNRWGVWYANTLNLDGFRLDAVKHIKFSFMRDWLGHVRGQTGKNLFAVAEYWKNDLGALENYLSKTNWTMSAFDVPLHYNLYQASNSSGNYDMRNLLNGTLVQRHPSHAVTFVDNHDTQPGEALESFVQGWFKPLAYATILTREQGYPQVFYGDYYGIPSDGVPSYRQQIDPLLKARQQYAYGRQHDYFDHWDVIGWTREGNASHPNSGLATIMSDGPGGSKWMYVGRQKAGEVWHDMTGNRSGTVTINQDGWGHFFVNGGSVSVWVKR

SEQ ID NO: 31144 - protein, 485 aa, Bacillus sp.
HHDGTNGTIMQYFEWNVPNDGQHWNRLHNNAQNLKNAGITAIWIPPAWKGTSQNDVGYGAYDLYDLGEFNQKGTVRTKYGTKAELERAIRSLKANGIQVYGDVVMNHKGGADFTERVQAVEVNPQNRNQEVSGTYQIEAWTGFNFPGRGNQHSSFKWRWYHFDGTDWDQSRQLANRIYKFRGDGKAWDWEVDTENGNYDYLMYADVDMDHPEVINELNRWGVWYANTLNLDGFRLDAVKHIKFSFMRDWLGHVRGQTLKNLFAVAEYWKNDLGALENYLSKTNWTMSAFDVPLHYNLYQASNSSGNYDMRNLLNGTLVQRHPSHAVTFVDNHDTQPGEALESFVQGWFKPLAYATILTREQGYPQVFYGDYYGIPSDGVPSYRQQIDPLLKARQQYAYGRQHDYFDHWDVIGWTREGNASHPNSGLATIMSDGPGGSKWMYVGRQKAGEVWHDMTGNRSGTVTINQDGWGHFFVNGGSVSVWVKR

SEQ ID NO: 31145 - protein, 485 aa, Bacillus sp.
HHDGTNGTIMQYFEWNVPNDGQHWNRLHNNAQNLKNAGITAIWIPPAWKGTSQNDVGYGAYDLYDLGEFNQKGTVRTKYGTKAELERAIRSLKANGIQVYGDVVMNHKGGADFTERVQAVEVNPQNRNQEVSGTYQIEAWTGFNFPGRGNQHSSFKWRWYHFDGTDWDQSRQLANRIYKFRGDGKAWDWEVDTENGNYDYLMYADVDMDHPEVINELNRWGVWYANTLNLDGFRLDAVKHIKFSFMRDWLGHVRGQTGVNLFAVAEYWKNDLGALENYLSKTNWTMSAFDVPLHYNLYQASNSSGNYDMRNLLNGTLVQRHPSHAVTFVDNHDTQPGEALESFVQGWFKPLAYATILTREQGYPQVFYGDYYGIPSDGVPSYRQQIDPLLKARQQYAYGRQHDYFDHWDVIGWTREGNASHPNSGLATIMSDGPGGSKWMYVGRQKAGEVWHDMTGNRSGTVTINQDGWGHFFVNGGSVSVWVKR

SEQ ID NO: 31146 - protein, 485 aa, Bacillus sp.
HHDGTNGTIMQYFEWNVPNDGQHWNRLHNNAQNLKNAGITAIWIPPAWKGTSQNDVGYGAYDLYDLGEFNQKGTVRTKYGTKAELERAIRSLKANGIQVYGDVVMNHKGGADFTERVQAVEVNPQNRNQEVSGTYQIEAWTGFNFPGRGNQHSSFKWRWYHFDGTDWDQSRQLANRIYKFRGDGKAWDWEVDTENGNYDYLMYADVDMDHPEVINELNRWGVWYANTLNLDGFRLDAVKHIKFSFMRDWLGHVRGQTGKNLFAVAEYWKNDLGALENYLSKTNWTMSAFDVPLHYNLYQASNSSGNYDMRNLLNGTLVQRHPSHAVTFVDNHDTQPGEALESFVQGWFKPLAYATILTREGGYPQVFYGDYYGIPSDGVPSYRQQIDPLLKARQQYAYGRQHDYFDHWDVIGWTREGNASHPNSGLATIMSDGPGGSKWMYVGRQKAGEVWHDMTGNRSGTVTINQDGWGHFFVNGGSVSVWVKR

SEQ ID NO: 31147 - protein, 485 aa, Bacillus sp.
HHDGTNGTIMQYFEWNVPNDGQHWNRLHNNAQNLKNAGITAIWIPPAWKGTSQNDVGYGAYDLYDLGEFNQKGTVRTKYGTKAELERAIRSLKANGIQVYGDVVMNHKGGADFTERVQAVEVNPQNRNQEVSGTYQIEAWTGFNFPGRGNQHSSFKWRWYHFDGTDWDQSRQLANRIYKFRGDGKAWDWEVDTENGNYDYLMYADVDMDHPEVINELNRWGVWYANTLNLDGFRLDAVKHIKFSFMRDWLGHVRGQTGKNLFAVAEYWKNDLGALENYLSKTNWTMSAFDVPLHYNLYQASNSSGNYDMRNLLNGTLVQRHPSHAVTFVDNHDTQPGEALESFVQGWFKPLAYATILTREQGYPQVFYGDYYTIPSDGVPSYRQQIDPLLKARQQYAYGRQHDYFDHWDVIGWTREGNASHPNSGLATIMSDGPGGSKWMYVGRQKAGEVWHDMTGNRSGTVTINQDGWGHFFVNGGSVSVWVKR

SEQ ID NO: 31148 - protein, 485 aa, Bacillus sp.
HHDGTNGTIMQYFEWNVPNDGQHWNRLHNNAQNLKNAGITAIWIPPAWKGTSQNDVGYGAYDLYDLGEFNQKGTVRTKYGTKAELERAIRSLKANGIQVYGDVVMNHKGGADFTERVQAVEVNPQNRNQEVSGTYQIEAWTGFNFPGRGNQHSSFKWRWYHFDGTDWDQSRQLANRIYKFRGDGKAWDWEVDTENGNYDYLMYADVDMDHPEVINELNRWGVWYANTLNLDGFRLDAVKHIKFSFMRDWLGHVRGQTGKNLFAVAEYWKNDLGALENYLSKTNWTMSAFDVPLHYNLYQASNSSGNYDMRNLLNGTLVQRHPSHAVTFVDNHDTQPGEALESFVQGWFKGLAYATILTREQGYPQVFYGDYYGIPSDGVPSYRQQIDPLLKARQQYAYGRQHDYFDHWDVIGWTREGNASHPNSGLATIMSDGPGGSKWMYVGRQKAGEVWHDMTGNRSGTVTINQDGWGHFFVNGGSVSVWVKR

SEQ ID NO: 31149 - protein, 485 aa, Bacillus sp.
HHDGTNGTIMQYFEWNVPNDGQHWNRLHNNAQNLKNAGITAIWIPPAWKGTSQNDVGYGAYDLYDLGEFNQKGTVRTKYGTKAELERAIRSLKANGIQVYGDVVMNHKGGADFTERVQAVEVNPQNRNQEVSGTYQIEAWTGFNFPGRGNQHSSFKWRWYHFDGTDWDQSRQLANRIYKFRGDGKAWDWEVDTENGNYDYLMYADVDMCHPEVINELNRWGVWYANTLNLDGFRLDAVKHIKFSFMRDWLGHVRGQTGKNLFAVAEYWKNDLGALENYLSKTNWTMSAFDVPLHYNLYQASNSSGNYDMRNLLNGTLVQRHPSHAVTFVDNHDTQPGEALESFVQGWFKPLAYATILTREQGYPQVFYGDYYGIPSDGVPSYRQQIDPLLKARQQYAYGRQHDYFDHWDVIGWTREGNASHPNSGLATIMSDGPGGSKWMYVGRQKAGEVWHDMTGNRSGTVTINQDGWGHFFVNGGSVSVWVKR

SEQ ID NO: 31150 - protein, 485 aa, Bacillus sp.
HTDGTNGTIMQYFEWNVPNDGQHWNRLHNNAQNLKNAGITAIWIPPAWKGTSQNDVGYGAYDLYDLGEFNQKGTVRTKYGTKAELERAIRSLKANGIQVYGDVVMNHKGGADFTERVQAVEVNPQNRNQEVSGTYQIEAWTGFNFPGRGNQHSSFKWRWYHFDGTDWDQSRQLANRIYKFRGDGKAWDWEVDTENGNYDYLMYADVDMDHPEVINELNRWGVWYANTLNLDGFRLDAVKHIKFSFMRDWLGHVRGQTGKNLFAVAEYWKNDLGALENYLSKTNWTMSAFDVPLHYNLYQASNSSGNYDMRNLLNGTLVQRHPSHAVTFVDNHDTQPGEALESFVQGWFKPLAYATILTREQGYPQVFYGDYYGIPSDGVPSYRQQIDPLLKARQQYAYGRQHDYFDHWDVIGWTREGNASHPNSGLATIMSDGPGGSKWMYVGRQKAGEVWHDMTGNRSGTVTINQDGWGHFFVNGGSVSVWVKR

SEQ ID NO: 31151 - protein, 485 aa, Bacillus sp.
HHDGTNGTIMQYFEWNVPNDGQHWNRLHNNAQNLKNAGITAIWIPPAWKGTSQNDVGYGAYDLYDLGEFNQKGTVRTKYGTKAELERAIRSLKANGIQVYGDVVMNHKGGADFTERVQAVEVNPQNRNQEVSGTYQIEAWTGFNFPGRGNQHSSFKWRWYHFDGTDWDQSRQLANRIYKFRGDGKAWDWEVDTENGNYDYLMYADVDMDHPEVINELNRWGVWYANTLNLDGFRLDAVKHIKFSFMRDWLGHVRGQTGKNLFAVAEYWKNDLGALENYLSATNWTMSAFDVPLHYNLYQASNSSGNYDMRNLLNGTLVQRHPSHAVTFVDNHDTQPGEALESFVQGWFKPLAYATILTREQGYPQVFYGDYYGIPSDGVPSYRQQIDPLLKARQQYAYGRQHDYFDHWDVIGWTREGNASHPNSGLATIMSDGPGGSKWMYVGRQKAGEVWHDMTGNRSGTVTINQDGWGHFFVNGGSVSVWVKR

SEQ ID NO: 31152 - protein, 485 aa, Bacillus sp.
HHDGTNGTIMQYFEWNVPNDGQHWNRLHNNAQNLKNAGITAIWIPPAWKGTSQNDVGYGAYDLYDLGEFNQRGTVRTKYGTKAELERAIRSLKANGIQVYGDVVMNHKGGADFTERVQAVEVNPQNRNQEVSGTYQIEAWTGFNFPGRGNQHSSFKWRWYHFDGTDWDQSRQLANRIYKFRGDGKAWDWEVDTENGNYDYLMYADVDMDHPEVINELNRWGVWYANTLNLDGFRLDAVKHIKFSFMRDWLGHVRGQTGKNLFAVAEYWKNDLGALENYLSKTNWTMSAFDVPLHYNLYQASNSSGNYDMRNLLNGTLVQRHPSHAVTFVDNHDTQPGEALESFVQGWFKPLAYATILTREQGYPQVFYGDYYGIPSDGVPSYRQQIDPLLKARQQYAYGRQHDYFDHWDVIGWTREGNASHPNSGLATIMSDGPGGSKWMYVGRQKAGEVWHDMTGNRSGTVTINQDGWGHFFVNGGSVSVWVKR

SEQ ID NO: 31153 - protein, 485 aa, Bacillus sp.
HHDGTNGTIMQYFEWNVPNDGQHWNRLHNNAQNLKNAGITAIWIPPAWKGTSQNDVGYGAYDLYDLGEFNQKGTVRTKYGTKAELERAIRSLKANGIQVYGDVVMNHKGGADFTERVQAVPVNPQNRNQEVSGTYQIEAWTGFNFPGRGNQHSSFKWRWYHFDGTDWDQSRQLANRIYKFRGDGKAWDWEVDTENGNYDYLMYADVDMDHPEVINELNRWGVWYANTLNLDGFRLDAVKHIKFSFMRDWLGHVRGQTGKNLFAVAEYWKNDLGALENYLSKTNWTMSAFDVPLHYNLYQASNSSGNYDMRNLLNGTLVQRHPSHAVTFVDNHDTQPGEALESFVQGWFKPLAYATILTREQGYPQVFYGDYYGIPSDGVPSYRQQIDPLLKARQQYAYGRQHDYFDHWDVIGWTREGNASHPNSGLATIMSDGPGGSKWMYVGRQKAGEVWHDMTGNRSGTVTINQDGWGHFFVNGGSVSVWVKR

SEQ ID NO: 31154 - protein, 485 aa, Bacillus sp.
HHDGTNGTIMQYFEWNVPNDGQHWNRLHNNAQNLKNAGITAIWIPPAWKGTSQNDVGYGAYDLYDLGEFNQKGTVRTKYGTKAELERAIRSLKANGIQVYGDVVMNHKGGADFTERVQAVEVNPQNRNQEVSGTYQIEAWTGFNFPGRGNQHSSFKWRWYHFDGTDWDQSRQLANRIYKFRGDGKAWDWEVDTENGNYDYLMYADVDMDHPEVINELNRWGVWYANTLNLDGFRLDAVKHIAFSFMRDWLGHVRGQTGKNLFAVAEYWKNDLGALENYLSKTNWTMSAFDVPLHYNLYQASNSSGNYDMRNLLNGTLVQRHPSHAVTFVDNHDTQPGEALESFVQGWFKPLAYATILTREQGYPQVFYGDYYGIPSDGVPSYRQQIDPLLKARQQYAYGRQHDYFDHWDVIGWTREGNASHPNSGLATIMSDGPGGSKWMYVGRQKAGEVWHDMTGNRSGTVTINQDGWGHFFVNGGSVSVWVKR

SEQ ID NO: 31155 - protein, 485 aa, Bacillus sp.
HHDGTNGTIMQYFEWNVPNDGQHWNRLHNNAQNLKNAGITAIWIPPAWKGTSQNDVGYGAYDLYDLGEFNQKGTVRTKYGTKAELERAIRSLKANGIQVYGDVVMNHKGGADFTERVQAVEVNPQNRNQEVSGTYQITAWTGFNFPGRGNQHSSFKWRWYHFDGTDWDQSRQLANRIYKFRGDGKAWDWEVDTENGNYDYLMYADVDMDHPEVINELNRWGVWYANTLNLDGFRLDAVKHIKFSFMRDWLGHVRGQTGKNLFAVAEYWKNDLGALENYLSKTNWTMSAFDVPLHYNLYQASNSSGNYDMRNLLNGTLVQRHPSHAVTFVDNHDTQPGEALESFVQGWFKPLAYATILTREQGYPQVFYGDYYGIPSDGVPSYRQQIDPLLKARQQYAYGRQHDYFDHWDVIGWTREGNASHPNSGLATIMSDGPGGSKWMYVGRQKAGEVWHDMTGNRSGTVTINQDGWGHFFVNGGSVSVWVKR

SEQ ID NO: 31156 - protein, 485 aa, Bacillus sp.
HHDGTNGTIMQYFEWNVPNDGQHWNRLHNNAQNLKNAGITAIWIPPAWKGTSQNDVGYGAYDLYDLGEFNQKGTVRTKYGTKAELERAIRSLKANGIQVYGDVVMNHKGGADFTERVQAVEVNPQNRNQEVSGTYQIEAWTGFNFPGRGNQHSSFKWRWYHFDGTDWDQSRQLANRIYKFRGDGKAWDWEVDTENGNYDYLMYADVDMDHPEVINELNRWGVWYANTLNLDGFRLDAVKHIKFSFMRDWLGHVRGQTGKNLFAVAEYWKNDLGALENYLSKTNWTMSAFDVPLHYNLYQASNSSGNYDMRNLLNGTLVQRHPSHAVTFVDNHDTQKGEALESFVQGWFKPLAYATILTREQGYPQVFYGDYYGIPSDGVPSYRQQIDPLLKARQQYAYGRQHDYFDHWDVIGWTREGNASHPNSGLATIMSDGPGGSKWMYVGRQKAGEVWHDMTGNRSGTVTINQDGWGHFFVNGGSVSVWVKR

SEQ ID NO: 31157 - protein, 485 aa, Bacillus sp.
HHDGTNGTIMQYFEWNVPNDGQHWNRLHNNAQNLKNAGITAIWIPPAWKGTSQNDVGYGAYDLYDLGEFNQKGTVRTKYGTKAELERAIRSLKANGIQVYGDVVMNHKGGADFVERVQAVEVNPQNRNQEVSGTYQIEAWTGFNFPGRGNQHSSFKWRWYHFDGTDWDQSRQLANRIYKFRGDGKAWDWEVDTENGNYDYLMYADVDMDHPEVINELNRWGVWYANTLNLDGFRLDAVKHIKFSFMRDWLGHVRGQTGKNLFAVAEYWKNDLGALENYLSKTNWTMSAFDVPLHYNLYQASNSSGNYDMRNLLNGTLVQRHPSHAVTFVDNHDTQPGEALESFVQGWFKPLAYATILTREQGYPQVFYGDYYGIPSDGVPSYRQQIDPLLKARQQYAYGRQHDYFDHWDVIGWTREGNASHPNSGLATIMSDGPGGSKWMYVGRQKAGEVWHDMTGNRSGTVTINQDGWGHFFVNGGSVSVWVKR

SEQ ID NO: 31158 - protein, 485 aa, Bacillus sp.
HHDGTNGTIMQYFEWNVPNDGQHWNRLHNNAQNLKNAGITAIWIPPAWKGTSQNDVGYGAYDLYDLGEFNQKGTVRTKYGTKAELERAIRSLKANGIQVYGDVVMNHKGGADFTERVQAVEVNPQNRNQEVSGTYQIEAWTGFNFPGRGNQHSSFKWRWYHFDGTDWDQSRQLANRIYKFRGDGKAWDWEVDTENGNYDYLMYADVDMDHPEVINELNRWGVWYANTLNLDGFRLDAVKHIKFSFMRDWLGHVRGQTGKNLFAVAEYWKNDLGALENYLSKTNWTMCAFDVPLHYNLYQASNSSGNYDMRNLLNGTLVQRHPSHAVTFVDNHDTQPGEALESFVQGWFKPLAYATILTREQGYPQVFYGDYYGIPSDGVPSYRQQIDPLLKARQQYAYGRQHDYFDHWDVIGWTREGNASHPNSGLATIMSDGPGGSKWMYVGRQKAGEVWHDMTGNRSGTVTINQDGWGHFFVNGGSVSVWVKR

SEQ ID NO: 31159 - protein, 485 aa, Bacillus sp.
HHDGTNGTIMQYFEWNVPNDGQHWNRLHNNAQNLKNAGITAIWIPPAWKGTSQNDVGYGAYDLYDLGEFNQKGTVRTKYGTKAELERAIRSLKANGIQVYGDVVMNHKGCADFTERVQAVEVNPQNRNQEVSGTYQIEAWTGFNFPGRGNQHSSFKWRWYHFDGTDWDQSRQLANRIYKFRGDGKAWDWEVDTENGNYDYLMYADVDMDHPEVINELNRWGVWYANTLNLDGFRLDAVKHIKFSFMRDWLGHVRGQTGKNLFAVAEYWKNDLGALENYLSKTNWTMSAFDVPLHYNLYQASNSSGNYDMRNLLNGTLVQRHPSHAVTFVDNHDTQPGEALESFVQGWFKPLAYATILTREQGYPQVFYGDYYGIPSDGVPSYRQQIDPLLKARQQYAYGRQHDYFDHWDVIGWTREGNASHPNSGLATIMSDGPGGSKWMYVGRQKAGEVWHDMTGNRSGTVTINQDGWGHFFVNGGSVSVWVKR

SEQ ID NO: 31160 - protein, 485 aa, Bacillus sp.
HHDGTNGTIMQYFEWNVPNDGQHWNRLHNNAQNLKNAGITAIWIPPAWKGTSQNDVGYGAYDLYDLGEFNQKGTVRTKYGTKAELERAIRSLKANGIQVYGDVVMNHKGGADFTERVQAVEVNPQNRNQEVSGTYQIEAWTGFNFPGRGNQHSSFKWRWYHFDGTDWDQSRQLANRIYKFRGDGKAWDWEVDTENGNYDYLMYADVDMDHPEVINELNRWGVWYANTLNLDGFRLDAVKHIKFSFMRDWLGHVRGQTGKNLFAVAEYWKNDLGALENYLSKTNWTMSAFDVPLHYNLYQASNSKGNYDMRNLLNGTLVQRHPSHAVTFVDNHDTQPGEALESFVQGWFKPLAYATILTREQGYPQVFYGDYYGIPSDGVPSYRQQIDPLLKARQQYAYGRQHDYFDHWDVIGWTREGNASHPNSGLATIMSDGPGGSKKMYVGRQKAGEVWHDMTGNRSGTVTINQDGWGHFFVNGGSVSVWVKR

SEQ ID NO: 31161 - protein, 485 aa, Bacillus sp.
HHDGTNGTIMQYFEWNVPNDGQHWNRLHNNAQNLKNAGITAIWIPPAWKGTSQNDVGYGAYDLYDLGEFNQKGTVRTKYGTKAELERAIRSLKANGIQVYGDVVMNHKGGAKFTERVQAVEVNPQNRNQEVSGTYQIEAWTGFNFPGRGNQHSSFKWRWYHFDGTDWDQSRQLANRIYKFRGDGKAWDWEVDTENGNYDYLMYADVDMDHPEVINELNRWGVWYANTLNLDGFRLDAVKHIKFSFMRDWLGHVRGQTGKNLFAVAEYWKNDLGALENYLSKTNWTMSAFDVPLHYNLYQASNSSGNYDMRNLLNGTLVQRHPSHAVTFVDNHDTQPGEALESFVQGWFKPLAYATILTREQGYPQVFYGDYYGIPSDGVPSYRQQIDPLLKARQQYAYGRQHDYFDHWDVIGWTREGNASHPNSGLATIMSDGPGGSKWMYVGRQKAGEVWHDMTGNRSGTVTINQDGWGHFFVNGGSVSVWVKR

SEQ ID NO: 31162 - protein, 485 aa, Bacillus sp.
HHDGTNGTIMQYFEWNVPNDGQHWNRLHNNAQNLKNAGITAIWIPPAWKGTSQNDVGYGAYDLYDLGEFNQKGTVRTKYGTKAELERAIRSLKANGIQVYGDVVMNHKGGADFTERVQAVEVNPQNRNQEVSGTYQIEAWTGFNFPGRGNQHSSFKWRWYHFDGTDWDQSRQLANRIYKFRGDGKAWDWEVDTENGNYDYLMYADVDMDHPEVINELNRWGVWYANTLNLDGFRLDAVKHIKFSFMRDLLGHVRGQTGKNLFAVAEYWKNDLGALENYLSKTNWTMSAFDVPLHYNLYQASNSSGNYDMRNLLNGTLVQRHPSHAVTFVDNHDTQPGEALESFVQGWFKPLAYATILTREQGYPQVFYGDYYGIPSDGVPSYRQQIDPLLKARQQYAYGRQHDYFDHWDVIGWTREGNASHPNSGLATIMSDGPGGSKWMYVGRQKAGEVWHDMTGNRSGTVTINQDGWGHFFVNGGSVSVWVKR

SEQ ID NO: 31163 - protein, 485 aa, Bacillus sp.
HHDGTNGTIMQYFMWNVPNDGQHWNRLHNNAQNLKNAGITAIWIPPAWKGTSQNDVGYGAYDLYDLGEFNQKGTVRTKYGTKAELERAIRSLKANGIQVYGDVVMNHKGGADFTERVQAVEVNPQNRNQEVSGTYQIEAWTGFNFPGRGNQHSSFKWRWYHFDGTDWDQSRQLANRIYKFRGDGKAWDWEVDTENGNYDYLMYADVDMDHPEVINELNRWGVWYANTLNLDGFRLDAVKHIKFSFMRDWLGHVRGQTGKNLFAVAEYWKNDLGALENYLSKTNWTMSAFDVPLHYNLYQASNSSGNYDMRNLLNGTLVQRHPSHAVTFVDNHDTQPGEALESFVQGWFKPLAYATILTREQGYPQVFYGDYYGIPSDGVPSYRQQIDPLLKARQQYAYGRQHDYFDHWDVIGWTREGNASHPNSGLATIMSDGPGGSKWMYVGRQKAGEVWHDMTGNRSGTVTINQDGWGHFFVNGGSVSVWVKR

SEQ ID NO: 31164 - protein, 485 aa, Bacillus sp.
HHDGTNGTIMQYFEWNVPNDGQHWNRLHNNAQNLKNAGITAIWIPPAWKGTSQNDVGYGAYDLYDLGEFNQKGTVRTKYGTKAELERAIRSLKANGIQVYGDVVMNHKGGADFTERVQAVEVNPQNRNQEVSGTYQIEAWTGFNFPGRGNQHSSFKWRWYHFDGTDWDQSRQLANRIYKFRGDGKAWDWEVDTENGNYDYLMYADVDMDHPEVINELNRWGVWYANTLNLDGFRLDAVKHIKFSFMRDWLGHVRGQTGKNLFAVAEYWKNDLGALENYLSKTNWTMSAFDVPLHYNLYQASNMSGNYDMRNLLNGTLVQRHPSHAVTFVDNHDTQPGEALESFVQGWFKPLAYATILTREQGYPQVFYGDYYGIPSDGVPSYRQQIDPLLKARQQYAYGRQHDYFDHWDVIGWTREGNASHPNSGLATIMSDGPGGSKWMYVGRQKAGEVWHDMTGNRSGTVTINQDGWGHFFVNGGSVSVWVKR

SEQ ID NO: 31165 - protein, 485 aa, Bacillus sp.
HHDGTNGTIMQYFEWNVPNDGQHWNRLHNNAQNLKNAGITAIWIPPAWKGTSQNDVGYGAYDLYDLGEFNQKGTVRTKYGTKAELERAIRSLKANGIQVYGDVVMNHKGGADFTERVQAVEVNPQNRNQEVSGTYQIEAWTGFNFPGRGNQHSSFKWRWYHFDGTDWDQSRQLANRIYKFRGDGKAWDWEVDTENGNYDYLMYADVDMDHPEVINELNRWGVWYANTLNLDGFRLDAVKHIKFSFMRDWLGHVRGQTGKNLFAVAEYWKNDLGALENYLSKTNWTMSAFDVPLHYNLYQASNSSGNYDMRNLLNGTLVQRHPSHAVTFVDNHDTQPGEALESFVQGWFKPLAYATILTREQGYPQVFYGDYYGIPSDGVPSYRQQIDPLLKARQQYAYGRQHDYFSHWDVIGWTREGNASHPNSGLATIMSDGPGGSKWMYVGRQKAGEVWHDMTGNRSGTVTINQDGWGHFFVNGGSVSVWVKR

SEQ ID NO: 31166 - protein, 485 aa, Bacillus sp.
HHDGTNGTIMQYFEWNVPNDGQHWNRLHNNAQNLKNAGITAIWIPPAWKGTSQNDVGYGAYDLYDLGEFNQKGTVRTKYGTKAELERAIRSLKANGIQVYGDVVMNHKGGADFTERVQAVEVNPQNRNQEVSGTYQIEAWTGFNFPGRGNQHSSFKWRWYHFDGTDWDQSRQLANRIYKFRGDGKAWDWEVDTENGNYDYLMYADVDMDHPEVINELNRWGVWYANTLNLDGFRLDAVKHIKFSFMRDWLGHVRGQTGKNLFAVAEYWKNDLGALENYLSKTNWTMSAFDVPLHYNLYQASNSSGNYDMRNLLNGTLVQRHPSHAVTFVDNHDTQPGEALESFVQGWFKPLAYATILTREQGYPQVFYGDYYGIPSDGVPSYRQQIDPLNKARQQYAYGRQHDYFDHWDVIGWTREGNASHPNSGLATIMSDGPGGSKWMYVGRQKAGEVWHDMTGNRSGTVTINQDGWGHFFVNGGSVSVWVKR

SEQ ID NO: 31167 - protein, 485 aa, Bacillus sp.
HHDGTNGTIMQYFEWNVPNDGQHWNRLHNNAQNLKNAGITAIWIPPAWKGTSQNDVGYGAYDLYDLGEFNQKGTVRTKYGTKAELERAIRSLKANGIQVYGDVVMNHKGGADFTERVQAVEVNPQNRNQEVSGTYQIEAWTGFNFPGRGNQHSSFKWRWYHFDGTDWDQSRQLANRIYKFRGDGKAWDWEVDTENGNYDYLMYADVDMDEPEVINELNRWGVWYANTLNLDGFRLDAVKHIKFSFMRDWLGHVRGQTGKNLFAVAEYWKNDLGALENYLSKTNWTMSAFDVPLHYNLYQASNSSGNYDMRNLLNGTLVQRHPSHAVTFVDNHDTQPGEALESFVQGWFKPLAYATILTREQGYPQVFYGDYYGIPSDGVPSYRQQIDPLLKARQQYAYGRQHDYFDHWDVIGWTREGNASHPNSGLATIMSDGPGGSKWMYVGRQKAGEVWHDMTGNRSGTVTINQDGWGHFFVNGGSVSVWVKR

SEQ ID NO: 31168 - protein, 485 aa, Bacillus sp.
HHDGTNGTIMQYFEWNVPNDGQHWNRLHNNAQNLKNAGITAIWIPPAWKGTSQNDVGYGAYDLYDLGEFNQKGTVRTKYGTKAELERAIRSLKANGIQVYGDVVMNHKGGADFTERVQAVEVNPQNRNQEVSGTYQIEAWTGFNFPGRGNQHSSFKWRWYHFDGTDWDQSRQLANRIYKFRGDGKAWDWEVDTENGNYDYLMYADVDMDHPEVINELNRWGVWYANTLNLDGFRLDAVKHIKFSFMRDWLGHVRGQTGKNLFAVAEYWKNDLGALENYLSKTNWTMSAFDVPLHYNLYQASNSSGNYDMRNLLNGTLVQRHPSHAVTFVDNHDTQPGEALESFVQGWQKPLAYATILTREQGYPQVFYGDYYGIPSDGVPSYRQQIDPLLKARQQYAYGRQHDYFDHWDVIGWTREGNASHPNSGLATIMSDGPGGSKWMYVGRQKAGEVWHDMTGNRSGTVTINQDGWGHFFVNGGSVSVWVKR

SEQ ID NO: 31169 - protein, 485 aa, Bacillus sp.
HHDGTNGTIMQYFEWNVPNDGQHWNRLHNNAQNLKNAGITAIWIPPAWKGTSQNDVGYGAYDLYDLGEFNQKGTVRTKYGTKAELERAIRSLKANGIQVYGDVVMNHKGGADFTERVQAVEVNPQNRNQEVSGTYQIEAWTGFNFPGRGNQHSSFKWRWYHFDGTDWDQSRQLANRIYKFRGDGKAWDWEVDTENGNYDYLMYADVDMDHPEVINELNRWGVWYACTLNLDGFRLDAVKHIKFSFMRDWLGHVRGQTGKNLFAVAEYWKNDLGALENYLSKTNWTMSAFDVPLHYNLYQASNSSGNYDMRNLLNGTLVQRHPSHAVTFVDNHDTQPGEALESFVQGWFKPLAYATILTREQGYPQVFYGDYYGIPSDGVPSYRQQIDPLLKARQQYAYGRQHDYFDHWDVIGWTREGNASHPNSGLATIMSDGPGGSKWMYVGRQKAGEVWHDMTGNRSGTVTINQDGWGHFFVNGGSVSVWVKR

SEQ ID NO: 31170 - protein, 485 aa, Bacillus sp.
HHDGTNGTIMQYFEWNVPNDGQHWNLLHNNAQNLKNAGITAIWIPPAWKGTSQNDVGYGAYDLYDLGEFNQKGTVRTKYGTKAELERAIRSLKANGIQVYGDVVMNHKGGADFTERVQAVEVNPQNRNQEVSGTYQIEAWTGFNFPGRGNQHSSFKWRWYHFDGTDWDQSRQLANRIYKFRGDGKAWDWEVDTENGNYDYLMYADVDMDHPEVINELNRWGVWYANTLNLDGFRLDAVKHIKFSFMRDWLGHVRGQTGKNLFAVAEYWKNDLGALENYLSKTNWTMSAFDVPLHYNLYQASNSSGNYDMRNLLNGTLVQRHPSHAVTFVDNHDTQPGEALESFVQGWFKPLAYATILTREQGYPQVFYGDYYGIPSDGVPSYRQQIDPLLKARQQYAYGRQHDYFDHWDVIGWTREGNASHPNSGLATIMSDGPGGSKWMYVGRQKAGEVWHDMTGNRSGTVTINQDGWGHFFVNGGSVSVWVKR

SEQ ID NO: 31171 - protein, 485 aa, Bacillus sp.
HHDGTNGTIMQYFEWNVPNDGQHWNRLHNNAQNLKNAGITAIWIPPAWKGTSQNDVGYGAYDLYDLGEFNQKGTVRTKYGTKAELERAIRSLKANGIQVYGDVVMNHKGGADFTERVQAVEVNPQNRNQEVDGTYQIEAWTGFNFPGRGNQHSSFKWRWYHFDGTDWDQSRQLANRIYKFRGDGKAWDWEVDTENGNYDYLMYADVDMDHPEVINELNRWGVWYANTLNLDGFRLDAVKHIKFSFMRDWLGHVRGQTGKNLFAVAEYWKNDLGALENYLSKTNWTMSAFDVPLHYNLYQASNSSGNYDMRNLLNGTLVQRHPSHAVTFVDNHDTQPGEALESFVQGWFKPLAYATILTREQGYPQVFYGDYYGIPSDGVPSYRQQIDPLLKARQQYAYGRQHDYFDHWDVIGWTREGNASHPNSGLATIMSDGPGGSKWMYVGRQKAGEVWHDMTGNRSGTVTINQDGWGHFFVNGGSVSVWVKR

SEQ ID NO: 31172 - protein, 485 aa, Bacillus sp.
HHDGTNGTIMQYFEWNVPNDGQHWNRLHNNAQNLKNAGITAIWIPPAWKGTSQNDVGYGAYDLYDLGEFNQKGTVRTKYGTKAELERAIRSLKANGIQVYGDVVMNHKGGADFTERVQAVEVNPQNRNQEVSGTYQIEAWTGFNFPGRGNQHSSFKWRWYHFDGTDWDQSRQLANRIYKFRGDGKAWDWEVDTENGNYDYLMYADVDMDHPEVINELNRWGVWYANTLNLDGFRLDAVKHIKFSFMRDWLGHVRGQTGKNLFAVAEYWKNDLGALENYLSKTNWTMSAFDVPLHYNLYQASNSSGNYDMRNLLNGTLVQRHPSHAVTFVDNHDTQPGEALESFVQGWFKPLAYATILTREQGYPQVFYGDYYGIPSDGVPSYRQQIDPLLKARQQYAYGRQHDYFDCWDVIGWTREGNASHPNSGLATIMSDGPGGSKWMYVGRQKAGEVWHDMTGNRSGTVTINQDGWGHFFVNGGSVSVWVKR

SEQ ID NO: 31173 - protein, 485 aa, Bacillus sp.
HHDGTNGTIMQYFEWNVPNDGQHWNRLHNNAQNLKNAGITAIWIPPAWKGTSQNDVGYGAYDLYDLGEFNQKGTVRTKYGTKAELERAIRSLKANGIQVYGDVVMNHKGGADFTERVQAVEVNPQNRNQEVSGTYQIEAWTGFNFPGRGNQHSSFKWRWYHFDGTDWDQSRQLANRIYKFRGDGKAWDWEVDTENGNYDYLMYADVDMDHPEVINELNRWGVWYANTLNLDGFRLDAVKHIKFSFMRDWLGHVRGQTGKNLFAVAEYWKNDLGALENYLSKTNWTMSAFDVPLAYNLYQASNSSGNYDMRNLLNGTLVQRHPSHAVTFVDNHDTQPGEALESFVQGWFKPLAYATILTREQGYPQVFYGDYYGIPSDGVPSYRQQIDPLLKARQQYAYGRQHDYFDHWDVIGWTREGNASHPNSGLATIMSDGPGGSKWMYVGRQKAGEVWHDMTGNRSGTVTINQDGWGHFFVNGGSVSVWVKR

SEQ ID NO: 31174 - protein, 485 aa, Bacillus sp.
HHDGTNGTIMQYFEWNVPNDGQHWNRLHNNAQNLKNAGITAIWIPPAWKGTSQNDVGYGAYDLYDLGEFNQKGTVRTKYGTKAELERAIRSLKANGIQVYGDVVMNHKGGADFTERVQAVEVNPQNRNQEVSGTLQIEAWTGFNFPGRGNQHSSFKWRWYHFDGTDWDQSRQLANRIYKFRGDGKAWDWEVDTENGNYDYLMYADVDMDHPEVINELNRWGVWYANTLNLDGFRLDAVKHIKFSFMRDWLGHVRGQTGKNLFAVAEYWKNDLGALENYLSKTNWTMSAFDVPLHYNLYQASNSSGNYDMRNLLNGTLVQRHPSHAVTFVDNHDTQPGEALESFVQGWFKPLAYATILTREQGYPQVFYGDYYGIPSDGVPSYRQQIDPLLKARQQYAYGRQHDYFDHWDVIGWTREGNASHPNSGLATIMSDGPGGSKWMYVGRQKAGEVWHDMTGNRSGTVTINQDGWGHFFVNGGSVSVWVKR

SEQ ID NO: 31175 - protein, 485 aa, Bacillus sp.
HHDGTNGTIMQYFEWNVPNDGQHWNRLHNNAQNLKNAGITAIWIPPAWKGTSQNDVGYGAYDLYDLGEFNQKGTVRTKYGTKAELERAIRSLKANGIQVYGDVVMNHKGGADFTERVQAVEVNPQNRNQEVSGTYQIEAWTGFNFPGRGNQHSSFKWRWEHFDGTDWDQSRQLANRIYKFRGDGKAWDWEVDTENGNYDYLMYADVDMDHPEVINELNRWGVWYANTLNLDGFRLDAVKHIKFSFMRDWLGHVRGQTGKNLFAVAEYWKNDLGALENYLSKTNWTMSAFDVPLHYNLYQASNSSGNYDMRNLLNGTLVQRHPSHAVTFVDNHDTQPGEALESFVQGWFKPLAYATILTREQGYPQVFYGDYYGIPSDGVPSYRQQIDPLLKARQQYAYGRQHDYFDHWDVIGWTREGNASHPNSGLATIMSDGPGGSKWMYVGRQKAGEVWHDMTGNRSGTVTINQDGWGHFFVNGGSVSVWVKR

SEQ ID NO: 31176 - protein, 485 aa, Bacillus sp.
HHDGTNGTIMQYFEWNVPNDGQHWNRLHNNAQNLKNAGITAIWIPPAWKGTSQNDVGYGAYDLYDLGEFNQKGTVRTKYGTKAELERAIRSLKANGIQVYGDVVMNHKGGADFTERVQAVEVNPQNRNQEVSGTYQIEAWTGFNFPGRGNQHSSFKWRWYHFDGTDWDQSRQLANRIYKFRGDGKAWDWEVDTENGNYDYLMYADVDMDHPEVINELNRWGVWYANTLNLDGFRLDAVKHIKFSFMRDWLGHVRGQTGKNLFAVAEYWKNDLGALENYLSKTNWTMSAFDVPLHYNLYQASNSSGNYDMRNLLNGTLVQRHPSHAVTFVDNHDTQPGEALESFVQGWFKPLAYATILTREQGYPQVFYIDYYGIPSDGVPSYRQQIDPLLKARQQYAYGRQHDYFDHWDVIGWTREGNASHPNSGLATIMSDGPGGSKWMYVGRQKAGEVWHDMTGNRSGTVTINQDGWGHFFVNGGSVSVWVKR

SEQ ID NO: 31177 - protein, 485 aa, Bacillus sp.
HHDGTNGTIMQYFEWNVPNDGQHWNRLHNNAQNLKNAGITAIWIPPAWKGTSQNDVGYGAYDLYDLGEFNQKGTVRTKYGTKAELERAIRSLKANGIQVYGDVVMNHKGGADFTERVQAVEVNPQNRNQEVSGTYQIEAWTGFNFPGRGNQHSSFKWRWYHFDGTDWDQSRQLANRIYKFRGDGKEWDWEVDTENGNYDYLMYADVDMDHPEVINELNRWGVWYANTLNLDGFRLDAVKHIKFSFMRDWLGHVRGQTGKNLFAVAEYWKNDLGALENYLSKTNWTMSAFDVPLHYNLYQASNSSGNYDMRNLLNGTLVQRHPSHAVTFVDNHDTQPGEALESFVQGWFKPLAYATILTREQGYPQVFYGDYYGIPSDGVPSYRQQIDPLLKARQQYAYGRQHDYFDHWDVIGWTREGNASHPNSGLATIMSDGPGGSKWMYVGRQKAGEVWHDMTGNRSGTVTINQDGWGHFFVNGGSVSVWVKR

SEQ ID NO: 31178 - protein, 485 aa, Bacillus sp.
HHDGTNGTIMQYFEWNVPNDGQHWNRLHNNAQNLKNAGITAIWIPPAWKGTSQNDVGYGAYDLYDLGEFNQKGTVRTKYGTKAELERAIRSLKANGIQVYGDVVMNHKGGADFTERVQAVEVNPQNRNQEVSGTYQIEAWTGFNFPGRGNQHSSFKWRWYHFDGTDWDQSRQLANRIYKFRGDGKAWDWEVDTENGNYDYLMYADVDMDHPEVINELNRWGVWYANTLNLDGFRLDAVKHIKFSFMRDWLGHVRGQTGKNLFAVAEYWKNDLGALENYLSKTNWTMSAFDVPLHYNLYQASNSSGNYDMRNLLNGTLVQRHPSHAVTFVDNHDTQPGEALESFVQGWFKPLAYATILTREQGYPQVFYGDYYGIPSDGVPSYRQQIDPLLKARQQYAYGRQHDYFTHWDVIGWTREGNASHPNSGLATIMSDGPGGSKWMYVGRQKAGEVWHDMTGNRSGTVTINQDGWGHFFVNGGSVSVWVKR

SEQ ID NO: 31179 - protein, 485 aa, Bacillus sp.
HHDGTNGTIMQYFEWNVPNDGQHWNRLHNNAQNLKNAGITAIWIPPAWKGTSQNDVGYGAYDLYDLGEFNQKGTVRTKYGTKAELERAIRSLKANGILVYGDVVMNHKGGADFTERVQAVEVNPQNRNQEVSGTYQIEAWTGFNFPGRGNQHSSFKWRWYHFDGTDWDQSRQLANRIYKFRGDGKAWDWEVDTENGNYDYLMYADVDMDHPEVINELNRWGVWYANTLNLDGFRLDAVKHIKFSFMRDWLGHVRGQTGKNLFAVAEYWKNDLGALENYLSKTNWTMSAFDVPLHYNLYQASNSSGNYDMRNLLNGTLVQRHPSHAVTFVDNHDTQPGEALESFVQGWFKPLAYATILTREQGYPQVFYGDYYGIPSDGVPSYRQQIDPLLKARQQYAYGRQHDYFDHWDVIGWTREGNASHPNSGLATIMSDGPGGSKWMYVGRQKAGEVWHDMTGNRSGTVTINQDGWGHFFVNGGSVSVWVKR

SEQ ID NO: 31180 - protein, 485 aa, Bacillus sp.
HHDGTNGTIMQYFEWNVPNDGQHWNRLHNNAQNLKNAGITAIWIPPAWKGTSQNDVGYGAYDLYDLGEFNQKGTVRTKYGTKAELERAIRSLKANGIQVYGDVVMNHKGGADFTERVQAVEVNPQNRNQEVSGTYQIEAWTGFNFPGRGNQHSSFKWRWYHFDGTDWDQSRQLANRIYKFRGDGKAWDWEVDTENGNYDYLMYADVDMDHPEVINELNRWGVWYANTLNLDGFRLDAVKHIKFSFMRDWLGHVRGQTGKNLFAVAEYWKNDLGALENYLSKTNWTMSAFDVPLHYNLPQASNSSGNYDMRNLLNGTLVQRHPSHAVTFVDNHDTQPGEALESFVQGWFKPLAYATILTREQGYPQVFYGDYYGIPSDGVPSYRQQIDPLLKARQQYAYGRQHDYFDHWDVIGWTREGNASHPNSGLATIMSDGPGGSKWMYVGRQKAGEVWHDMTGNRSGTVTINQDGWGHFFVNGGSVSVWVKR

SEQ ID NO: 31181 - protein, 485 aa, Bacillus sp.
HHDGTNGTIMQYFEWNVPNDGQHWNRLHNNAQNLKNAGITAIWIPPAWKGTSQNDVGYGAYDLYDLGEFNQKGTVRTKYGTKAELERAIRSLKANGIQVYGDVVMNHKGGADFTERVQAVEVNPQNRNQEVSGTYQIEAWTGFNFPGRGNQHSSFKWRWYHFDGTDWDQSRQLANRIYKFRGDGKAWDWEVDTENGNYDYLMYADVDMDHPEVINELNRWGVWYANTLNLDGFRLDAVKHIKFSFMRDWLGHVRGQTGKNLFAVAEYWKNDLGALENYLSKTNWTMSAFDVPLHYNLYQASNSSGNYDMRNLLNGTLVQRHPSHAVTFADNHDTQPGEALESFVQGWFKPLAYATILTREQGYPQVFYGDYYGIPSDGVPSYRQQIDPLLKARQQYAYGRQHDYFDHWDVIGWTREGNASHPNSGLATIMSDGPGGSKWMYVGRQKAGEVWHDMTGNRSGTVTINQDGWGHFFVNGGSVSVWVKR

SEQ ID NO: 31182 - protein, 483 aa, Bacillus sp. (in: firmicutes)
HHDGTNGTIMQYFEWNVPNDGQHWNRLHNNAQNLKNAGITAIWIPPAWKGTSQNDVGYGAYDLYDLGEFNQKGTVRTKYGTKAELERAIRSLKANGIQVYGDVVMNHKGGADFTERVQAVEVNPQNRNQEVSGTYQIEAWTGFNFPGRGNQHSSFKWRWYHFDGTDWDQSLQLANRIYKFRGKAWDWEVDTENGNYDYLMYADVDMDHPEVINELNRWGVWYANTLNLDGFRLDAVKHIKFSFVRDWLGHVRGQTGKNLFAVAEYWKNDLGALENYLSKTNWTMSAFDVPLHYNLYQASNSSGNYDMRNLLNGTLVQRHPSHAVTFVDNHDTQPGEALESFVQGWFKPLAYATILTREQGYPCVFYGDYYGIPSDGVPSYRQQIDPLLKARQQYAYGRQHDYFDHWDVIGWTREGNASHPNSGLATIMSDGPGGSKWMYVGRQKAGEVWHDMTGNRSGTVTINQDGWGHFFVNGGSVSVWVKR

SEQ ID NO: 31183 - protein, 485 aa, Bacillus sp.
HHDGTNGTIMQYFEWNVPNDGQHWNRLHNNAQNLKNAGITAIWIPPAWKGTSQNDVGYGAYDLYDLGEFNQKGTVRTKYGTKAELERAIRSLKANGIQGYGDVVMNHKGGADFTERVQAVEVNPQNRNQEVSGTYQIEAWTGFNFPGRGNQHSSFKWRWYHFDGTDWDQSRQLANRIYKFRGDGKAWDWEVDTENGNYDYLMYADVDMDHPEVINELNRWGVWYANTLNLDGFRLDAVKHIKFSFMRDWLGHVRGQTGKNLFAVAEYWKNDLGALENYLSKTNWTMSAFDVPLHYNLYQASNSSGNYDMRNLLNGTLVQRHPSHAVTFVDNHDTQPGEALESFVQGWFKPLAYATILTREQGYPQVFYGDYYGIPSDGVPSYRQQIDPLLKARQQYAYGRQHDYFDHWDVIGWTREGNASHPNSGLATIMSDGPGGSKWMYVGRQKAGEVWHDMTGNRSGTVTINQDGWGHFFVNGGSVSVWVKR

SEQ ID NO: 31184 - protein, 485 aa, Bacillus sp.
HHDGTNGTIMQYFEWNVPNDGQHWNRLHNNAQNLKNAGITAIWIPPAWKGTSQNDVGYGAYDLYDLGEFNQKGTVRTKYGTKAELERAIRSLKANGIQVYGDVVMNHKGGADFTERVQAVEVNPQNRNQEVSGTYQIEAWTGFNFPGRGNQHSSFKWRWYHFDGTDWDQSRQLANRIYKFRGDGKAWDWEVDTENGNYDYLMYADVDMDHPEVINELNRWGVWYANTLNLDGFRLDAVKHIKFSFMRDWLGHVRGQTGKNLFAVAEYWKNDLGALENYLSKTNWTMSAFDVPLHYNLYQASNSSGNYDMRNLLNGTLVQRHPSHAVTFVDNHDTQPGEALESFVQGWFKPLAYATILTREQGYPQVFYGDYYGIPSDGVPSYRQQIDPLLKARQQYAYGRQHDYFDHWDVIGWTREGNASHPNSGLATIMSDGPGGSKWMYVGRQKAGEVWRDMTGNRSGTVTINQDGWGHFFVNGGSVSVWVKR

SEQ ID NO: 31185 - protein, 485 aa, Bacillus sp.
HHDGTNGTIMQYFEWNVPNDGQHWNRLHNNAQNLKNAGITAIWIPPAWKGTSQNDVGYGAYDLYDLGEFNQKGTVRTKYGTKAELERAIRSLKANGIQVYGDVVMNHKGGADFTERVQAVEVNPQNRNQEVSGTYQIEAWTGFNFPGRGNQHSSFKWRWYHFDGTDWDQSRQLANRIYKFRGDGKAWDWEVDTENGNYDYLMYADVDMDHPEVINELNRWGVWYANTLNLDGFRLDAVKHIKFSFMRDWLGHVRGQTGKNLFAVAEYWKNDLGALENYLSKTNWTMSAFDVLLHYNLYQASNSSGNYDMRNLLNGTLVQRHPSHAVTFVDNHDTQPGEALESFVQGWFKPLAYATILTREQGYPQVFYGDYYGIPSDGVPSYRQQIDPLLKARQQYAYGRQHDYFDHWDVIGWTREGNASHPNSGLATIMSDGPGGSKWMYVGRQKAGEVWHDMTGNRSGTVTINQDGWGHFFVNGGSVSVWVKR

SEQ ID NO: 31186 - protein, 485 aa, Bacillus sp.
HHDGTNGTIMQYFEWNVPNDGQHWNRLHNNAQNLKNAGITAIWIPPAWKGTSQNDVGYGAYDLYDLGEFNQKGTVRTKYGTKAELERAIRSLKANGIQVYGDVVMNHKGGADFTERVQAVEVNPQNRNQEVSGTYQIEAWTGFNFPGRGNQHSSFKWRWYNFDGTDWDQSRQLANRIYKFRGDGKAWDWEVDTENGNYDYLMYADVDMDHPEVINELNRWGVWYANTLNLDGFRLDAVKHIKFSFMRDWLGHVRGQTGKNLFAVAEYWKNDLGALENYLSKTNWTMSAFDVPLHYNLYQASNSSGNYDMRNLLNGTLVQRHPSHAVTFVDNHDTQPGEALESFVQGWFKPLAYATILTREQGYPQVFYGDYYGIPSDGVPSYRQQIDPLLKARQQYAYGRQHDYFDHWDVIGWTREGNASHPNSGLATIMSDGPGGSKWMYVGRQKAGEVWHDMTGNRSGTVTINQDGWGHFFVNGGSVSVWVKR

SEQ ID NO: 31187 - protein, 485 aa, Bacillus sp.
HHDGTNGTIMQYFEWNVPNDGQHWNRLHNNAQNLKNAGITAIWIPPAWKGTSQNDVGYGAYDLYDLGEFNQKGTVRTKYGTKAELERAIRSLKANGIQVYGDVVMNHKGGADFTERVQAVEVNPQNRNQEVSGTFQIEAWTGFNFPGRGNQHSSFKWRWYHFDGTDWDQSRQLANRIYKFRGDGKAWDWEVDTENGNYDYLMYADVDMDHPEVINELNRWGVWYANTLNLDGFRLDAVKHIKFSFMRDWLGHVRGQTGKNLFAVAEYWKNDLGALENYLSKTNWTMSAFDVPLHYNLYQASNSSGNYDMRNLLNGTLVQRHPSHAVTFVDNHDTQPGEALESFVQGWFKPLAYATILTREQGYPQVFYGDYYGIPSDGVPSYRQQIDPLLKARQQYAYGRQHDYFDHWDVIGWTREGNASHPNSGLATIMSDGPGGSKWMYVGRQKAGEVWHDMTGNRSGTVTINQDGWGHFFVNGGSVSVWVKR

SEQ ID NO: 31188 - protein, 485 aa, Bacillus sp.
HHDGTNGTIMQYFEWNVPNDGQHWNRLHNNAQNLKNAGITAIWIPPAWKGTSQNDVGYGAYDLYDLGEFNQKGTVRTKYGTKAELERAIRSLKARGIQVYGDVVMNHKGGADFTERVQAVEVNPQNRNQEVSGTYQIEAWTGFNFPGRGNQHSSFKWRWYHFDGTDWDQSRQLANRIYKFRGDGKAWDWEVDTENGNYDYLMYADVDMDHPEVINELNRWGVWYANTLNLDGFRLDAVKHIKFSFMRDWLGHVRGQTGKNLFAVAEYWKNDLGALENYLSKTNWTMSAFDVPLHYNLYQASNSSGNYDMRNLLNGTLVQRHPSHAVTFVDNHDTQPGEALESFVQGWFKPLAYATILTREQGYPQVFYGDYYGIPSDGVPSYRQQIDPLLKARQQYAYGRQHDYFDHWDVIGWTREGNASHPNSGLATIMSDGPGGSKWMYVGRQKAGEVWHDMTGNRSGTVTINQDGWGHFFVNGGSVSVWVKR

SEQ ID NO: 31189 - protein, 485 aa, Bacillus sp.
HHDGTNGTIMQYFEWNVPNDGQHWNRLHNNAQNLKNAGITAIWIPPAWKGTSQNDVGYGAYDLYDLGEFNQKGTVRTKYGTKAELERAIRSLKANGIQVYGDVVMNHKGGADFTERVQAVEVNPQNRNQEVSGTYQIEAWTGFNFPGRGNQHSSWKWRWYHFDGTDWDQSRQLANRIYKFRGDGKAWDWEVDTENGNYDYLMYADVDMDHPEVINELNRWGVWYANTLNLDGFRLDAVKHIKFSFMRDWLGHVRGQTGKNLFAVAEYWKNDLGALENYLSKTNWTMSAFDVPLHYNLYQASNSSGNYDMRNLLNGTLVQRHPSHAVTFVDNHDTQPGEALESFVQGWFKPLAYATILTREQGYPQVFYGDYYGIPSDGVPSYRQQIDPLLKARQQYAYGRQHDYFDHWDVIGWTREGNASHPNSGLATIMSDGPGGSKWMYVGRQKAGEVWHDMTGNRSGTVTINQDGWGHFFVNGGSVSVWVKR

SEQ ID NO: 31190 - protein, 485 aa, Bacillus sp.
HHDGTNGTIMQYFEWNVPNDGQHWNRLHNNAQNLKNAGITAIWIPPAWKGTSQNDVGYGAYDLYDLGEFNQKGTVRTKYGTKAELERAIRSLKANGIQVYGDVVMNHKGGADFTERVQAVEVNPQNRNQEVSGTYQIEAWTGFNFPGRGNQHSSFKWRWYHFDGTDWDQSRQLANRIYKFRGDGKAWDWEVDTENGDYDYLMYADVDMDHPEVINELNRWGVWYANTLNLDGFRLDAVKHIKFSFMRDWLGHVRGQTGKNLFAVAEYWKNDLGALENYLSKTNWTMSAFDVPLHYNLYQASNSSGNYDMRNLLNGTLVQRHPSHAVTFVDNHDTQPGEALESFVQGWFKPLAYATILTREQGYPQVFYGDYYGIPSDGVPSYRQQIDPLLKARQQYAYGRQHDYFDHWDVIGWTREGNASHPNSGLATIMSDGPGGSKWMYVGRQKAGEVWHDMTGNRSGTVTINQDGWGHFFVNGGSVSVWVKR

SEQ ID NO: 31191 - protein, 485 aa, Bacillus sp.
HHDGTNGTIMQYFEWNVPNDGQHWNRLHNNAQNLKNAGITAIWIPPAWKGTSQNDVGYGAYDLYDLGEFNQKGTVRTKYGTKAELERAIRSLKANGIQVYGDVVMNHKGGADFTERVQAVEVNPQNRNQEVSGTYQIEAWTGFNFPGRGNQHSSFKWRWYHFDGTDWDQSRQLANRIYKFRGDGKAWDWEVDTENGNYDYLMYADVDMDHPEVINELNRWGVWYANTLNLDGFRLDAVKHIKFSFMRDWLGHVRGQTGKNLFAVAEYWKNDLGALENYLSKTNWTMSAFDVPLHYYLYQASNSSGNYDMRNLLNGTLVQRHPSHAVTFVDNHDTQPGEALESFVQGWFKPLAYATILTREQGYPQVFYGDYYGIPSDGVPSYRQQIDPLLKARQQYAYGRQHDYFDHWDVIGWTREGNASHPNSGLATIMSDGPGGSKWMYVGRQKAGEVWHDMTGNRSGTVTINQDGWGHFFVNGGSVSVWVKR

SEQ ID NO: 31192 - protein, 485 aa, Bacillus sp.
HHDGTNGTIMQYFEWNVPNDGQHWNRLHNNAQNLKNAGITAIWIPPAWKGTSQNDVGYGAYDLYDLGEFNQKGTVRTKYGTKAELERAIRSLKANGIQVYGDVVMNHKGGADFTERVQAVEVNPQNRNQEVSGTYQIEAWTGFNFPGRGNQHSSFLWRWYHFDGTDWDQSRQLANRIYKFRGDGKAWDWEVDTENGNYDYLMYADVDMDHPEVINELNRWGVWYANTLNLDGFRLDAVKHIKFSFMRDWLGHVRGQTGKNLFAVAEYWKNDLGALENYLSKTNWTMSAFDVPLHYNLYQASNSSGNYDMRNLLNGTLVQRHPSHAVTFVDNHDTQPGEALESFVQGWFKPLAYATILTREQGYPQVFYGDYYGIPSDGVPSYRQQIDPLLKARQQYAYGRQHDYFDHWDVIGWTREGNASHPNSGLATIMSDGPGGSKWMYVGRQKAGEVWHDMTGNRSGTVTINQDGWGHFFVNGGSVSVWVKR

SEQ ID NO: 31193 - protein, 485 aa, Bacillus sp.
HHDGTNGTIMQYFEWNVPNDGQHWNRLHNNAQNLKNAGITAIWIPPAWKGTSQNDVGYGAYDLYDLGEFNQKGTVRTKYGTKAELERAIRSLKANGIQVYGDVVMNHKGGADFTERVQAVEVNPQNRNQEVSGTYQIEAWTGFNFPGRGNQHSSFKWRWYHFDGTDWDQSRQLANRIYKFRGDGKAWDWEVDTENGNYDYLMYADVDMDGPEVINELNRWGVWYANTLNLDGFRLDAVKHIKFSFMRDWLGHVRGQTGKNLFAVAEYWKNDLGALENYLSKTNWTMSAFDVPLHYNLYQASNSSGNYDMRNLLNGTLVQRHPSHAVTFVDNHDTQPGEALESFVQGWFKPLAYATILTREQGYPQVFYGDYYGIPSDGVPSYRQQIDPLLKARQQYAYGRQHDYFDHWDVIGWTREGNASHPNSGLATIMSDGPGGSKWMYVGRQKAGEVWHDMTGNRSGTVTINQDGWGHFFVNGGSVSVWVKR

SEQ ID NO: 31194 - protein, 485 aa, Bacillus sp.
HHDGTNGTIMQYFEWNVPNDGQHWNRLHNNAQNLKNAGITAIWIPPAWKGTSQNDVGYGAYDLYDLGEFNQKGTVRTKYGTKAELERAIRSLKANGIQVYGDVVMNHKGGADFTERVQAVEVNPQNRNQEVSGTYQIEAWTGFNFPGRGNQHSSFKWRWYHFDGTDWDQSRQLANRIYKFRGDGKAWDWEVDTENGNYDYLMYADVDMDHPEVINELNRWGVWYANTLNLDGFRLDAVKHIKFSFMRDWLGHVRGQTGKNLFAVAEYWKNDLGALENYLSKTNWTMSAFDVPLHYNLYQASNSSGNYDMRNLLNGTLVQRHPSHAVTFVDNHDTQPGEALESFVQGWFKPLAYATILTREQGYPQVFYGDYYGIPSDGVPSYRQQIDPLLKARQQYAYGRQHDYFDHWDVIGWTREGNASHPNSGLATIMSDGPGLSKWMYVGRQKAGEVWHDMTGNRSGTVTINQDGWGHFFVNGGSVSVWVKR

SEQ ID NO: 31195 - protein, 485 aa, Bacillus sp.
HHDGTNGTIMQYFEWNVPNDGQHWNRLHNNAQNLKNAGITAIWIPPAWKGTSQNDVGYGAYDLYDLGEFNQKGTVRTKYGTKAELERAIRSLKANGIQVYGDVVMNHKGGADFTERVQAVEVNPQNRNQEVSGTYQIEAWTGFNFPGRGNQHSSFKWRWYHFLGTDWDQSRQLANRIYKFRGDGKAWDWEVDTENGNYDYLMYADVDMDHPEVINELNRWGVWYANTLNLDGFRLDAVKHIKFSFMRDWLGHVRGQTGKNLFAVAEYWKNDLGALENYLSKTNWTMSAFDVPLHYNLYQASNSSGNYDMRNLLNGTLVQRHPSHAVTFVDNHDTQPGEALESFVQGWFKPLAYATILTREQGYPQVFYGDYYGIPSDGVPSYRQQIDPLLKARQQYAYGRQHDYFDHWDVIGWTREGNASHPNSGLATIMSDGPGGSKWMYVGRQKAGEVWHDMTGNRSGTVTINQDGWGHFFVNGGSVSVWVKR

SEQ ID NO: 31196 - protein, 485 aa, Bacillus sp.
HHDGTNGTIMQYFEWNVPNDGQHWNRLHNNAQNLKNAGITAIWIPPAWKGTSQNDVGYGAYDLYDLGEFNQKGTVRTKYGTKAELERAIRSLKANGIQVYGDVVMNHKGGADFTERVQAVEVNPQNRNQEVSGTYQIEAWTGFNFPGRGNQHSSFKWRWYHFDGTDWDQSRQLANRIYKFRGDGKAWDWEVDTENGNYDYLMYADVDMDHPEVINELNRWGVWYANTLNLDGFRLDAVKHIKFSFMRDWLGHVRGQTGKNLFAVAEYWKNDLGAAENYLSKTNWTMSAFDVPLHYNLYQASNSSGNYDMRNLLNGTLVQRHPSHAVTFVDNHDTQPGEALESFVQGWFKPLAYATILTREQGYPQVFYGDYYGIPSDGVPSYRQQIDPLLKARQQYAYGRQHDYFDHWDVIGWTREGNASHPNSGLATIMSDGPGGSKWMYVGRQKAGEVWHDMTGNRSGTVTINQDGWGHFFVNGGSVSVWVKR

SEQ ID NO: 31197 - protein, 485 aa, Bacillus sp.
HHDGTNGTIMQYFEWNVPNDGQHWNRLHNNAQNLKNAGITAIWIPPAWKGTSQNDVGYGAYDLYDLGEFNQKGTVRTKYGTKAELERAIRSLKANGIQVYGDVVMNHKGGADFTERVQAVEVNPQNRNQEVSGTYQIEAWTGFNFPGRGNQHSSFKWRWYHFDGTDWDQSRQLANRIYKFRGDGKAWDWEVDTENGNYDYLMYADVDMDHPEVINELNRWGVWYANTLNLDGFRLDAVKHIKFSFMRDWLGHVRGQTGKNLFAVAEYWKNDLGALENYLSKTNWTMSAFDVPLHYNLYQASNSSGNYDMRNLLNGTLVQRHPSHAVTFVDNHDTQPGEALESFVQGWFKPLAYATILTREQGYPQVFYGDYYGIPSDGVPSYRQQIDPLLKARQQYAYGRQHDYFEHWDVIGWTREGNASHPNSGLATIMSDGPGGSKWMYVGRQKAGEVWHDMTGNRSGTVTINQDGWGHFFVNGGSVSVWVKR

SEQ ID NO: 31198 - protein, 485 aa, Bacillus sp.
HHDGTNGTIMQYFEWNVPNDGQHWNRLHNNAQNLKNAGITAIWIPPAWKSTSQNDVGYGAYDLYDLGEFNQKGTVRTKYGTKAELERAIRSLKANGIQVYGDVVMNHKGGADFTERVQAVEVNPQNRNQEVSGTYQIEAWTGFNFPGRGNQHSSFKWRWYHFDGTDWDQSRQLANRIYKFRGDGKAWDWEVDTENGNYDYLMYADVDMDHPEVINELNRWGVWYANTLNLDGFRLDAVKHIKFSFMRDWLGHVRGQTGKNLFAVAEYWKNDLGALENYLSKTNWTMSAFDVPLHYNLYQASNSSGNYDMRNLLNGTLVQRHPSHAVTFVDNHDTQPGEALESFVQGWFKPLAYATILTREQGYPQVFYGDYYGIPSDGVPSYRQQIDPLLKARQQYAYGRQHDYFDHWDVIGWTREGNASHPNSGLATIMSDGPGGSKWMYVGRQKAGEVWHDMTGNRSGTVTINQDGWGHFFVNGGSVSVWVKR

SEQ ID NO: 31199 - protein, 485 aa, Bacillus sp.
HHDGLNGTIMQYFEWNVPNDGQHWNRLHNNAQNLKNAGITAIWIPPAWKGTSQNDVGYGAYDLYDLGEFNQKGTVRTKYGTKAELERAIRSLKANGIQVYGDVVMNHKGGADFTERVQAVEVNPQNRNQEVSGTYQIEAWTGFNFPGRGNQHSSFKWRWYHFDGTDWDQSRQLANRIYKFRGDGKAWDWEVDTENGNYDYLMYADVDMDHPEVINELNRWGVWYANTLNLDGFRLDAVKHIKFSFMRDWLGHVRGQTGKNLFAVAEYWKNDLGALENYLSKTNWTMSAFDVPLHYNLYQASNSSGNYDMRNLLNGTLVQRHPSHAVTFVDNHDTQPGEALESFVQGWFKPLAYATILTREQGYPQVFYGDYYGIPSDGVPSYRQQIDPLLKARQQYAYGRQHDYFDHWDVIGWTREGNASHPNSGLATIMSDGPGGSKWMYVGRQKAGEVWHDMTGNRSGTVTINQDGWGHFFVNGGSVSVWVKR

SEQ ID NO: 31200 - protein, 485 aa, Bacillus sp.
HHDGTNGTIMQYFEWNVPNDGQHWNRLHNNAQNLKNAGITAIWIPPAWKGTSQNDVGYGAYDLYDLGEFNQKGTVRTKYGTKAELERAIRSLKANGIQVYGDVVMNHKGGADFTERVQAVEVNPQNRNQEVSGTYQIEAWTGFNFPDRGNQHSSFKWRWYHFDGTDWDQSRQLANRIYKFRGDGKAWDWEVDTENGNYDYLMYADVDMDHPEVINELNRWGVWYANTLNLDGFRLDAVKHIKFSFMRDWLGHVRGQTGKNLFAVAEYWKNDLGALENYLSKTNWTMSAFDVPLHYNLYQASNSSGNYDMRNLLNGTLVQRHPSHAVTFVDNHDTQPGEALESFVQGWFKPLAYATILTREQGYPQVFYGDYYGIPSDGVPSYRQQIDPLLKARQQYAYGRQHDYFDHWDVIGWTREGNASHPNSGLATIMSDGPGGSKWMYVGRQKAGEVWHDMTGNRSGTVTINQDGWGHFFVNGGSVSVWVKR

SEQ ID NO: 31201 - protein, 485 aa, Bacillus sp.
HHDGTNGTIMQYFEWNVPNDGQHWNRLHNNAQNLKNAGITAIWIPPAWKGTSQNDVGYGAYDLYDLGEFNQKGTVRTKYGTKAELERAIRSLKANGIQVYGDVVMNHKGGADFTERVQAVEVNPQNRNQEVSGTYQIEAWTGFNFPGRGNQHSSFKWRWYHFDGTDWDQSRQLANRIYKFRGDGKAWDWEVDTENGYYDYLMYADVDMDHPEVINELNRWGVWYANTLNLDGFRLDAVKHIKFSFMRDWLGHVRGQTGKNLFAVAEYWKNDLGALENYLSKTNWTMSAFDVPLHYNLYQASNSSGNYDMRNLLNGTLVQRHPSHAVTFVDNHDTQPGEALESFVQGWFKPLAYATILTREQGYPQVFYGDYYGIPSDGVPSYRQQIDPLLKARQQYAYGRQHDYFDHWDVIGWTREGNASHPNSGLATIMSDGPGGSKWMYVGRQKAGEVWHDMTGNRSGTVTINQDGWGHFFVNGGSVSVWVKR

SEQ ID NO: 31202 - protein, 485 aa, Bacillus sp.
HHDGTNGTIMQYFEWNVPNDGQHWNRLHNNAQNLKNAGITAIWIPPAWKGTSQNDVGYGAYDLYDLGEFNQKGTVRTKYGTKAELERAIRSLKANGIQVYGDVVMNHKGGADFTERVQAVEVNPQNRNQEVSGTYQIEAWTGFNFPGRGNQHSSFKWRWYHFDGTDWDQSRQLANRIYKFRGDGKAWDWEVDTENGNYDYLMYADVDMDHPEVINELNRWGVWYANTLNLDGFRLDAVKHIKFSFMRDWLGHVRGQTGKNLFAVAEYWKNDLGALENYLSKTNWTMSAFDVPLHYNLYQASNSSGNYDMRNLLNGTLVQRHPSHAVTFVDNHDTQPGEALESFVQGWFKPLAYATILTREQGYPQVFYGDYYGMPSDGVPSYRQQIDPLLKARQQYAYGRQHDYFDHWDVIGWTREGNASHPNSGLATIMSDGPGGSKWMYVGRQKAGEVWHDMTGNRSGTVTINQDGWGHFFVNGGSVSVWVKR

SEQ ID NO: 31203 - protein, 485 aa, Bacillus sp.
HHDGTNGTIMQYFEWNVPNDGQHWNRLHNNAQNLKNAGITAIWIPPAWKGTSQNDVGYGAYDLYDLGEFNQKGTVRTKYGTKAELLRAIRSLKANGIQVYGDVVMNHKGGADFTERVQAVEVNPQNRNQEVSGTYQIEAWTGFNFPGRGNQHSSFKWRWYHFDGTDWDQSRQLANRIYKFRGDGKAWDWEVDTENGNYDYLMYADVDMDHPEVINELNRWGVWYANTLNLDGFRLDAVKHIKFSFMRDWLGHVRGQTGKNLFAVAEYWKNDLGALENYLSKTNWTMSAFDVPLHYNLYQASNSSGNYDMRNLLNGTLVQRHPSHAVTFVDNHDTQPGEALESFVQGWFKPLAYATILTREQGYPQVFYGDYYGIPSDGVPSYRQQIDPLLKARQQYAYGRQHDYFDHWDVIGWTREGNASHPNSGLATIMSDGPGGSKWMYVGRQKAGEVWHDMTGNRSGTVTINQDGWGHFFVNGGSVSVWVKR

SEQ ID NO: 31204 - protein, 485 aa, Bacillus sp.
HHDGTNGTIMQYFEWNVPNDGQHWNRLHNNAQNLKNAGITAIWIPPAWKGTSQNDVGYGAYDLYDLGEFNQKGTVRTKYGTKAELERAIRSLKANGIQVYGDVVMNHKGGADFTERVQAVEVNPQNRNQEVEGTYQIEAWTGFNFPGRGNQHSSFKWRWYHFDGTDWDQSRQLANRIYKFRGDGKAWDWEVDTENGNYDYLMYADVDMDHPEVINELNRWGVWYANTLNLDGFRLDAVKHIKFSFMRDWLGHVRGQTGKNLFAVAEYWKNDLGALENYLSKTNWTMSAFDVPLHYNLYQASNSSGNYDMRNLLNGTLVQRHPSHAVTFVDNHDTQPGEALESFVQGWFKPLAYATILTREQGYPQVFYGDYYGIPSDGVPSYRQQIDPLLKARQQYAYGRQHDYFDHWDVIGWTREGNASHPNSGLATIMSDGPGGSKWMYVGRQKAGEVWHDMTGNRSGTVTINQDGWGHFFVNGGSVSVWVKR

SEQ ID NO: 31205 - protein, 483 aa, Bacillus sp. (in: firmicutes)
HHDGTNGTIMQYFEWEVPNDGQHWNRLHNNAQNLKNAGITAIWIPPAWKGTSQNDVGYGAYDLYDLGEFNQKGTVRTKYGTKAELERAIRSLKANGIQVYGDVVMNHKGGADFTERVQAVEVNPQNRNQEVSGTYQIEAWTGFNFPGRGNQHSSFKWRWYHFDGTDWDQSRQLANRIYKFRGKAWDWEVDTEFGNYDYLMYADVDMDHPEVINELNRWGVWYANTLNLDGFRLDAVKHIKFSFMRDWLGHVRGQTGKNLFAVAEYWKNDLGALENYLSKTNWTMSAFDVPLHYNLYQASNSSGNYDMRNLLNGTLVQRHPSHAVTFVDNHDTQPEEALESFVQGWFKPLAYATILTREQGYPSVFYGDYYGITSHGVPSYRQQIDPLLKARQQYAYGRQHDYFDHWDVIGWTREGNASHPNSGLATIMSDGPGGSKWMYVGRQKAGEVWHDMTGNRSGTVTINQDGWGHFFVNGGSVSVWVKR

SEQ ID NO: 31206 - protein, 485 aa, Bacillus sp.
HHDGTNGTIMQYFEWNVPNDGQHWNRLHNNAQNLKNAGITAIWIPPAWKGTSQNDVGYGAYDLYDLGEFNQKGTVRTKYGTKAELERAIRSLKANGIQVYGDVVMNHKGGADFTERVQAVEVNPQNRNQEVSGTYQIEAWTGFNFPGRGNQHSSFKWRWYHFDGTDWDQSRQLANRIYKFQGDGKAWDWEVDTENGNYDYLMYADVDMDHPEVINELNRWGVWYANTLNLDGFRLDAVKHIKFSFMRDWLGHVRGQTGKNLFAVAEYWKNDLGALENYLSKTNWTMSAFDVPLHYNLYQASNSSGNYDMRNLLNGTLVQRHPSHAVTFVDNHDTQPGEALESFVQGWFKPLAYATILTREQGYPQVFYGDYYGIPSDGVPSYRQQIDPLLKARQQYAYGRQHDYFDHWDVIGWTREGNASHPNSGLATIMSDGPGGSKWMYVGRQKAGEVWHDMTGNRSGTVTINQDGWGHFFVNGGSVSVWVKR

SEQ ID NO: 31207 - protein, 485 aa, Bacillus sp.
HHDGTNGTIMQYFEWNVPNDGQHWNRLHNNAQNLKNAGITAIWIPPAWKGTSQNDVGYGAYDLYDLGEFNQKGTVRTKYGTKAELERAIRSLKANGIQVYGDVVMNHKGGADFTERVQAVEVNPQNRNQEVSGTYQIEAWTGFNFPGRGNQHSSFKWRWYHFDGTDWDQSRQLANRIYKFRGDGKAWDWEVDTENGNYDYLMYADVDMDHPEVINELNRWGVWYANTLNLDGFRLDAVKHIKFSFMRDWLGHVRGQTGKNLFAVAEYWKNDLGALENYLSKTNWTMSAFDVPLHYNLYQASNSSGNYDMRNLLNGTLVQRHPSHAVTFVDNHDTQPGEALTSFVQGWFKPLAYATILTREQGYPQVFYGDYYGIPSDGVPSYRQQIDPLLKARQQYAYGRQHDYFDHWDVIGWTREGNASHPNSGLATIMSDGPGGSKWMYVGRQKAGEVWHDMTGNRSGTVTINQDGWGHFFVNGGSVSVWVKR

SEQ ID NO: 31208 - protein, 485 aa, Bacillus sp.
HHDGTNGTIMQYFEWNVPNDGQHWNRLHNNAQNLKNAGITAIWIPPAWKGTSQNDVGYGAYDLYDLGEFNQKGTVRTKYGTKAELERAIRSLKANGIQVYGDVVMNHKGGADFTERVQAVEVNPQNRNQEVSGTYQIEAWTGFNFPGRGNQHSSFKWRWYHFDGTDWDQSRQLANRIYKFRGDGKAWDWEVDTENGNYDYLMYADVDMDHPEVINELNRWGVWYANTLNLDGFRLDAVKHIKFSFMRDWLGHVRGQTGKNLFAVAEYWKNDLGALENYLSKTNWTMSAFDVPLHYNLYQASNSSGNYDMRNLLNGCLVQRHPSHAVTFVDNHDTQPGEALESFVQGWFKPLAYATILTREQGYPQVFYGDYYGIPSDGVPSYRQQIDPLLKARQQYAYGRQHDYFDHWDVIGWTREGNASHPNSGLATIMSDGPGGSKWMYVGRQKAGEVWHDMTGNRSGTVTINQDGWGHFFVNGGSVSVWVKR

SEQ ID NO: 31209 - protein, 485 aa, Bacillus sp.
HHDGTNGTIMQYFEWNVPNDGQHWNRLHNNAQNLKNAGITAIWIPPAWKGTSQNDVGYGAYDLYDLGEFNQKGTVRTKYGTKAELERAIRSLKANGIQVYGDVVMNHKGGADFTERVQAVEVNPQNRNQEVSGTYQIEAWTGFNFPGRGNQHSSFKWRWYHFDGTDWDQSRQLANRIYKFRGDGKAWDWEVDTENGNYDYLMYADVDMDHPEVINELNRWGVWYANTLNLDGFRLDAVKHIKFSFMRDWLGHVRGQTGKNLFAVAEYWKNDLGALENYLSKTNWTMSAFDVPLHYNLYQASNSSGNYDMRNLLNGTLVQRHPSHAVTFVDNHDTQPGEALESFVQGWFKPLAYATILTREQGYPQVFYGDYYGIPSDGVPSYRQQIDPLLKARQQYAYGRQVDYFDHWDVIGWTREGNASHPNSGLATIMSDGPGGSKWMYVGRQKAGEVWHDMTGNRSGTVTINQDGWGHFFVNGGSVSVWVKR

SEQ ID NO: 31210 - protein, 485 aa, Bacillus sp.
HHDGTNGTIMQYFEWNVPNDGQHWNRLHNNAQNLKNAGITAIWIPPAWKGTSQNDVGYGAYDLYDLGEFNQKGTVRTKYGTKAELERAIRSLKANGIQVYGDVVMNHKGGADFTERVQAVEVNPQNRNQEVSGTYQIEAWTGFNTPGRGNQHSSFKWRWYHFDGTDWDQSRQLANRIYKFRGDGKAWDWEVDTENGNYDYLMYADVDMDHPEVINELNRWGVWYANTLNLDGFRLDAVKHIKFSFMRDWLGHVRGQTGKNLFAVAEYWKNDLGALENYLSKTNWTMSAFDVPLHYNLYQASNSSGNYDMRNLLNGTLVQRHPSHAVTFVDNHDTQPGEALESFVQGWFKPLAYATILTREQGYPQVFYGDYYGIPSDGVPSYRQQIDPLLKARQQYAYGRQHDYFDHWDVIGWTREGNASHPNSGLATIMSDGPGGSKWMYVGRQKAGEVWHDMTGNRSGTVTINQDGWGHFFVNGGSVSVWVKR

SEQ ID NO: 31211 - protein, 485 aa, Bacillus sp.
HHDGTNGTIMQYFEWNVPNDGQHWNRLHNNAQNLKNAGITAIWIPPAWKGTSQNDVGYGAYDLYDLGEFNQKGTVRTKYGTKAELERAIRSLKANGIQVYGDVVMNHKGGADFTERVQAVEVNPQNRNQEVSGTYQIEAWTGFNFPGRGNQHSSFKWRWYHFDGTDWDQSRQLANRIYKFRGDGKAWDWEVDTENGNYDYLMYADVDMDHPEVINELNRWGVWYANTLNLDGFRLDAVKHIKFSFMRDWLGHVRGQTGKNLFAVAEYWKNDLGALENYLSKTNWTMSAFDVPLHYNLYQASNSSGNYDMRNLLNGTLVQRHPSHAVTFVDNHDTQPGEALESFVQGWFKPLAYATILTREQGYPQVFYGDYYGIPSDGVPSYRQQIDPLLKARQQYAYGRQHDYFDHWDVIGWTREGLASHPNSGLATIMSDGPGGSKWMYVGRQKAGEVWHDMTGNRSGTVTINQDGWGHFFVNGGSVSVWVKR

SEQ ID NO: 31212 - protein, 485 aa, Bacillus sp.
HHDGTNGTIMQYFEWNVPNDGQHWNRLHNNAQNLKNAGITAIWIPPAWKGTSQNDVGYGAYDLYDLGEFNQKGTVRTKYGTKAELERAIRSLKANGIQVYGDVVMNHKGGADFTERVQAVEVNPQNRNQEVSGTYQIEAWTGFNFPGRGNQHSSFKWRWYHFDGTDWDQSRQLANRIYKFRGDGKAWDWEVDTLNGNYDYLMYADVDMDHPEVINELNRWGVWYANTLNLDGFRLDAVKHIKFSFMRDWLGHVRGQTGKNLFAVAEYWKNDLGALENYLSKTNWTMSAFDVPLHYNLYQASNSSGNYDMRNLLNGTLVQRHPSHAVTFVDNHDTQPGEALESFVQGWFKPLAYATILTREQGYPQVFYGDYYGIPSDGVPSYRQQIDPLLKARQQYAYGRQHDYFDHWDVIGWTREGNASHPNSGLATIMSDGPGGSKWMYVGRQKAGEVWHDMTGNRSGTVTINQDGWGHFFVNGGSVSVWVKR

SEQ ID NO: 31213 - protein, 485 aa, Bacillus sp.
HHDGTNGTIMQYFEWNVPNDGQHWNRLHNNAQNLKNAGITAIWIPPAWKGTSQNDVGYGAYDLYDLGEFNQKGTVRTKYGTKAELERAIRSLKANGIQVYGDVVMNHKGGADFTERVQAVEVNPQNRNQEVSGTYQIEAWTGFNFPGRGNQHSSFKWRWYHFDGTDWSQSRQLANRIYKFRGDGKAWDWEVDTENGNYDYLMYADVDMDHPEVINELNRWGVWYANTLNLDGFRLDAVKHIKFSFMRDWLGHVRGQTGKNLFAVAEYWKNDLGALENYLSKTNWTMSAFDVPLHYNLYQASNSSGNYDMRNLLNGTLVQRHPSHAVTFVDNHDTQPGEALESFVQGWFKPLAYATILTREQGYPQVFYGDYYGIPSDGVPSYRQQIDPLLKARQQYAYGRQHDYFDHWDVIGWTREGNASHPNSGLATIMSDGPGGSKWMYVGRQKAGEVWHDMTGNRSGTVTINQDGWGHFFVNGGSVSVWVKR

SEQ ID NO: 31214 - protein, 485 aa, Bacillus sp.
HHDGTNGTIMQYFEWNVPNDGQHWNRLHNNAQNLKNAGITAIWIPPAWKGTSQNDVGYGAYDLYDLGEFNQKGTVRTKYGTKAELERAIRSLKANGIQVYGDVVMNHKGGADFTERVQAVEVNPQNRNQEVSGTYQIEAWTGFNFPGRGNQHSSFKWRWYHFDGTDWDQSRQLANRIYKFRGDGKAWDWEVDTENGNYDYLMYADVDMDHPEVINELNRWGVWYANTLNLDGFRLDAVKHIKFSFMRDWLGHVRGQTGKNLFAVAEYWKNDLGALENYLSKTNWTMSAFDVPLHYNLYQASNSSGNYDMRNLLNGTLVQRHPSHAVTFVDNHDTQPGEALESFVQGWFKPLAYATILTREAGYPQVFYGDYYGIPSDGVPSYRQQIDPLLKARQQYAYGRQHDYFDHWDVIGWTREGNASHPNSGLATIMSDGPGGSKWMYVGRQKAGEVWHDMTGNRSGTVTINQDGWGHFFVNGGSVSVWVKR

SEQ ID NO: 31215 - protein, 485 aa, Bacillus sp.
HHDGTNGTIMQYFEWNVPNDGQHWNRLHNNAQNLKNAGITAIWIPPAWKGTSQNDVGYGAYDLYDLGEFNQKGTVRTKYGTKAELERAIRSLKANGIQVYGDVVMNHKGGADFTERVQAVEVNPQNRNQEVSGTYQIEAWTGFNFPGRGNQHSSFKWRWYHFDGTDWDQSRQLANRIYKFRGDGKAWDWEVDTENGNYDYLMYADVDMDHPCVINELNRWGVWYANTLNLDGFRLDAVKHIKFSFMRDWLGHVRGQTGKNLFAVAEYWKNDLGALENYLSKTNWTMSAFDVPLHYNLYQASNSSGNYDMRNLLNGTLVQRHPSHAVTFVDNHDTQPGEALESFVQGWFKPLAYATILTREQGYPQVFYGDYYGIPSDGVPSYRQQIDPLLKARQQYAYGRQHDYFDHWDVIGWTREGNASHPNSGLATIMSDGPGGSKWMYVGRQKAGEVWHDMTGNRSGTVTINQDGWGHFFVNGGSVSVWVKR

SEQ ID NO: 31216 - protein, 485 aa, Bacillus sp.
HHDGTNGTIMQYFEWNVPNDGQHWNWLHNNAQNLKNAGITAIWIPPAWKGTSQNDVGYGAYDLYDLGEFNQKGTVRTKYGTKAELERAIRSLKANGIQVYGDVVMNHKGGADFTERVQAVEVNPQNRNQEVSGTYQIEAWTGFNFPGRGNQHSSFKWRWYHFDGTDWDQSRQLANRIYKFRGDGKAWDWEVDTENGNYDYLMYADVDMDHPEVINELNRWGVWYANTLNLDGFRLDAVKHIKFSFMRDWLGHVRGQTGKNLFAVAEYWKNDLGALENYLSKTNWTMSAFDVPLHYNLYQASNSSGNYDMRNLLNGTLVQRHPSHAVTFVDNHDTQPGEALESFVQGWFKPLAYATILTREQGYPQVFYGDYYGIPSDGVPSYRQQIDPLLKARQQYAYGRQHDYFDHWDVIGWTREGNASHPNSGLATIMSDGPGGSKWMYVGRQKAGEVWHDMTGNRSGTVTINQDGWGHFFVNGGSVSVWVKR

SEQ ID NO: 31217 - protein, 485 aa, Bacillus sp.
HHDGTNGTIMQYFEWNVPNDGQHWNRLHNNAQNLKNAGITAIWIPPAWKGTSQNDVGYGAYDLYDLGEFNQKGTVRTKYGTKAELERAIRSLKANGIQVYGDVVMNHKGGADFTERVQAVEVNPQNRNQEVSGTYQIEAWTGFNFPGRGNQHSSFKWRWYHFDGTDWDQSRQLANRIYKFRGDGKAWDWEVDTENGNYDYLMYADVDMDHPEVINELNRWGVWYANTLNLDGFRLDAVKHIKFSFMRDWLGHVRGQTGKNLFAVAEYWKNDLGALENYLSKTNWTMSAFDVPLHYNLYQASNSSGNYDMRNLLNGTLVQRHPSHAVTFVDNHDTQPGEALESFVQGWFKPLAYATILTREQGYPQVFYGDYYGIPSDGVPSYRQQIDPLLKARQQYAYGRQHDYADHWDVIGWTREGNASHPNSGLATIMSDGPGGSKWMYVGRQKAGEVWHDMTGNRSGTVTINQDGWGHFFVNGGSVSVWVKR

SEQ ID NO: 31218 - protein, 485 aa, Bacillus sp.
HHDGTNGTIMQYFEWNVPNDGQHWNRLHNNAQNLKNAGITAIWIPPAWKGTSQNDVGYGAYDLYDLGEFNQKETVRTKYGTKAELERAIRSLKANGIQVYGDVVMNHKGGADFTERVQAVEVNPQNRNQEVSGTYQIEAWTGFNFPGRGNQHSSFKWRWYHFDGTDWDQSRQLANRIYKFRGDGKAWDWEVDTENGNYDYLMYADVDMDHPEVINELNRWGVWYANTLNLDGFRLDAVKHIKFSFMRDWLGHVRGQTGKNLFAVAEYWKNDLGALENYLSKTNWTMSAFDVPLHYNLYQASNSSGNYDMRNLLNGTLVQRHPSHAVTFVDNHDTQPGEALESFVQGWFKPLAYATILTREQGYPQVFYGDYYGIPSDGVPSYRQQIDPLLKARQQYAYGRQHDYFDHWDVIGWTREGNASHPNSGLATIMSDGPGGSKWMYVGRQKAGEVWHDMTGNRSGTVTINQDGWGHFFVNGGSVSVWVKR

SEQ ID NO: 31219 - protein, 485 aa, Bacillus sp.
HHDGTNGTIMQYFEWNVPNDGQHWNRLHNNAQNLKNAGITAIWIPPAWKGTSQNDVGYGAYDLYDLGEFNQKGTVRTKYGTKAELERAIRSLKANGIQVYGDVVMNHKGGADFTERVQAVEVNPQNRNQEVSGTYQIEAWTGFNFPGRGNQHSSFKWRWYHFDGTDWDQSRQLANRIKKFRGDGKAWDWEVDTENGNYDYLMYADVDMDHPEVINELNRWGVWYANTLNLDGFRLDAVKHIKFSFMRDWLGHVRGQTGKNLFAVAEYWKNDLGALENYLSKTNWTMSAFDVPLHYNLYQASNSSGNYDMRNLLNGTLVQRHPSHAVTFVDNHDTQPGEALESFVQGWFKPLAYATILTREQGYPQVFYGDYYGIPSDGVPSYRQQIDPLLKARQQYAYGRQHDYFDHWDVIGWTREGNASHPNSGLATIMSDGPGGSKWMYVGRQKAGEVWHDMTGNRSGTVTINQDGWGHFFVNGGSVSVWVKR

SEQ ID NO: 31220 - protein, 485 aa, Bacillus sp.
HHDGTNGTIMQYFEWNVPNDGQHWNRLHNNAQNLKNAGITAIWIPPAWKGTSQNDVGYGAYDLYDLGEFNQKGTVRTKYGTKAELERAIRSLKANGIQVYGDVVMNHKGGADFTERVQAVEVNPQNRNQEVSGTYQIEAWTGFNFPGRGNQHSSFKWRWWHFDGTDWDQSRQLANRIYKFRGDGKAWDWEVDTENGNYDYLMYADVDMDHPEVINELNRWGVWYANTLNLDGFRLDAVKHIKFSFMRDWLGHVRGQTGKNLFAVAEYWKNDLGALENYLSKTNWTMSAFDVPLHYNLYQASNSSGNYDMRNLLNGTLVQRHPSHAVTFVDNHDTQPGEALESFVQGWFKPLAYATILTREQGYPQVFYGDYYGIPSDGVPSYRQQIDPLLKARQQYAYGRQHDYFDHWDVIGWTREGNASHPNSGLATIMSDGPGGSKWMYVGRQKAGEVWHDMTGNRSGTVTINQDGWGHFFVNGGSVSVWVKR

SEQ ID NO: 31221 - protein, 485 aa, Bacillus sp.
HHDGTNGTIMQYFEWNVPNDGQHWNRLHNNAQNLKNAGITAIWIPPAWKGTSQNDVGYGAYDLYDLGEFNQKGTVRTKYGTKAELERAIRSLKANGIQVYGDVVMNHKGGADFTERVQAVEVNPQNRNQEVSGTYQIEAWTGFNFPGRGNQHSSFKWRWYHFDGTDWDQSRQLANRIYKFRGDGKAWDWEVDTENGNYDYLMYADVDMDHPEVINELNRWGVWYANTLNLDGFRLDAVKHIKFSFMRDWLGHVRGQTGKNLFAVAEYWKNDLGALENYLSKTNWTMSAFDVPLHYNLYQASNSSGNYDMRNLLNGTLVQRHPSHAVTFVDNHDTQPGEALESFVQGWFKPLAYATILTREQGYPQVFYGDYYGIPSDGVPSYRQQIDPLLKARQQYAYGRQHDYFDHWDVIGWTREGNASHPNSGLATIMSDGPGGSKWMYVGRQKAGEVWHDMTGNRSGTVTINQVGWGHFFVNGGSVSVWVKR

SEQ ID NO: 31222 - protein, 485 aa, Bacillus sp.
HHDGTNGTIMQYFEWNVPNDGQHWNRLHNNAQNLKNAGITAIWIPPAWKGTSQNDVGYGAYDLYDLGEFNQKGTVRTKYGTKAELERAIRSLLANGIQVYGDVVMNHKGGADFTERVQAVEVNPQNRNQEVSGTYQIEAWTGFNFPGRGNQHSSFKWRWYHFDGTDWDQSRQLANRIYKFRGDGKAWDWEVDTENGNYDYLMYADVDMDHPEVINELNRWGVWYANTLNLDGFRLDAVKHIKFSFMRDWLGHVRGQTGKNLFAVAEYWKNDLGALENYLSKTNWTMSAFDVPLHYNLYQASNSSGNYDMRNLLNGTLVQRHPSHAVTFVDNHDTQPGEALESFVQGWFKPLAYATILTREQGYPQVFYGDYYGIPSDGVPSYRQQIDPLLKARQQYAYGRQHDYFDHWDVIGWTREGNASHPNSGLATIMSDGPGGSKWMYVGRQKAGEVWHDMTGNRSGTVTINQDGWGHFFVNGGSVSVWVKR

SEQ ID NO: 31223 - protein, 485 aa, Bacillus sp.
HHDGTNGTIMQYFEWNVPNDGQHWNRLHNNAQNLKNAGITAIWIPPAWKGTSQNDVGYGAYDLYDLGEFNQKGTVRTKYGTKAELERAIRSLKANGIQVYGDVVMNHKGGADFTERVQAVEVNPQNRNQEVSGTYQIEAWTGFNFPGRGNQHSSFKWRWYHFDGTDWDQSRQLANRIYKFRGDGKAWDWEVDTENGNYDYLMYADVDMDHPEVINELNRWGVWYANTLNLDGFRLDAVKHIKFSFMRDWLGHVRGQTGKNLFAVAEYWKNDLGALENYLSKTNWTMSAFDVPLHYNLYQASNSSGNYDMRNLLNGTLVQRHPSHAVTFVDNHDTQPGEALESFVQGWFKPLAYATILTREQGYPQVFYGDYYGIPSDGVPSYRQQIDPLLKARQQYAYGRQHDFFDHWDVIGWTREGNASHPNSGLATIMSDGPGGSKWMYVGRQKAGEVWHDMTGNRSGTVTINQDGWGHFFVNGGSVSVWVKR

SEQ ID NO: 31224 - protein, 485 aa, Bacillus sp.
HHDGTNGTIMQYFEWNVPNDGQHWNRLHNNAQNLKNAGITAIWIPPAWKGTSQNDVGYGAYDLYDLGEFNQKGTVRTKYGTKAELERAIRSLKADGIQVYGDVVMNHKGGADFTERVQAVEVNPQNRNQEVSGTYQIEAWTGFNFPGRGNQHSSFKWRWYHFDGTDWDQSRQLANRIYKFRGDGKAWDWEVDTENGNYDYLMYADVDMDHPEVINELNRWGVWYANTLNLDGFRLDAVKHIKFSFMRDWLGHVRGQTGKNLFAVAEYWKNDLGALENYLSKTNWTMSAFDVPLHYNLYQASNSSGNYDMRNLLNGTLVQRHPSHAVTFVDNHDTQPGEALESFVQGWFKPLAYATILTREQGYPQVFYGDYYGIPSDGVPSYRQQIDPLLKARQQYAYGRQHDYFDHWDVIGWTREGNASHPNSGLATIMSDGPGGSKWMYVGRQKAGEVWHDMTGNRSGTVTINQDGWGHFFVNGGSVSVWVKR

SEQ ID NO: 31225 - protein, 485 aa, Bacillus sp.
HHDGTNGTIMQYFEWNVPNDGQHWNRLHNNAQNLKNAGITAIWIPPAWKGTSQNDVGYGAYDLYDLGEFNQKGTVRTKYGTKAELERAIRSLKANGIQVYGDVVMNHKGGADFTERVQAVEVNPQNRNQEVSGTYQIEAWTGFNFPGRGNQHSSFKWRWYHFDGTDWDQSRQLANRIYKFRGDGKAWDWEVDTENGNYDYLMYADVDMDHPEVINELNRWGVWYANTLNLDGFRLDAVKHIKFSFMRDWLGHVRGQTGKNLFAVAEYWKNDLGALENYLSKTNWTMSAFDVPLHYNLYQASNSSGNYDMRNLLNGTLVQRHPSHAVTFVDNHDTQPGEALESFVQGWFKPLAYATILTREQGYPQVFYGDYYGIPSDGVPSYRQQIDPLLKARQQYAYGRQHDYFDHWDVIGWTREGNASHPNSGLVTIMSDGPGGSKWMYVGRQKAGEVWHDMTGNRSGTVTINQDGWGHFFVNGGSVSVWVKR

SEQ ID NO: 31226 - protein, 485 aa, Bacillus sp.
HHDGTNGTIMQYFEWNVPNDGQHWNRLHNNAQNLKNAGITAIWIPPAWKGTSQNDVGYGAYDLYDLGEFNQKGTVRTKYGTKAELERAIRSLKANGIQVYGDVVMNHKGGADFTERVQAVEVNPQNRNQEVSGTYQIEAWTGFNFPGRGNQHSSFKWRWYHFDGTDWDQSRQLANRIYKFRGDGKTWDWEVDTENGNYDYLMYADVDMDHPEVINELNRWGVWYANTLNLDGFRLDAVKHIKFSFMRDWLGHVRGQTGKNLFAVAEYWKNDLGALENYLSKTNWTMSAFDVPLHYNLYQASNSSGNYDMRNLLNGTLVQRHPSHAVTFVDNHDTQPGEALESFVQGWFKPLAYATILTREQGYPQVFYGDYYGIPSDGVPSYRQQIDPLLKARQQYAYGRQHDYFDHWDVIGWTREGNASHPNSGLATIMSDGPGGSKWMYVGRQKAGEVWHDMTGNRSGTVTINQDGWGHFFVNGGSVSVWVKR

SEQ ID NO: 31227 - protein, 485 aa, Bacillus sp.
HHDGTNGTIMQYFEWNVPNDGQHWNRLHNNAQNLKNAGITAIWIPPAWKGTSQNDVGYGAYDLYDLGEFNQKGTVRTKYGTKAELERAIRSLKANGIQVYGDVVMNHKGGADFTERVQAVEVNPQNRNQEVSGTYQIEAWTGFNFPGRGNQHSSFKWRWYHFDGTDWDQSRQLANRIYKFRGDGKAWDWEVDTENGNYDYLLYADVDMDHPEVINELNRWGVWYANTLNLDGFRLDAVKHIKFSFMRDWLGHVRGQTGKNLFAVAEYWKNDLGALENYLSKTNWTMSAFDVPLHYNLYQASNSSGNYDMRNLLNGTLVQRHPSHAVTFVDNHDTQPGEALESFVQGWFKPLAYATILTREQGYPQVFYGDYYGIPSDGVPSYRQQIDPLLKARQQYAYGRQHDYFDHWDVIGWTREGNASHPNSGLATIMSDGPGGSKWMYVGRQKAGEVWHDMTGNRSGTVTINQDGWGHFFVNGGSVSVWVKR

SEQ ID NO: 31228 - protein, 485 aa, Bacillus sp.
HHDGTNGTIMQYFEWNVPNDGQHWNRLHNNAQNLKNAGITAIWIPPAWKGTSQNDVGYGAYDLYDLGEFNQKGTVRTKYGTKAELERAIRSLKANGIQVYGDVVMNHKGGADFTERVQAVEVNPQNRNQEVSGTYQIEAWTGFNFPGRGNQHSSFKWRWYHFDGTDWDQSRQLANRIYKFRGDGKAWDWEVDTENGNYDYLMYADVDMDHPEVINELNRWGVWYANTLNLDGFRLDAVKHIKFSFMRDWLGHVRGQTGKNLFAVAEYWKNDLGALENYLSKTNWTMSAFDVPLHYNLYQASNSSGNYDMRNLLNGTLVQRHPSHACTFVDNHDTQPGEALESFVQGWFKPLAYATILTREQGYPQVFYGDYYGIPSDGVPSYRQQIDPLLKARQQYAYGRQHDYFDHWDVIGWTREGNASHPNSGLATIMSDGPGGSKWMYVGRQKAGEVWHDMTGNRSGTVTINQDGWGHFFVNGGSVSVWVKR

SEQ ID NO: 31229 - protein, 485 aa, Bacillus sp.
HHDGTNGTIMQYFEWNVPNDGQHWNRLHNNAQNLKNAGITAIWIPPAWKGTSQNDVGYGAYDLYDLGEFNQKGTVRTKYGTKAELERAIRSLKANGIQVYGDVVMNHKGGADFTERVQAVEVNPQNRNQEVSGTYQIEAWTGFNFPGRGNQHSSFKWRWYHFDGTDWDQSRQLANRIYKFRGDGKAWDREVDTENGNYDYLMYADVDMDHPEVINELNRWGVWYANTLNLDGFRLDAVKHIKFSFMRDWLGHVRGQTGKNLFAVAEYWKNDLGALENYLSKTNWTMSAFDVPLHYNLYQASNSSGNYDMRNLLNGTLVQRHPSHAVTFVDNHDTQPGEALESFVQGWFKPLAYATILTREQGYPQVFYGDYYGIPSDGVPSYRQQIDPLLKARQQYAYGRQHDYFDHWDVIGWTREGNASHPNSGLATIMSDGPGGSKWMYVGRQKAGEVWHDMTGNRSGTVTINQDGWGHFFVNGGSVSVWVKR

SEQ ID NO: 31230 - protein, 485 aa, Bacillus sp.
HHDGTNGTIMQYFEWNVPNDGQHWNRLHNNAQNLKNAGITAIWIPPAWKGTSQNDVGYGAYDLYDLGEFNQKGTVRTKYGTKAELERAIRSLKANGIQVYGDVVMNHKGGADFTERVQAVEVNPQNRNQEVSGTYQIEAWTGFNFPGRGNQHSSFKWRWYHFDGTDWDQSRQLANRIYKFRGDGKAWRWEVDTENGNYDYLMYADVDMDHPEVINELNRWGVWYANTLNLDGFRLDAVKHIKFSFMRDWLGHVRGQTGKNLFAVAEYWKNDLGALENYLSKTNWTMSAFDVPLHYNLYQASNSSGNYDMRNLLNGTLVQRHPSHAVTFVDNHDTQPGEALESFVQGWFKPLAYATILTREQGYPQVFYGDYYGIPSDGVPSYRQQIDPLLKARQQYAYGRQHDYFDHWDVIGWTREGNASHPNSGLATIMSDGPGGSKWMYVGRQKAGEVWHDMTGNRSGTVTINQDGWGHFFVNGGSVSVWVKR

SEQ ID NO: 31231 - protein, 483 aa, Bacillus sp.
HHNGTNGTMMQYFEWYLPNDGNHWNRLNSDASNLKSKGIKAVWIPPAWKGASQNDVGYGAYDLYDLGEFNQRGTVRTKYGTRSQLQAAVTSLKNNGIQVYGDVVMNHKGGADATEMVRAVEVNPNNRNQEVTGEYTIEAWTRFDFPGRGNTHSSFKWRWYHFDGVDFDQSRRLNNRIYKFRGKAWDWEVDTEFGNYDYLMYADYDYDHPETTNEMRNWGVWYTNTLGLDGFRIDAVKHIKYSFTRDWINHVRSATGKNMFAVAEFWKNDLGAIENYLQKTNWNHSVFDVPLHYNLYNASKSGGNYDMRNIFNGTVVQAHPSQAVTFVDNHDSQPEEALESFVEEWFKPLAYALTLTREQGYPSVFYGDYYGIPTHGVPAMRSKIDPILEARQKYAYGPQHDYLDHPDVIGWTREGDSSHPKSGLATLITDGPGGSKRMYAGLKNAGETWYDITGNRSDTVKIGSDGWGEFHVNDGSVSIYVQK

SEQ ID NO: 31232 - protein, 485 aa, Bacillus sp.
HHDGTNGTIMQYFEWNVPNDGQHWNRLHNNAQNLKNAGITAIWIPPAWKGTSQNDVGYGAYDLYDLGEFNQKGTVRTKYGTKAELERAIRSLKANGIQVYGDVVMNHKGGADFTERVQAVEVNPQNRNQEVSGTYQIEAWTGFNFPGRGNQHSSFKWRWYHFDGTDWDQSRQLANRIYKFRGDGKAWDWEVDTENGNYDYLMYADVDMDHPEVINELNRWGVWYANTLNLDGFRLDAVKHIKFSFMRDWLGHVRGQTGKNLFAVAEYWKNDLGALENYLSKTNWTMSAFDVPLHYNLYQASNSSGNYDMRNLLNGTLVQRHPSHAVTFVDNHDTQPGEALESFVQGWFKPLAYATILTREQGYPQVFYGDYYGIPSDGVPSYRQQIDPLLKARQQYAYGRQTDYFDHWDVIGWTREGNASHPNSGLATIMSDGPGGSKWMYVGRQKAGEVWHDMTGNRSGTVTINQDGWGHFFVNGGSVSVWVKR

SEQ ID NO: 31233 - protein, 485 aa, Bacillus sp.
HHDGTNGTIMQYFEWNVPNDGQHWNRLHNNAQNLKNAGITAIWIPPAWKGTSQNDVGYGAYDLYDLGEFNQKGTVRTKYGTKAELERAIRSLKANGIQVYGDVVMNHKGGADFTERVQAVEVNPQNRNQEVSGTYQIEAWTGFNFPGRGNQHSSFKWRWYHFDGTDWDQSRQLANRIYKFRGDGKAWDWEVDTENGNYDYLMYADVDMDHPEVINELNRWGVWYANTLNLDGFRLDAVKHIKFSFMRDWLGHVRGQTGKNLFAVAEYWKNDLGALENYLSKTNWTMSAFDVPLHYNLYQASNSKGNYDMRNLLNGTLVQRHPSHAVTFVDNHDTQPGEALESFVQGWFKPLAYATILTREQGYPQVFYGDYYGIPSDGVPSYRQQIDPLLKARQQYAYGRQHDYFDHWDVIGWTREGNASHPNSGLATIMSDGPGGSKWMYVGRQKAGEVWHDMTGNRSGTVTINQDGWGHFFVNGRSVSVWVKR

SEQ ID NO: 31234 - protein, 485 aa, Bacillus sp.
HHDGTNGTIMQYFEWNVPNDGQHWNRLHNNAQNLKNAGITAIWIPPAWKGTSQNDVGYGAYDLYDLGEFNQKGTVRTKYGTKAELERAIRSLKANGIQVYGDVVMNHKGGADFTERVQAVEVNPQNRNQEVSGTYQIEAWTGFNFPGRGNQHSSFKWRWYHFDGTDWDQSRQLANRIYKFRGDGKAWDWEVDTENGNYDYLMYADVDMDHPEVINELNRWGVWYANTLNLDGFRLDAVKHIKFSFMRDWLGHVRGQTGKNLFAVAEYWKNDLGALENYLSKTNWTMSAFDVPLHYNLYQASNSSGNYDMRNLLNGTLVQRHPSHAVTFVDNHDTQPGEALESFVQGWFKPLAYATILTREQMYPQVFYGDYYGIPSDGVPSYRQQIDPLLKARQQYAYGRQHDYFDHWDVIGWTREGNASHPNSGLATIMSDGPGGSKWMYVGRQKAGEVWHDMTGNRSGTVTINQDGWGHFFVNGGSVSVWVKR

SEQ ID NO: 31235 - protein, 483 aa, Bacillus sp. (in: firmicutes)
HHDGTNGTIMQYFEWNVPNDGQHWNRLHNNAQNLKNAGITAIWIPPAWKGTSQNDVGYGTYDLYDLGEFNQKGTVRTKYGTKAELERAIRSLKANGIQVYGDVVMNHKGGADFTERVQAVEVNPQNRNQEVSGTYQIEAWTGFNFPGRGNQHSSFKWRWYHFDGTDWDQSRQLANRIYKFRGKAWDWEVDTENGNYDYLMYADVDMDHPEVINELNRWGVWYANTLNLDGFRLDAVKHIKFSFMRDWLGHVRGQTGKNLFAVAEYWKNDLGALENYLSKTNWTMSAFDVPLHYNLYQASNSSGNYDMRNLLNGTLVQRHPSHAVTFVDNHDTQPGEALESFVQGWFKPLAYATILTREQGYPQVFYGDYYGIPSDGVPSYRQQIDPLLKARQQYAYGRQHDYFDHWDVIGWTREGNASHPNSGLATIMSDGPGGSKWMYVGRQKAGEVWHDMTGNRSGTVTINQDGWGHFFVNGGSVSVWVKR

SEQ ID NO: 31236 - protein, 485 aa, Bacillus sp.
HHDGTNGTIMQYFEWNVPNDGQHWNRLHNNAQNLKNAGITAIWIPPAWKGTSQNDVGYGAYDLYDLGEFNQKGTVRTKYGTKAELERAIRSLKANGIQVYGDVVMNHKGGADFTERVQAVEVNPQNRNQEVSGTYQIEAWTGFNFPGRGNQHSSFKWRWYHFDGTDWDQSRQLANRIYKFRGDGKAWDWEVDTENGNWDYLMYADVDMDHPEVINELNRWGVWYANTLNLDGFRLDAVKHIKFSFMRDWLGHVRGQTGKNLFAVAEYWKNDLGALENYLSKTNWTMSAFDVPLHYNLYQASNSSGNYDMRNLLNGTLVQRHPSHAVTFVDNHDTQPGEALESFVQGWFKPLAYATILTREQGYPQVFYGDYYGIPSDGVPSYRQQIDPLLKARQQYAYGRQHDYFDHWDVIGWTREGNASHPNSGLATIMSDGPGGSKWMYVGRQKAGEVWHDMTGNRSGTVTINQDGWGHFFVNGGSVSVWVKR

SEQ ID NO: 31237 - protein, 485 aa, Bacillus sp.
HHDGTNGTIMQYFEWNVPNDGQHWNRLHNNAQNLKNAGITAIWIPPAWKGTSQNDVGYGAYDLYDLGEFNQKGTVRTKYGTKAELERAIRSLKANGIQVYGDVVMNHKGGADFTERVQAVEVNPQNRNQEVSGTYQIEAWTGFNFPGRGNQHSSFKWRWYHFDGTDWDQFRQLANRIYKFRGDGKAWDWEVDTENGNYDYLMYADVDMDHPEVINELNRWGVWYANTLNLDGFRLDAVKHIKFSFMRDWLGHVRGQTGKNLFAVAEYWKNDLGALENYLSKTNWTMSAFDVPLHYNLYQASNSSGNYDMRNLLNGTLVQRHPSHAVTFVDNHDTQPGEALESFVQGWFKPLAYATILTREQGYPQVFYGDYYGIPSDGVPSYRQQIDPLLKARQQYAYGRQHDYFDHWDVIGWTREGNASHPNSGLATIMSDGPGGSKWMYVGRQKAGEVWHDMTGNRSGTVTINQDGWGHFFVNGGSVSVWVKR

SEQ ID NO: 31238 - protein, 485 aa, Bacillus sp.
HHDGTNGTIMQYFEWNVPNDGQHWNRLHNNAQNLKNAGITAIWIPPAWKGTSQNDVGYGAYDLYDLGEFNQKGTVRTKYGTKAELERAIRSLKANGIQVYGDVVMNHKGGADFTERVQAVEVNPQNRNQEVSGTYQIEAWTGFNCPGRGNQHSSFKWRWYHFDGTDWDQSRQLANRIYKFRGDGKAWDWEVDTENGNYDYLMYADVDMDHPEVINELNRWGVWYANTLNLDGFRLDAVKHIKFSFMRDWLGHVRGQTGKNLFAVAEYWKNDLGALENYLSKTNWTMSAFDVPLHYNLYQASNSSGNYDMRNLLNGTLVQRHPSHAVTFVDNHDTQPGEALESFVQGWFKPLAYATILTREQGYPQVFYGDYYGIPSDGVPSYRQQIDPLLKARQQYAYGRQHDYFDHWDVIGWTREGNASHPNSGLATIMSDGPGGSKWMYVGRQKAGEVWHDMTGNRSGTVTINQDGWGHFFVNGGSVSVWVKR

SEQ ID NO: 31239 - protein, 485 aa, Bacillus sp.
HHDGTNGTIMQYFEWNVPNDGQHWNRLHNNAQNLKNAGITAIWIPPAWKGTSQNDVGYGAYDLYDLGEFNQKGTVRTKYGTKAELERAIRSLKANGIQVYGDVVMNHKGGADFTERVQAVEVNPQNRNQEVSGTYQIEAWTGFNFPGRGNQHSSFKWRWYHFDGTDWDQSRQLANRIYKFRGDGKAWDWEVDTENGNYDYLMYADVDMDHPEVINELNRWGVWYANTLNLDGFRLDAVKHIKFSFMRDWLGHVRGQTGKNLFAVAEYWKNDLGALENYLSKTNWTMSAFDVPLHYNLYQASNSSGNYDMRNLLNGTLVFRHPSHAVTFVDNHDTQPGEALESFVQGWFKPLAYATILTREQGYPQVFYGDYYGIPSDGVPSYRQQIDPLLKARQQYAYGRQHDYFDHWDVIGWTREGNASHPNSGLATIMSDGPGGSKWMYVGRQKAGEVWHDMTGNRSGTVTINQDGWGHFFVNGGSVSVWVKR

SEQ ID NO: 31240 - protein, 485 aa, Bacillus sp.
HHDGTNGTIMQYFEWNVPNDGQHWNRLHNNAQNLKNAGITAIWIPPAWKGTSQNDVGYGAYDLYDLGEFNQKGTVRTKYGTKAELERAIRSLKANGIQVYGDVVMNHKGGADFTERVQAVEVNPQNRNQEVSGTYQIEAWTGFNFPGRGNQHSSFKWRWYHFDGTDWDQSRQLANRIYKFRGDGKAWDWEVDTENGNYDYLMYADVDMDHPEVINELNRWGVWYANTLNLDGFRLDAVKHIKFSFMRDWLGHVRGQTGKNLFAVAEYWKNDLGALENYLSKTNWTMSAFDVPLHYNLYQASNSSGNYDMRNLLNFTLVQRHPSHAVTFVDNHDTQPGEALESFVQGWFKPLAYATILTREQGYPQVFYGDYYGIPSDGVPSYRQQIDPLLKARQQYAYGRQHDYFDHWDVIGWTREGNASHPNSGLATIMSDGPGGSKWMYVGRQKAGEVWHDMTGNRSGTVTINQDGWGHFFVNGGSVSVWVKR

SEQ ID NO: 31241 - protein, 485 aa, Bacillus sp.
HHDGTNGTIMQYFEWNVPNDGQHWNRLHNNAQNLKNAGITAIWIPPAWKGTSQNDVGYGAYDLYDLGEFNQKGTVRTKYGTKAELERAIRSLKANGIQVYGDVVMNHKGGADFTERVQAVEVNPQNRNQEVSVTYQIEAWTGFNFPGRGNQHSSFKWRWYHFDGTDWDQSRQLANRIYKFRGDGKAWDWEVDTENGNYDYLMYADVDMDHPEVINELNRWGVWYANTLNLDGFRLDAVKHIKFSFMRDWLGHVRGQTGKNLFAVAEYWKNDLGALENYLSKTNWTMSAFDVPLHYNLYQASNSSGNYDMRNLLNGTLVQRHPSHAVTFVDNHDTQPGEALESFVQGWFKPLAYATILTREQGYPQVFYGDYYGIPSDGVPSYRQQIDPLLKARQQYAYGRQHDYFDHWDVIGWTREGNASHPNSGLATIMSDGPGGSKWMYVGRQKAGEVWHDMTGNRSGTVTINQDGWGHFFVNGGSVSVWVKR

SEQ ID NO: 31242 - protein, 485 aa, Bacillus sp.
HHDGTNGTIMQYFEWNVPNDGQHWNRLHNNAQNLKNAGITAIWIPPAQKGTSQNDVGYGAYDLYDLGEFNQKGTVRTKYGTKAELERAIRSLKANGIQVYGDVVMNHKGGADFTERVQAVEVNPQNRNQEVSGTYQIEAWTGFNFPGRGNQHSSFKWRWYHFDGTDWDQSRQLANRIYKFRGDGKAWDWEVDTENGNYDYLMYADVDMDHPEVINELNRWGVWYANTLNLDGFRLDAVKHIKFSFMRDWLGHVRGQTGKNLFAVAEYWKNDLGALENYLSKTNWTMSAFDVPLHYNLYQASNSSGNYDMRNLLNGTLVQRHPSHAVTFVDNHDTQPGEALESFVQGWFKPLAYATILTREQGYPQVFYGDYYGIPSDGVPSYRQQIDPLLKARQQYAYGRQHDYFDHWDVIGWTREGNASHPNSGLATIMSDGPGGSKWMYVGRQKAGEVWHDMTGNRSGTVTINQDGWGHFFVNGGSVSVWVKR

SEQ ID NO: 31243 - protein, 485 aa, Bacillus sp.
HHDGTNGTIMQYFEWNVPNDGQHWNRLHNNAQNLKNAGITAIWIPPAWKGTSQNDVGYGAYDLYDLGEFNQKGTVRTKYGTKAELERAIRSLKANGIQVYGDVVMNHKGGADFTERVQAVEVNPQNRNQEVSGTYQIEAWTGFNFPGRGNQHSSFKWRWYHFDGTDWDQSRQLANRIYKARGDGKAWDWEVDTENGNYDYLMYADVDMDHPEVINELNRWGVWYANTLNLDGFRLDAVKHIKFSFMRDWLGHVRGQTGKNLFAVAEYWKNDLGALENYLSKTNWTMSAFDVPLHYNLYQASNSSGNYDMRNLLNGTLVQRHPSHAVTFVDNHDTQPGEALESFVQGWFKPLAYATILTREQGYPQVFYGDYYGIPSDGVPSYRQQIDPLLKARQQYAYGRQHDYFDHWDVIGWTREGNASHPNSGLATIMSDGPGGSKWMYVGRQKAGEVWHDMTGNRSGTVTINQDGWGHFFVNGGSVSVWVKR

SEQ ID NO: 31244 - protein, 485 aa, Bacillus sp.
HHDGTNGTIMQYFEWNVPNDGQHWNRLHNNAQNLKNAGITAIWIPPAWKGTSQNDVGYGAYDLYDLGEFNQKGTERTKYGTKAELERAIRSLKANGIQVYGDVVMNHKGGADFTERVQAVEVNPQNRNQEVSGTYQIEAWTGFNFPGRGNQHSSFKWRWYHFDGTDWDQSRQLANRIYKFRGDGKAWDWEVDTENGNYDYLMYADVDMDHPEVINELNRWGVWYANTLNLDGFRLDAVKHIKFSFMRDWLGHVRGQTGKNLFAVAEYWKNDLGALENYLSKTNWTMSAFDVPLHYNLYQASNSSGNYDMRNLLNGTLVQRHPSHAVTFVDNHDTQPGEALESFVQGWFKPLAYATILTREQGYPQVFYGDYYGIPSDGVPSYRQQIDPLLKARQQYAYGRQHDYFDHWDVIGWTREGNASHPNSGLATIMSDGPGGSKWMYVGRQKAGEVWHDMTGNRSGTVTINQDGWGHFFVNGGSVSVWVKR

SEQ ID NO: 31245 - protein, 485 aa, Bacillus sp.
HHDGTNGTIMQYFEWNVPNDGQHWNRLHNNAQNLKNAGITAIWIPPAWKGTSQNDVGYGAYDLYDLGEFNQKGTVRTKYGTKAELERAIRSLKANGIQVYGDVVMNHKGGADFTERVQAVEVNPQNRNQEVSGTYQIEAWTGFNFPGRGNQHSSFKWRWYHFDGTDWDQSRQLANRIYKFRGDGKAWDWEVDTENGNYDYLMYADVDMDHPEVINELNRWGVWYANTLNLDGFRLDAVKHIKFSFMRDWLGHVRGQTGKNLFAVAEYWKNDLGALENYLSKTNWTMSAFDVPLHYNLYQASNSSGNYDMRNLLNGTLVQRHPSHAVTFVDNHDTQPGEALESFVQGWFKPLAYATILTREQGYPQVFYGDYYGIPSDGVPSYRQQIDPLLKARQQYAYGRQHDYFDHWDVIGWTREGNASHPNSGLATIMSDGPGGSKWMHVGRQKAGEVWHDMTGNRSGTVTINQDGWGHFFVNGGSVSVWVKR

SEQ ID NO: 31246 - protein, 483 aa, Bacillus sp. (in: firmicutes)
HHDGTNGTIMQYFEWNVPNDGQHWNRLHNNAQNLKNAGITAIWIPPAWKGTSQNDVGYGAYDLYDLGEFNQKGTVRTKYGTKAELERAIRSLKANGIQVYGDVVMNHKGGADFTERVQAVEVNPQNRNQEVSGTYQIEAWTGFNFPGRGNQHSSFKWRWYHFDGTDWDQSRQLANRIYKFRGKAWDWEVDTENGNYDYLMYADVDMDHPEVINELNRWGVWYANTLNLDGFRLDAVKHIKFSFMRDWLGHVRGQTGKNLFAIAEYWKNDLGALENYLSKTNWTMSAFDVPLHYNLYQASNSSGNYDMRNLLNGTLVQRHPSHAVTLVDNHDTQPGEALESFVQGWFKPLAYATILTREQGYPSVFYGDYYGIPSDGVPSYRQQIDPLLKARQQYAYGRQHDYFDHWDVIGWTREGNASHPNSGLATIMSDGPGGSKWMYVGRQKAGEVWHDMTGNRSGTVTINQDGWGHFFVNGGSVSVWVKR

SEQ ID NO: 31247 - protein, 485 aa, Bacillus sp.
HHDGTNGTIMQYFEWNVPNDGQHWNRLHNNAQNLKNAGITAIWIPPAWKGTSQNDVGYGAYDLYDLGEFNQKGTVRTKYGTKAELERAIRSLKANGIQVYGDVVMNHKGGADFTERVQAVEVNPQNRNQEVSGTYQIEAWTGFNFPGRGNQHSSFKWRWYHFDGTDWDQSRQLANRIYKFRGDGKAWDWEVDTENGNYDYLMYADXDMDHPEVINELNRWGVWYANTLNLDGFRLDAVKHIKFSFMRDWLGHVRGQTGKNLFAVAEYWKNDLGALENYLSKTNWTMSAFDVPLHYNLYQASNSSGNYDMRNLLNGTLVQRHPSHAVTFVDNHDTQPGEALESFVQGWFKPLAYATILTREQGYPQVFYGDYYGIPSDGVPSYRQQIDPLLKARQQYAYGRQHDYFDHWDVIGWTREGNASHPNSGLATIMSDGPGGSKWMYVGRQKAGEVWHDMTGNRSGTVTINQDGWGHFFVNGGSVSVWVKR

SEQ ID NO: 31248 - protein, 485 aa, Bacillus sp.
HHDGTNGTIMQYFEWNVPNDGQHWNRLHNNAQNLKNAGITAIWIPPAWKGTSQNDVGYGAYDLYDLGEFNQKGTVRTKYGTKAELERAIRSLKANGIQVYGDVVMNHKGGADFTERVQAVEVNPQNRNQEVSGTYQIEAWTGFNFPGRGNQHSSFKWRWYHFDGTDWDQSRQLANRIYKFRGDGKAWDWEVDTENGNYDYLMYADVDMDHPEVINELNRWGVWYANTLNLDGFRLDAVKHIKFSFMRDWLGHVRGQTGKNLFAVAEYWKNDLGALENYLSKTNWTMSAFDVPLHYNLYQASNSSGNYDMRNLLNGTLVQRHPSHAVTFVDNHDTQPGEALESFVQGWFKPLAYATILTREQGYPQVFYGDYYGIPSDGVPSYRQQIDPLLKARQQYAYGRQMDYFDHWDVIGWTREGNASHPNSGLATIMSDGPGGSKWMYVGRQKAGEVWHDMTGNRSGTVTINQDGWGHFFVNGGSVSVWVKR

SEQ ID NO: 31249 - protein, 485 aa, Bacillus sp.
HHDGTNGTIMQYFEWNVPNDGQHWNRLHNNAQNLKNAGITAIWIPPAWKGTSQNDVGYGAYDLYDLGEFNQKGTVRTKYGTKAELERAIRSLKANGIQVYGDVVMNHKGGADFTERVQAVEVNPQNWNQEVSGTYQIEAWTGFNFPGRGNQHSSFKWRWYHFDGTDWDQSRQLANRIYKFRGDGKAWDWEVDTENGNYDYLMYADVDMDHPEVINELNRWGVWYANTLNLDGFRLDAVKHIKFSFMRDWLGHVRGQTGKNLFAVAEYWKNDLGALENYLSKTNWTMSAFDVPLHYNLYQASNSSGNYDMRNLLNGTLVQRHPSHAVTFVDNHDTQPGEALESFVQGWFKPLAYATILTREQGYPQVFYGDYYGIPSDGVPSYRQQIDPLLKARQQYAYGRQHDYFDHWDVIGWTREGNASHPNSGLATIMSDGPGGSKWMYVGRQKAGEVWHDMTGNRSGTVTINQDGWGHFFVNGGSVSVWVKR

SEQ ID NO: 31250 - protein, 485 aa, Bacillus sp.
HHDGTNGTIMQYFEWNVPNDGQHWNRLHNNAQNLKNAGITAIWIPPAFKGTSQNDVGYGAYDLYDLGEFNQKGTVRTKYGTKAELERAIRSLKANGIQVYGDVVMNHKGGADFTERVQAVEVNPQNRNQEVSGTYQIEAWTGFNFPGRGNQHSSFKWRWYHFDGTDWDQSRQLANRIYKFRGDGKAWDWEVDTENGNYDYLMYADVDMDHPEVINELNRWGVWYANTLNLDGFRLDAVKHIKFSFMRDWLGHVRGQTGKNLFAVAEYWKNDLGALENYLSKTNWTMSAFDVPLHYNLYQASNSSGNYDMRNLLNGTLVQRHPSHAVTFVDNHDTQPGEALESFVQGWFKPLAYATILTREQGYPQVFYGDYYGIPSDGVPSYRQQIDPLLKARQQYAYGRQHDYFDHWDVIGWTREGNASHPNSGLATIMSDGPGGSKWMYVGRQKAGEVWHDMTGNRSGTVTINQDGWGHFFVNGGSVSVWVKR

SEQ ID NO: 31251 - protein, 485 aa, Bacillus sp.
HHDGTNGTIMQYFEWNVPNDGQHWNRLHNNAQNLKNAGITAIWIPPAWKGTSQNDVGYGAYDLYDLGEFNQKGTVRTKYGTKAELERAIRSLKANGIQVYGDVVMNHKGGADFTERVQAVEVNPQNRNQEVSGTYQIEAWTGFNFPGRGNQHSSFKWRWYHFDGTDWDQSRQLANRIYKFRGDGKAWDWEVDTENGNYDYLMYADVDMDHPEVINELNRWGVWYANTLNLDGFRLDAVKHIKFSFMRDWLGHVRGQTGKNLFAVAEYWKNDLGALENYLSKTNWTMSAFDVPLHYNLYQASNSSGNYDMRNLLNGTLVQRHPSHAVTFVDNHDTQPGEALESFVQGWFKPLAYATILTREQGYPQVFTGDYYGIPSDGVPSYRQQIDPLLKARQQYAYGRQHDYFDHWDVIGWTREGNASHPNSGLATIMSDGPGGSKWMYVGRQKAGEVWHDMTGNRSGTVTINQDGWGHFFVNGGSVSVWVKR

SEQ ID NO: 31252 - protein, 485 aa, Bacillus sp.
HHDGTNGTIMQYFEWNVPNDGQHWNRLHNNAQNLKNAGITAIWIPPAWKGTSQNDVGYGAYDLYDLGEFNQKGTVRTKYGTKAELERAIRSLKANGIQVYGDVVMNHKGGADFTERVQAVEVNPQNRNQEVSGTYQIEAWTGFNFPGRGNQHSSFKWRWYHFDGTDWDQSRQLANRIYKFRGDGKAWDWEVDTENGNYDYLMLADVDMDHPEVINELNRWGVWYANTLNLDGFRLDAVKHIKFSFMRDWLGHVRGQTGKNLFAVAEYWKNDLGALENYLSKTNWTMSAFDVPLHYNLYQASNSSGNYDMRNLLNGTLVQRHPSHAVTFVDNHDTQPGEALESFVQGWFKPLAYATILTREQGYPQVFYGDYYGIPSDGVPSYRQQIDPLLKARQQYAYGRQHDYFDHWDVIGWTREGNASHPNSGLATIMSDGPGGSKWMYVGRQKAGEVWHDMTGNRSGTVTINQDGWGHFFVNGGSVSVWVKR

SEQ ID NO: 31253 - protein, 485 aa, Bacillus sp.
HHDGTNGTIMQYFEWNVPNDGQHWNRLHNNAQNLKNAGITAIWIPPAWKGTSQNDVGYGAYDLYDLGEFNQKGTVRTKYGTKAELERAIRSLKANGIQVYGDVVMNHKGGADFTERVQAVEVNPQNRNQEVSGTYQIEAWTGFNFPGRGNQHSSFKWRWYHFDGTDWDQSRQLANRIYKFRGDGKAWDWEVDTENGNYDYLMYADVDMDHPEVINELNRWGVWYANTLNLDGFRLDAVKHIKFSFMRDWLGHVRGQTGKNLFAVAEYWKNDLGALENYLSKTNWTMSAFDVPLHYNLYQASNSSGNYDMRNLLNGTLVQRHPSHAVTFVDNHDTQPGEALESFVQGWFKPLAYATILTREQGYPQVFYGDYYGIPSDGVPSYRQQIDPLLKARQQYAYGRQHDYFDHWDVIGWTREGNASHPNSGLATIMSDGPGESKWMYVGRQKAGEVWHDMTGNRSGTVTINQDGWGHFFVNGGSVSVWVKR

SEQ ID NO: 31254 - protein, 485 aa, Bacillus sp.
HHDGTNGTIMQYFEWNVPNDGQHWNRLHNNAQNLKNAGITAIWIPPAWKGTSQNDVGYGAYDLYDLGEFNQKGTVRTKYGTKAELERAIRSLKANGIQVYGDVVMNHKGGADFTERVQAVEVNPQNRNQEVSGTYQIEAWTGFNFPGRGNQHSSFKWRWYHFDGTDWDQSRQLANRIYKFRGDGKAWDWEVDTENGNYDYLMYADVDMDHPEVINELNRWGVWYANTLNLDGFRLDAVKHIKFSFMRDWLGHVRGQTGKNLFAVAEYWKNDLGALENYLSKTNWTMSAFDVPLHYNLYQASNSSGNYDMRNLLNGTLVQRHPSHAVTFVDNHDTQPGEALESFVQGWFKPLAYATILTREQGYPQVFYGDYYGIPSDGVPSYRQQIDPLLKARQQYAYGRQHDYFDHWDVIGWTREGNASHPNSGLATIMSDGPGGSKWMYVGRQKAGEVWHDMTGNRSGTVQINQDGWGHFFVNGGSVSVWVKR

SEQ ID NO: 31255 - protein, 485 aa, Bacillus sp.
HHDGTNGTIMQYFEWNVPNDGQHWNRLHNNAQNLKNAGITAIWIPPAWKGTSQNDVGYGAYDLYDLGEFNQKGTVRTKYGTKAELERAIRSLKANGIQVYGDVVMNHKGGADFTERVQAVEVNPQNGNQEVSGTYQIEAWTGFNFPGRGNQHSSFKWRWYHFDGTDWDQSRQLANRIYKFRGDGKAWDWEVDTENGNYDYLMYADVDMDHPEVINELNRWGVWYANTLNLDGFRLDAVKHIKFSFMRDWLGHVRGQTGKNLFAVAEYWKNDLGALENYLSKTNWTMSAFDVPLHYNLYQASNSSGNYDMRNLLNGTLVQRHPSHAVTFVDNHDTQPGEALESFVQGWFKPLAYATILTREQGYPQVFYGDYYGIPSDGVPSYRQQIDPLLKARQQYAYGRQHDYFDHWDVIGWTREGNASHPNSGLATIMSDGPGGSKWMYVGRQKAGEVWHDMTGNRSGTVTINQDGWGHFFVNGGSVSVWVKR

SEQ ID NO: 31256 - protein, 485 aa, Bacillus sp.
HHDGTNGTIMQYFEWNVPNDGQHWNRLHNNAQNLKNAGITAIWIPPAWKGTSQNDVGYGAYDLYDLGEFNQKGTVRTKYGTKAELERAIRSLKANGIQVYGDVVMNHKGGADFTERVQAVEVNPQNRNQEVSGTYQIEAWTGFNFPGRGNQHSSFKWRWYHFDGTDWDQSRQLANRIYKFRGDGKAWDWEVDTENGNYDYLMYADVDMDHPEVINELNRWGVWYANTLNLDGFRLDAVKHIKFSFMRDWLGHVRGQTGKNLFAVAEYWKNDLGALENYLSLTNWTMSAFDVPLHYNLYQASNSSGNYDMRNLLNGTLVQRHPSHAVTFVDNHDTQPGEALESFVQGWFKPLAYATILTREQGYPQVFYGDYYGIPSDGVPSYRQQIDPLLKARQQYAYGRQHDYFDHWDVIGWTREGNASHPNSGLATIMSDGPGGSKWMYVGRQKAGEVWHDMTGNRSGTVTINQDGWGHFFVNGGSVSVWVKR

SEQ ID NO: 31257 - protein, 485 aa, Bacillus sp.
HHDGTNGTIMQYFEWNVPNDGQHWNRLHNNAQNLKNAGITAIWIPPAWKGTSQNDVGYGAYDLYDLGEFNQKGTVRTKYGTKAELERAARSLKANGIQVYGDVVMNHKGGADFTERVQAVEVNPQNRNQEVSGTYQIEAWTGFNFPGRGNQHSSFKWRWYHFDGTDWDQSRQLANRIYKFRGDGKAWDWEVDTENGNYDYLMYADVDMDHPEVINELNRWGVWYANTLNLDGFRLDAVKHIKFSFMRDWLGHVRGQTGKNLFAVAEYWKNDLGALENYLSKTNWTMSAFDVPLHYNLYQASNSSGNYDMRNLLNGTLVQRHPSHAVTFVDNHDTQPGEALESFVQGWFKPLAYATILTREQGYPQVFYGDYYGIPSDGVPSYRQQIDPLLKARQQYAYGRQHDYFDHWDVIGWTREGNASHPNSGLATIMSDGPGGSKWMYVGRQKAGEVWHDMTGNRSGTVTINQDGWGHFFVNGGSVSVWVKR

SEQ ID NO: 31258 - protein, 485 aa, Bacillus sp.
HHDGTNGTIMQYFEWNVPNDGQHWNRLHNNAQNLKNAGITAIWIPPAWKGTSQNDVGYGAYDLYDLGEFNQKGTVRTKYGTKAELERAIRSLKANGIQVYGDVVMNHKGGADFTERVQAVEVNPQNRNQEVSGTYQIEAWTGFNFPGRGNQHSSFEWRWYHFDGTDWDQSRQLANRIYKFRGDGKAWDWEVDTENGNYDYLMYADVDMDHPEVINELNRWGVWYANTLNLDGFRLDAVKHIKFSFMRDWLGHVRGQTGKNLFAVAEYWKNDLGALENYLSKTNWTMSAFDVPLHYNLYQASNSSGNYDMRNLLNGTLVQRHPSHAVTFVDNHDTQPGEALESFVQGWFKPLAYATILTREQGYPQVFYGDYYGIPSDGVPSYRQQIDPLLKARQQYAYGRQHDYFDHWDVIGWTREGNASHPNSGLATIMSDGPGGSKWMYVGRQKAGEVWHDMTGNRSGTVTINQDGWGHFFVNGGSVSVWVKR

SEQ ID NO: 31259 - protein, 485 aa, Bacillus sp.
HHDGTNGTIMQYFEWNVPNDGQHWNRLHNNAQNLKNAYITAIWIPPAWKGTSQNDVGYGAYDLYDLGEFNQKGTVRTKYGTKAELERAIRSLKANGIQVYGDVVMNHKGGADFTERVQAVEVNPQNRNQEVSGTYQIEAWTGFNFPGRGNQHSSFKWRWYHFDGTDWDQSRQLANRIYKFRGDGKAWDWEVDTENGNYDYLMYADVDMDHPEVINELNRWGVWYANTLNLDGFRLDAVKHIKFSFMRDWLGHVRGQTGKNLFAVAEYWKNDLGALENYLSKTNWTMSAFDVPLHYNLYQASNSSGNYDMRNLLNGTLVQRHPSHAVTFVDNHDTQPGEALESFVQGWFKPLAYATILTREQGYPQVFYGDYYGIPSDGVPSYRQQIDPLLKARQQYAYGRQHDYFDHWDVIGWTREGNASHPNSGLATIMSDGPGGSKWMYVGRQKAGEVWHDMTGNRSGTVTINQDGWGHFFVNGGSVSVWVKR

SEQ ID NO: 31260 - protein, 485 aa, Bacillus sp.
HHDGTNGTIMQYFEWNVPNDGQHWNRLHNNAQNLKNAGITAIWIPPAWKGTSQNDVGYGAYDLYDLGEFNQKGTVRTKYGTKAELERAIRSLKANGIQVYGDVVMNHKGGACFTERVQAVEVNPQNRNQEVSGTYQIEAWTGFNFPGRGNQHSSFKWRWYHFDGTDWDQSRQLANRIYKFRGDGKAWDWEVDTENGNYDYLMYADVDMDHPEVINELNRWGVWYANTLNLDGFRLDAVKHIKFSFMRDWLGHVRGQTGKNLFAVAEYWKNDLGALENYLSKTNWTMSAFDVPLHYNLYQASNSSGNYDMRNLLNGTLVQRHPSHAVTFVDNHDTQPGEALESFVQGWFKPLAYATILTREQGYPQVFYGDYYGIPSDGVPSYRQQIDPLLKARQQYAYGRQHDYFDHWDVIGWTREGNASHPNSGLATIMSDGPGGSKWMYVGRQKAGEVWHDMTGNRSGTVTINQDGWGHFFVNGGSVSVWVKR

SEQ ID NO: 31261 - protein, 485 aa, Bacillus sp.
HHDGTNGTIMQYFEWNVPNDGQHWNRLHNNAQNLKNAGITAIWIPPAWKGTSQNDVGYGAYDLYDLGEFNQKGTVRTKYGTKAELERAIRSLKANGIQVYGDVVMNHKGGADFTERVQAVEVNPQNRNQEVSGTYQIEAWTGFNFPGRGNQHSSFKWRWYHFDGTDWDQSRQLANRIYKFRGDGKAWDWEVDTENGCYDYLMYADVDMDHPEVINELNRWGVWYANTLNLDGFRLDAVKHIKFSFMRDWLGHVRGQTGKNLFAVAEYWKNDLGALENYLSKTNWTMSAFDVPLHYNLYQASNSSGNYDMRNLLNGTLVQRHPSHAVTFVDNHDTQPGEALESFVQGWFKPLAYATILTREQGYPQVFYGDYYGIPSDGVPSYRQQIDPLLKARQQYAYGRQHDYFDHWDVIGWTREGNASHPNSGLATIMSDGPGGSKWMYVGRQKAGEVWHDMTGNRSGTVTINQDGWGHFFVNGGSVSVWVKR

SEQ ID NO: 31262 - protein, 485 aa, Bacillus sp.
HHDGTNGTIMQYFEWNVPNDGQHWNRLHNNAQNLKNAGITAIWIPPAWKGTSQNDVGYGAYDLYDLGEFNQKGTVRTKYGTKAELERAIRSLKANGIQVYGDVVMNHKGGADFTERVQAVEVNPQNRNQEVSGTYQIEAWTGFNFPGRGNQHSSFAWRWYHFDGTDWDQSRQLANRIYKFRGDGKAWDWEVDTENGNYDYLMYADVDMDHPEVINELNRWGVWYANTLNLDGFRLDAVKHIKFSFMRDWLGHVRGQTGKNLFAVAEYWKNDLGALENYLSKTNWTMSAFDVPLHYNLYQASNSSGNYDMRNLLNGTLVQRHPSHAVTFVDNHDTQPGEALESFVQGWFKPLAYATILTREQGYPQVFYGDYYGIPSDGVPSYRQQIDPLLKARQQYAYGRQHDYFDHWDVIGWTREGNASHPNSGLATIMSDGPGGSKWMYVGRQKAGEVWHDMTGNRSGTVTINQDGWGHFFVNGGSVSVWVKR

SEQ ID NO: 31263 - protein, 485 aa, Bacillus sp.
HHDGTNGTIMQYFEWNVPNDGQHWNRLHNNAQNLKNAGITAIWIPPAWKGTSQNDVGYGAYDLYDLGEFNQKGTVRTKYGTKAELERAIRSLKANGIQVYGDVVMNHVGGADFTERVQAVEVNPQNRNQEVSGTYQIEAWTGFNFPGRGNQHSSFKWRWYHFDGTDWDQSRQLANRIYKFRGDGKAWDWEVDTENGNYDYLMYADVDMDHPEVINELNRWGVWYANTLNLDGFRLDAVKHIKFSFMRDWLGHVRGQTGKNLFAVAEYWKNDLGALENYLSKTNWTMSAFDVPLHYNLYQASNSSGNYDMRNLLNGTLVQRHPSHAVTFVDNHDTQPGEALESFVQGWFKPLAYATILTREQGYPQVFYGDYYGIPSDGVPSYRQQIDPLLKARQQYAYGRQHDYFDHWDVIGWTREGNASHPNSGLATIMSDGPGGSKWMYVGRQKAGEVWHDMTGNRSGTVTINQDGWGHFFVNGGSVSVWVKR

SEQ ID NO: 31264 - protein, 485 aa, Bacillus sp.
HHDGTNGTIMQYFEWNVPNDGQHWNRLHNNAQNLKNAGITAIWIPPAWKGTSQNDVGYGAYDLYDLGEFNQKGTVRTKYGTKAELERAIRSLKANGIQVYGDVVMNHKGGADFTERVQAVEVNPQNRNQEVSGTYQIEAWTGFNFPGRGNQHSSFKWRWYHFDGTDWDQSRQLANRIYKFRGDGKAWDWEVDTENGNYDYLMYADVDMDHPEVINELNRWGVWYANTLNLDGFRLDAVKHIKFSFMRDWLGHVRGQTGKNLFAVAEYWKNDLGALENYLSKTNWTMSAFDVPLHYNLYQASNSSGNYDMRNLLNGTLVQRHPSHAVTFVDNHDTQPGEALESFVQGWFKPLAYATILTREQGRPQVFYGDYYGIPSDGVPSYRQQIDPLLKARQQYAYGRQHDYFDHWDVIGWTREGNASHPNSGLATIMSDGPGGSKWMYVGRQKAGEVWHDMTGNRSGTVTINQDGWGHFFVNGGSVSVWVKR

SEQ ID NO: 31265 - protein, 485 aa, Bacillus sp.
HHDGTNGTIMQYFEWNVPNDGQHWNRLHNNAQNLKNAGITAIWIPPAWKGTSQNDVGYGAYDCYDLGEFNQKGTVRTKYGTKAELERAIRSLKANGIQVYGDVVMNHKGGADFTERVQAVEVNPQNRNQEVSGTYQIEAWTGFNFPGRGNQHSSFKWRWYHFDGTDWDQSRQLANRIYKFRGDGKAWDWEVDTENGNYDYLMYADVDMDHPEVINELNRWGVWYANTLNLDGFRLDAVKHIKFSFMRDWLGHVRGQTGKNLFAVAEYWKNDLGALENYLSKTNWTMSAFDVPLHYNLYQASNSSGNYDMRNLLNGTLVQRHPSHAVTFVDNHDTQPGEALESFVQGWFKPLAYATILTREQGYPQVFYGDYYGIPSDGVPSYRQQIDPLLKARQQYAYGRQHDYFDHWDVIGWTREGNASHPNSGLATIMSDGPGGSKWMYVGRQKAGEVWHDMTGNRSGTVTINQDGWGHFFVNGGSVSVWVKR

SEQ ID NO: 31266 - protein, 485 aa, Bacillus sp.
HHDGTNGTIMQYFEWNVPNDGQHWNRLHNNAQNLKNAGITAIWIPPAWKGTSQNDVGYGAYDLYDLGEFNQKGTVRTKYGTKAELERAIRSLKANGIQVYGDVVMNHKGGADFTERVQAVEVNPQNRNQEVSGTYQIEAWTGFNFPGRGNQHSSFKWRWYHFDGTDGDQSRQLANRIYKFRGDGKAWDWEVDTENGNYDYLMYADVDMDHPEVINELNRWGVWYANTLNLDGFRLDAVKHIKFSFMRDWLGHVRGQTGKNLFAVAEYWKNDLGALENYLSKTNWTMSAFDVPLHYNLYQASNSSGNYDMRNLLNGTLVQRHPSHAVTFVDNHDTQPGEALESFVQGWFKPLAYATILTREQGYPQVFYGDYYGIPSDGVPSYRQQIDPLLKARQQYAYGRQHDYFDHWDVIGWTREGNASHPNSGLATIMSDGPGGSKWMYVGRQKAGEVWHDMTGNRSGTVTINQDGWGHFFVNGGSVSVWVKR

SEQ ID NO: 31267 - protein, 485 aa, Bacillus sp.
HHDGTNGTIMQYFEWNVPNDGQHWNRLHNNAQNLKNAGITAIWIPPAWKGTSQNDVGYGAYDLYDLGEFNQKGTVRTKYGTKAELERAIRSLKANGIQVYGDVVMNHKGGADFTERVQAVEVNPQNRNQEVSGTYQIEAWTGFNFPGRGNQHSSFKWRWYHFDGTDWDQSRQLANRIYKFRGDGKAWDWEVDTENGNYDYLMYADVDMDHPEVINELNRWGVWYANTLNLDGFRLDAVKHIKFSFMRDWLGHVRGQTGKNLFAVAEYWKNDLGALENYLSKTNWTMSAFDVPLHYNLYQASNSSGNYDMRNLLNGTLVQRHPSHAVTFVDNHDTQPGEALESFVQGWFKPLAYATILTREQGYPQVFYLDYYGIPSDGVPSYRQQIDPLLKARQQYAYGRQHDYFDHWDVIGWTREGNASHPNSGLATIMSDGPGGSKWMYVGRQKAGEVWHDMTGNRSGTVTINQDGWGHFFVNGGSVSVWVKR

SEQ ID NO: 31268 - protein, 485 aa, Bacillus sp. (in: firmicutes)
HHDGTNGTIMQYFEWNVPNDGQHWNRLHNNAQNLKNAGITAIWIPPAWKGTSQNDVGYGAYDLYDLGEFNQKGTVRTKYGTKAELERAIRSLKANGIQVYGDVVMNHKGGADFTERVQAVEVNPQNRNQEVSGTYQIEAWTGFNFPGRGNQHSSFKWRWYHFDGTDWDQSRQLANRIYKFRGDGKAWDWEVDTENGNYDYLMYADVDMDHPEVINELNRWGVWYANTLNLDGFRLDAVKHIKFSFMRDWLGHVRGQTGKNLFAVAEYWKNDLGALENYLSYTNWTMSAFDVPLHYNLYQASNSSGNYDMRNLLNGTLVQRHPSHAVTFVDNHDTQPGEALESFVQGWFKPLAYATILTREQGYPQVFYGDYYGIPSDGVPSYRQQIDPLLKARQQYAYGRQHDYFDHWDVIGWTREGNASHPNSGLATIMSDGPGGSKWMYVGRQKAGEVWHDMTGNRSGTVTINQDGWGHFFVNGGSVSVWVKR

SEQ ID NO: 31269 - protein, 485 aa, Bacillus sp.
HHDGTNGTIMQYFEWNVPNDGQHWNRLHNNAQNLKNAGITAIWIPPAWKGTSQNDVGYGAYDLYDLGEFNQKGTVRTKYGTKAELERAIRSLKANGIQVYGDVVMNHKGGADFTERVQAVEVNPQNRNQEVSGTYQIEAWTGFNFPGRGNQHSSFKWRWYHFDGTDWDQSRQLANRIYKFRGDGKAWDWEVDTENGNYDYLMYADVDMDHPEVINELNRWGVWYANTLNLDGFRLDAVKHIKFSFMRDWLGHVRGQTGKNLFAVAEYWKNDLGALENYLSKTNWTMSAFDVPLHYNLYQASNSSGNYDMRNLLNGTLVQRHPSHAVTFVDNHDTQPMEALESFVQGWFKPLAYATILTREQGYPQVFYGDYYGIPSDGVPSYRQQIDPLLKARQQYAYGRQHDYFDHWDVIGWTREGNASHPNSGLATIMSDGPGGSKWMYVGRQKAGEVWHDMTGNRSGTVTINQDGWGHFFVNGGSVSVWVKR

SEQ ID NO: 31270 - protein, 485 aa, Bacillus sp.
HHDGTNGTIMQYFEWNVPNDGQHWNRLHNNAQNLKNAGITAIWIPPAWKGTSQNDVGYGAYDLHDLGEFNQKGTVRTKYGTKAELERAIRSLKANGIQVYGDVVMNHKGGADFTERVQAVEVNPQNRNQEVSGTYQIEAWTGFNFPGRGNQHSSFKWRWYHFDGTDWDQSRQLANRIYKFRGDGKAWDWEVDTENGNYDYLMYADVDMDHPEVINELNRWGVWYANTLNLDGFRLDAVKHIKFSFMRDWLGHVRGQTGKNLFAVAEYWKNDLGALENYLSKTNWTMSAFDVPLHYNLYQASNSSGNYDMRNLLNGTLVQRHPSHAVTFVDNHDTQPGEALESFVQGWFKPLAYATILTREQGYPQVFYGDYYGIPSDGVPSYRQQIDPLLKARQQYAYGRQHDYFDHWDVIGWTREGNASHPNSGLATIMSDGPGGSKWMYVGRQKAGEVWHDMTGNRSGTVTINQDGWGHFFVNGGSVSVWVKR

SEQ ID NO: 31271 - protein, 485 aa, Bacillus sp.
HHDGTNGTIMQYFEWNVPNDGQHWNRLHNNAQNLKNAGITAIWIPPAWKGTSQNDVGYGAYDLYDLGEFNQKGTVRTKYGTKAELERAIRSLKANGIQVYGDVVMNHKGGADFTERVQAVEVNPQNRNQEVSGTYQIEAWTGFNFPGRGNQHSSFKWRWYHFDGTDWDQSRQLANRIVKFRGDGKAWDWEVDTENGNYDYLMYADVDMDHPEVINELNRWGVWYANTLNLDGFRLDAVKHIKFSFMRDWLGHVRGQTGKNLFAVAEYWKNDLGALENYLSKTNWTMSAFDVPLHYNLYQASNSSGNYDMRNLLNGTLVQRHPSHAVTFVDNHDTQPGEALESFVQGWFKPLAYATILTREQGYPQVFYGDYYGIPSDGVPSYRQQIDPLLKARQQYAYGRQHDYFDHWDVIGWTREGNASHPNSGLATIMSDGPGGSKWMYVGRQKAGEVWHDMTGNRSGTVTINQDGWGHFFVNGGSVSVWVKR

SEQ ID NO: 31272 - protein, 485 aa, Bacillus sp.
HHDGTNGTIMQYFEWNVPNDGQHWNRLHNNAQNLKNAGITAIWIPPAWKGTSQNDVGYGAYDLYDLGEFNQKGTVRTKYGTKAELERAIRSLKANGIQVYGDVVMNHKGGADFTERVQAVEVNPQNRNQEVSGTYQIEAWTGFNFPGRGNQHSSFKWRWYHFDGTDWDQSRQLANRIYKFRGDGKAWDWEVDTENGNYDYLMYADVDMDHPEVINELNRWGVWYANTLNLDGFRLDAVKHIKFSFMRDWLGHVRGQTGKNLFAVAEYWKNDLGALENYLSKTNWTMSAFDVPLHYNLYQASNSSGNYDMRNLLNGTLVQRHPSHAVTFVDNHDTQPGEALESFVQGWFKPLAYATILTREQGYPQVFIGDYYGIPSDGVPSYRQQIDPLLKARQQYAYGRQHDYFDHWDVIGWTREGNASHPNSGLATIMSDGPGGSKWMYVGRQKAGEVWHDMTGNRSGTVTINQDGWGHFFVNGGSVSVWVKR

SEQ ID NO: 31273 - protein, 485 aa, Bacillus sp.
HHDGTNGTIMQYFEWNVPNDGQHWNRLHNNAQNLKNAGITAIWIPPAWKGTSQNDVGYGAYDLYDLGEFNQKGTVRTKYGTKAELERAIRSLKANGIQVYGDVVMNHKGGADFTERVQAVEVNPQNRNQEVSGTYQIEAWTGFNFPGRGNQHSSFKWRWYHFDGTDWDQSRQLANRIYKFRGDGKAWDWEVDTENGNYDYLMYADVDMDHPEVINELNRWGVWYANTLNLDGFRLDAVKHIKFSFMRDWLGHVRGQTGKNLPAVAEYWKNDLGALENYLSKTNWTMSAFDVPLHYNLYQASNSSGNYDMRNLLNGTLVQRHPSHAVTFVDNHDTQPGEALESFVQGWFKPLAYATILTREQGYPQVFYGDYYGIPSDGVPSYRQQIDPLLKARQQYAYGRQHDYFDHWDVIGWTREGNASHPNSGLATIMSDGPGGSKWMYVGRQKAGEVWHDMTGNRSGTVTINQDGWGHFFVNGGSVSVWVKR

SEQ ID NO: 31274 - protein, 485 aa, Bacillus sp.
HHDGTNGTIMQYFEWNVPNDGQHWNRLHNNAQNLKNAGITAIWIPPAWKGTSQNDVGYGAYDLYDLGEFNQKGTVRTKYGTKAELERAIRSLKANGIQVYGDVVMNHKGGADFTERVQAVEVNPQNRNQEVSGTYQIEAWTGFNFPGRGNQHSSFKWRWYHFDGTDWDQSRQLANRIYKFRGDGKAWDWEVDTENGNYDYLMYADVDMDHPEVINELNRWGVWYANTLNLDGFRLDAVKHIKFSFMRDWLGHVRGQTGKNLFAVAEYWKNDLGALENYLSKTNWTMSAFDVPLHYNLYQASNSSGNYDMRNLLNGTLVQRHPSHAVTFVDNHDTQPGEALESFVQGWFKPLAYATILTREQGYPQVFYGDYYGIPSDGVPSYRQQIDPLLKARQQYAYGRQHDYFDHWDVLGWTREGNASHPNSGLATIMSDGPGGSKWMYVGRQKAGEVWHDMTGNRSGTVTINQDGWGHFFVNGGSVSVWVKR

SEQ ID NO: 31275 - protein, 485 aa, Bacillus sp. (in: firmicutes)
HHDGTNGTIMQYFEWNVPNDGQHWNRLHNNAQNLKNAGITAIWIPPAWKGTSQNDVGYGAYDLYDLGEFNQKGTVRTKYGTKAELERAIRSLKANGIQVYGDVVMNHKGGADFTERVQAVEVNPQNRNQEVSGTYQIEAWTGFNFPGRGNQHSSFKWRWYHFDGTDWDQSRQLANRIYKFRGDGKAWDWEVDTENGNYDYLMYADVDMDHPEVINELNRWGVWYANTLNLDGFRLDAVKHIKFSFMRDWLGHVRGQTGKNLFAVAEYWKNDLGALENYLSITNWTMSAFDVPLHYNLYQASNSSGNYDMRNLLNGTLVQRHPSHAVTFVDNHDTQPGEALESFVQGWFKPLAYATILTREQGYPQVFYGDYYGIPSDGVPSYRQQIDPLLKARQQYAYGRQHDYFDHWDVIGWTREGNASHPNSGLATIMSDGPGGSKWMYVGRQKAGEVWHDMTGNRSGTVTINQDGWGHFFVNGGSVSVWVKR

SEQ ID NO: 31276 - protein, 485 aa, Bacillus sp.
HHDGTNGAIMQYFEWNVPNDGQHWNRLHNNAQNLKNAGITAIWIPPAWKGTSQNDVGYGAYDLYDLGEFNQKGTVRTKYGTKAELERAIRSLKANGIQVYGDVVMNHKGGADFTERVQAVEVNPQNRNQEVSGTYQIEAWTGFNFPGRGNQHSSFKWRWYHFDGTDWDQSRQLANRIYKFRGDGKAWDWEVDTENGNYDYLMYADVDMDHPEVINELNRWGVWYANTLNLDGFRLDAVKHIKFSFMRDWLGHVRGQTGKNLFAVAEYWKNDLGALENYLSKTNWTMSAFDVPLHYNLYQASNSSGNYDMRNLLNGTLVQRHPSHAVTFVDNHDTQPGEALESFVQGWFKPLAYATILTREQGYPQVFYGDYYGIPSDGVPSYRQQIDPLLKARQQYAYGRQHDYFDHWDVIGWTREGNASHPNSGLATIMSDGPGGSKWMYVGRQKAGEVWHDMTGNRSGTVTINQDGWGHFFVNGGSVSVWVKR

SEQ ID NO: 31277 - protein, 485 aa, Bacillus sp.
HHDGTNGTIMQYFEWNVPNDGQHWNRLHNNAQNLKNAGITAIWIPPAWKGTSQNDVGYGAYDLYDLGEFNQKGTVRTKYGTKAELERAIRSLKANGIQVYGDVVMNHKGGADFTERVQAVEVNPQNRNQEVSGTYQIEAWTGFNFPGRGNQHSSFKWRWYHFDGTDWDQSRQLANRIYKFRGDGKAWDWEVDTENGNYDYLMYADVDMDHPEVINELNRWGVWYANRLNLDGFRLDAVKHIKFSFMRDWLGHVRGQTGKNLFAVAEYWKNDLGALENYLSKTNWTMSAFDVPLHYNLYQASNSSGNYDMRNLLNGTLVQRHPSHAVTFVDNHDTQPGEALESFVQGWFKPLAYATILTREQGYPQVFYGDYYGIPSDGVPSYRQQIDPLLKARQQYAYGRQHDYFDHWDVIGWTREGNASHPNSGLATIMSDGPGGSKWMYVGRQKAGEVWHDMTGNRSGTVTINQDGWGHFFVNGGSVSVWVKR

SEQ ID NO: 31278 - protein, 485 aa, Bacillus sp.
HHDGTNGTIMQYFEWNVPNDGQHWNRLHNNAQNLKNAGITAIWIPPAWKGTSQNDVGYGAYDLYDLGEFNQKGTVRTKYGTKAELERAIRSLKANGIQVYGDVVMNHKGGADFTERVQAVEVNPQNRNQEVSGTYQIEAWTGFNNPGRGNQHSSFKWRWYHFDGTDWDQSRQLANRIYKFRGDGKAWDWEVDTENGNYDYLMYADVDMDHPEVINELNRWGVWYANTLNLDGFRLDAVKHIKFSFMRDWLGHVRGQTGKNLFAVAEYWKNDLGALENYLSKTNWTMSAFDVPLHYNLYQASNSSGNYDMRNLLNGTLVQRHPSHAVTFVDNHDTQPGEALESFVQGWFKPLAYATILTREQGYPQVFYGDYYGIPSDGVPSYRQQIDPLLKARQQYAYGRQHDYFDHWDVIGWTREGNASHPNSGLATIMSDGPGGSKWMYVGRQKAGEVWHDMTGNRSGTVTINQDGWGHFFVNGGSVSVWVKR

SEQ ID NO: 31279 - protein, 485 aa, Bacillus sp.
HHDGTNGTIMQYFEWNVPNDGQHWNRLHNNAQNLKNAGITAIWIPPAWKGTSQNDVGYGAYDLYDLGEFNQKGTVRTKYGTKAELERAIRSLKANGIQVYGDVVMNHKGGADFTERVQAVEVNPQNRNQEVSGTYQIEAWTGFNFPGRGNQHSSFKWRWYHFDGTDWDQSRQLANRIYKFRGDGKAWDWEVDTENGNYDYLMYADVDMDHPEVINELNRWGVWYANTLNLDGFRLDAVKHIKFSFMRDWLGHVRGQTGKNLFAVAEYWKNDLGALENYLSKTNWTMSAFDVPLHYNLYQASNSSGNYDMRNLLNGTLVQRHPSHAVTFVDNHDTQPGEALESFVQGWFKPLAYATILTREQGYPQVFYGDYYGIPSDGVPSYRQQIDMLLKARQQYAYGRQHDYFDHWDVIGWTREGNASHPNSGLATIMSDGPGGSKWMYVGRQKAGEVWHDMTGNRSGTVTINQDGWGHFFVNGGSVSVWVKR

SEQ ID NO: 31280 - protein, 485 aa, Bacillus sp.
HHDGTNGTIMQYFEWNVPNDGQHWNRLHNNAQNLKNAGITAIWIPPAWKGTSQNDVGYGAYDLYDLGEFNQKGTVRTKYGTKAELERAIRSLKANGIQVYGDVVMNHKGGADFTERVQAVEVNPQNRNQEVSGTYQIEAWTGFNFSGRGNQHSSFKWRWYHFDGTDWDQSRQLANRIYKFRGDGKAWDWEVDTENGNYDYLMYADVDMDHPEVINELNRWGVWYANTLNLDGFRLDAVKHIKFSFMRDWLGHVRGQTGKNLFAVAEYWKNDLGALENYLSKTNWTMSAFDVPLHYNLYQASNSSGNYDMRNLLNGTLVQRHPSHAVTFVDNHDTQPGEALESFVQGWFKPLAYATILTREQGYPQVFYGDYYGIPSDGVPSYRQQIDPLLKARQQYAYGRQHDYFDHWDVIGWTREGNASHPNSGLATIMSDGPGGSKWMYVGRQKAGEVWHDMTGNRSGTVTINQDGWGHFFVNGGSVSVWVKR

SEQ ID NO: 31281 - protein, 485 aa, Bacillus sp.
HHDGTNGTIMQYFEWNVPNDGQHWNRLHNNAQNLKNAGITAIWIPPAWKGTSQNDVGYGAYDLYDLGEFNQKGTVRTKYGTKAELERAIRSLKANGIQVYGDVVMNHKGGADFTERVQAVEVNPQNRNQEVSGTYQIEAWTGFNFPGRGNQHSSFKWRWYHFDGTDWDQSRQLANRIYKFRGDGKAWDWEVDTENGNYDYLMYADVDMDHPEVINELNRWGVWYANTLNLDGFRLDAVKHIKFSFMRDWLGHVRGQTGKNLFAVAEYWKADLGALENYLSKTNWTMSAFDVPLHYNLYQASNSSGNYDMRNLLNGTLVQRHPSHAVTFVDNHDTQPGEALESFVQGWFKPLAYATILTREQGYPQVFYGDYYGIPSDGVPSYRQQIDPLLKARQQYAYGRQHDYFDHWDVIGWTREGNASHPNSGLATIMSDGPGGSKWMYVGRQKAGEVWHDMTGNRSGTVTINQDGWGHFFVNGGSVSVWVKR

SEQ ID NO: 31282 - protein, 485 aa, Bacillus sp.
HHDGTNGTIMQYFEWNVPNRGQHWNRLHNNAQNLKNAGITAIWIPPAWKGTSQNDVGYGAYDLYDLGEFNQKGTVRTKYGTKAELERAIRSLKANGIQVYGDVVMNHKGGADFTERVQAVEVNPQNRNQEVSGTYQIEAWTGFNFPGRGNQHSSFKWRWYHFDGTDWDQSRQLANRIYKFRGDGKAWDWEVDTENGNYDYLMYADVDMDHPEVINELNRWGVWYANTLNLDGFRLDAVKHIKFSFMRDWLGHVRGQTGKNLFAVAEYWKNDLGALENYLSKTNWTMSAFDVPLHYNLYQASNSSGNYDMRNLLNGTLVQRHPSHAVTFVDNHDTQPGEALESFVQGWFKPLAYATILTREQGYPQVFYGDYYGIPSDGVPSYRQQIDPLLKARQQYAYGRQHDYFDHWDVIGWTREGNASHPNSGLATIMSDGPGGSKWMYVGRQKAGEVWHDMTGNRSGTVTINQDGWGHFFVNGGSVSVWVKR

SEQ ID NO: 31283 - protein, 485 aa, Bacillus sp.
HHDGTNGTIMQYFEWNVPNDGQHWNRLHNNAQNLKNAGITAIWIPPAWKGTSQNDVGYGAYDLYDLGEFNQKGTVRTKYGTKAELERAIRSLKANGIQVYGDVVMNHKGGADFTERVQAVEVNPQNRNQEVSGTYQIEAWTGFNFPGRGNQHSSFKWRWYHFDGTDWGQSRQLANRIYKFRGDGKAWDWEVDTENGNYDYLMYADVDMDHPEVINELNRWGVWYANTLNLDGFRLDAVKHIKFSFMRDWLGHVRGQTGKNLFAVAEYWKNDLGALENYLSKTNWTMSAFDVPLHYNLYQASNSSGNYDMRNLLNGTLVQRHPSHAVTFVDNHDTQPGEALESFVQGWFKPLAYATILTREQGYPQVFYGDYYGIPSDGVPSYRQQIDPLLKARQQYAYGRQHDYFDHWDVIGWTREGNASHPNSGLATIMSDGPGGSKWMYVGRQKAGEVWHDMTGNRSGTVTINQDGWGHFFVNGGSVSVWVKR

SEQ ID NO: 31284 - protein, 485 aa, Bacillus sp.
HHDGTNGTIMQYFEWNVPNDGQHWNRLHNNAQNLKNAGITAIWIPPAWKGTSQNDVGYGAYDLYDLGEFNQKGTVRTKYGTKAELERAIRSLKANGIQVYGDVVMNHKDGADFTERVQAVEVNPQNRNQEVSGTYQIEAWTGFNFPGRGNQHSSFKWRWYHFDGTDWDQSRQLANRIYKFRGDGKAWDWEVDTENGNYDYLMYADVDMDHPEVINELNRWGVWYANTLNLDGFRLDAVKHIKFSFMRDWLGHVRGQTGKNLFAVAEYWKNDLGALENYLSKTNWTMSAFDVPLHYNLYQASNSSGNYDMRNLLNGTLVQRHPSHAVTFVDNHDTQPGEALESFVQGWFKPLAYATILTREQGYPQVFYGDYYGIPSDGVPSYRQQIDPLLKARQQYAYGRQHDYFDHWDVIGWTREGNASHPNSGLATIMSDGPGGSKWMYVGRQKAGEVWHDMTGNRSGTVTINQDGWGHFFVNGGSVSVWVKR

SEQ ID NO: 31285 - protein, 485 aa, Bacillus sp.
HHDGTNGTIMQYFEWNVPNDGQHWNRLHNNAQNLKNAGITAIWIPPAWKGTSQNDVGYGAYDLYDLGEFNQKGTVRTKYGTKAELERAIRSLKANGIQVYGDVVMNHKGGADFTERVQAVEVNPQNRNQEVVGTYQIEAWTGFNFPGRGNQHSSFKWRWYHFDGTDWDQSRQLANRIYKFRGDGKAWDWEVDTENGNYDYLMYADVDMDHPEVINELNRWGVWYANTLNLDGFRLDAVKHIKFSFMRDWLGHVRGQTGKNLFAVAEYWKNDLGALENYLSKTNWTMSAFDVPLHYNLYQASNSSGNYDMRNLLNGTLVQRHPSHAVTFVDNHDTQPGEALESFVQGWFKPLAYATILTREQGYPQVFYGDYYGIPSDGVPSYRQQIDPLLKARQQYAYGRQHDYFDHWDVIGWTREGNASHPNSGLATIMSDGPGGSKWMYVGRQKAGEVWHDMTGNRSGTVTINQDGWGHFFVNGGSVSVWVKR

SEQ ID NO: 31286 - protein, 485 aa, Bacillus sp.
HHDGTNGTIMQYFEWNVPNDGQHWNRLHNNAQNLKNAGITAIWIPPAWKGTSQNDVGYGAYDLYDLGEFNQKGTVRTKYGTKAELERAIRSLKANGIQVYGDVVMNHKGGADFTERVQAVEVNPQNRNQEVSGTYQIETWTGFNFPGRGNQHSSFKWRWYHFDGTDWDQSRQLANRIYKFRGDGKAWDWEVDTENGNYDYLMYADVDMDHPEVINELNRWGVWYANTLNLDGFRLDAVKHIKFSFMRDWLGHVRGQTGKNLFAVAEYWKNDLGALENYLSKTNWTMSAFDVPLHYNLYQASNSSGNYDMRNLLNGTLVQRHPSHAVTFVDNHDTQPGEALESFVQGWFKPLAYATILTREQGYPQVFYGDYYGIPSDGVPSYRQQIDPLLKARQQYAYGRQHDYFDHWDVIGWTREGNASHPNSGLATIMSDGPGGSKWMYVGRQKAGEVWHDMTGNRSGTVTINQDGWGHFFVNGGSVSVWVKR

SEQ ID NO: 31287 - protein, 483 aa, Bacillus sp.
HHDGTNGTIMQYFEWNVPNDGQHWNRLHNNAQNLKNAGITAIWIPPAWKGTSQNDVGYGAYDLYDLGEFNQKGTVRTKYGTKAELERAIRSLKANGIQVYGDVVMNHKGGADFTERVQAVEVNPQNRNQEVSGTYQIEAWTGFNFPGRGNQHSSFKWRWYHFDGTDWDQSRQLANRIYKFRGKAWDWEVDTENGNYDYLMYADVDMDHPEVINXLNRWGVWYANTLNLDGFRLDAVKHIKFSFMRDWLGHVRGQTGKNLFAVAEYWKNDLGALENYLSKTNWTMSAFDVPLHYNLYQASNSSGNYDMRNLLNGTLVQRHPSHAVTFVDNHDTQPGEALESFVQGWFKPLAYATILTREQGYPQVFYGDYYGIPSDGVPSYRQQIDPLLKARQQYAYGRQHDYFDHWDVIGWTREGNASHPNSGLATIMSDGPGGSKWMYVGRQKAGEVWHDMTGNRSGTVTINQDGWGHFFVNGGSVSVWVKR

SEQ ID NO: 31288 - protein, 485 aa, Bacillus sp.
HHDGTNGTIMQYFEWNVPNDGQHWNRLHNNAQNLKNAGITAIWIPPAWKGTSQNDVGYGAYDLYDLGEFNQKGTVRTKYGTKAELERAIRSLKANGIQVYGDVVMNHKGGADFTERVQAVEVNPQNRNQEVSGTYQIEAWTGFNFPGRGNQHSSFKWRWYHFDGTDWDQSRQLANRIYKFRGDGKAWDWEVDTENGNYDYLMYADVDMDHPEVINELNRWGVWYANTLNLDGFRLDAVKWIKFSFMRDWLGHVRGQTGKNLFAVAEYWKNDLGALENYLSKTNWTMSAFDVPLHYNLYQASNSSGNYDMRNLLNGTLVQRHPSHAVTFVDNHDTQPGEALESFVQGWFKPLAYATILTREQGYPQVFYGDYYGIPSDGVPSYRQQIDPLLKARQQYAYGRQHDYFDHWDVIGWTREGNASHPNSGLATIMSDGPGGSKWMYVGRQKAGEVWHDMTGNRSGTVTINQDGWGHFFVNGGSVSVWVKR

SEQ ID NO: 31289 - protein, 485 aa, Bacillus sp.
HHDGTNGTIMQYFEWNVPNDGQHWNRLHNNAQNLKNAGITAIWIPPAWKGTSQNDVGYGAYDLYDLGEFNQKGTVRTKYGTKAELERAIRSLKANGIQVYGDVVMNHKGGADFTERVQAVEVNPQNRNQEVSGTYQIEAWTGFNFPGRGNQHSSFKWRWYHFDGTDWDQSRQLANRIYKFRGDGKAWDWEVDTENGNYDYLMYADVDMDHPEVINELNRWGVWYANTLNLDGFRLDAVKHIRFSFMRDWLGHVRGQTGKNLFAVAEYWKNDLGALENYLSKTNWTMSAFDVPLHYNLYQASNSSGNYDMRNLLNGTLVQRHPSHAVTFVDNHDTQPGEALESFVQGWFKPLAYATILTREQGYPQVFYGDYYGIPSDGVPSYRQQIDPLLKARQQYAYGRQHDYFDHWDVIGWTREGNASHPNSGLATIMSDGPGGSKWMYVGRQKAGEVWHDMTGNRSGTVTINQDGWGHFFVNGGSVSVWVKR

SEQ ID NO: 31290 - protein, 485 aa, Bacillus sp.
HHDGTNGTIMQYFEWNVPNDGQHWNRLHNNAQNLKNAGITAIWIPPAWKGTSQNDVGYGAYDLYDLGEFNQKGTVRTKYGTKAELERAIRSLKANGIQVYGDVVMNHKGGADFTERVQAVEVNPQNRNQEVSGTYQIEAWTGFNFPGRGNQHSSFKWRWYHFDGTDWDQSRQLANRIYKFRGDGKAWDWEVDTENGNYDYLMYADVDMDHPEVINELNRWGVWYANTLNLDGFRLDAVKHIKFSFMRDWLGHVRGQTGKNLFAVAEYWKNDLGALENYLSKTNWTMSAFDVPLHYNLYQASNSSGNYDMRNLLNGTLVQRHPSHAVTFVDNHDTQPGEALESFVQGWFKPLAYATILTREQGYPQVFYGDYYGIPSDGVPSYRQQIDPLLKARQQYAYGRQRDYFDHWDVIGWTREGNASHPNSGLATIMSDGPGGSKWMYVGRQKAGEVWHDMTGNRSGTVTINQDGWGHFFVNGGSVSVWVKR

SEQ ID NO: 31291 - protein, 485 aa, Bacillus sp.
HHDGTNGTIMQYFEWNVPNDGQHWNRLHNNAQNLKNAGITAIWIPPAWKGTSQNDVGYGAYDLYDLGEFNQKGTVRTKYGTKAELERAIRSLKANGIQVYGDVVMNHKGGADFTERVQAVEVNPQNRNQEVSDTYQIEAWTGFNFPGRGNQHSSFKWRWYHFDGTDWDQSRQLANRIYKFRGDGKAWDWEVDTENGNYDYLMYADVDMDHPEVINELNRWGVWYANTLNLDGFRLDAVKHIKFSFMRDWLGHVRGQTGKNLFAVAEYWKNDLGALENYLSKTNWTMSAFDVPLHYNLYQASNSSGNYDMRNLLNGTLVQRHPSHAVTFVDNHDTQPGEALESFVQGWFKPLAYATILTREQGYPQVFYGDYYGIPSDGVPSYRQQIDPLLKARQQYAYGRQHDYFDHWDVIGWTREGNASHPNSGLATIMSDGPGGSKWMYVGRQKAGEVWHDMTGNRSGTVTINQDGWGHFFVNGGSVSVWVKR

SEQ ID NO: 31292 - protein, 485 aa, Bacillus sp.
HHDGTNGTIMQYFEWNVPNDGQHWNRLHNNAQNLKNAGITAIWIPPAWKGTSQNDVGYGAYDLYDLGEFNQKGTVRTKYGTKAELERAIRSLKANGIQVYGDVVMNHKGGADFTERVQAVVVNPQNRNQEVSGTYQIEAWTGFNFPGRGNQHSSFKWRWYHFDGTDWDQSRQLANRIYKFRGDGKAWDWEVDTENGNYDYLMYADVDMDHPEVINELNRWGVWYANTLNLDGFRLDAVKHIKFSFMRDWLGHVRGQTGKNLFAVAEYWKNDLGALENYLSKTNWTMSAFDVPLHYNLYQASNSSGNYDMRNLLNGTLVQRHPSHAVTFVDNHDTQPGEALESFVQGWFKPLAYATILTREQGYPQVFYGDYYGIPSDGVPSYRQQIDPLLKARQQYAYGRQHDYFDHWDVIGWTREGNASHPNSGLATIMSDGPGGSKWMYVGRQKAGEVWHDMTGNRSGTVTINQDGWGHFFVNGGSVSVWVKR

SEQ ID NO: 31293 - protein, 485 aa, Bacillus sp.
HHDGTNGTIMQYFEWNVPNDGQHWNRLHNNAQNLKNAGITAIWIPPAWKGTSQNDVGYGAYDLYDLGEFNQKGTVRTKYGTKAELERAIRSLKANGIQVYGDVVMNHKGGADFTERVQAVEVNPQNRNQEVSGTYQIEAWTGFNFPGRGNQHSSFKWRWYHFDGTDWDQSRQLANRIYKFRGDGKAWDWEVDTENGNYDYLMYADVDMDHGEVINELNRWGVWYANTLNLDGFRLDAVKHIKFSFMRDWLGHVRGQTGKNLFAVAEYWKNDLGALENYLSKTNWTMSAFDVPLHYNLYQASNSSGNYDMRNLLNGTLVQRHPSHAVTFVDNHDTQPGEALESFVQGWFKPLAYATILTREQGYPQVFYGDYYGIPSDGVPSYRQQIDPLLKARQQYAYGRQHDYFDHWDVIGWTREGNASHPNSGLATIMSDGPGGSKWMYVGRQKAGEVWHDMTGNRSGTVTINQDGWGHFFVNGGSVSVWVKR

SEQ ID NO: 31294 - protein, 485 aa, Bacillus sp.
HHDGTNGTIMQYFEWNVPNDGQHWNRLHNNAQNLKNAGITAIWIPPAWKGTSQNDVGYGAYDLYDLGEFNQKGTVRTKYGTKAELERAIRSLKANGIQVYGDVVMNHKGGADFTERVQAVEVNPQNRNQEVSGTYQIEAWTGFNFPGRGNQHSSFKWRWYHFDGTDWDQSRQLANRIYKFRGDGKAWDWEVDTENGNYDYLMYADVDMDHPEVINELNRWGVWYANTLNLDGFRLDAVKHIKFSFMRDWLGHVRGQTGKNLFAVAEYWKNDLGALENYLSKTNWTMSAFDVPLHYALYQASNSSGNYDMRNLLNGTLVQRHPSHAVTFVDNHDTQPGEALESFVQGWFKPLAYATILTREQGYPQVFYGDYYGIPSDGVPSYRQQIDPLLKARQQYAYGRQHDYFDHWDVIGWTREGNASHPNSGLATIMSDGPGGSKWMYVGRQKAGEVWHDMTGNRSGTVTINQDGWGHFFVNGGSVSVWVKR

SEQ ID NO: 31295 - protein, 485 aa, Bacillus sp.
HHDGTNGTIMQYFEWNVPNDGQHWNRLHNNAQNLKNAGITAIWIPPAWKGTSQNDVGYGAYDLYDLGEFNQKGTVRTKYGTKAELERAIRSLKANGIQVYGDVVMNHKGGADFTERVQAVEVNPQNRNQEVSGTYQIEAWTGFNFPGRGNQHSSFKWRWYHFDGTSWDQSRQLANRIYKFRGDGKAWDWEVDTENGNYDYLMYADVDMDHPEVINELNRWGVWYANTLNLDGFRLDAVKHIKFSFMRDWLGHVRGQTGKNLFAVAEYWKNDLGALENYLSKTNWTMSAFDVPLHYNLYQASNSSGNYDMRNLLNGTLVQRHPSHAVTFVDNHDTQPGEALESFVQGWFKPLAYATILTREQGYPQVFYGDYYGIPSDGVPSYRQQIDPLLKARQQYAYGRQHDYFDHWDVIGWTREGNASHPNSGLATIMSDGPGGSKWMYVGRQKAGEVWHDMTGNRSGTVTINQDGWGHFFVNGGSVSVWVKR

SEQ ID NO: 31296 - protein, 485 aa, Bacillus sp.
HHDGTNGTIMQYFEWNVPNDGQHWNRLHNNAQNLKNAGITAIWIPPAWKGTSQNDVGYGAYDLYDLGEFNQKGTVRTKYGTKAELERAIRSLKANGIQVYGDVVMNHKGGADFTERVQAVEVNPQNRNQEVSGTYQIEAWTGFNFPGRGNQHSSFKWRWYHFDGTDWDQSRQLANRIYKFRGDGKAWDWEVDTENGNYDYLMYADVDMDHPEVINELNRWGVWYANTLNLDGFRLDAVKHIKFSFMRDWLGHVRGQTGKNLFAVAEYWKNDLGALENYLSKTNWTMSAFDVPLHYNLYQASNSSGNYDMRNLLNGTLVQRHPSHAVTFVDNHDTQPGEALESFVQGWFKPLAYATILTREQGYPQVFYGDYYGIPSDGVPSYRQQIDPLLKARQQYAYGRQHDYFDHWDVIGWTREGNASHHNSGLATIMSDGPGGSKWMYVGRQKAGEVWHDMTGNRSGTVTINQDGWGHFFVNGGSVSVWVKR

SEQ ID NO: 31297 - protein, 485 aa, Bacillus sp.
HHDGTNGTIMQYFEWNVPNDGQHWNRLHNNAQNLKNAGITAIWIPPAWKGTSQNDVGYGAYDLYDLGEFNQKGTVRTKYGTKAELERAIRSLKANGIQVYGDVVMNHKGGADFTERVQAVEVNPQNRNQEVSGTYQIEAWTGFNFPGRGNQHSSFKWRWYHFDTTDWDQSRQLANRIYKFRGDGKAWDWEVDTENGNYDYLMYADVDMDHPEVINELNRWGVWYANTLNLDGFRLDAVKHIKFSFMRDWLGHVRGQTGKNLFAVAEYWKNDLGALENYLSKTNWTMSAFDVPLHYNLYQASNSSGNYDMRNLLNGTLVQRHPSHAVTFVDNHDTQPGEALESFVQGWFKPLAYATILTREQGYPQVFYGDYYGIPSDGVPSYRQQIDPLLKARQQYAYGRQHDYFDHWDVIGWTREGNASHPNSGLATIMSDGPGGSKWMYVGRQKAGEVWHDMTGNRSGTVTINQDGWGHFFVNGGSVSVWVKR

SEQ ID NO: 31298 - protein, 485 aa, Bacillus sp.
HHDGTNGTIMQYFEWNVPNDGQHWNRLHNNAQNLKNAGITAIWIPPAWKGTSQNDVGYGAYDLYDLGEFNQKGTVRTKYGTKAELERAIRSLKANGIQVYGDVVMNHKGGADFTERVQAVEVNPQNRNQEVSGTYQIEAWTGFNFPGRGNQHSSFKWRWYHFDGTDWDQSRQLANRIYKFRGDGKAWDWEVDTENGNYDYLMYADVDMDHPEVINELNRWGVWYANTLNLDGFRLDAVKHIKFSFMRDWLGHVRGQTGKNLFAVAEYWKNDLGALENYLSKTNWTMSAFDVPLHYNLYQASNSSGNYDMRNLLNGTLVQRHPSHAVTFVDNHDTQPGEALESFVQGWFKPLAYATILTREQGYPQVFYGDYYGIPSDGVPSYRQQIHPLLKARQQYAYGRQHDYFDHWDVIGWTREGNASHPNSGLATIMSDGPGGSKWMYVGRQKAGEVWHDMTGNRSGTVTINQDGWGHFFVNGGSVSVWVKR

SEQ ID NO: 31299 - protein, 485 aa, Bacillus sp.
HHDGTNGTIMQYFEWNVPNDGQHWNRLHNNAQNLKNAGITAIWIPPAWKGTSQNDVGYGAYDLYDLGEFNQKGTVRTKYGTKAELERAIRSLKANGIQVYGDVVMNHKGGADFTERVQAVEVNPQNRNQEVSGTYQIEAWTGFNFPGRGNQHSSFKWRWYHFDGTDWDASRQLANRIYKFRGDGKAWDWEVDTENGNYDYLMYADVDMDHPEVINELNRWGVWYANTLNLDGFRLDAVKHIKFSFMRDWLGHVRGQTGKNLFAVAEYWKNDLGALENYLSKTNWTMSAFDVPLHYNLYQASNSSGNYDMRNLLNGTLVQRHPSHAVTFVDNHDTQPGEALESFVQGWFKPLAYATILTREQGYPQVFYGDYYGIPSDGVPSYRQQIDPLLKARQQYAYGRQHDYFDHWDVIGWTREGNASHPNSGLATIMSDGPGGSKWMYVGRQKAGEVWHDMTGNRSGTVTINQDGWGHFFVNGGSVSVWVKR

SEQ ID NO: 31300 - protein, 485 aa, Bacillus sp.
HHDGTNGTIMQYFEWNVPNDGQHWNRLHNNAQNLKNAGITAIWIPPAWKGTSQNDVGYGAYDLYDLGEFNQKGTVRTKYGTKAELERAIRSLKANGIQVYGDVVMNHKGGADFTERVQAVEVNPQNRNQEVSGTYQIEAWTGFNFPGRGNQHSSFKWRWYHFDGTDWDQSRQLANRIYKFRGDGKAWDWEVDTENGNYDYLMYADVDMDHPEVITELNRWGVWYANTLNLDGFRLDAVKHIKFSFMRDWLGHVRGQTGKNLFAVAEYWKNDLGALENYLSKTNWTMSAFDVPLHYNLYQASNSSGNYDMRNLLNGTLVQRHPSHAVTFVDNHDTQPGEALESFVQGWFKPLAYATILTREQGYPQVFYGDYYGIPSDGVPSYRQQIDPLLKARQQYAYGRQHDYFDHWDVIGWTREGNASHPNSGLATIMSDGPGGSKWMYVGRQKAGEVWHDMTGNRSGTVTINQDGWGHFFVNGGSVSVWVKR

SEQ ID NO: 31301 - protein, 485 aa, Bacillus sp.
HHDGTNGTIMQYFEWNVPNDGQHWNRLHNNAQNLKNAGITAIWIPPAWKGTSQNDVGYGAYDLYDLGEFNQKGTVRTKYGTKAELERAIRSLKANGIQVYGDVVMNHKGGADFTERVQAVEVNPQGRNQEVSGTYQIEAWTGFNFPGRGNQHSSFKWRWYHFDGTDWDQSRQLANRIYKFRGDGKAWDWEVDTENGNYDYLMYADVDMDHPEVINELNRWGVWYANTLNLDGFRLDAVKHIKFSFMRDWLGHVRGQTGKNLFAVAEYWKNDLGALENYLSKTNWTMSAFDVPLHYNLYQASNSSGNYDMRNLLNGTLVQRHPSHAVTFVDNHDTQPGEALESFVQGWFKPLAYATILTREQGYPQVFYGDYYGIPSDGVPSYRQQIDPLLKARQQYAYGRQHDYFDHWDVIGWTREGNASHPNSGLATIMSDGPGGSKWMYVGRQKAGEVWHDMTGNRSGTVTINQDGWGHFFVNGGSVSVWVKR

SEQ ID NO: 31302 - protein, 485 aa, Bacillus sp.
HHDGTNGTIMQYFEWNVPNDGQHWNRLHNNAQNLKNAGITAIWIPPAWKGTSQNDVGYGAYDLYDLGEFNQKGTVRTKYGTKAELERAIRSLKANGIQVYGDVVMNHKGGADFTERVQAVEVNPQNRNQEVSGTYQIEAWTGFNFPGRGNQHSSFKWRWYHFDGTDWDQSRQLANRIYKFRGDGKAWVWEVDTENGNYDYLMYADVDMDHPEVINELNRWGVWYANTLNLDGFRLDAVKHIKFSFMRDWLGHVRGQTGKNLFAVAEYWKNDLGALENYLSKTNWTMSAFDVPLHYNLYQASNSSGNYDMRNLLNGTLVQRHPSHAVTFVDNHDTQPGEALESFVQGWFKPLAYATILTREQGYPQVFYGDYYGIPSDGVPSYRQQIDPLLKARQQYAYGRQHDYFDHWDVIGWTREGNASHPNSGLATIMSDGPGGSKWMYVGRQKAGEVWHDMTGNRSGTVTINQDGWGHFFVNGGSVSVWVKR

SEQ ID NO: 31303 - protein, 485 aa, Bacillus sp.
HHDGTNGTIMQYFEWNVPNDGQHWNRLHNNWQNLKNAGITAIWIPPAWKGTSQNDVGYGAYDLYDLGEFNQKGTVRTKYGTKAELERAIRSLKANGIQVYGDVVMNHKGGADFTERVQAVEVNPQNRNQEVSGTYQIEAWTGFNFPGRGNQHSSFKWRWYHFDGTDWDQSRQLANRIYKFRGDGKAWDWEVDTENGNYDYLMYADVDMDHPEVINELNRWGVWYANTLNLDGFRLDAVKHIKFSFMRDWLGHVRGQTGKNLFAVAEYWKNDLGALENYLSKTNWTMSAFDVPLHYNLYQASNSSGNYDMRNLLNGTLVQRHPSHAVTFVDNHDTQPGEALESFVQGWFKPLAYATILTREQGYPQVFYGDYYGIPSDGVPSYRQQIDPLLKARQQYAYGRQHDYFDHWDVIGWTREGNASHPNSGLATIMSDGPGGSKWMYVGRQKAGEVWHDMTGNRSGTVTINQDGWGHFFVNGGSVSVWVKR

SEQ ID NO: 31304 - protein, 485 aa, Bacillus sp.
HHDGTNGTIMQYFEWNVPNDGQHWNRLHNNAQNLKNAGITAIWIPPAWKGTSQNDVGYGAYDLYDLGEFNQKGTVRTKYGTKAELERAIRSLKANGIQVYGDVVMNHKGGADFTERVQAVEVNPQNRNQEVSGTYQIEAWTGFNQPGRGNQHSSFKWRWYHFDGTDWDQSRQLANRIYKFRGDGKAWDWEVDTENGNYDYLMYADVDMDHPEVINELNRWGVWYANTLNLDGFRLDAVKHIKFSFMRDWLGHVRGQTGKNLFAVAEYWKNDLGALENYLSKTNWTMSAFDVPLHYNLYQASNSSGNYDMRNLLNGTLVQRHPSHAVTFVDNHDTQPGEALESFVQGWFKPLAYATILTREQGYPQVFYGDYYGIPSDGVPSYRQQIDPLLKARQQYAYGRQHDYFDHWDVIGWTREGNASHPNSGLATIMSDGPGGSKWMYVGRQKAGEVWHDMTGNRSGTVTINQDGWGHFFVNGGSVSVWVKR

SEQ ID NO: 31305 - protein, 485 aa, Bacillus sp.
HHDGTNGTIMQYFEWNVPNDGQHWNRLHNNAQNLKNAGITAIWIPPAWKGTSQNDVGYGAYDLYDLGEFNQKGTVRTKYGTKAELERAIRSLKANGIQVYGDVVMNHKGGADFTERVQAVEVNPQNRNQEVSGTRQIEAWTGFNFPGRGNQHSSFKWRWYHFDGTDWDQSRQLANRIYKFRGDGKAWDWEVDTENGNYDYLMYADVDMDHPEVINELNRWGVWYANTLNLDGFRLDAVKHIKFSFMRDWLGHVRGQTGKNLFAVAEYWKNDLGALENYLSKTNWTMSAFDVPLHYNLYQASNSSGNYDMRNLLNGTLVQRHPSHAVTFVDNHDTQPGEALESFVQGWFKPLAYATILTREQGYPQVFYGDYYGIPSDGVPSYRQQIDPLLKARQQYAYGRQHDYFDHWDVIGWTREGNASHPNSGLATIMSDGPGGSKWMYVGRQKAGEVWHDMTGNRSGTVTINQDGWGHFFVNGGSVSVWVKR

SEQ ID NO: 31306 - protein, 485 aa, Bacillus sp.
HHDGTNGTIMQYFEWNVPNDGQHWNRLHNNAQNLKNAGITAIWIPPAWKGTSQNDVGYGAYDLYDLGEFNQKGTVRTKYGTKAELERAIRSLKANGIQVYGDVVMNHKGGADFTERVQAVEVNPQNRNQEVSGTSQIEAWTGFNFPGRGNQHSSFKWRWYHFDGTDWDQSRQLANRIYKFRGDGKAWDWEVDTENGNYDYLMYADVDMDHPEVINELNRWGVWYANTLNLDGFRLDAVKHIKFSFMRDWLGHVRGQTGKNLFAVAEYWKNDLGALENYLSKTNWTMSAFDVPLHYNLYQASNSSGNYDMRNLLNGTLVQRHPSHAVTFVDNHDTQPGEALESFVQGWFKPLAYATILTREQGYPQVFYGDYYGIPSDGVPSYRQQIDPLLKARQQYAYGRQHDYFDHWDVIGWTREGNASHPNSGLATIMSDGPGGSKWMYVGRQKAGEVWHDMTGNRSGTVTINQDGWGHFFVNGGSVSVWVKR

SEQ ID NO: 31307 - protein, 485 aa, Bacillus sp.
HHDGTNGTIMQYFEWNVPNDGQHWNRLHNNAQNLKNAGITAIWIPPAWKGTSQNDVGYGAYDLYDLGEFNQKGTVRTKYGTKAELERAIRSLKANGIQVYGDVVMNHKGGADFTERVQAVEVNPQNRNQEVSGTYQIEAWTGFNFPGRGNQHSSFKWRWYHFDGTDWDQSRQLANRIYKFRGDGKAWDWEVDTENGNYDYLMYADVDMDHPEVINELNRWGVWYANTLNLDGFRLDAVKHIKFSFMRDWLGHVRGQTGKNLFAVAEYWKNDLGALENYLSKTNWTMSAFDVPLHYNLYQASNSSGNYDMRNLLNGTLVQRHPSHAVTFVDNHDTQPGEALESFVQGRFKPLAYATILTREQGYPQVFYGDYYGIPSDGVPSYRQQIDPLLKARQQYAYGRQHDYFDHWDVIGWTREGNASHPNSGLATIMSDGPGGSKWMYVGRQKAGEVWHDMTGNRSGTVTINQDGWGHFFVNGGSVSVWVKR

SEQ ID NO: 31308 - protein, 485 aa, Bacillus sp.
HHDGTNGTIMQYFEWNVPNDGQHWNRLHNNAQNLKNAGITAIWIPPAWKGTSQNDVGYGAYDLYDLGEFNQKGTVRTKYGTKAELERAIRSLKANGIQVYGDVVMNHKGGADFTERVQAVEVNPQNRNQEVSGTYQIEAWTGFNFPGRGNQHSSFKWRWYHFDGTDWDQSRQLANRIYKFRGDGKAWDWEVDTENGNYDYLMYADVDMDHPEVINELNRWGVWYANTLTLDGFRLDAVKHIKFSFMRDWLGHVRGQTGKNLFAVAEYWKNDLGALENYLSKTNWTMSAFDVPLHYNLYQASNSSGNYDMRNLLNGTLVQRHPSHAVTFVDNHDTQPGEALESFVQGWFKPLAYATILTREQGYPQVFYGDYYGIPSDGVPSYRQQIDPLLKARQQYAYGRQHDYFDHWDVIGWTREGNASHPNSGLATIMSDGPGGSKWMYVGRQKAGEVWHDMTGNRSGTVTINQDGWGHFFVNGGSVSVWVKR

SEQ ID NO: 31309 - protein, 485 aa, Bacillus sp.
HHDGTNGTIMQYFEWNVPNDGQHWNRLHNNAQNLKNAGITAIWIPPAWKGTSQNDVGYGAYDLYDLGEFNQKGTVRTKYGTKAELERAIRSLKANGIQVYGDVVMNHKGGADFTERVQAVEVNPQNRNQEVSGTYQIEAWTGFNFPGRGNQHSSFKWRWYHFDGTDWDQSRQLANRIYKFRGDGKAWDWEVDTENGNYDYLMYFDVDMDHPEVINELNRWGVWYANTLNLDGFRLDAVKHIKFSFMRDWLGHVRGQTGKNLFAVAEYWKNDLGALENYLSKTNWTMSAFDVPLHYNLYQASNSSGNYDMRNLLNGTLVQRHPSHAVTFVDNHDTQPGEALESFVQGWFKPLAYATILTREQGYPQVFYGDYYGIPSDGVPSYRQQIDPLLKARQQYAYGRQHDYFDHWDVIGWTREGNASHPNSGLATIMSDGPGGSKWMYVGRQKAGEVWHDMTGNRSGTVTINQDGWGHFFVNGGSVSVWVKR

SEQ ID NO: 31310 - protein, 485 aa, Bacillus sp.
HHDGTNGTIMQYFEWNVPNDGQHWNRLHNNAQNLKNAGITAIWIPPAWKGTSQNDVGYGAYDLYDLGEFNQKGTVRTKYGTKAELERAIRSLKANGIQVYGDVVMNHKGGADFTERVQAVEVNPQNRNQEVSGTYQIEAWTGFNFPGRGNQHSSFKWRWYHFDGTDWDQSRQLANRIYKFRGDGKAWDWEVDTENGNYDYLMYADVDMDHPEVINELNRWGVWYAQTLNLDGFRLDAVKHIKFSFMRDWLGHVRGQTGKNLFAVAEYWKNDLGALENYLSKTNWTMSAFDVPLHYNLYQASNSSGNYDMRNLLNGTLVQRHPSHAVTFVDNHDTQPGEALESFVQGWFKPLAYATILTREQGYPQVFYGDYYGIPSDGVPSYRQQIDPLLKARQQYAYGRQHDYFDHWDVIGWTREGNASHPNSGLATIMSDGPGGSKWMYVGRQKAGEVWHDMTGNRSGTVTINQDGWGHFFVNGGSVSVWVKR

SEQ ID NO: 31311 - protein, 485 aa, Bacillus sp.
HHDGTNGTIMQYFEWNVPNDGQHWNRLHNNAQNLKNAGITAIWIPPAWKGTSQNDVGYGAYDLYDLGEFNQKGTVRTKYGTKAELERAIRSLKANGIQVYGDVVMNHKGGADFTERVQAVEVNPQNRNQEVSGTYQIEAWTGFNFPGRGNQHSSFKWRWYHFDGTDWDQSRQLANRIYKFRGDGKAWDWEVDTENGNYDFLMYADVDMDHPEVINELNRWGVWYANTLNLDGFRLDAVKHIKFSFMRDWLGHVRGQTGKNLFAVAEYWKNDLGALENYLSKTNWTMSAFDVPLHYNLYQASNSSGNYDMRNLLNGTLVQRHPSHAVTFVDNHDTQPGEALESFVQGWFKPLAYATILTREQGYPQVFYGDYYGIPSDGVPSYRQQIDPLLKARQQYAYGRQHDYFDHWDVIGWTREGNASHPNSGLATIMSDGPGGSKWMYVGRQKAGEVWHDMTGNRSGTVTINQDGWGHFFVNGGSVSVWVKR

SEQ ID NO: 31312 - protein, 485 aa, Bacillus sp.
HHDGTNGTIMQYFEWNVPNDGQHWNRLHNNAQNLKNAGITAIWIPPAWKGTSQNDVGYGAYDLYDLGEFNQKGTVRTKYGTKAELERAIRSLKANGIQVYGDVVMNHKGGADFTERVQAVEVNPQNRNQEVSGTYQIEAWTGFNFPGRGNQHSSFKWRWYHFDGTDWDQSRQLANRIYKFRGDGKAWDWEVDTENGNYDYLMYADVDMDHPEVINELNRWGVWYANTLNLDGFRLDAVKHIKFSFMRDWLGHVRGQTGKNLFAVAEYWKNDLGALENYLSKTNWTMSAFDVPLHYNLYQASNSSGNYDMRNLLNGTLVQRHPSHAVTFVDNHDTQPGEALESFVQGWFKPLAYATILTREQGYPQVFYGDYYGIPSDGVPSYRQQIDPLLKARQQYAYGRQHDYFDHWDVIGWTREGNASHPNSGLATIMTDGPGGSKWMYVGRQKAGEVWHDMTGNRSGTVTINQDGWGHFFVNGGSVSVWVKR

SEQ ID NO: 31313 - protein, 485 aa, Bacillus sp.
HHDGTNGTIMQYFEWNVPNDGQHWNRLHNNAQNLKNAGITAIWIPPAWKGTSQNDVGYGAYDLYDLGEFNQKGTVRTKYGTKAELERAIRSLKANGIQVYGDVVMNHKGGADFTERVQAVEVNPQNRNQEVSGTYQIEAWTGFNFPGRGNQHSSFKWRWYHFDGTDWDQSRQLANRIYKFRGDGKAWDWEVDTENGNYDYLMYADVDMDHPEVINELNRWGVWYANTLNLDGFRLDAVKHIKFSFMRDWLGHVRGQTGKNLFAVAEYWKNDLGALENYLSKTNWTMSAFDVPLHYNLYQASTSSGNYDMRNLLNGTLVQRHPSHAVTFVDNHDTQPGEALESFVQGWFKPLAYATILTREQGYPQVFYGDYYGIPSDGVPSYRQQIDPLLKARQQYAYGRQHDYFDHWDVIGWTREGNASHPNSGLATIMSDGPGGSKWMYVGRQKAGEVWHDMTGNRSGTVTINQDGWGHFFVNGGSVSVWVKR

SEQ ID NO: 31314 - protein, 485 aa, Bacillus sp.
HHDGTNGTIMQYFEWNVPNDGQHWNRLHNNAQNLKNAGITAIWIPPAWKGTSQNDVGYGAYDLYDLGEFNQKGTVRTKYGTKAELERAIRSLKANGIQVYGDVVMNHKGGADFTERVQAVEVNPQNRNQEVSGTYQIEAWTGFNFPGRGNQHSSFKWRWYHFDGTDWDSSRQLANRIYKFRGDGKAWDWEVDTENGNYDYLMYADVDMDHPEVINELNRWGVWYANTLNLDGFRLDAVKHIKFSFMRDWLGHVRGQTGKNLFAVAEYWKNDLGALENYLSKTNWTMSAFDVPLHYNLYQASNSSGNYDMRNLLNGTLVQRHPSHAVTFVDNHDTQPGEALESFVQGWFKPLAYATILTREQGYPQVFYGDYYGIPSDGVPSYRQQIDPLLKARQQYAYGRQHDYFDHWDVIGWTREGNASHPNSGLATIMSDGPGGSKWMYVGRQKAGEVWHDMTGNRSGTVTINQDGWGHFFVNGGSVSVWVKR

SEQ ID NO: 31315 - protein, 485 aa, Bacillus sp.
HHDGTNGTIMQYFEWNVPNDGQHWNRLHNNAQNLKNAGITAIWIPPAWKGTSQNDVGYGAYDLYDLGEFNQKGTVRTKYGTKAELERAIRSLKANGIQVYGDVVMNHKGGADFTERVQAVEVNPQNRNQEVSGTYQIEAWTGFNFPGRGNQHSSFKWRWYHFDGTDWDQSRQLANRIYKFRGDGKAWDWEVDTENGNYDYLMYADVDMDHPEVINELNRWGVWYANTLNTDGFRLDAVKHIKFSFMRDWLGHVRGQTGKNLFAVAEYWKNDLGALENYLSKTNWTMSAFDVPLHYNLYQASNSSGNYDMRNLLNGTLVQRHPSHAVTFVDNHDTQPGEALESFVQGWFKPLAYATILTREQGYPQVFYGDYYGIPSDGVPSYRQQIDPLLKARQQYAYGRQHDYFDHWDVIGWTREGNASHPNSGLATIMSDGPGGSKWMYVGRQKAGEVWHDMTGNRSGTVTINQDGWGHFFVNGGSVSVWVKR

SEQ ID NO: 31316 - protein, 485 aa, Bacillus sp.
HHDGTNGTIMQYFEWNVPNDGQHWNRLHNNAQNLKNAGITAIWIPPAWKGTSQNDVGYGAYDLYDLGEFNQKGTVRTKYGTKAELERAIRSLKANGIQVYGDVVMNHKGGADFTERVQAVEVNPQNRNQEVSGTGQIEAWTGFNFPGRGNQHSSFKWRWYHFDGTDWDQSRQLANRIYKFRGDGKAWDWEVDTENGNYDYLMYADVDMDHPEVINELNRWGVWYANTLNLDGFRLDAVKHIKFSFMRDWLGHVRGQTGKNLFAVAEYWKNDLGALENYLSKTNWTMSAFDVPLHYNLYQASNSSGNYDMRNLLNGTLVQRHPSHAVTFVDNHDTQPGEALESFVQGWFKPLAYATILTREQGYPQVFYGDYYGIPSDGVPSYRQQIDPLLKARQQYAYGRQHDYFDHWDVIGWTREGNASHPNSGLATIMSDGPGGSKWMYVGRQKAGEVWHDMTGNRSGTVTINQDGWGHFFVNGGSVSVWVKR

SEQ ID NO: 31317 - protein, 485 aa, Bacillus sp.
HHDGTNGTIMQYFEWNVPNDGQHWNRLHNNAQNLKNAGITAIWIPPAWKGTSQNDVGYGAYDLYDLGEFNQKGTVRTKYGTKAELERAIRSLKANGIQVYGDVVMNHKGGADFTERVQAVEVNPQNRNQEVSGTYQIEAWMGFNFPGRGNQHSSFKWRWYHFDGTDWDQSRQLANRIYKFRGDGKAWDWEVDTENGNYDYLMYADVDMDHPEVINELNRWGVWYANTLNLDGFRLDAVKHIKFSFMRDWLGHVRGQTGKNLFAVAEYWKNDLGALENYLSKTNWTMSAFDVPLHYNLYQASNSSGNYDMRNLLNGTLVQRHPSHAVTFVDNHDTQPGEALESFVQGWFKPLAYATILTREQGYPQVFYGDYYGIPSDGVPSYRQQIDPLLKARQQYAYGRQHDYFDHWDVIGWTREGNASHPNSGLATIMSDGPGGSKWMYVGRQKAGEVWHDMTGNRSGTVTINQDGWGHFFVNGGSVSVWVKR

SEQ ID NO: 31318 - protein, 485 aa, Bacillus sp.
HHDGTNGTIMQYFEWNVPNDGQHWNRLHNNAQNLKNAGITAIWIPPAWKGTSQNDVGYGAYDLYDLGEFNQKGTVRTKYGTKAELERAIRSLKANGIQVYGDVVMNHKGGADFTERVQAVEVNPQNRNQEVSGTYQIEAWTGFNFPGRGNQHSSFKWRWYHFDGTDWDQSRQLANRIYKFRGDGKAWDWEVDTENGNYDYLMYADVDMDHPEVINELNRWGVWYANTLNLDGFRLDAVKHIKFSFMRDWLGHVRGQTGKNLFAVAEYWKNDLGALENYLSKTNWTMSAFDVPLHYNLYQASNSSGNYDMRNLLNGTLVQRHPSHAVTFVDNHDTQPGEALESFVQGWFLPLAYATILTREQGYPQVFYGDYYGIPSDGVPSYRQQIDPLLKARQQYAYGRQHDYFDHWDVIGWTREGNASHPNSGLATIMSDGPGGSKWMYVGRQKAGEVWHDMTGNRSGTVTINQDGWGHFFVNGGSVSVWVKR

SEQ ID NO: 31319 - protein, 485 aa, Bacillus sp.
HHDGTNGTIMQYFEWNVPNDGQHWNRLHNNAQNLKNAGITAIWIPPAWKGTSQNDVGYGAYDLYDLGEFNQKGTVRTKYGTKAELERAIRSLKANGIQVYGDVVMNHKGGADFTERVQAVEVNPQNRNQEVSGTYQIEAWTGFNFPGRGNQHSSFKWRWYHFDGTDWDQSRQLANRIYKFRGDGKAWDWEVDTENGNYDYLMYADVDMDHPEVINELNRWGVWYANTLNLDGFRLDAVKHIKFSFMRDWLGHVRGQTGKNLFAVAEYWKNDLGALENYLSKTNWTMSAFDVPLHINLYQASNSSGNYDMRNLLNGTLVQRHPSHAVTFVDNHDTQPGEALESFVQGWFKPLAYATILTREQGYPQVFYGDYYGIPSDGVPSYRQQIDPLLKARQQYAYGRQHDYFDHWDVIGWTREGNASHPNSGLATIMSDGPGGSKWMYVGRQKAGEVWHDMTGNRSGTVTINQDGWGHFFVNGGSVSVWVKR

SEQ ID NO: 31320 - protein, 485 aa, Bacillus sp.
HHDGTNGTIMQYFEWNVPNDGQHWNRLHNNAQNLKNAGITAIRIPPAWKGTSQNDVGYGAYDLYDLGEFNQKGTVRTKYGTKAELERAIRSLKANGIQVYGDVVMNHKGGADFTERVQAVEVNPQNRNQEVSGTYQIEAWTGFNFPGRGNQHSSFKWRWYHFDGTDWDQSRQLANRIYKFRGDGKAWDWEVDTENGNYDYLMYADVDMDHPEVINELNRWGVWYANTLNLDGFRLDAVKHIKFSFMRDWLGHVRGQTGKNLFAVAEYWKNDLGALENYLSKTNWTMSAFDVPLHYNLYQASNSSGNYDMRNLLNGTLVQRHPSHAVTFVDNHDTQPGEALESFVQGWFKPLAYATILTREQGYPQVFYGDYYGIPSDGVPSYRQQIDPLLKARQQYAYGRQHDYFDHWDVIGWTREGNASHPNSGLATIMSDGPGGSKWMYVGRQKAGEVWHDMTGNRSGTVTINQDGWGHFFVNGGSVSVWVKR

SEQ ID NO: 31321 - protein, 485 aa, Bacillus sp.
HHDGTNGTIMQYFEWNVPNDGQHWNRLHNNAQNLKNAGITAIWIPPAWKGTSQNDVGYGAYDLYDLGEFNQKGTVRTKYGTKAELERAIRSLKANGIQVYGDVVMNHKGGADFTERVQAVEVNPQNRNQEVSGTYQIEAWTGFNFPGRGNQHSSFKWRWYHFDGTDWDQSRQLANRIYKFRGDGKAWDWEVDTENGNYDYLMYADVDMDHPEVINELNRWGVWYANTLNLDGFRLDAVKHIKFSFMRDWLGHVRGQTGKNLFAVAEYWKNDLGALENYLSKTNWTMSAFDVPLHYNLYQASNSSGNYDMRNLLNGTLVQRHPSHAVTFVDNHDTQPGEALESFVQGWFKPLAYATILTREQGYPQVFYGDYYGIPSDGVPSYRQQIDRLLKARQQYAYGRQHDYFDHWDVIGWTREGNASHPNSGLATIMSDGPGGSKWMYVGRQKAGEVWHDMTGNRSGTVTINQDGWGHFFVNGGSVSVWVKR

SEQ ID NO: 31322 - protein, 485 aa, Bacillus sp.
HHDGTNGTIMQYFEWNVPNDGQHWNRLHNNAQNLKNAGITAIWIPPAWKGTSQNDVGYGAYDLYDLGEFNQKGTVRTKYGTKAELERAIRSLKANGIQVYGDVVMNHKGGADFTERVQAVEVNPQNRNQEVSGTYQIEAWTGFNFPGRGNQHSSFKWRWYCFDGTDWDQSRQLANRIYKFRGDGKAWDWEVDTENGNYDYLMYADVDMDHPEVINELNRWGVWYANTLNLDGFRLDAVKHIKFSFMRDWLGHVRGQTGKNLFAVAEYWKNDLGALENYLSKTNWTMSAFDVPLHYNLYQASNSSGNYDMRNLLNGTLVQRHPSHAVTFVDNHDTQPGEALESFVQGWFKPLAYATILTREQGYPQVFYGDYYGIPSDGVPSYRQQIDPLLKARQQYAYGRQHDYFDHWDVIGWTREGNASHPNSGLATIMSDGPGGSKWMYVGRQKAGEVWHDMTGNRSGTVTINQDGWGHFFVNGGSVSVWVKR

SEQ ID NO: 31323 - protein, 485 aa, Bacillus sp.
HHDGTNGTIMQYFEWNVPNDGQHWNRLHNNAQNLKNAGITAIWIPPAWQGTSQNDVGYGAYDLYDLGEFNQKGTVRTKYGTKAELERAIRSLKANGIQVYGDVVMNHKGGADFTERVQAVEVNPQNRNQEVSGTYQIEAWTGFNFPGRGNQHSSFKWRWYHFDGTDWDQSRQLANRIYKFRGDGKAWDWEVDTENGNYDYLMYADVDMDHPEVINELNRWGVWYANTLNLDGFRLDAVKHIKFSFMRDWLGHVRGQTGKNLFAVAEYWKNDLGALENYLSKTNWTMSAFDVPLHYNLYQASNSSGNYDMRNLLNGTLVQRHPSHAVTFVDNHDTQPGEALESFVQGWFKPLAYATILTREQGYPQVFYGDYYGIPSDGVPSYRQQIDPLLKARQQYAYGRQHDYFDHWDVIGWTREGNASHPNSGLATIMSDGPGGSKWMYVGRQKAGEVWHDMTGNRSGTVTINQDGWGHFFVNGGSVSVWVKR

SEQ ID NO: 31324 - protein, 485 aa, Bacillus sp.
HHDGTNGTIMQYFEWNVPNDGQHWNRLHNNAQNLKNAGITAIWIPPAWKGTSQNDVGYGAYDLYDLGEFNQKGTVRTKYGTKAELERAIRSLKANGIQVYGDVVMNHKGGAEFTERVQAVEVNPQNRNQEVSGTYQIEAWTGFNFPGRGNQHSSFKWRWYHFDGTDWDQSRQLANRIYKFRGDGKAWDWEVDTENGNYDYLMYADVDMDHPEVINELNRWGVWYANTLNLDGFRLDAVKHIKFSFMRDWLGHVRGQTGKNLFAVAEYWKNDLGALENYLSKTNWTMSAFDVPLHYNLYQASNSSGNYDMRNLLNGTLVQRHPSHAVTFVDNHDTQPGEALESFVQGWFKPLAYATILTREQGYPQVFYGDYYGIPSDGVPSYRQQIDPLLKARQQYAYGRQHDYFDHWDVIGWTREGNASHPNSGLATIMSDGPGGSKWMYVGRQKAGEVWHDMTGNRSGTVTINQDGWGHFFVNGGSVSVWVKR

SEQ ID NO: 31325 - protein, 485 aa, Bacillus sp.
HHDGTNGTIMQYFEWNVPNDGQHWNRLHNNAQNLKNAGITAIWIPPAWKGTSQNDVGYGAYDLYDLGEFNQKGTVRTKYGTKAELERAIRSLKANGIQVYGDVVMNHKGGADFTERVQAVEVNPQNRNQEVSGTYQIEAWTGFNFPGRGNQHSSFKWRWYHFDGTDWDQSRQLANRIYKFRGDGKAWDWEVDTENGNYDYLMYADVDMDHPEVINELNAWGVWYANTLNLDGFRLDAVKHIKFSFMRDWLGHVRGQTGKNLFAVAEYWKNDLGALENYLSKTNWTMSAFDVPLHYNLYQASNSSGNYDMRNLLNGTLVQRHPSHAVTFVDNHDTQPGEALESFVQGWFKPLAYATILTREQGYPQVFYGDYYGIPSDGVPSYRQQIDPLLKARQQYAYGRQHDYFDHWDVIGWTREGNASHPNSGLATIMSDGPGGSKWMYVGRQKAGEVWHDMTGNRSGTVTINQDGWGHFFVNGGSVSVWVKR

SEQ ID NO: 31326 - protein, 485 aa, Bacillus sp.
HHDGTNGTIMQYFEWNVPNDGQHWNRLHNNAQNLKNAGITAIWIPPAWKGTSQNDVGYGAYDLYDLGEFNQKGTVRTKYGTKAELERAIRSLKANGIQVYGDVVMNHKGGADFTERVQAVEVNPQNRNQEVSGTYQIAAWTGFNFPGRGNQHSSFKWRWYHFDGTDWDQSRQLANRIYKFRGDGKAWDWEVDTENGNYDYLMYADVDMDHPEVINELNRWGVWYANTLNLDGFRLDAVKHIKFSFMRDWLGHVRGQTGKNLFAVAEYWKNDLGALENYLSKTNWTMSAFDVPLHYNLYQASNSSGNYDMRNLLNGTLVQRHPSHAVTFVDNHDTQPGEALESFVQGWFKPLAYATILTREQGYPQVFYGDYYGIPSDGVPSYRQQIDPLLKARQQYAYGRQHDYFDHWDVIGWTREGNASHPNSGLATIMSDGPGGSKWMYVGRQKAGEVWHDMTGNRSGTVTINQDGWGHFFVNGGSVSVWVKR

SEQ ID NO: 31327 - protein, 485 aa, Bacillus sp.
HHDGTNGTIMQYFEWNVPNDGQHWNRLHNNAQNLKNAGITAIWIPPAWKGTSQNDVGYGAYDLYDLGEFNQKGTVRTKYGTKAELERAIRSLKANGIQVYGDVVMNHKGGADFTERVQAVEVNPQNRNQEVSGTYQIEAWTGFNFPGRGNQHSSFKWRWYHFDGTDWDQSRQLANRIYKFRGDGKAWDWEVDTENGNYDYLMYADVDMDHPEVINELNRWGVWYANTLNLDGFRLDAVKHIKFSFMRDWLGHVRGQTGKNLFAVAEYWKNDLGALENYLSKTNWTMSAFDVPLHYNLYQASNSSGNYDMRNLLNGTLVQRHPSHAVTFVDNHDTQPGEALESFVQGWFKPLAYATILTREQGYPQVFYGDYYGIPSDGVPSYRQQIDPLLKARQQYAYGRQHDYFDHWDVIGWTREGNASHPNSGLATIMSDGPGGSKWMYVGRQGAGEVWHDMTGNRSGTVTINQDGWGHFFVNGGSVSVWVKR

SEQ ID NO: 31328 - protein, 485 aa, Bacillus sp.
HHDGTNGTIMQYFEWNVPNDGQHWNRLHNNAQNLKNAGITAIWIPPAWKGTSQNDVGYGAYDLYDLGEFNQKGTVRTKYGTKAELERAIRSLKANGIQVYGDVVMNHKGGADFTERVQAVEVNPQNRNQEVSGTYQIEAWTGFNFPGRGNQHSSFYWRWYHFDGTDWDQSRQLANRIYKFRGDGKAWDWEVDTENGNYDYLMYADVDMDHPEVINELNRWGVWYANTLNLDGFRLDAVKHIKFSFMRDWLGHVRGQTGKNLFAVAEYWKNDLGALENYLSKTNWTMSAFDVPLHYNLYQASNSSGNYDMRNLLNGTLVQRHPSHAVTFVDNHDTQPGEALESFVQGWFKPLAYATILTREQGYPQVFYGDYYGIPSDGVPSYRQQIDPLLKARQQYAYGRQHDYFDHWDVIGWTREGNASHPNSGLATIMSDGPGGSKWMYVGRQKAGEVWHDMTGNRSGTVTINQDGWGHFFVNGGSVSVWVKR

SEQ ID NO: 31329 - protein, 483 aa, Bacillus sp. (in: firmicutes)
HHDGTNGTIMQYFEWNVPNDGQHWNRLHNNAQNLKNAGITAIWIPPAWKGTSQNDVGYGAYDLYDLGEFNQKGTVRTKYGTKAELERAIRSLKANGIQVYGDVVMNHKGGADFTERVQAVEVNPQNRNQEVSGPYQIEAWTGFNFPGRGNQHSSFKWRWYHFDGTDWDQSRQLANRIYKFRGKAWDWEVDTEFGNYDYLMYADVDMDHPEVINELNRWGVWYANTLNLDGFRLDAVKHIKFSFMRDWLGHVRGQTGKNLFAVAEYWKNDLGALENYLSKTNWTMSAFDVPLHYNLYQASNSSGNYDMRNLLNGTLVQRHPSHAVTFVDNHDTQPGEALESFVQGWFKPLAYATILTREQGYPQVFYGDYYGIPSDGVPSYRQQIDPLLKARQQYAYGRQHDYFDHWDVIGWTREGNASHPNSGLATIMSDGPGGSKWMYVGRQKAGEVWHDMTGNRSGTVTINQDGWGHFFVNGGSVSVWVKR

SEQ ID NO: 31330 - protein, 485 aa, Bacillus sp.
HHDGTNGTIMQYFEWNVPNDGQHWNRLHNNAQNLKNAGITAIWIPPAWKGTSQNDVGYGAYDLYDLGEFNQKGTVRTKYGTKAELERAIRSLKANGIQVYGDVVMNHKGGADFTERVQAVEVNPQNRNQEVSGTYQIEAWTGFNFPGRGNQHSSFKWRWYHFDGTDWDQSRQLANRIYKFRGDGKAWDWEVDTENGNYDYLMYADVDMDHPEVINELNRWGVWYANTLNLDGFRLDAVKHIKFSFMRDWLGHVRGQTGKNLFAVAEYWKNDLGALENYLSKTNWTMSAFDVPLHYNLYQASNSSGNYDMRNLLNGTLVQRHPSHAVTFVDNHDTQPGEALESFVQGWFKPLAYATILTREQGYPQVFYGDYYGIPSDGVPSYRQQIDPLFKARQQYAYGRQHDYFDHWDVIGWTREGNASHPNSGLATIMSDGPGGSKWMYVGRQKAGEVWHDMTGNRSGTVTINQDGWGHFFVNGGSVSVWVKR

SEQ ID NO: 31331 - protein, 485 aa, Bacillus sp.
HHDGTNGTIMQYFEWNVPNDGQHWNRLHNNAQNLKNAGITAIWIPPAWKGTSQNDVGYGAYDLYDLGEFNQKGTVRTKYGTKAELERAIRSLKANGIQVYGDVVMNHKGGADFTERVQAVEVNPQNRNQEVSGTYQIEAWTGFNFPGRGNQHSSFKWRWYHFDGTDWDQSRQLANRIYKFRGDGKAWDWEVDTENGNYDYLMYADVDMDHPEVINELNRWGVWYANTLNLDGFRLDAVKHIKFSFMRDWLGHVRGQTGKNLFAVAEYWKNDLGALENYLSKTNWTMSAFDVPLHYNLYQASNSSGNYDMRNILNGTLVQRHPSHAVTFVDNHDTQPGEALESFVQGWFKPLAYATILTREQGYPQVFYGDYYGIPSDGVPSYRQQIDPLLKARQQYAYGRQHDYFDHWDVIGWTREGNASHPNSGLATIMSDGPGGSKWMYVGRQKAGEVWHDMTGNRSGTVTINQDGWGHFFVNGGSVSVWVKR

SEQ ID NO: 31332 - protein, 485 aa, Bacillus sp.
HHDGTNGTIMQYFEWNVPNDGQHWNRLHNNAQNLKNAGITAIWIPPAWKGTSQNDVGYGAYDLYDLGEFNQKGTVRTKYGTKAELERAIRSLKANGIQVYGDVVMNHKGGADFTERVQAVEVNPQNRNQEVSGTYQIEAWTGFNFPGRGNQHSSFKWRWYHFDGTDWDQSRQLANRIYKFRGDGKAWDWEVDTENGNYDYLMFADVDMDHPEVINELNRWGVWYANTLNLDGFRLDAVKHIKFSFMRDWLGHVRGQTGKNLFAVAEYWKNDLGALENYLSKTNWTMSAFDVPLHYNLYQASNSSGNYDMRNLLNGTLVQRHPSHAVTFVDNHDTQPGEALESFVQGWFKPLAYATILTREQGYPQVFYGDYYGIPSDGVPSYRQQIDPLLKARQQYAYGRQHDYFDHWDVIGWTREGNASHPNSGLATIMSDGPGGSKWMYVGRQKAGEVWHDMTGNRSGTVTINQDGWGHFFVNGGSVSVWVKR

SEQ ID NO: 31333 - protein, 485 aa, Bacillus sp.
HHDGTNGTIMQYFEWNVPNDGQHWNRLHNNAQNLKNAGITAIWIPPAWKGTSQNDVGYGAYDLYDLGEFNQKGTVRTKYGTKAELERAIRSLKANGIQVYGDVVMNHKGGADFTERVQAVEVNPQNRNQEVSGTYQIEAWTGFNFPGRGNQHSSFKWRWYHFDGTDWDQSRQLANRIYKFRGDGKAWDWEVDTENGNYDYLMYADVDMDHPEVINELNRWGVWYANTLNLDGFRLDAVKHIKFSFMRDWLGHVRGQTGKNLFAVAEYWKNDLGALENYLSKTNWTMSAFDVPLHYNLYQASNSSGNYDMRNLLNGTLEQRHPSHAVTFVDNHDTQPGEALESFVQGWFKPLAYATILTREQGYPQVFYGDYYGIPSDGVPSYRQQIDPLLKARQQYAYGRQHDYFDHWDVIGWTREGNASHPNSGLATIMSDGPGGSKWMYVGRQKAGEVWHDMTGNRSGTVTINQDGWGHFFVNGGSVSVWVKR

SEQ ID NO: 31334 - protein, 485 aa, Bacillus sp.
HHDGTNGTIMQYFEWNVPNDGQHWNRLHNNAQNLKNAGITAIWIPPAWKGTSQNDVGYGAYDLYDLGEFNQKGTVRTKYGTKAELERAIRSLKANGIQVYGDVVMNHKGGADFTERVQAVEVNPQNRNQEVSGTYQIEAWTGFNFPGRGNQHSSFKWRWYHFDGTDWDQSRGLANRIYKFRGDGKAWDWEVDTENGNYDYLMYADVDMDHPEVINELNRWGVWYANTLNLDGFRLDAVKHIKFSFMRDWLGHVRGQTGKNLFAVAEYWKNDLGALENYLSKTNWTMSAFDVPLHYNLYQASNSSGNYDMRNLLNGTLVQRHPSHAVTFVDNHDTQPGEALESFVQGWFKPLAYATILTREQGYPQVFYGDYYGIPSDGVPSYRQQIDPLLKARQQYAYGRQHDYFDHWDVIGWTREGNASHPNSGLATIMSDGPGGSKWMYVGRQKAGEVWHDMTGNRSGTVTINQDGWGHFFVNGGSVSVWVKR

SEQ ID NO: 31335 - protein, 485 aa, Bacillus sp.
HHDGTNGTIMQYFEWNVPNDGQHWNRLHNNAQNLKNAGITAIWIPPAWKGTSQNGVGYGAYDLYDLGEFNQKGTVRTKYGTKAELERAIRSLKANGIQVYGDVVMNHKGGADFTERVQAVEVNPQNRNQEVSGTYQIEAWTGFNFPGRGNQHSSFKWRWYHFDGTDWDQSRQLANRIYKFRGDGKAWDWEVDTENGNYDYLMYADVDMDHPEVINELNRWGVWYANTLNLDGFRLDAVKHIKFSFMRDWLGHVRGQTGKNLFAVAEYWKNDLGALENYLSKTNWTMSAFDVPLHYNLYQASNSSGNYDMRNLLNGTLVQRHPSHAVTFVDNHDTQPGEALESFVQGWFKPLAYATILTREQGYPQVFYGDYYGIPSDGVPSYRQQIDPLLKARQQYAYGRQHDYFDHWDVIGWTREGNASHPNSGLATIMSDGPGGSKWMYVGRQKAGEVWHDMTGNRSGTVTINQDGWGHFFVNGGSVSVWVKR

SEQ ID NO: 31336 - protein, 485 aa, Bacillus sp.
HHDGTNGTIMQYFEWNVPNDGQHWNRLHNNAQNLKNAGITAIWIPPAWKGTSQNDVGYGAYDLYDLGEFGQKGTVRTKYGTKAELERAIRSLKANGIQVYGDVVMNHKGGADFTERVQAVEVNPQNRNQEVSGTYQIEAWTGFNFPGRGNQHSSFKWRWYHFDGTDWDQSRQLANRIYKFRGDGKAWDWEVDTENGNYDYLMYADVDMDHPEVINELNRWGVWYANTLNLDGFRLDAVKHIKFSFMRDWLGHVRGQTGKNLFAVAEYWKNDLGALENYLSKTNWTMSAFDVPLHYNLYQASNSSGNYDMRNLLNGTLVQRHPSHAVTFVDNHDTQPGEALESFVQGWFKPLAYATILTREQGYPQVFYGDYYGIPSDGVPSYRQQIDPLLKARQQYAYGRQHDYFDHWDVIGWTREGNASHPNSGLATIMSDGPGGSKWMYVGRQKAGEVWHDMTGNRSGTVTINQDGWGHFFVNGGSVSVWVKR

SEQ ID NO: 31337 - protein, 485 aa, Bacillus sp.
HHDGTNGTIMQYFEWNVPNDGQHWNRLHNNAQNLKNAGITAIWIPPAPKGTSQNDVGYGAYDLYDLGEFNQKGTVRTKYGTKAELERAIRSLKANGIQVYGDVVMNHKGGADFTERVQAVEVNPQNRNQEVSGTYQIEAWTGFNFPGRGNQHSSFKWRWYHFDGTDWDQSRQLANRIYKFRGDGKAWDWEVDTENGNYDYLMYADVDMDHPEVINELNRWGVWYANTLNLDGFRLDAVKHIKFSFMRDWLGHVRGQTGKNLFAVAEYWKNDLGALENYLSKTNWTMSAFDVPLHYNLYQASNSSGNYDMRNLLNGTLVQRHPSHAVTFVDNHDTQPGEALESFVQGWFKPLAYATILTREQGYPQVFYGDYYGIPSDGVPSYRQQIDPLLKARQQYAYGRQHDYFDHWDVIGWTREGNASHPNSGLATIMSDGPGGSKWMYVGRQKAGEVWHDMTGNRSGTVTINQDGWGHFFVNGGSVSVWVKR

SEQ ID NO: 31338 - protein, 485 aa, Bacillus sp.
HHDGTNGTIMQYFEWNVPNDGQHWNRLHNNAQNLKNAGITAIWIPPAWKGTSQNDVGYGAYDLYDLGEFNQKGTVRTKYGTKAELERAIRSLKANGIQVYGDVVMNHKGGADFTERVQAVEVNPQNRNQEVSGTYQIEAWTGFNFPGRGNQHSSFKWRWYHFDGTDWDQSRQLANRIYKFRGDGKAWDWEVDTENGNYDYLMYADVDMDHPEVINELNRWGVWYANTLNLDGFRLDAVKHIKFSFMRDWLGHVRGQTGKNLFAVAEYWKNDLGALENYLSKTNWTMSAFDVPLHYNLYQASNSSGNYDMRNLLNGTLVQRHPSHAVTFVDNHDTQPGEALESFVQGWFKPLAYATILTREQGYPQVFAGDYYGIPSDGVPSYRQQIDPLLKARQQYAYGRQHDYFDHWDVIGWTREGNASHPNSGLATIMSDGPGGSKWMYVGRQKAGEVWHDMTGNRSGTVTINQDGWGHFFVNGGSVSVWVKR

SEQ ID NO: 31339 - protein, 485 aa, Bacillus sp.
HHDGTNGTIMQYFEWNVPNDGQHWNRMHNNAQNLKNAGITAIWIPPAWKGTSQNDVGYGAYDLYDLGEFNQKGTVRTKYGTKAELERAIRSLKANGIQVYGDVVMNHKGGADFTERVQAVEVNPQNRNQEVSGTYQIEAWTGFNFPGRGNQHSSFKWRWYHFDGTDWDQSRQLANRIYKFRGDGKAWDWEVDTENGNYDYLMYADVDMDHPEVINELNRWGVWYANTLNLDGFRLDAVKHIKFSFMRDWLGHVRGQTGKNLFAVAEYWKNDLGALENYLSKTNWTMSAFDVPLHYNLYQASNSSGNYDMRNLLNGTLVQRHPSHAVTFVDNHDTQPGEALESFVQGWFKPLAYATILTREQGYPQVFYGDYYGIPSDGVPSYRQQIDPLLKARQQYAYGRQHDYFDHWDVIGWTREGNASHPNSGLATIMSDGPGGSKWMYVGRQKAGEVWHDMTGNRSGTVTINQDGWGHFFVNGGSVSVWVKR

SEQ ID NO: 31340 - protein, 485 aa, Bacillus sp.
HHDGTNGTIMQYFEWNVPNDGQHWNRLHNNAQNLKNAGITAIWIPPAWKGTSQNDVGYGAYDLYDLGEFNEKGTVRTKYGTKAELERAIRSLKANGIQVYGDVVMNHKGGADFTERVQAVEVNPQNRNQEVSGTYQIEAWTGFNFPGRGNQHSSFKWRWYHFDGTDWDQSRQLANRIYKFRGDGKAWDWEVDTENGNYDYLMYADVDMDHPEVINELNRWGVWYANTLNLDGFRLDAVKHIKFSFMRDWLGHVRGQTGKNLFAVAEYWKNDLGALENYLSKTNWTMSAFDVPLHYNLYQASNSSGNYDMRNLLNGTLVQRHPSHAVTFVDNHDTQPGEALESFVQGWFKPLAYATILTREQGYPQVFYGDYYGIPSDGVPSYRQQIDPLLKARQQYAYGRQHDYFDHWDVIGWTREGNASHPNSGLATIMSDGPGGSKWMYVGRQKAGEVWHDMTGNRSGTVTINQDGWGHFFVNGGSVSVWVKR

SEQ ID NO: 31341 - protein, 485 aa, Bacillus sp.
HHDGTNGTIMQYFEWNVPNDGQHWNRLHNNAQNLKNAGITAIWIPPAWKGTSQNDVGYGAYDLYDLGEFNQKGTVRTKYGTKAELERAIRSLKANGIQVYGDVVMNHKGGADFTERVQAVEVNPQNRNQEVSGTYQIEAWTGFNFPGRGNQHSSFKWRWAHFDGTDWDQSRQLANRIYKFRGDGKAWDWEVDTENGNYDYLMYADVDMDHPEVINELNRWGVWYANTLNLDGFRLDAVKHIKFSFMRDWLGHVRGQTGKNLFAVAEYWKNDLGALENYLSKTNWTMSAFDVPLHYNLYQASNSSGNYDMRNLLNGTLVQRHPSHAVTFVDNHDTQPGEALESFVQGWFKPLAYATILTREQGYPQVFYGDYYGIPSDGVPSYRQQIDPLLKARQQYAYGRQHDYFDHWDVIGWTREGNASHPNSGLATIMSDGPGGSKWMYVGRQKAGEVWHDMTGNRSGTVTINQDGWGHFFVNGGSVSVWVKR

SEQ ID NO: 31342 - protein, 485 aa, Bacillus sp.
HHDGTNGTIMQYFEWNVPNDGQHWNRLHNNAQNLKNAGITAIWIPPAWKGTSQNDVGYGAYDLYDLGEFNQKGTVRTKYGTKAELERAIRSLKANGIQVYGDVVMNHKGGADFTERVQAVEVNPQNRNQEVAGTYQIEAWTGFNFPGRGNQHSSFKWRWYHFDGTDWDQSRQLANRIYKFRGDGKAWDWEVDTENGNYDYLMYADVDMDHPEVINELNRWGVWYANTLNLDGFRLDAVKHIKFSFMRDWLGHVRGQTGKNLFAVAEYWKNDLGALENYLSKTNWTMSAFDVPLHYNLYQASNSSGNYDMRNLLNGTLVQRHPSHAVTFVDNHDTQPGEALESFVQGWFKPLAYATILTREQGYPQVFYGDYYGIPSDGVPSYRQQIDPLLKARQQYAYGRQHDYFDHWDVIGWTREGNASHPNSGLATIMSDGPGGSKWMYVGRQKAGEVWHDMTGNRSGTVTINQDGWGHFFVNGGSVSVWVKR

SEQ ID NO: 31343 - protein, 485 aa, Bacillus sp.
HHDGTNGTIMQYFEWNVPNDGQHWNRLHNNAQNLKNAGITAIWIPPAWKGTSQNDVGYGAYDLYDLGEFNQKGTVRTKYGTKAELERAIRSLKANGIQVYGDVVMNHKGGADFTERVQAVEVNPQNRNQEVSGTYQIEAWTGFNFPGRGNQHSSFKWRWYHFDGTDWDQSRQLANRIYKFRGDGKAWDWEVDTENGNYDYLMYADVDMDHPEVINELNRWGVWYANTLNLDGFRLDAVKHIKFSFMRDWLGHVRGQTGKNLFAVAEYWKNDLGALENYLSKTNWTMSAFDVPLHYNLYQASNSSGNYDMRNLLNGTLVQRHPSHAVTFVDNHDTQPGEALSSFVQGWFKPLAYATILTREQGYPQVFYGDYYGIPSDGVPSYRQQIDPLLKARQQYAYGRQHDYFDHWDVIGWTREGNASHPNSGLATIMSDGPGGSKWMYVGRQKAGEVWHDMTGNRSGTVTINQDGWGHFFVNGGSVSVWVKR

SEQ ID NO: 31344 - protein, 485 aa, Bacillus sp.
HHDGTNGTIMQYFEWNVPNDGQHWNRLHNNAQNLKNAGITAIWIPPAWKGTSQNDVGYGAYDLYDLGEFNQKGTVRTKYGTKAELERAIRSLKANGIQVYGDVVMNHKGGADFTERVQACEVNPQNRNQEVSGTYQIEAWTGFNFPGRGNQHSSFKWRWYHFDGTDWDQSRQLANRIYKFRGDGKAWDWEVDTENGNYDYLMYADVDMDHPEVINELNRWGVWYANTLNLDGFRLDAVKHIKFSFMRDWLGHVRGQTGKNLFAVAEYWKNDLGALENYLSKTNWTMSAFDVPLHYNLYQASNSSGNYDMRNLLNGTLVQRHPSHAVTFVDNHDTQPGEALESFVQGWFKPLAYATILTREQGYPQVFYGDYYGIPSDGVPSYRQQIDPLLKARQQYAYGRQHDYFDHWDVIGWTREGNASHPNSGLATIMSDGPGGSKWMYVGRQKAGEVWHDMTGNRSGTVTINQDGWGHFFVNGGSVSVWVKR

SEQ ID NO: 31345 - protein, 485 aa, Bacillus sp.
HHDGTNGTIMQYFEWNVPNDGQHWNRLHNNAQNLKNAGITAIWIPPAWKGTSQNDVGYGAYDLYDLGEFNQKGTVRTKYGTKAELERAIRSLKANGIQVYGDVVMNHKGGADFTERVQAVEVNPQNRNQEVSGTYQIEAWTGMNFPGRGNQHSSFKWRWYHFDGTDWDQSRQLANRIYKFRGDGKAWDWEVDTENGNYDYLMYADVDMDHPEVINELNRWGVWYANTLNLDGFRLDAVKHIKFSFMRDWLGHVRGQTGKNLFAVAEYWKNDLGALENYLSKTNWTMSAFDVPLHYNLYQASNSSGNYDMRNLLNGTLVQRHPSHAVTFVDNHDTQPGEALESFVQGWFKPLAYATILTREQGYPQVFYGDYYGIPSDGVPSYRQQIDPLLKARQQYAYGRQHDYFDHWDVIGWTREGNASHPNSGLATIMSDGPGGSKWMYVGRQKAGEVWHDMTGNRSGTVTINQDGWGHFFVNGGSVSVWVKR

SEQ ID NO: 31346 - protein, 485 aa, Bacillus sp.
HHDGTNGTIMQYFEWNVPNDGQHWNRLHNNAQNLKNAGIQAIWIPPAWKGTSQNDVGYGAYDLYDLGEFNQKGTVRTKYGTKAELERAIRSLKANGIQVYGDVVMNHKGGADFTERVQAVEVNPQNRNQEVSGTYQIEAWTGFNFPGRGNQHSSFKWRWYHFDGTDWDQSRQLANRIYKFRGDGKAWDWEVDTENGNYDYLMYADVDMDHPEVINELNRWGVWYANTLNLDGFRLDAVKHIKFSFMRDWLGHVRGQTGKNLFAVAEYWKNDLGALENYLSKTNWTMSAFDVPLHYNLYQASNSSGNYDMRNLLNGTLVQRHPSHAVTFVDNHDTQPGEALESFVQGWFKPLAYATILTREQGYPQVFYGDYYGIPSDGVPSYRQQIDPLLKARQQYAYGRQHDYFDHWDVIGWTREGNASHPNSGLATIMSDGPGGSKWMYVGRQKAGEVWHDMTGNRSGTVTINQDGWGHFFVNGGSVSVWVKR

SEQ ID NO: 31347 - protein, 485 aa, Bacillus sp.
HHDGTNGTIMQYFEWNVPNDGQHWNRLHNNAQNLKNAGITAIWIPPAWKGTSQNDVGYGAYDLYDLGEFNQKGTVRTKYGTKAELERAIRSLKANGIQVYGDVVMNHKGGADFTERVQAVEVNPQNRNQEVSGTYQIEAWTGFNFPGRGNQHSSFKWRWYHFDGTDWDQSRQLANRIYKFRGDGKAWDWEVDTENGNYDYLMYADVDMDHPEVINELNRWGVWYANTLNLDGFRLDAVKHIKFSFMRDWLGHVRGQTGKNLFAVAEYWKNDLGALENYLSKTNWTMSAFDVPLHYNLYQASNSSGNYDMRNLLNGTLVQRHPSHAVTFVDNHDTQPGEALESFVQGWFKPLAYATILTREQGYPQVFYGDYYGIPSDGVPSYRQQIDPLLKARQQYAYGRQHDYFDHWDVIGWTREGNASHPNSGLATIMSDGPGGSKAMYVGRQKAGEVWHDMTGNRSGTVTINQDGWGHFFVNGGSVSVWVKR

SEQ ID NO: 31348 - protein, 485 aa, Bacillus sp.
HHDGTNGTIMQYFEWNVPNDGQHWNRLHNNAQNLKNAGITAIWIPPAWKGTSQNDVGYGAYDLYDLGEFNQKGTVRTKYGTKAELERAIRSLKANGIQVYGDVVMNHKGGADFTERVQAVEVNPQNRNQEVSGTYQIEAWTGFNFPGRGNQHSSFKWRWYHFDGTDWDQSRQLANRIYKFRGDGKAWDWEVDTENGNYDYLMYADVDMDLPEVINELNRWGVWYANTLNLDGFRLDAVKHIKFSFMRDWLGHVRGQTGKNLFAVAEYWKNDLGALENYLSKTNWTMSAFDVPLHYNLYQASNSSGNYDMRNLLNGTLVQRHPSHAVTFVDNHDTQPGEALESFVQGWFKPLAYATILTREQGYPQVFYGDYYGIPSDGVPSYRQQIDPLLKARQQYAYGRQHDYFDHWDVIGWTREGNASHPNSGLATIMSDGPGGSKWMYVGRQKAGEVWHDMTGNRSGTVTINQDGWGHFFVNGGSVSVWVKR

SEQ ID NO: 31349 - protein, 485 aa, Bacillus sp.
HHDGTNGTIMQYFLWNVPNDGQHWNRLHNNAQNLKNAGITAIWIPPAWKGTSQNDVGYGAYDLYDLGEFNQKGTVRTKYGTKAELERAIRSLKANGIQVYGDVVMNHKGGADFTERVQAVEVNPQNRNQEVSGTYQIEAWTGFNFPGRGNQHSSFKWRWYHFDGTDWDQSRQLANRIYKFRGDGKAWDWEVDTENGNYDYLMYADVDMDHPEVINELNRWGVWYANTLNLDGFRLDAVKHIKFSFMRDWLGHVRGQTGKNLFAVAEYWKNDLGALENYLSKTNWTMSAFDVPLHYNLYQASNSSGNYDMRNLLNGTLVQRHPSHAVTFVDNHDTQPGEALESFVQGWFKPLAYATILTREQGYPQVFYGDYYGIPSDGVPSYRQQIDPLLKARQQYAYGRQHDYFDHWDVIGWTREGNASHPNSGLATIMSDGPGGSKWMYVGRQKAGEVWHDMTGNRSGTVTINQDGWGHFFVNGGSVSVWVKR

SEQ ID NO: 31350 - protein, 485 aa, Bacillus sp.
HHDGTNGTIMQYFEWNVPNDGQHWNRLHNNAQNLKNAGITAIWIPPAWKGTSQNDVGYGAYDLYDLGEFNQKGTVRTKYGTKAELERAIRSLKANGIQVYGDVVMNHKGGADFTERVQAVEVNPQNRNQEVSGTYQIEAWTGFNFPGRGNQHSSFCWRWYHFDGTDWDQSRQLANRIYKFRGDGKAWDWEVDTENGNYDYLMYADVDMDHPEVINELNRWGVWYANTLNLDGFRLDAVKHIKFSFMRDWLGHVRGQTGKNLFAVAEYWKNDLGALENYLSKTNWTMSAFDVPLHYNLYQASNSSGNYDMRNLLNGTLVQRHPSHAVTFVDNHDTQPGEALESFVQGWFKPLAYATILTREQGYPQVFYGDYYGIPSDGVPSYRQQIDPLLKARQQYAYGRQHDYFDHWDVIGWTREGNASHPNSGLATIMSDGPGGSKWMYVGRQKAGEVWHDMTGNRSGTVTINQDGWGHFFVNGGSVSVWVKR

SEQ ID NO: 31351 - protein, 485 aa, Bacillus sp.
HHDGTNGTIMQYFEWNVPNDGQHWNRLHNNAQNLKNAGITAIWIPPAWKGSSQNDVGYGAYDLYDLGEFNQKGTVRTKYGTKAELERAIRSLKANGIQVYGDVVMNHKGGADFTERVQAVEVNPQNRNQEVSGTYQIEAWTGFNFPGRGNQHSSFKWRWYHFDGTDWDQSRQLANRIYKFRGDGKAWDWEVDTENGNYDYLMYADVDMDHPEVINELNRWGVWYANTLNLDGFRLDAVKHIKFSFMRDWLGHVRGQTGKNLFAVAEYWKNDLGALENYLSKTNWTMSAFDVPLHYNLYQASNSSGNYDMRNLLNGTLVQRHPSHAVTFVDNHDTQPGEALESFVQGWFKPLAYATILTREQGYPQVFYGDYYGIPSDGVPSYRQQIDPLLKARQQYAYGRQHDYFDHWDVIGWTREGNASHPNSGLATIMSDGPGGSKWMYVGRQKAGEVWHDMTGNRSGTVTINQDGWGHFFVNGGSVSVWVKR

SEQ ID NO: 31352 - protein, 485 aa, Bacillus sp.
HHDGTNGTIMQYIEWNVPNDGQHWNRLHNNAQNLKNAGITAIWIPPAWKGTSQNDVGYGAYDLYDLGEFNQKGTVRTKYGTKAELERAIRSLKANGIQVYGDVVMNHKGGADFTERVQAVEVNPQNRNQEVSGTYQIEAWTGFNFPGRGNQHSSFKWRWYHFDGTDWDQSRQLANRIYKFRGDGKAWDWEVDTENGNYDYLMYADVDMDHPEVINELNRWGVWYANTLNLDGFRLDAVKHIKFSFMRDWLGHVRGQTGKNLFAVAEYWKNDLGALENYLSKTNWTMSAFDVPLHYNLYQASNSSGNYDMRNLLNGTLVQRHPSHAVTFVDNHDTQPGEALESFVQGWFKPLAYATILTREQGYPQVFYGDYYGIPSDGVPSYRQQIDPLLKARQQYAYGRQHDYFDHWDVIGWTREGNASHPNSGLATIMSDGPGGSKWMYVGRQKAGEVWHDMTGNRSGTVTINQDGWGHFFVNGGSVSVWVKR

SEQ ID NO: 31353 - protein, 485 aa, Bacillus sp.
HHDGTNGTIMQYFEWNVPNDGQHWNRLHNNAQNLKNAGITAIWIPPAWKGTSQNDVGYGAYDLYDLGEFNQKGTVRTKYGTKAELERAIRSLKANGIQVYGDVVMNHKGGADFTERVQAVEVNPQNRNQEVSGTYQIEAWTGFNFPGRGNQHSSFKWRWYHFDGTDWDQSRQLANRIYKFRGDGKAWDWEVDTENGNYDYLMYADVDMDHPEVINELNRWGVWYANTLNLDGFRLDAVKHIKFSFMRDWLGHVRGQTGKNLFAVAEYWKNDLGALENYLSKRNWTMSAFDVPLHYNLYQASNSSGNYDMRNLLNGTLVQRHPSHAVTFVDNHDTQPGEALESFVQGWFKPLAYATILTREQGYPQVFYGDYYGIPSDGVPSYRQQIDPLLKARQQYAYGRQHDYFDHWDVIGWTREGNASHPNSGLATIMSDGPGGSKWMYVGRQKAGEVWHDMTGNRSGTVTINQDGWGHFFVNGGSVSVWVKR

SEQ ID NO: 31354 - protein, 485 aa, Bacillus sp.
HHDGTNGTIMQYFEWNVPNDGQHWNRLHNNAQNLKNAGITAIWIPPAWKGTSQNDVGYGAYDLYDLGEFNQKGTVRTKYGTKAELERAIRSLKANGIQVYGDVVMNHKGGADFTERVQAVEVNPQNRNQEVSGTYQIEAWTGFNFPGRGNQHSSFKWRWYHFDGTDWDQSRQLANRIYKFRGDGKAWDWEVDTENGNYDYLMYADVDMDHPEVINELNRWGVWYANTLNLDGFRLDAVKHIKFSFMRDWLGHVRGQTGKNLFAVAEYWKNDLGALENYLSKTNWTMSAFDVPLHYNLYQASNSSGNYDMRNLLNGTLVQRHPSHAVTFVDNHDTQPGEALESFVQGWFKPLAYATILTREQGYPQVFYGDYYGIPSDGVPSYRQQIDPLLKARQQYAYGRQHDYFDHWDVIGWTREGNASHPNSGLATIMSDGPGGSKWMYVGRQKAGEVWHDMTGNRSGTVAINQDGWGHFFVNGGSVSVWVKR

SEQ ID NO: 31355 - protein, 485 aa, Bacillus sp.
HHDGTNGTIMQYFEWNVPNDGQHWNELHNNAQNLKNAGITAIWIPPAWKGTSQNDVGYGAYDLYDLGEFNQKGTVRTKYGTKAELERAIRSLKANGIQVYGDVVMNHKGGADFTERVQAVEVNPQNRNQEVSGTYQIEAWTGFNFPGRGNQHSSFKWRWYHFDGTDWDQSRQLANRIYKFRGDGKAWDWEVDTENGNYDYLMYADVDMDHPEVINELNRWGVWYANTLNLDGFRLDAVKHIKFSFMRDWLGHVRGQTGKNLFAVAEYWKNDLGALENYLSKTNWTMSAFDVPLHYNLYQASNSSGNYDMRNLLNGTLVQRHPSHAVTFVDNHDTQPGEALESFVQGWFKPLAYATILTREQGYPQVFYGDYYGIPSDGVPSYRQQIDPLLKARQQYAYGRQHDYFDHWDVIGWTREGNASHPNSGLATIMSDGPGGSKWMYVGRQKAGEVWHDMTGNRSGTVTINQDGWGHFFVNGGSVSVWVKR

SEQ ID NO: 31356 - protein, 485 aa, Bacillus sp.
HHDGTNGTIMQYFEWNVPNDGQHWNRLHNNAQNLKNAGITAIWIPPAWKGTSQNDVGYGAYDLYDLGEFNQKGTVRTKYGTKAELERAIRSLKANGIQVYGDVVMNHKGGADFTERVQAVEVNPQNRNQEVSGTYQIEAWGGFNFPGRGNQHSSFKWRWYHFDGTDWDQSRQLANRIYKFRGDGKAWDWEVDTENGNYDYLMYADVDMDHPEVINELNRWGVWYANTLNLDGFRLDAVKHIKFSFMRDWLGHVRGQTGKNLFAVAEYWKNDLGALENYLSKTNWTMSAFDVPLHYNLYQASNSSGNYDMRNLLNGTLVQRHPSHAVTFVDNHDTQPGEALESFVQGWFKPLAYATILTREQGYPQVFYGDYYGIPSDGVPSYRQQIDPLLKARQQYAYGRQHDYFDHWDVIGWTREGNASHPNSGLATIMSDGPGGSKWMYVGRQKAGEVWHDMTGNRSGTVTINQDGWGHFFVNGGSVSVWVKR

SEQ ID NO: 31357 - protein, 485 aa, Bacillus sp.
HHDGTNGTIMQYFEWNVPNDGQHWNRLHNNAQNLKNAGITAIWIPPAWKGTSQNDLGYGAYDLYDLGEFNQKGTVRTKYGTKAELERAIRSLKANGIQVYGDVVMNHKGGADFTERVQAVEVNPQNRNQEVSGTYQIEAWTGFNFPGRGNQHSSFKWRWYHFDGTDWDQSRQLANRIYKFRGDGKAWDWEVDTENGNYDYLMYADVDMDHPEVINELNRWGVWYANTLNLDGFRLDAVKHIKFSFMRDWLGHVRGQTGKNLFAVAEYWKNDLGALENYLSKTNWTMSAFDVPLHYNLYQASNSSGNYDMRNLLNGTLVQRHPSHAVTFVDNHDTQPGEALESFVQGWFKPLAYATILTREQGYPQVFYGDYYGIPSDGVPSYRQQIDPLLKARQQYAYGRQHDYFDHWDVIGWTREGNASHPNSGLATIMSDGPGGSKWMYVGRQKAGEVWHDMTGNRSGTVTINQDGWGHFFVNGGSVSVWVKR

SEQ ID NO: 31358 - protein, 485 aa, Bacillus sp.
HHDGTNGTIMQYFEWNVPNDGQHWNRLHNNGQNLKNAGITAIWIPPAWKGTSQNDVGYGAYDLYDLGEFNQKGTVRTKYGTKAELERAIRSLKANGIQVYGDVVMNHKGGADFTERVQAVEVNPQNRNQEVSGTYQIEAWTGFNFPGRGNQHSSFKWRWYHFDGTDWDQSRQLANRIYKFRGDGKAWDWEVDTENGNYDYLMYADVDMDHPEVINELNRWGVWYANTLNLDGFRLDAVKHIKFSFMRDWLGHVRGQTGKNLFAVAEYWKNDLGALENYLSKTNWTMSAFDVPLHYNLYQASNSSGNYDMRNLLNGTLVQRHPSHAVTFVDNHDTQPGEALESFVQGWFKPLAYATILTREQGYPQVFYGDYYGIPSDGVPSYRQQIDPLLKARQQYAYGRQHDYFDHWDVIGWTREGNASHPNSGLATIMSDGPGGSKWMYVGRQKAGEVWHDMTGNRSGTVTINQDGWGHFFVNGGSVSVWVKR

SEQ ID NO: 31359 - protein, 485 aa, Bacillus sp.
HHDGTNGTIMQYFEWNVPNDGQHWNRLHNNAQNLKNAGITAIWIPPAWKGTSQNDVGYGAYDLYDLGSFNQKGTVRTKYGTKAELERAIRSLKANGIQVYGDVVMNHKGGADFTERVQAVEVNPQNRNQEVSGTYQIEAWTGFNFPGRGNQHSSFKWRWYHFDGTDWDQSRQLANRIYKFRGDGKAWDWEVDTENGNYDYLMYADVDMDHPEVINELNRWGVWYANTLNLDGFRLDAVKHIKFSFMRDWLGHVRGQTGKNLFAVAEYWKNDLGALENYLSKTNWTMSAFDVPLHYNLYQASNSSGNYDMRNLLNGTLVQRHPSHAVTFVDNHDTQPGEALESFVQGWFKPLAYATILTREQGYPQVFYGDYYGIPSDGVPSYRQQIDPLLKARQQYAYGRQHDYFDHWDVIGWTREGNASHPNSGLATIMSDGPGGSKWMYVGRQKAGEVWHDMTGNRSGTVTINQDGWGHFFVNGGSVSVWVKR

SEQ ID NO: 31360 - protein, 485 aa, Bacillus sp.
HHDGTNGTIMQYFEWNVPTDGQHWNRLHNNAQNLKNAGITAIWIPPAWKGTSQNDVGYGAYDLYDLGEFNQKGTVRTKYGTKAELERAIRSLKANGIQVYGDVVMNHKGGADFTERVQAVEVNPQNRNQEVSGTYQIEAWTGFNFPGRGNQHSSFKWRWYHFDGTDWDQSRQLANRIYKFRGDGKAWDWEVDTENGNYDYLMYADVDMDHPEVINELNRWGVWYANTLNLDGFRLDAVKHIKFSFMRDWLGHVRGQTGKNLFAVAEYWKNDLGALENYLSKTNWTMSAFDVPLHYNLYQASNSSGNYDMRNLLNGTLVQRHPSHAVTFVDNHDTQPGEALESFVQGWFKPLAYATILTREQGYPQVFYGDYYGIPSDGVPSYRQQIDPLLKARQQYAYGRQHDYFDHWDVIGWTREGNASHPNSGLATIMSDGPGGSKWMYVGRQKAGEVWHDMTGNRSGTVTINQDGWGHFFVNGGSVSVWVKR

SEQ ID NO: 31361 - protein, 485 aa, Bacillus sp.
HHDGTNGTIMQYFEWNVPNDGQHWNRLHNNAQNLKNAGITAIWIPPAWKGTSQNDVGYGAYDLYDLGEFNQKGTVRTKYGTKAELERAIRSLKANGIQVYGDVVMNHKGGADFTERVQAVEVNPQNRNQEVSGTYQIEAWTGFNFPGRGNQHSSFKWRWYHFDGTDWDQSRQLANRIYKFRGDGKAWDWEVDTENGNYDYLTYADVDMDHPEVINELNRWGVWYANTLNLDGFRLDAVKHIKFSFMRDWLGHVRGQTGKNLFAVAEYWKNDLGALENYLSKTNWTMSAFDVPLHYNLYQASNSSGNYDMRNLLNGTLVQRHPSHAVTFVDNHDTQPGEALESFVQGWFKPLAYATILTREQGYPQVFYGDYYGIPSDGVPSYRQQIDPLLKARQQYAYGRQHDYFDHWDVIGWTREGNASHPNSGLATIMSDGPGGSKWMYVGRQKAGEVWHDMTGNRSGTVTINQDGWGHFFVNGGSVSVWVKR

SEQ ID NO: 31362 - protein, 485 aa, Bacillus sp.
HHDGTNGTIMQYFEWNVPNDGQHWNRLHNNAQNLKNAGITAIWIPPAWKGTSQNDVGYGAYDLYDLGEFNQKGTVRTKYGTKAELERAIRSLKANGIQVYGDVVMNHKGGADFTERVQAVEVNPQNRNQEVSGTYQIEAWTGFNFPGRGNQHSSFKWRWYHFDGTDWDQSRQLANRIYKFRGDGKAWDWEVDTENGNYGYLMYADVDMDHPEVINELNRWGVWYANTLNLDGFRLDAVKHIKFSFMRDWLGHVRGQTGKNLFAVAEYWKNDLGALENYLSKTNWTMSAFDVPLHYNLYQASNSSGNYDMRNLLNGTLVQRHPSHAVTFVDNHDTQPGEALESFVQGWFKPLAYATILTREQGYPQVFYGDYYGIPSDGVPSYRQQIDPLLKARQQYAYGRQHDYFDHWDVIGWTREGNASHPNSGLATIMSDGPGGSKWMYVGRQKAGEVWHDMTGNRSGTVTINQDGWGHFFVNGGSVSVWVKR

SEQ ID NO: 31363 - protein, 485 aa, Bacillus sp.
HHDGTNGTIMQYFEWNVPNDGQHWNRLHNNAQNLKNAGITAIWIPPAWKGTSQNDVGYGAYDLYDLGEFNQKGTVRTKYGTKAELERAIRSLKANGIQVYGDVVMNHKGGADFTERVQAVEVNPQNRNQEVSGTYQIEAWTGFNFPGRGNQHSSFKWRWYHFDGTDWDQSRQLANRIYKFRGDGKAWDWEVDTENGNYDYLMYADVDMDHPEGINELNRWGVWYANTLNLDGFRLDAVKHIKFSFMRDWLGHVRGQTGKNLFAVAEYWKNDLGALENYLSKTNWTMSAFDVPLHYNLYQASNSSGNYDMRNLLNGTLVQRHPSHAVTFVDNHDTQPGEALESFVQGWFKPLAYATILTREQGYPQVFYGDYYGIPSDGVPSYRQQIDPLLKARQQYAYGRQHDYFDHWDVIGWTREGNASHPNSGLATIMSDGPGGSKWMYVGRQKAGEVWHDMTGNRSGTVTINQDGWGHFFVNGGSVSVWVKR

SEQ ID NO: 31364 - protein, 485 aa, Bacillus sp.
HHDGTNGTIMQYFEWNVPNDGQHWNRLHNNAQNLKNAGITAIWIPPAWKGTSQNDVGYGAYDLYDLGEFNQKGTVRTKYGTKAELERAIRSLKANGIQVYGDVVMNHKGGADFTERVQAVEVNPQNRNQEVSGTYQIEAWTGFNFPGRGNQHSSFKWRWYHFDGTDWDQSRQLANRIYWFRGDGKAWDWEVDTENGNYDYLMYADVDMDHPEVINELNRWGVWYANTLNLDGFRLDAVKHIKFSFMRDWLGHVRGQTGKNLFAVAEYWKNDLGALENYLSKTNWTMSAFDVPLHYNLYQASNSSGNYDMRNLLNGTLVQRHPSHAVTFVDNHDTQPGEALESFVQGWFKPLAYATILTREQGYPQVFYGDYYGIPSDGVPSYRQQIDPLLKARQQYAYGRQHDYFDHWDVIGWTREGNASHPNSGLATIMSDGPGGSKWMYVGRQKAGEVWHDMTGNRSGTVTINQDGWGHFFVNGGSVSVWVKR

SEQ ID NO: 31365 - protein, 485 aa, Bacillus sp.
HHDGTNGTIMQYFEWNVPNDGQHWNRLHNNAQNLKNAGITAIWIPPAWKGTSQNDVGYGAYDLYDLGEFNQKGTVRTKYGTKAELERAIRSLKANGIQVYGDVVMNHKGGADFTERVQAVEVNPQNRNQEVSGTYQIEAWTGFNFPGRGNQHSSFKWRWYHFDGTDWDQSRQLANRIYKFRGDGKAWDWEVDTENGNYDYLMYADVDMDHPEVINELNRWGVWYANTLNLDGFRLDAVKHIKFSFMRDWLGHVRGQTGKNLFAVAEYWKNDLGALENYLSKTNWTMSAFDVPTHYNLYQASNSSGNYDMRNLLNGTLVQRHPSHAVTFVDNHDTQPGEALESFVQGWFKPLAYATILTREQGYPQVFYGDYYGIPSDGVPSYRQQIDPLLKARQQYAYGRQHDYFDHWDVIGWTREGNASHPNSGLATIMSDGPGGSKWMYVGRQKAGEVWHDMTGNRSGTVTINQDGWGHFFVNGGSVSVWVKR

SEQ ID NO: 31366 - protein, 485 aa, Bacillus sp.
HHDGTNGTIMQYFEWNVPNDGQHWNRLHNNAQNLKNAGITAIWIPPAWKGTSQNDVGYGAYDLYDLGEFNQKGTVRTKYGTKAELERAIRSLKANGIQVYGDVVMNHKGGADFTERVQAVEVNPQNRNQEVSGTYQIEAWTGFNFPGRGNQHSSFKWRWYHFDGTDWDQSRQLANRIYKFRGDGKAWDWEVDTENGNYDYLMYADVDMDHPEVINELNRWGVWYANTLNLDGFRLDAVKHIKFSFMRDWLGHVRGQTGKNLFAVAEYWKNDLGALENYLSKTNWTMSAFDVPLHYNLYQASNSSGNYDMRNLLNGTLVQRHPSHAVTFVDNHDTQPGEALESFVQGWFKPLAYATILTREQGYPQVFYGDYYGYPSDGVPSYRQQIDPLLKARQQYAYGRQHDYFDHWDVIGWTREGNASHPNSGLATIMSDGPGGSKWMYVGRQKAGEVWHDMTGNRSGTVTINQDGWGHFFVNGGSVSVWVKR

SEQ ID NO: 31367 - protein, 485 aa, Bacillus sp.
HHDGTNGTIMQYFEWNVPNDGQHWNRLHNNAQNLKNAGITAIWIPPAWKGTSQNDVGYGAYDLYDLGEFNQKGTVRTKYGTKAELERAIRSLKANGIQVYGDVVMNHKGGADFTERVQAVEVNPQNRNQEVSGTYQIEAWTGFNFPGRGNQHSSFKWRWYHFDGTDWDQSRQLANRIYKFRGDGKAWDWEVDTENGNYDYLMYADVDMDHPEVINELNRWGVWYANTLNLDGFRLDAVKHIKFSFMRDWLGHVRGQTGKNLFAVAEYWKNDLGALENYLSKTNWTMSAFDVPLHYNLYQASNSSGNYDMRNLLNGTLVQRHPSHAVTFVDNHDTQPGEALESFVQGWFKPLAYATILTREQGYPQVFYGDYYGIPSDGSPSYRQQIDPLLKARQQYAYGRQHDYFDHWDVIGWTREGNASHPNSGLATIMSDGPGGSKWMYVGRQKAGEVWHDMTGNRSGTVTINQDGWGHFFVNGGSVSVWVKR

SEQ ID NO: 31368 - protein, 485 aa, Bacillus sp.
HHDGTNGTIMQYFEWNVPNDGQHWNRLHNNAQNLKNAGITAIWIPPAWKGTSQNDVGYGAYDLYDLGEFNQKGTVRTKYGTKAELERAIRSLKANGIQVYGDVVMNHKGGADFTERVQAVEVNPQNRNQEVSGTYQIEAWTGFNFTGRGNQHSSFKWRWYHFDGTDWDQSRQLANRIYKFRGDGKAWDWEVDTENGNYDYLMYADVDMDHPEVINELNRWGVWYANTLNLDGFRLDAVKHIKFSFMRDWLGHVRGQTGKNLFAVAEYWKNDLGALENYLSKTNWTMSAFDVPLHYNLYQASNSSGNYDMRNLLNGTLVQRHPSHAVTFVDNHDTQPGEALESFVQGWFKPLAYATILTREQGYPQVFYGDYYGIPSDGVPSYRQQIDPLLKARQQYAYGRQHDYFDHWDVIGWTREGNASHPNSGLATIMSDGPGGSKWMYVGRQKAGEVWHDMTGNRSGTVTINQDGWGHFFVNGGSVSVWVKR

SEQ ID NO: 31369 - protein, 485 aa, Bacillus sp.
HHDGTNGTIMQYFEWNVPNDGQHWNRLHNNAQNLKNAGITAIWIPPAMKGTSQNDVGYGAYDLYDLGEFNQKGTVRTKYGTKAELERAIRSLKANGIQVYGDVVMNHKGGADFTERVQAVEVNPQNRNQEVSGTYQIEAWTGFNFPGRGNQHSSFKWRWYHFDGTDWDQSRQLANRIYKFRGDGKAWDWEVDTENGNYDYLMYADVDMDHPEVINELNRWGVWYANTLNLDGFRLDAVKHIKFSFMRDWLGHVRGQTGKNLFAVAEYWKNDLGALENYLSKTNWTMSAFDVPLHYNLYQASNSSGNYDMRNLLNGTLVQRHPSHAVTFVDNHDTQPGEALESFVQGWFKPLAYATILTREQGYPQVFYGDYYGIPSDGVPSYRQQIDPLLKARQQYAYGRQHDYFDHWDVIGWTREGNASHPNSGLATIMSDGPGGSKWMYVGRQKAGEVWHDMTGNRSGTVTINQDGWGHFFVNGGSVSVWVKR

SEQ ID NO: 31370 - protein, 485 aa, Bacillus sp.
HHDGTNGTIMQYFEWNVPNDGQHWNRLHNNAQNLKNAGITAIWIPPAWKGTSQNDVGYGAYDLYDLGEFNQKGTVRTKYGTKAELERAIRSLKANGIQVYGDVVMNHKGGADFTERVQAVEVNPQNRNQEVSGTYQIEAWTGFNFPGRGNQHSSFKWRWYHFDGTDWDQSRQLANRIYKFRGDGKAWDWEVDTENGNYDYLMYADVDMDHPEVINELNRWGVWYANTLNLDGFRLDAVKHIKFSFMRDWLGHVRGQTGKNLFAVAEYWKNDLGALENYLSKTNWTMSAFDVPLHYNLYQASNSSLNYDMRNLLNGTLVQRHPSHAVTFVDNHDTQPGEALESFVQGWFKPLAYATILTREQGYPQVFYGDYYGIPSDGVPSYRQQIDPLLKARQQYAYGRQHDYFDHWDVIGWTREGNASHPNSGLATIMSDGPGGSKWMYVGRQKAGEVWHDMTGNRSGTVTINQDGWGHFFVNGGSVSVWVKR

SEQ ID NO: 31371 - protein, 485 aa, Bacillus sp.
HHDGTNGTIMQYFEWNVPNDGQHWNRLHNNAQNLKNAGITAIWIPPAWKGTSQNDVGYGAYDLYDLGEFNQKGTVRTKYGTKAELERAIRSLKANGIQVYGDVVMNHKGGADFTERVQAVEVNPQNRNQEVSGTYQIEAWTGFNFPGRGNQHSSFKWRWYHFDGTDWDQSRQLANRIYKFRGDGKAWDWEVDTENGNYDYLMYADVDMDHPEVINELNRWGVWYANTLNLDGMRLDAVKHIKFSFMRDWLGHVRGQTGKNLFAVAEYWKNDLGALENYLSKTNWTMSAFDVPLHYNLYQASNSSGNYDMRNLLNGTLVQRHPSHAVTFVDNHDTQPGEALESFVQGWFKPLAYATILTREQGYPQVFYGDYYGIPSDGVPSYRQQIDPLLKARQQYAYGRQHDYFDHWDVIGWTREGNASHPNSGLATIMSDGPGGSKWMYVGRQKAGEVWHDMTGNRSGTVTINQDGWGHFFVNGGSVSVWVKR

SEQ ID NO: 31372 - protein, 485 aa, Bacillus sp.
HHDGTNGTIMQYFEWNVPNDGQHWNRLHNNAQNLKNAGITAIWIPPAWKGTSQNDVGYGAYDLYDLGEFNQKGTVRTKYGTKAELERAIRSLKANGIQVYGDVVMNHKGGADFTERVQAVEVNPQNRNQEVSGTYQIEAWTGFNFPGRGNQHSSFKWRWYHFDGTDWDQSRQLANRIYKFRGDGKAWDWEVDTENGNYDYLMYADVDMDHPEVINELNRWGVWYANTLNLDGFRLDAVKHIKFSFMRDWLGHVRGQTGKNLFAVAEYWKNDLGALENYLSKTNWTMSAFDVPLHYNLYQASNSSGNYDMRNLLNGTLVQRHPSHAVTFVDNHDTQPGEALESFVQGWFKPLAYATILTREQGYPQVFYGDYYGIPSDGVPSYRQQIDPLLKARQQYAYGRQHDYFDHWDVIGWTREGRASHPNSGLATIMSDGPGGSKWMYVGRQKAGEVWHDMTGNRSGTVTINQDGWGHFFVNGGSVSVWVKR

SEQ ID NO: 31373 - protein, 485 aa, Bacillus sp.
HHDGTNGTIMQYFEWNVPNDGQHWNRLHNNAQNLKNAGITAIWIPPAWKGTSQNDVGYGAYDLYDLGEFNQKGTVRTKYGTKAELERAIRSLKANGIQVYGDVVMNHKGGADFTERVQAVEVNPQNRNQEVSGTYQIEAWTGFNFPGRGNQHSSFKWMWYHFDGTDWDQSRQLANRIYKFRGDGKAWDWEVDTENGNYDYLMYADVDMDHPEVINELNRWGVWYANTLNLDGFRLDAVKHIKFSFMRDWLGHVRGQTGKNLFAVAEYWKNDLGALENYLSKTNWTMSAFDVPLHYNLYQASNSSGNYDMRNLLNGTLVQRHPSHAVTFVDNHDTQPGEALESFVQGWFKPLAYATILTREQGYPQVFYGDYYGIPSDGVPSYRQQIDPLLKARQQYAYGRQHDYFDHWDVIGWTREGNASHPNSGLATIMSDGPGGSKWMYVGRQKAGEVWHDMTGNRSGTVTINQDGWGHFFVNGGSVSVWVKR

SEQ ID NO: 31374 - protein, 485 aa, Bacillus sp.
HHDGTNGTIMQYFEWNVPNDGQHWNRLHNNAQNLKNAGITAIWIPPAWKGTSQNDVGYGAYDLYDLGEFNQKGTVRTKYGTKAELERAIRSLKANGIQVYGDVVMNHKGGADFTERVQAVEVNPQNRNQEVSGTYQIEAWTGFNFPGRGNQHSSFKWRWYHFDGTDWDQSRQLANRIYKFRGDGKAWDWEVDTENGNYDYLMYADVDMDHPEVINELNRWGVWYANTLNLDGFRLDAVKHIKFSFMRDWLGHVRGQTGKNLFAVAEYWKNDLGALENYLSKTNWTMSAFDVPLHYNLYQASNSSGNYDMRNLLNGTLVQRHPSHAVTFVDNHDTQPGEALESFVQGWFKPLAYATILTREQGYPQVFYGDYYGIPSDGVPSYRQQIDPLLKARQQYAYGRQHDYFDHWDVIGWTREGNASHPNSGLATIMSDGPGGSKWMYVGRQKAGEVWHDMTGNRSGTVTINQDGWGHFFVGGGSVSVWVKR

SEQ ID NO: 31375 - protein, 485 aa, Bacillus sp.
HHDGTNGTIMQYFEWNVPNDGQHWNRLHNNAQNLKNAGITAIWIPPAWKGTSQNDVGYGAYDLYDLGEFNQKGTVRTKYGTKAELERAIRSLKANGIQVYGDVVMNHKGGADFTERVQAVEVNPQNRNQEVSGTYQIEAWTGFNFPGRGNQHSSFKWRWYHFDGTDWDQSRQLANRIYKFRGDGKAWDWEVDTENGNYDYLMYADVDMDHPEVINELNRWGVWYANTLNLDGFRLDAVKHIKFSFMRDWLGHVRGQTGKNLFAVAEYWKNDLGALENYLSKTNWTMSAFDVPLHYNLYQASNSSGNYDMRNLLNGTLVQRHPSHAVTFVDNHDTQPGEALESFVQGVFKPLAYATILTREQGYPQVFYGDYYGIPSDGVPSYRQQIDPLLKARQQYAYGRQHDYFDHWDVIGWTREGNASHPNSGLATIMSDGPGGSKWMYVGRQKAGEVWHDMTGNRSGTVTINQDGWGHFFVNGGSVSVWVKR

SEQ ID NO: 31376 - protein, 485 aa, Bacillus sp.
HHDGTNGTIMQYFEWNVPNDGQHWNRLHNNAQNLKNAGITAIWIPPAWKGTSQNDVGYGAYDLYDLGEFNQKGTVRTKYGTKAELERAIRSLKANGIQVYGDVVMNHKGGADFTERVQAVEVNPQNRNQEVSGTYQIEAWTGFNFPGRGNQHSSFKWRWYHFDGTDWDQSRQLANRIYKFRGDGKAWDWEVDTENGNYDYLMYADVDMDHPEVINELNRWGVWYANTLNLDGFRLDAVKHIKFSFMRDWLGHVRGQTGKNLFAVAEYWKNDLGALENYLSKTNWTMSAFDVPLHYNLYQASNSSGNYDMRNLLNGTLVQRHPSHAVTFVDNHDTQPGEALESFVQGWFKPLAYATILTREQGYPQVFYGDYYGISSDGVPSYRQQIDPLLKARQQYAYGRQHDYFDHWDVIGWTREGNASHPNSGLATIMSDGPGGSKWMYVGRQKAGEVWHDMTGNRSGTVTINQDGWGHFFVNGGSVSVWVKR

SEQ ID NO: 31377 - protein, 485 aa, Bacillus sp.
HHDGTNGTIMQYFEWNVPNDGQHWNRLHNNAQNLKNAGITAIWIPPAWKGTSQNDVGYGAYDLYDLGEFNQKGTVRTKYGTKAELERAIRSLKANGIQVYGDVVMNHKGGADFTERVQAVEVNPQNRNQEVSGTYQIEAWTGFNFPGRGNQHSSFKWRWYHFDGTDWDQSRQLANRIYKFRGDGKAWDWEVDTENGNYDYLMYADVDMDHPEVINELNRWGVWYANTLNLDGFRLDAVKHIKFSFMRDWLGHVRGQTGKNLFAVAEYWKNDLGALENYLSKTNWTMSAFDVPLHYNLYQASNSSGNYDMRNLLNGTLVQRHPSHAVTFVDNHDTQPGEALESFVQGWFKPLAYATILTREQGYPQVFYGDYYGIPSDGVPSYRQQIDPLLKARQQYAYGRQHDYFDHWDVIGWTREGNASHDNSGLATIMSDGPGGSKWMYVGRQKAGEVWHDMTGNRSGTVTINQDGWGHFFVNGGSVSVWVKR

SEQ ID NO: 31378 - protein, 485 aa, Bacillus sp.
HHDGTNGTIMQYFEWNVPNDGQHWNRLHNNAQNLKNAGITAIWIPPAWKGTSQNDVGYGAYDLYDLGEFNQKGTVRTKYGTKAELERAIRSLKANGIQVYGDVVMNHKGGADFTERVQAVEVNPQNRNQEVSGTYQIEAWTGFNFPGRGNQHSSFKWRWYHFDGTDWDQSRQLANRIYKFRGDGKAWDWEVDTENGNYDYLMYADVDMDHPEVINELNRWGVWYANTLNLDGFRLDAVKHIKFSFMRDWLGHVRGQTGKNLFAVAEYWKNDLGALENYLSKANWTMSAFDVPLHYNLYQASNSSGNYDMRNLLNGTLVQRHPSHAVTFVDNHDTQPGEALESFVQGWFKPLAYATILTREQGYPQVFYGDYYGIPSDGVPSYRQQIDPLLKARQQYAYGRQHDYFDHWDVIGWTREGNASHPNSGLATIMSDGPGGSKWMYVGRQKAGEVWHDMTGNRSGTVTINQDGWGHFFVNGGSVSVWVKR

SEQ ID NO: 31379 - protein, 485 aa, Bacillus sp.
HHDGTNGTIMQYFEWNVPNDGQHWNRLHNNAQNLKNAGITAIWIPPAWKGTSQNDVGYGAYDLYDLGEFNQKGTVRTKYGTKAELERAIRSLKANGIQVYGDVVMNHKGGADFTERVQAVEVNPQNRNQEVSGTYQIEAWTGFNFPGRGNQHSSFKWRWYHFDGTDWDQSRQLANRIYKFRGDGNAWDWEVDTENGNYDYLMYADVDMDHPEVINELNRWGVWYANTLNLDGFRLDAVKHIKFSFMRDWLGHVRGQTGKNLFAVAEYWKNDLGALENYLSKTNWTMSAFDVPLHYNLYQASNSSGNYDMRNLLNGTLVQRHPSHAVTFVDNHDTQPGEALESFVQGWFKPLAYATILTREQGYPQVFYGDYYGIPSDGVPSYRQQIDPLLKARQQYAYGRQHDYFDHWDVIGWTREGNASHPNSGLATIMSDGPGGSKWMYVGRQKAGEVWHDMTGNRSGTVTINQDGWGHFFVNGGSVSVWVKR

SEQ ID NO: 31380 - protein, 485 aa, Bacillus sp.
HHDGTNGTIMQYFEWNVPNDGQHWNRLHNNAQNLKNAGITAIWIPPAWKGTSQNDVGYGAYDLYDLGEFNQKGTVRTKYGTKAELERAIRSLKANGIQVYGDVVMNHKGGADFTERVQAVEVNPQNRNQEVSGTYQIEAWTGFNFPGRGNQHSSFKWRWYHFDGTDWDQSRQLANRIYKFRGDGKAWDWEVDTENGNYDYLMYADVDMDHPEVINELNRWGVWYANTLNLDGFRLDAVKHIKFSFMRDWLGHVRGQTGKNLFAVAEYWKNDLGALENYLSKTNWTMSAFDVPLHYNLYQASNSSGNYDMRNLLNGTLVQRHPSHAVTFVDNHDTQPGEALESFVQGWFKPLAYATILTREQGYPQVFYGDYYGIPSDGPPSYRQQIDPLLKARQQYAYGRQHDYFDHWDVIGWTREGNASHPNSGLATIMSDGPGGSKWMYVGRQKAGEVWHDMTGNRSGTVTINQDGWGHFFVNGGSVSVWVKR

SEQ ID NO: 31381 - protein, 485 aa, Bacillus sp.
HHDGTNGTIMQYFEWNVPNDGQHWNSLHNNAQNLKNAGITAIWIPPAWKGTSQNDVGYGAYDLYDLGEFNQKGTVRTKYGTKAELERAIRSLKANGIQVYGDVVMNHKGGADFTERVQAVEVNPQNRNQEVSGTYQIEAWTGFNFPGRGNQHSSFKWRWYHFDGTDWDQSRQLANRIYKFRGDGKAWDWEVDTENGNYDYLMYADVDMDHPEVINELNRWGVWYANTLNLDGFRLDAVKHIKFSFMRDWLGHVRGQTGKNLFAVAEYWKNDLGALENYLSKTNWTMSAFDVPLHYNLYQASNSSGNYDMRNLLNGTLVQRHPSHAVTFVDNHDTQPGEALESFVQGWFKPLAYATILTREQGYPQVFYGDYYGIPSDGVPSYRQQIDPLLKARQQYAYGRQHDYFDHWDVIGWTREGNASHPNSGLATIMSDGPGGSKWMYVGRQKAGEVWHDMTGNRSGTVTINQDGWGHFFVNGGSVSVWVKR

SEQ ID NO: 31382 - protein, 485 aa, Bacillus sp.
HHDGTNGTIMQYFEWNVPNDGQHWNRLHNNAQNLKNAGITAIWIPPAWKGTSQNDVGYGAYDLYDLGEFNQKGTVRTKYGTKAELERAIRSLKANGIQVYGDVVMNHKGGADFTERVQAVEVNPQNRNQEVSGTYQIEAWTGFNFPGRGNQHSSFKWRWYHFDGTDWDQSRQLANRIYKFRGDGKAWDWEVDTENGNYDYLMYADVDMDHPEVINELNRWGVWYANTLNLDGFRLDAVKHIKFSFMRDWLGHVRGQTGKNLFAVAEYWKNDLGALENYLSKTNWTMSAFDVPLHYNLYQASNSSGNYDMRNLLNGSLVQRHPSHAVTFVDNHDTQPGEALESFVQGWFKPLAYATILTREQGYPQVFYGDYYGIPSDGVPSYRQQIDPLLKARQQYAYGRQHDYFDHWDVIGWTREGNASHPNSGLATIMSDGPGGSKWMYVGRQKAGEVWHDMTGNRSGTVTINQDGWGHFFVNGGSVSVWVKR

SEQ ID NO: 31383 - protein, 485 aa, Bacillus sp.
HHDGTNGTIMQYFEWNVPNDGQHWNRLHNNAQNLKNAGITAIWIPPAWKGTSQNDVGYGAYDLYDLGEFNQKGTVRTKYGTKAELERAIRSLKANGIQVYGDVVMNHKGGADFTERVQAVEVNPQNRNQEVSGTYQIEAWTGFNFPGRGNQHSSFKWRWYHFAGTDWDQSRQLANRIYKFRGDGKAWDWEVDTENGNYDYLMYADVDMDHPEVINELNRWGVWYANTLNLDGFRLDAVKHIKFSFMRDWLGHVRGQTGKNLFAVAEYWKNDLGALENYLSKTNWTMSAFDVPLHYNLYQASNSSGNYDMRNLLNGTLVQRHPSHAVTFVDNHDTQPGEALESFVQGWFKPLAYATILTREQGYPQVFYGDYYGIPSDGVPSYRQQIDPLLKARQQYAYGRQHDYFDHWDVIGWTREGNASHPNSGLATIMSDGPGGSKWMYVGRQKAGEVWHDMTGNRSGTVTINQDGWGHFFVNGGSVSVWVKR

SEQ ID NO: 31384 - protein, 485 aa, Bacillus sp.
HHDGTNGTIMQYFEWNVPNDGQHWNRLHNNAQNLKNAGITAIWIPPAWKGTSQNDVGYGAYDLYDLGEFNQKGTVRTKYGTKAELERAIRSLKANGIQEYGDVVMNHKGGADFTERVQAVEVNPQNRNQEVSGTYQIEAWTGFNFPGRGNQHSSFKWRWYHFDGTDWDQSRQLANRIYKFRGDGKAWDWEVDTENGNYDYLMYADVDMDHPEVINELNRWGVWYANTLNLDGFRLDAVKHIKFSFMRDWLGHVRGQTGKNLFAVAEYWKNDLGALENYLSKTNWTMSAFDVPLHYNLYQASNSSGNYDMRNLLNGTLVQRHPSHAVTFVDNHDTQPGEALESFVQGWFKPLAYATILTREQGYPQVFYGDYYGIPSDGVPSYRQQIDPLLKARQQYAYGRQHDYFDHWDVIGWTREGNASHPNSGLATIMSDGPGGSKWMYVGRQKAGEVWHDMTGNRSGTVTINQDGWGHFFVNGGSVSVWVKR

SEQ ID NO: 31385 - protein, 485 aa, Bacillus sp.
HHDGTNGTIMQYFEWNVPNDGQHWNRLHNNAQNLKNAGITAIWIPPAWKGTSQNDVGYGAYDLYDLGEFNQKGTVRTKYGTKAELERAIRSLKANGIQVYGDVVMNHKGGADFTERVQAVEVNPQNRNQEVSGTYQIEAWTGFNFPGRGNQHSSFKWRWYHFDGTDWDQSRQLANRIYKFRGDGKAWDWEVDTENGNYDYLMYADVDMDHPEVINELNRWGVWYANTLNLDGFRLDAVKHIKFSFMRDWLGHVRGQTGKNLFAVAEYWKNDLGALENYLSKTNWTMSAFDVPLHYNLYQASNSSGNYDMRNLLNGTLVQRHPSHAVTFVDNHDTQPGEALESFVQGWFKPLAYATILTREQGYPQVFYGDYYGIPSDGVPSYRQQIDPLLKARQQYAYGRQHDYFDHWDVIGWTREGNASHPNSGLATIMSDGPSGSKWMYVGRQKAGEVWHDMTGNRSGTVTINQDGWGHFFVNGGSVSVWVKR

SEQ ID NO: 31386 - protein, 485 aa, Bacillus sp.
HHDGTNGTIMQYFEWNVPNDGQHWNRLHNNAQNLKNAGITAIWIPPAWKGTSQNDVGYGAYDLYDLGEFNQKGTVRTKYGTKAELERAIRSLKANGIQVYGDVVMNHKGGADFTERVQAVEVNPQNRNQEVSGTYQIEAWTGFNFPGRGNQHSSFKWRWYHFDGTDWDQSRQLANRIYKFRGDGKAWDWEVDTENGNGDYLMYADVDMDHPEVINELNRWGVWYANTLNLDGFRLDAVKHIKFSFMRDWLGHVRGQTGKNLFAVAEYWKNDLGALENYLSKTNWTMSAFDVPLHYNLYQASNSSGNYDMRNLLNGTLVQRHPSHAVTFVDNHDTQPGEALESFVQGWFKPLAYATILTREQGYPQVFYGDYYGIPSDGVPSYRQQIDPLLKARQQYAYGRQHDYFDHWDVIGWTREGNASHPNSGLATIMSDGPGGSKWMYVGRQKAGEVWHDMTGNRSGTVTINQDGWGHFFVNGGSVSVWVKR

SEQ ID NO: 31387 - protein, 485 aa, Bacillus sp.
HHDGTNGTIMQYFEWNVPNDGQHWNRLHNNAQNLKNAGITAIWIPPAWKGTSQNDVGYGAYDLYDLGEFNQKGTVRTKYGTKAELERAIRSLKANGIQVYGDVVMNHKGGADFTERVQAVEVNPQNRNQEVSGTYQIEGWTGFNFPGRGNQHSSFKWRWYHFDGTDWDQSRQLANRIYKFRGDGKAWDWEVDTENGNYDYLMYADVDMDHPEVINELNRWGVWYANTLNLDGFRLDAVKHIKFSFMRDWLGHVRGQTGKNLFAVAEYWKNDLGALENYLSKTNWTMSAFDVPLHYNLYQASNSSGNYDMRNLLNGTLVQRHPSHAVTFVDNHDTQPGEALESFVQGWFKPLAYATILTREQGYPQVFYGDYYGIPSDGVPSYRQQIDPLLKARQQYAYGRQHDYFDHWDVIGWTREGNASHPNSGLATIMSDGPGGSKWMYVGRQKAGEVWHDMTGNRSGTVTINQDGWGHFFVNGGSVSVWVKR

SEQ ID NO: 31388 - protein, 485 aa, Bacillus sp.
HHDGTNGTIMQYFEWNVPNDGQHWNRLHNNAQNLKNAGITAIWIPPAWKGTSQNDVGYGAYDLYDLGEFNQKGTVRTKYGTKAELERAIRSLKANGIQVYGDVVMNHKGGADFTERVQAVEVNPQNRNQEVSGTYQIEVWTGFNFPGRGNQHSSFKWRWYHFDGTDWDQSRQLANRIYKFRGDGKAWDWEVDTENGNYDYLMYADVDMDHPEVINELNRWGVWYANTLNLDGFRLDAVKHIKFSFMRDWLGHVRGQTGKNLFAVAEYWKNDLGALENYLSKTNWTMSAFDVPLHYNLYQASNSSGNYDMRNLLNGTLVQRHPSHAVTFVDNHDTQPGEALESFVQGWFKPLAYATILTREQGYPQVFYGDYYGIPSDGVPSYRQQIDPLLKARQQYAYGRQHDYFDHWDVIGWTREGNASHPNSGLATIMSDGPGGSKWMYVGRQKAGEVWHDMTGNRSGTVTINQDGWGHFFVNGGSVSVWVKR

SEQ ID NO: 31389 - protein, 485 aa, Bacillus sp.
HHDGTNGTIMQYFEWNVPNDGQHWNRLHNNAQNLKNAGITAIWIPPAWKGTSQNDVGYGAYDLYDLGEFNQKGTVRTKYGTKAELERAIRSLKANGIQVYGDVVMNHKGGADFTERVQAVEVNPQNRNQEVSGTYQIEAWTGFNFPGRGNQHSSFKWRWYHFDGTDWDQSRQLANRIYKFRGDGKAWDWEVDTENGNYDYLMYADVDMDHPEVINELNRWGVWYANTLNLDGFRLDAVKHIKFSFMRDWLGHVRGQTGKNLFAVAEYWKNDLGALENYLSKTNWTMSAFDVPLHYNLYQASNSSGNYDMRNLLNGTLVQRHPSHAVTFVDNHDTQPGEALESFVNGWFKPLAYATILTREQGYPQVFYGDYYGIPSDGVPSYRQQIDPLLKARQQYAYGRQHDYFDHWDVIGWTREGNASHPNSGLATIMSDGPGGSKWMYVGRQKAGEVWHDMTGNRSGTVTINQDGWGHFFVNGGSVSVWVKR

SEQ ID NO: 31390 - protein, 485 aa, Bacillus sp.
HHDGTNGTIMQYFEWNVPNDGQHWSRLHNNAQNLKNAGITAIWIPPAWKGTSQNDVGYGAYDLYDLGEFNQKGTVRTKYGTKAELERAIRSLKANGIQVYGDVVMNHKGGADFTERVQAVEVNPQNRNQEVSGTYQIEAWTGFNFPGRGNQHSSFKWRWYHFDGTDWDQSRQLANRIYKFRGDGKAWDWEVDTENGNYDYLMYADVDMDHPEVINELNRWGVWYANTLNLDGFRLDAVKHIKFSFMRDWLGHVRGQTGKNLFAVAEYWKNDLGALENYLSKTNWTMSAFDVPLHYNLYQASNSSGNYDMRNLLNGTLVQRHPSHAVTFVDNHDTQPGEALESFVQGWFKPLAYATILTREQGYPQVFYGDYYGIPSDGVPSYRQQIDPLLKARQQYAYGRQHDYFDHWDVIGWTREGNASHPNSGLATIMSDGPGGSKWMYVGRQKAGEVWHDMTGNRSGTVTINQDGWGHFFVNGGSVSVWVKR

SEQ ID NO: 31391 - protein, 485 aa, Bacillus sp.
HHDGTNGTIMQYFEWNVPNDGQHWNRLHNNAQNLKNAGITAIWIPPAWKGTSQNDVGYGAYDVYDLGEFNQKGTVRTKYGTKAELERAIRSLKANGIQVYGDVVMNHKGGADFTERVQAVEVNPQNRNQEVSGTYQIEAWTGFNFPGRGNQHSSFKWRWYHFDGTDWDQSRQLANRIYKFRGDGKAWDWEVDTENGNYDYLMYADVDMDHPEVINELNRWGVWYANTLNLDGFRLDAVKHIKFSFMRDWLGHVRGQTGKNLFAVAEYWKNDLGALENYLSKTNWTMSAFDVPLHYNLYQASNSSGNYDMRNLLNGTLVQRHPSHAVTFVDNHDTQPGEALESFVQGWFKPLAYATILTREQGYPQVFYGDYYGIPSDGVPSYRQQIDPLLKARQQYAYGRQHDYFDHWDVIGWTREGNASHPNSGLATIMSDGPGGSKWMYVGRQKAGEVWHDMTGNRSGTVTINQDGWGHFFVNGGSVSVWVKR

SEQ ID NO: 31392 - protein, 485 aa, Bacillus sp.
HHDGTNGTIMQYFEWNVPNDGQHWVRLHNNAQNLKNAGITAIWIPPAWKGTSQNDVGYGAYDLYDLGEFNQKGTVRTKYGTKAELERAIRSLKANGIQVYGDVVMNHKGGADFTERVQAVEVNPQNRNQEVSGTYQIEAWTGFNFPGRGNQHSSFKWRWYHFDGTDWDQSRQLANRIYKFRGDGKAWDWEVDTENGNYDYLMYADVDMDHPEVINELNRWGVWYANTLNLDGFRLDAVKHIKFSFMRDWLGHVRGQTGKNLFAVAEYWKNDLGALENYLSKTNWTMSAFDVPLHYNLYQASNSSGNYDMRNLLNGTLVQRHPSHAVTFVDNHDTQPGEALESFVQGWFKPLAYATILTREQGYPQVFYGDYYGIPSDGVPSYRQQIDPLLKARQQYAYGRQHDYFDHWDVIGWTREGNASHPNSGLATIMSDGPGGSKWMYVGRQKAGEVWHDMTGNRSGTVTINQDGWGHFFVNGGSVSVWVKR

SEQ ID NO: 31393 - protein, 485 aa, Bacillus sp.
HHDGTNGTIMQVFEWNVPNDGQHWNRLHNNAQNLKNAGITAIWIPPAWKGTSQNDVGYGAYDLYDLGEFNQKGTVRTKYGTKAELERAIRSLKANGIQVYGDVVMNHKGGADFTERVQAVEVNPQNRNQEVSGTYQIEAWTGFNFPGRGNQHSSFKWRWYHFDGTDWDQSRQLANRIYKFRGDGKAWDWEVDTENGNYDYLMYADVDMDHPEVINELNRWGVWYANTLNLDGFRLDAVKHIKFSFMRDWLGHVRGQTGKNLFAVAEYWKNDLGALENYLSKTNWTMSAFDVPLHYNLYQASNSSGNYDMRNLLNGTLVQRHPSHAVTFVDNHDTQPGEALESFVQGWFKPLAYATILTREQGYPQVFYGDYYGIPSDGVPSYRQQIDPLLKARQQYAYGRQHDYFDHWDVIGWTREGNASHPNSGLATIMSDGPGGSKWMYVGRQKAGEVWHDMTGNRSGTVTINQDGWGHFFVNGGSVSVWVKR

SEQ ID NO: 31394 - protein, 485 aa, Bacillus sp.
HHDGTNGTIMQYFEWNVPNDGQHWNRLHNNAQNLKNAGITAIWIPPAWKGTSQNDVGYGAYDLYDLGEFNQKGTVRTKYGTKAELERAIRSLKANGIQVYGDVVMNHKGGADFTERVQAVEVNPQNRNQEVSGTYQIEAWTGFNFPGRGNQHSSFKWRWYHFDGTDWDQSRQLANRIYKFRGDGKAWDWEVDTENGNYDYLMYADVDMDHPEVINELNRWGVWYANTLNLDGFRLDAVKHIKFSFMRDWLGHVRGQTGKNLFAVAEYWKNDLGALENYLSKTNWTMSAFDVPLHYNLYQASNSSGNYDMRNLLNGTLVQRHPSHAVTFVDNHDTQPGEALESFVQGWFKPLAYATILTREQGYPQVFYGDYYGIPSDGVPSYRQQIDPLLKARMQYAYGRQHDYFDHWDVIGWTREGNASHPNSGLATIMSDGPGGSKWMYVGRQKAGEVWHDMTGNRSGTVTINQDGWGHFFVNGGSVSVWVKR

SEQ ID NO: 31395 - protein, 485 aa, Bacillus sp.
HHDGTNGTIMQYFEWNVPNDGQHWNRLHNNAQNLKNAGITAIWIPPAWKGTSQNDVGYGAYDLYDLGEFNQKGTVRTKYGTKAELERAIRSLKANGIQVYGDVVMNHKGGADFTERVQAVEVNPQNRNQEVSGTYQIEAWTGFNFPGRGNQHSSFKWRWYHFDGTDWDQSRQLANRIYKFRGDGKAWDWEVDTENGNYDYLMYADVDMDHPEVINELNRWGVWYANTLNLDGFRLDAVKHIKFSFMRDWLGHVRGQTGKNLFAVAEYWKNDLGALENYLSKTNWTMSAFDVPLHYNLYQASNSSGNYDMRNLLNGTLVQRHPSHAVTFVDNHDTQPGEALESFVQGCFKPLAYATILTREQGYPQVFYGDYYGIPSDGVPSYRQQIDPLLKARQQYAYGRQHDYFDHWDVIGWTREGNASHPNSGLATIMSDGPGGSKWMYVGRQKAGEVWHDMTGNRSGTVTINQDGWGHFFVNGGSVSVWVKR

SEQ ID NO: 31396 - protein, 485 aa, Bacillus sp.
HHDGTNGTIMQYFEWNVPNDGQHWNRLHNNAQNLKNAGITAIWIPPAWKGTSQNDVGYGAYDLYDLGEFNQKGTVRTKYGTKAELERAIRSLKANGIQVYGDVVMNHKGGADFTERVQAVEVNPQNRNQEVSGTYQIEAWTGFNFPGRGNQHSSFKWRHYHFDGTDWDQSRQLANRIYKFRGDGKAWDWEVDTENGNYDYLMYADVDMDHPEVINELNRWGVWYANTLNLDGFRLDAVKHIKFSFMRDWLGHVRGQTGKNLFAVAEYWKNDLGALENYLSKTNWTMSAFDVPLHYNLYQASNSSGNYDMRNLLNGTLVQRHPSHAVTFVDNHDTQPGEALESFVQGWFKPLAYATILTREQGYPQVFYGDYYGIPSDGVPSYRQQIDPLLKARQQYAYGRQHDYFDHWDVIGWTREGNASHPNSGLATIMSDGPGGSKWMYVGRQKAGEVWHDMTGNRSGTVTINQDGWGHFFVNGGSVSVWVKR

SEQ ID NO: 31397 - protein, 485 aa, Bacillus sp.
HHDGTNGTIMQYFEWNVPNDGQHWNRLHNNAQNLKNAGITAIWIPPAWKGTSQNDVGYGAYDLYDLGEFNQKGTVRTKYGTKAEVERAIRSLKANGIQVYGDVVMNHKGGADFTERVQAVEVNPQNRNQEVSGTYQIEAWTGFNFPGRGNQHSSFKWRWYHFDGTDWDQSRQLANRIYKFRGDGKAWDWEVDTENGNYDYLMYADVDMDHPEVINELNRWGVWYANTLNLDGFRLDAVKHIKFSFMRDWLGHVRGQTGKNLFAVAEYWKNDLGALENYLSKTNWTMSAFDVPLHYNLYQASNSSGNYDMRNLLNGTLVQRHPSHAVTFVDNHDTQPGEALESFVQGWFKPLAYATILTREQGYPQVFYGDYYGIPSDGVPSYRQQIDPLLKARQQYAYGRQHDYFDHWDVIGWTREGNASHPNSGLATIMSDGPGGSKWMYVGRQKAGEVWHDMTGNRSGTVTINQDGWGHFFVNGGSVSVWVKR

SEQ ID NO: 31398 - protein, 485 aa, Bacillus sp.
HHDGTNGTIMQYFEWNVPNDGQHWNRLHNNAQNLKNAGITAIWIPPAWKGTSQNDVGYGAYDLYDLGEFNQKGTVRTKYGTKAELERAIRSLKANGIQVYGDVVMNHKGGADFTERVQAVEVNPQNRNQEVSGTYQIEAWTGFNFPGRGNQHSSFKWRWYHFDGTDWDQSRQLANRIYKFRGDGKAWDWEVDTENGNYDYLMYADVDMDHPEVINELNRWGVWYANTLNLDGFRLDAVKHIKFSFMRDWLGHVRGQTGKPLFAVAEYWKNDLGALENYLSKTNWTMSAFDVPLHYNLYQASNSSGNYDMRNLLNGTLVQRHPSHAVTFVDNHDTQPGEALESFVQGWFKPLAYATILTREQGYPQVFYGDYYGIPSDGVPSYRQQIDPLLKARQQYAYGRQHDYFDHWDVIGWTREGNASHPNSGLATIMSDGPGGSKKMYVGRQKAGEVWHDMTGNRSGTVTINQDGWGHFFVNGGSVSVWVKR

SEQ ID NO: 31399 - protein, 485 aa, Bacillus sp.
HHDGTNGTIMQYFEWNVPNDGQHWNRLHNNAQNLKNAGITAIWIPPAWKGTSQNDVGYGAYDLYDLGEFNQKGTVRTKYGTKAELERAIRSLKANGIQVYGDVVMNHKGGADFTERVQAVEVNPQNRNQEVSGTYQIEAWTGFNFPGRGNQHSSFKWRWYHFDGTDWDQSRQLANRIYKFRGDGKAWDWEVDTENGNYDYLMYADVDMDHPEVINELNRWGVWYANTLNLDGFRLDAVKHIKFSFMRDWLGHVRGQTGKNLFAVAEYWKNDLGALENYLSKTNWTMSAFDVPLHYNLYQASNSSGNYDMRNLLNGTLVQRHPSHAVTFVDNHDTQPGEALESFVQGLFKPLAYATILTREQGYPQVFYGDYYGIPSDGVPSYRQQIDPLLKARQQYAYGRQHDYFDHWDVIGWTREGNASHPNSGLATIMSDGPGGSKWMYVGRQKAGEVWHDMTGNRSGTVTINQDGWGHFFVNGGSVSVWVKR

SEQ ID NO: 31400 - protein, 485 aa, Bacillus sp.
HHDGTNGTIMQYFEWNVPNDGQHWNRLHNNAQNLKNAGITAIWIPPAWKGTSQNDVGYGAYDLYDLGEFNQKGTVRTKYGTKAELERAIRSLKANGIQVYGDVVMNHKGGADFTERVQAVEVNPQNRNQEVSGTYQIEAWTGFNFPGRGNQHSSFKWRWYHFDGTDWDQSRQLANRIYKFRGDGKAWDWEVDTENGNYDYLMYADVDMDHPEVINELNRWGVWYANTLNLDGFRLDAVKHIKFSFMRDWLGHVRGQTGKNLFAVAEYWKNDLGALENYLSKTNWTMSAFDVPLHYNLYQASNSSGNYDMRNLLNGTLVQRHPSHAVTFVDNHDTQPGEALESFVQGWFKPLAYATILTREQGYPQVFYGDYYGIPSDGVPSYRQQIDPLLKARQQYAYGRQHDYFDHWDVIGWTREGNASHPNSGLATIMSDGPGGSKWMYVGRQKAGETWHDMTGNRSGTVTINQDGWGHFFVNGGSVSVWVKR

SEQ ID NO: 31401 - protein, 485 aa, Bacillus sp.
HHDGTNGTIMQYFEWNVPNDGQHWNRLHNNAQNLKNAGITAIWIPPAWKGTSQNDVGYGAYDLYDLGEFNQKGTVRTKYGTKAELERAIRSLKANGIQVYGDVVMNHKGGADFTERVQAVEVNPQNRNQEVSGTYQIEAWTGFNFPGRGNQHSSFKWRWYHFDGTDWDQSRQLANRIYKLRGDGKAWDWEVDTENGNYDYLMYADVDMDHPEVINELNRWGVWYANTLNLDGFRLDAVKHIKFSFMRDWLGHVRGQTGKNLFAVAEYWKNDLGALENYLSKTNWTMSAFDVPLHYNLYQASNSSGNYDMRNLLNGTLVQRHPSHAVTFVDNHDTQPGEALESFVQGWFKPLAYATILTREQGYPQVFYGDYYGIPSDGVPSYRQQIDPLLKARQQYAYGRQHDYFDHWDVIGWTREGNASHPNSGLATIMSDGPGGSKWMYVGRQKAGEVWHDMTGNRSGTVTINQDGWGHFFVNGGSVSVWVKR

SEQ ID NO: 31402 - protein, 485 aa, Bacillus sp.
HHDGTNGTIMQYFEWNVPNDGQHWNRLHNNAQNLKNAGITAIWIPPAWKGTSQNDVGYGAYDLYDLGEFNQKGTVRTKYGTKAELERAIRSLKANGIQVYGDVVMNHKGGADFTERVQAVEVNPQNRNQEVSGTYQIEAWTGFNFPGRGNQHSSFKWRWYHFDGTDWDQSRQLANRIYKFRGDGKAWDWEVDTENGNYDYLMYADVDMDHPEVINELNRWGVWYANTLNLDGFRLDAVKHIKFSFMRDWLGHVRGQTGKNLFAVAEYWKNDLGALENYLSKTNWTMSAFDVPQHYNLYQASNSSGNYDMRNLLNGTLVQRHPSHAVTFVDNHDTQPGEALESFVQGWFKPLAYATILTREQGYPQVFYGDYYGIPSDGVPSYRQQIDPLLKARQQYAYGRQHDYFDHWDVIGWTREGNASHPNSGLATIMSDGPGGSKWMYVGRQKAGEVWHDMTGNRSGTVTINQDGWGHFFVNGGSVSVWVKR

SEQ ID NO: 31403 - protein, 485 aa, Bacillus sp.
HHDGTNGTIMQYFEWNVPNDGQHWNRLHNNAQNLKNAGITAIWIPPAWKGTSQNDVGYGAYDLYDLGEFNQKGTVRTKYGTKAELERAIRSLKANGIQVYGDVVMNHKGGADFTERVQAVEVNPQNRNQEVSGTYQIEAWTGFNFPGRGNQHSSFKWRWYHFDGTDWDQSRQLANRIYKFRGDGKAWDWEVDTENGNYDYLMYADVDMDHCEVINELNRWGVWYANTLNLDGFRLDAVKHIKFSFMRDWLGHVRGQTGKNLFAVAEYWKNDLGALENYLSKTNWTMSAFDVPLHYNLYQASNSSGNYDMRNLLNGTLVQRHPSHAVTFVDNHDTQPGEALESFVQGWFKPLAYATILTREQGYPQVFYGDYYGIPSDGVPSYRQQIDPLLKARQQYAYGRQHDYFDHWDVIGWTREGNASHPNSGLATIMSDGPGGSKWMYVGRQKAGEVWHDMTGNRSGTVTINQDGWGHFFVNGGSVSVWVKR

SEQ ID NO: 31404 - protein, 485 aa, Bacillus sp.
HHDGTNGTIMQYFEWNVPNDGQHWNRLHNNAQNLKNAGITAIWIPPAWKGTSQNDVGYGAYDLYDLGEFNQKGTVRTKYGTKAELERAIRSLKANGIQVYGDVVMNHKGGADFTERVQAVEVNPQNRNQEVSGTYQIEAWTGFNFPGRGNQHSSFKWRWYHFDGTDWDQSRQLANRIYKFRGDGKAWDWEVDTENGNYDYLMYADVDMDHPEVINELNRWGVWYANTLNLDGFRLDAVKHIKFSFMRDWLGHVRGQTGKNLFAVAEYWKNDLGALENYLSKTNWTMSAFDVPLHYNLYQASNSSGNYDMRNLLNGTLVQRHPSHAVTFVDNHDTQPGEALESFVQGWFKPLAYATILTREQGYPQVFYGDYYGIPSDGVPSYRQQIDPLLKARQQYAYGRQHDYFDHWDVIGWTREGNASHPNSGLATIMADGPGGSKWMYVGRQKAGEVWHDMTGNRSGTVTINQDGWGHFFVNGGSVSVWVKR

SEQ ID NO: 31405 - protein, 485 aa, Bacillus sp.
HHDGTNGTIMQYFEWNVPNDGQHWNRLHNNAQNLKNAGITAIWIPPAWKGTSQNDVGYGAYDLYDLGEFNQKGTVRTKYGTKAELERAIRSLKANGIQVYGDVVMNHKGGADFTERVQAVEVNPQNRNQEVSGTYQIEAWTGFNFPGRGNQHSSFKWRWYHFDGTDWDQSRQLANRIYKFRGDGKAWDWDVDTENGNYDYLMYADVDMDHPEVINELNRWGVWYANTLNLDGFRLDAVKHIKFSFMRDWLGHVRGQTGKNLFAVAEYWKNDLGALENYLSKTNWTMSAFDVPLHYNLYQASNSSGNYDMRNLLNGTLVQRHPSHAVTFVDNHDTQPGEALESFVQGWFKPLAYATILTREQGYPQVFYGDYYGIPSDGVPSYRQQIDPLLKARQQYAYGRQHDYFDHWDVIGWTREGNASHPNSGLATIMSDGPGGSKWMYVGRQKAGEVWHDMTGNRSGTVTINQDGWGHFFVNGGSVSVWVKR

SEQ ID NO: 31406 - protein, 485 aa, Bacillus sp.
HHDGTNGTIMQYFEWNVPNDGQHWNRLHNNAQNLKNAGITAIWIPPAWKGTSQNDVGYGAYDLYDLGEFNQKGTVRTKYGTKAELERAIRSLKANGIQVYGDVVMNHKGGADFTERVQAVEVNPQNRSQEVSGTYQIEAWTGFNFPGRGNQHSSFKWRWYHFDGTDWDQSRQLANRIYKFRGDGKAWDWEVDTENGNYDYLMYADVDMDHPEVINELNRWGVWYANTLNLDGFRLDAVKHIKFSFMRDWLGHVRGQTGKNLFAVAEYWKNDLGALENYLSKTNWTMSAFDVPLHYNLYQASNSSGNYDMRNLLNGTLVQRHPSHAVTFVDNHDTQPGEALESFVQGWFKPLAYATILTREQGYPQVFYGDYYGIPSDGVPSYRQQIDPLLKARQQYAYGRQHDYFDHWDVIGWTREGNASHPNSGLATIMSDGPGGSKWMYVGRQKAGEVWHDMTGNRSGTVTINQDGWGHFFVNGGSVSVWVKR

SEQ ID NO: 31407 - protein, 485 aa, Bacillus sp.
HHDGTNGTIMQYFEWNVPNDGQHWNRLHNNAQNLKNAGITAIWIPPAWKGTSQNDVGYGAYDLYDLGEFNQKGTVRTKYGTKAELERAIRSLKANGIQVYGDVVMNHKGGADFTERVQAVEVNPQNRNQEVSGTYQIEAWTGFNFPGRGNQHSSFKWRWYHFDGTDWDQSRQLANRIYKFRGDGKAWDWEVDTENGNYDYLMYADVDMDHPEVINELNRWGVWYANTLNLDGFRLDAVKHIKFSFMRDWLGHVRGQTGKNLFAVAEYWKNDLGALENYLSKTNWTMSAFDVPLHYNLYQASNSSGDYDMRNLLNGTLVQRHPSHAVTFVDNHDTQPGEALESFVQGWFKPLAYATILTREQGYPQVFYGDYYGIPSDGVPSYRQQIDPLLKARQQYAYGRQHDYFDHWDVIGWTREGNASHPNSGLATIMSDGPGGSKWMYVGRQKAGEVWHDMTGNRSGTVTINQDGWGHFFVNGGSVSVWVKR

SEQ ID NO: 31408 - protein, 485 aa, Bacillus sp.
HHDGTNGTIMQYFEWNVPNDGQHWNRLHNNAQNLKNAGITAIWIPPAWKGTSQNDVGYGAYDLYDLGEFNQKGTVRTKYGTKAELERAIRSLKANGIQVYGDVVMNHKGGADFTERVQAVEVNPQNRNQEVSGTYQIEAWTGFNFPGRGNQHSSFKWRWYHFDGTDWDQSRQLANRIYKFRGDGKAWDWEVDTENGNYDYLMYADVDMDHPEVINELNRWGVWYANTLNLDGFRLDAVKHIKFSFMRDWLGHVRGQTGKNLFAVAEYWKNDLGALENYLSKTNWTMSAFDVPLHYNLYQASNSSGNYDMRNLLNGTLVQRHPSHAVTFVDNHDTQPGEALESFVQGWFKPLAYATILTREQGYPQVFYGDYYGIPSDGVPSYRQQIDPLLKARTQYAYGRQHDYFDHWDVIGWTREGNASHPNSGLATIMSDGPGGSKWMYVGRQKAGEVWHDMTGNRSGTVTINQDGWGHFFVNGGSVSVWVKR

SEQ ID NO: 31409 - protein, 485 aa, Bacillus sp.
HHDGTNGTIMQYFEWNVPNDGQHWNRLHNNAQNLKNAGITAIWIPPAWKGTSQNDVGYGAYDLYDLGEFNQKGTVRTKYGTKAELERAIRSLKANGIQVYGDVVMNHKGGADFTERVQAVEVNPQNRNQEVSGTYQIEAWTGFNFPGRGNQHSSFKWRWYHFDGTDWDQSRQLANRIYKFRGDGKAWDWEVDTENGNYDYLMYADVDMDHPEVINELNRWGVWYANTLNLDGFRLDAVKHIKFSFMRDWLGHVRGQTGKNLFAVAEYWKNDLGALENYLSKTNWTMSAFDVPLHYNLYQASNSSGTYDMRNLLNGTLVQRHPSHAVTFVDNHDTQPGEALESFVQGWFKPLAYATILTREQGYPQVFYGDYYGIPSDGVPSYRQQIDPLLKARQQYAYGRQHDYFDHWDVIGWTREGNASHPNSGLATIMSDGPGGSKWMYVGRQKAGEVWHDMTGNRSGTVTINQDGWGHFFVNGGSVSVWVKR

SEQ ID NO: 31410 - protein, 485 aa, Bacillus sp.
HHDGTNGTIMQYFEWNVPNDGQHWNRLHNNAQNLKNAGITAIWIPPAWKGTSQNDVGYGAYDLYDLGEFNQKGTVRTKYGTKAELERAIRSLKANGIQVYGDVVMNHKGGADFTERVQAVEVNPQNRNQEVSGTYQIEAWTGFNFPGRGNQHSSFKWRWYHFDGTDWDQSRQLANRIYKFRGDGKAWDWEVDTENGNYDYLMYADPDMDHPEVINELNRWGVWYANTLNLDGFRLDAVKHIKFSFMRDWLGHVRGQTGKNLFAVAEYWKNDLGALENYLSKTNWTMSAFDVPLHYNLYQASNSSGNYDMRNLLNGTLVQRHPSHAVTFVDNHDTQPGEALESFVQGWFKPLAYATILTREQGYPQVFYGDYYGIPSDGVPSYRQQIDPLLKARQQYAYGRQHDYFDHWDVIGWTREGNASHPNSGLATIMSDGPGGSKWMYVGRQKAGEVWHDMTGNRSGTVTINQDGWGHFFVNGGSVSVWVKR

SEQ ID NO: 31411 - protein, 485 aa, Bacillus sp.
HHDGTNGTIMQYFEWNVPNDGQHWNRLHNNAQNLKNAGITAIWIPPAWKGTSQNDVGYGAYDLYDLGEFNQKGTVRTKYGTKAELERAIRSLKANGIQVYGDVVMNHKGGADFTERVQAVEVNPQNRNQEVSGTYQIEAWTGFNFPGRGNQHSSFKWRWYHFDGTDWDQSRQLANRIYKFRGDGKAWDWEVDTENGNYDYLMYADVDMDHPEVINELNRWGVWYANTLNLDGFRLDAVKHIKFSFMRDWLGHVRGQTGKNLFAVAEYWKNDLGALENYLSKTNWTMSAFDVPLHYNLYQASNSSGNYDMRNLLNGTLVQRHPSHAVTFVDNHDTQPGEALESFVQGWFKPLAYATILTREQGYPQVFYGDYYGIPSDGFPSYRQQIDPLLKARQQYAYGRQHDYFDHWDVIGWTREGNASHPNSGLATIMSDGPGGSKWMYVGRQKAGEVWHDMTGNRSGTVTINQDGWGHFFVNGGSVSVWVKR

SEQ ID NO: 31412 - protein, 485 aa, Bacillus sp.
HHDGTNGTIMQYFEWNVPNDGQHWNRLHNNAQNLKNAGITAIWIPPAWKGTCQNDVGYGAYDLYDLGEFNQKGTVRTKYGTKAELERAIRSLKANGIQVYGDVVMNHKGGADFTERVQAVEVNPQNRNQEVSGTYQIEAWTGFNFPGRGNQHSSFKWRWYHFDGTDWDQSRQLANRIYKFRGDGKAWDWEVDTENGNYDYLMYADVDMDHPEVINELNRWGVWYANTLNLDGFRLDAVKHIKFSFMRDWLGHVRGQTGKNLFAVAEYWKNDLGALENYLSKTNWTMSAFDVPLHYNLYQASNSSGNYDMRNLLNGTLVQRHPSHAVTFVDNHDTQPGEALESFVQGWFKPLAYATILTREQGYPQVFYGDYYGIPSDGVPSYRQQIDPLLKARQQYAYGRQHDYFDHWDVIGWTREGNASHPNSGLATIMSDGPGGSKWMYVGRQKAGEVWHDMTGNRSGTVTINQDGWGHFFVNGGSVSVWVKR

SEQ ID NO: 31413 - protein, 485 aa, Bacillus sp.
HHDGTNGTIMQYFEWNVPNDGQHWNRLHNNAQNLKNAGITAIWIPPAWKGTSQNDVGYGAYDLYDLGEFNQKGTVRTKYGTKAELERAIRSLKANGIQVYGDVVMNHKGGADFTERVQAVEVNPQNRNQEVSGTYQIEAWTGFNFPGRGNQHSSFKWRWYHFDGTDWDQSRQLANRIYKFRGDGKAWDWEVDTEAGNYDYLMYADVDMDHPEVINELNRWGVWYANTLNLDGFRLDAVKHIKFSFMRDWLGHVRGQTGKNLFAVAEYWKNDLGALENYLSKTNWTMSAFDVPLHYNLYQASNSSGNYDMRNLLNGTLVQRHPSHAVTFVDNHDTQPGEALESFVQGWFKPLAYATILTREQGYPQVFYGDYYGIPSDGVPSYRQQIDPLLKARQQYAYGRQHDYFDHWDVIGWTREGNASHPNSGLATIMSDGPGGSKWMYVGRQKAGEVWHDMTGNRSGTVTINQDGWGHFFVNGGSVSVWVKR

SEQ ID NO: 31414 - protein, 485 aa, Bacillus sp.
HHDGTNGTIMQYFEWNVPNDGQHWNRLHNNAQNLKNAGITAIWIPPAWKGTSQNDVGYGAYDLYDLGEFNQKGTVRTKYGTKAELERAIRSLKANGIQVYGDVVMNHKGGADFTERVQAVEVNPQNRNQEVSGTYQIEAWTGFNFPGRGNQHSSFKWRWYHFDGTDWDQSRQLANRIYKFRGDGKAWDWEVDTENGNYDTLMYADVDMDHPEVINELNRWGVWYANTLNLDGFRLDAVKHIKFSFMRDWLGHVRGQTGKNLFAVAEYWKNDLGALENYLSKTNWTMSAFDVPLHYNLYQASNSSGNYDMRNLLNGTLVQRHPSHAVTFVDNHDTQPGEALESFVQGWFKPLAYATILTREQGYPQVFYGDYYGIPSDGVPSYRQQIDPLLKARQQYAYGRQHDYFDHWDVIGWTREGNASHPNSGLATIMSDGPGGSKWMYVGRQKAGEVWHDMTGNRSGTVTINQDGWGHFFVNGGSVSVWVKR

SEQ ID NO: 31415 - protein, 483 aa, Bacillus sp. (in: firmicutes)
HHDGTNGTIMQYFEWNVPNDGQHWNRLHNNAQNLKNAGITAIWIPPAWKGTSQNDVGYGAYDLYDLGEFNQKGTVRTKYGTKAELERAIRSLKANGIQVYGDVVMNHKGGADFTERVQAVEVNPQNRNQEVSGTYQIEAWTGFNFPGRGNQHSSFKWRWYHFDGTDWDQSHQLANRIYKFRGKAWDWEVDTENGNYDYLMYADVDMDHPEVINELNRWGVWYANTLNLDGFRLDAVKHIKFSFLRDWLGHVRGQTGKNLFAVAEYWKNDLGAVENYLSKTNWTMSAFDVPLHYNLYQASNSSGNYDMRNLLNGTLVQRHPSHAVTFVDNHDTQPGEALESFVQGWFKPLAYATILTREQGYPSVFYGDYYGIPSDGVPSYRQQIDPLLKARQQYAYGRQHDYFDHWDVIGWTREGNASHPNSGLATIMSDGPGGSKWMYVGRQKAGEVWHDMTGNRSGTVTINQDGWGHFFVNGGSVSVWVKR

SEQ ID NO: 31416 - protein, 485 aa, Bacillus sp.
HHDGTNGTIMQYFEWNVPNDGQHWNRLHNNAQNLKNAGITAIWIPPAWKGTSQNDVGYGAYDLYDLGEFNQKGTVRTKYGTKAELERAIRSLKANGIQVYGDVVMNHKGGADFTERVQAVEVNPQNRNQEVSGTYQIEAWTGFNFPGRGNQHSSFKWRWYHFDGTDWDQSRQLANRIYKFRGDGKAWDWEVDTENGNYDYLMYADVDMDHPEVINELNRWGVWYANTLNLDGFRLDAVKHIKFSFMRDWLGHVRGQTGKNLFAVAEYWKNDLGALEDYLSKTNWTMSAFDVPLHYNLYQASNSSGNYDMRNLLNGTLVQRHPSHAVTFVDNHDTQPGEALESFVQGWFKPLAYATILTREQGYPQVFYGDYYGIPSDGVPSYRQQIDPLLKARQQYAYGRQHDYFDHWDVIGWTREGNASHPNSGLATIMSDGPGGSKWMYVGRQKAGEVWHDMTGNRSGTVTINQDGWGHFFVNGGSVSVWVKR

SEQ ID NO: 31417 - protein, 485 aa, Bacillus sp.
HHDGTNGTIMQYFEWNVPNDGQHWNRLHNNAQNLKNAGITAIWIPPAWKGTSQNDVGYGAYDLYDLGEFNQKGTVRTKYGTKAELERAIRSLKANGIQVYGDVVMNHKGGADFTERVQAVEVNPQNRNQEVSGTYQIEAWTGFNFPGRGNQHSSFKWRWYHFDGTDWDQSRQLANRIYKFRGDGKAWDWEVDTENGNYDYLMYADVDMDHPEVINELNRWGVWYANTLNLDGFRLDAVKHIKFSFMRDWLGHVRGQTGKNLFAVAEYWKNDLGALENYLSKTNWTMSAFDVPLHYNLYQASNSSGNYDMRNLLNGTLVQRHPSHAVTFVDNHDTQPGEALESFVQGWFKPLAYATILTREQGYPQVFYGDYYGIPSDGVPSYRQQIDPLLKARQQYAYGRQHDYFDHWDVIGWTREGGASHPNSGLATIMSDGPGGSKWMYVGRQKAGEVWHDMTGNRSGTVTINQDGWGHFFVNGGSVSVWVKR

SEQ ID NO: 31418 - protein, 485 aa, Bacillus sp.
HHDGTNGTIMQYFEWNVPNDGQHWNRLHNNAQNLKNAGITAIWIPPAWKGTSQNDVGYGAYDLYDLGEFNQKGTVRTKYGTKAELERAIRSLKANGIQVYGDVVMNHKGGADFTERVQAVEVNPQNRNQEVSGTYQIEAWTGFNFPGRGNQHSSFKWRWYHFDGTDWDQSRQLANRIYKFRGDGKAWDWEVDTENGNYDYLMYADVDMDHPEVINELNRWGVWYANTLNLDGFRLDAVKHIKFSFMRDWLGHVRGQTGKNLFAVAEYWKNDLGALENYLSKTNWTMSAFDVPLHYNLYQASNSSGNYDMRNLLNGTLVQRHPSHAVTFVDNHDTQPGEALESFVQGWFKPLAYATILTREQGYPQVFYGDYYGIPSDGVPSYRQQIDPLLKARQQYAYGRQEDYFDHWDVIGWTREGNASHPNSGLATIMSDGPGGSKWMYVGRQKAGEVWHDMTGNRSGTVTINQDGWGHFFVNGGSVSVWVKR

SEQ ID NO: 31419 - protein, 485 aa, Bacillus sp.
HHDGTNGTIMQYFEWNVPNDGQHWNRLHNNAQNLKNAGITAIWIPPAWKGTSQNDVGYGAYDLYDLGEFNQKGTVRTKYGTKAELERAIRSLKANGIQVYGDVVMNHKGGADFTERVQAVEVNPQNRNQEVSETYQIEAWTGFNFPGRGNQHSSFKWRWYHFDGTDWDQSRQLANRIYKFRGDGKAWDWEVDTENGNYDYLMYADVDMDHPEVINELNRWGVWYANTLNLDGFRLDAVKHIKFSFMRDWLGHVRGQTGKNLFAVAEYWKNDLGALENYLSKTNWTMSAFDVPLHYNLYQASNSSGNYDMRNLLNGTLVQRHPSHAVTFVDNHDTQPGEALESFVQGWFKPLAYATILTREQGYPQVFYGDYYGIPSDGVPSYRQQIDPLLKARQQYAYGRQHDYFDHWDVIGWTREGNASHPNSGLATIMSDGPGGSKWMYVGRQKAGEVWHDMTGNRSGTVTINQDGWGHFFVNGGSVSVWVKR

SEQ ID NO: 31420 - protein, 485 aa, Bacillus sp.
HHDGTNGTIMQYFEWNVPNDGQHWNRLHNNAQNLKNAKITAIWIPPAWKGTSQNDVGYGAYDLYDLGEFNQKGTVRTKYGTKAELERAIRSLKANGIQVYGDVVMNHKGGADFTERVQAVEVNPQNRNQEVSGTYQIEAWTGFNFPGRGNQHSSFKWRWYHFDGTDWDQSRQLANRIYKFRGDGKAWDWEVDTENGNYDYLMYADVDMDHPEVINELNRWGVWYANTLNLDGFRLDAVKHIKFSFMRDWLGHVRGQTGKNLFAVAEYWKNDLGALENYLSKTNWTMSAFDVPLHYNLYQASNSSGNYDMRNLLNGTLVQRHPSHAVTFVDNHDTQPGEALESFVQGWFKPLAYATILTREQGYPQVFYGDYYGIPSDGVPSYRQQIDPLLKARQQYAYGRQHDYFDHWDVIGWTREGNASHPNSGLATIMSDGPGGSKWMYVGRQKAGEVWHDMTGNRSGTVTINQDGWGHFFVNGGSVSVWVKR

SEQ ID NO: 31421 - protein, 485 aa, Bacillus sp.
HHDGTNGTIMQYFEWNVPNDGQHWNRLHNNAQNLKNAGITAIWIPPAWKGTSQNDVGYGAYDLYDLGEHNQKGTVRTKYGTKAELERAIRSLKANGIQVYGDVVMNHKGGADFTERVQAVEVNPQNRNQEVSGTYQIEAWTGFNFPGRGNQHSSFKWRWYHFDGTDWDQSRQLANRIYKFRGDGKAWDWEVDTENGNYDYLMYADVDMDHPEVINELNRWGVWYANTLNLDGFRLDAVKHIKFSFMRDWLGHVRGQTGKNLFAVAEYWKNDLGALENYLSKTNWTMSAFDVPLHYNLYQASNSSGNYDMRNLLNGTLVQRHPSHAVTFVDNHDTQPGEALESFVQGWFKPLAYATILTREQGYPQVFYGDYYGIPSDGVPSYRQQIDPLLKARQQYAYGRQHDYFDHWDVIGWTREGNASHPNSGLATIMSDGPGGSKWMYVGRQKAGEVWHDMTGNRSGTVTINQDGWGHFFVNGGSVSVWVKR

SEQ ID NO: 31422 - protein, 485 aa, Bacillus sp.
HHDGTNGTIMQYFEWNVPNDGQHWNRLHNNAQNLKNAGITAIWIPPAWKGASQNDVGYGAYDLYDLGEFNQKGTVRTKYGTKAELERAIRSLKANGIQVYGDVVMNHKGGADFTERVQAVEVNPQNRNQEVSGTYQIEAWTGFNFPGRGNQHSSFKWRWYHFDGTDWDQSRQLANRIYKFRGDGKAWDWEVDTENGNYDYLMYADVDMDHPEVINELNRWGVWYANTLNLDGFRLDAVKHIKFSFMRDWLGHVRGQTGKNLFAVAEYWKNDLGALENYLSKTNWTMSAFDVPLHYNLYQASNSSGNYDMRNLLNGTLVQRHPSHAVTFVDNHDTQPGEALESFVQGWFKPLAYATILTREQGYPQVFYGDYYGIPSDGVPSYRQQIDPLLKARQQYAYGRQHDYFDHWDVIGWTREGNASHPNSGLATIMSDGPGGSKWMYVGRQKAGEVWHDMTGNRSGTVTINQDGWGHFFVNGGSVSVWVKR

SEQ ID NO: 31423 - protein, 485 aa, Bacillus sp.
HHDGTNGTIMQYFEWNVPNDGQHWNRLHNNAQNLKNAGITAIWIPPAWKGTSQNDVGYGAYDLYDLGEFNQKGTVRTKYGTKAELERAIRSLKANGIQVYGDVVMNHKGGADFTERVQAVEVNPQNRNQEVSGTYQIEAWTGFNFPGRGNQHSSFKWRWYHFDGTDWDQSRQLANRIYKFRGDGKAWDWEVDTENGNYDYLMYADVDMDHPEVINELNRWGVWYANTLNLDGFRLDAVKHIKFSFMRDWTGHVRGQTGKNLFAVAEYWKNDLGALENYLSKTNWTMSAFDVPLHYNLYQASNSSGNYDMRNLLNGTLVQRHPSHAVTFVDNHDTQPGEALESFVQGWFKPLAYATILTREQGYPQVFYGDYYGIPSDGVPSYRQQIDPLLKARQQYAYGRQHDYFDHWDVIGWTREGNASHPNSGLATIMSDGPGGSKWMYVGRQKAGEVWHDMTGNRSGTVTINQDGWGHFFVNGGSVSVWVKR

SEQ ID NO: 31424 - protein, 485 aa, Bacillus sp.
HHDGTNGTIMQYFEWNVPNDGQHWNRLHNNAQNLKNAGITAIWIPPAWKGTSQNDVGYGAYDLYDLGEFNQKGTVRTKYGTKAELERAIRSLKANGIQVYGDVVMNHKGGADFTERVQAVEVNPQNRNQEVSGTYQIEAWTGFNFPGRGNQHSSFKWRWYHFDGTDWDQSRQLANRIYKFRGDGKAWDWEVDTENGNYDYLMYADVDMDHPEVINELNRWGVWYANTLNLDGFRLDAVKHIKFSFMRDWLGHVRGQTGKNLFAVAEYWKNDLGALENYLSKTNWTMSAFDVPLHYNLYQASNSSGNYDMRNLLNGTLVQRHPSHAVTFVDNHDTQPGEALESFVQGWFKPLAYATILTREQGYPQVFYGDYYGIPSDGVPSYRQQIDPLLKARQQYAYGRQHDYFDHWDVVGWTREGNASHPNSGLATIMSDGPGGSKWMYVGRQKAGEVWHDMTGNRSGTVTINQDGWGHFFVNGGSVSVWVKR

SEQ ID NO: 31425 - protein, 485 aa, Bacillus sp.
HHDGTNGTIMQYFEWNVPNDGQHWNRLHNNAQNLKNAGITAIWIPPAWKGTSQNDVGYGAYDLYDLGEFNQKGTVRTKYGTKAELERAIRSLKANGIQVYGDVVMNHKGGADFTERVQAVEVNPQNRNQEVSGTYQIEAWTGFNFPGRGNQHSSFKWRWYHFDGTDWDQSRQLANRIYKFRGDGKAWDWEVDTENGNYDYLMYADVDMDHPEVINELNRWGVWYANTLNLDGFRLDAVKHIKFSFMRDWLGHVRGQTGKNLFAVAEYWKNDLGALENYLSKTNWTMSAFDVPLHYNLYQASNSSGNYDMRNLLNGTLVQRHPSHAVTFVDNHDTQPGEALESFVQGWFKPLAYATILTREQGYPQVFYGDYLGIPSDGVPSYRQQIDPLLKARQQYAYGRQHDYFDHWDVIGWTREGNASHPNSGLATIMSDGPGGSKWMYVGRQKAGEVWHDMTGNRSGTVTINQDGWGHFFVNGGSVSVWVKR

SEQ ID NO: 31426 - protein, 485 aa, Bacillus sp.
HHDGTNGTIMQYFEWNVPNDGQHWNRLHNNAQNLKNAGITAIWIPPAWKGTSQNDVGYGAYDLYDLGEFNQKGTVRTKYGTKAELERAIRSLKANGIQVYGDVVMNHKGGADFTERVQAVEVNPQNRNQEVSGTYQIEAWTGFNFPGRGNQHSSFKWRWYHFDGTDDDQSRQLANRIYKFRGDGKAWDWEVDTENGNYDYLMYADVDMDHPEVINELNRWGVWYANTLNLDGFRLDAVKHIKFSFMRDWLGHVRGQTGKNLFAVAEYWKNDLGALENYLSKTNWTMSAFDVPLHYNLYQASNSSGNYDMRNLLNGTLVQRHPSHAVTFVDNHDTQPGEALESFVQGWFKPLAYATILTREQGYPQVFYGDYYGIPSDGVPSYRQQIDPLLKARQQYAYGRQHDYFDHWDVIGWTREGNASHPNSGLATIMSDGPGGSKWMYVGRQKAGEVWHDMTGNRSGTVTINQDGWGHFFVNGGSVSVWVKR

SEQ ID NO: 31427 - protein, 485 aa, Bacillus sp.
HHDGTNGTIMQYFQWNVPNDGQHWNRLHNNAQNLKNAGITAIWIPPAWKGTSQNDVGYGAYDLYDLGEFNQKGTVRTKYGTKAELERAIRSLKANGIQVYGDVVMNHKGGADFTERVQAVEVNPQNRNQEVSGTYQIEAWTGFNFPGRGNQHSSFKWRWYHFDGTDWDQSRQLANRIYKFRGDGKAWDWEVDTENGNYDYLMYADVDMDHPEVINELNRWGVWYANTLNLDGFRLDAVKHIKFSFMRDWLGHVRGQTGKNLFAVAEYWKNDLGALENYLSKTNWTMSAFDVPLHYNLYQASNSSGNYDMRNLLNGTLVQRHPSHAVTFVDNHDTQPGEALESFVQGWFKPLAYATILTREQGYPQVFYGDYYGIPSDGVPSYRQQIDPLLKARQQYAYGRQHDYFDHWDVIGWTREGNASHPNSGLATIMSDGPGGSKWMYVGRQKAGEVWHDMTGNRSGTVTINQDGWGHFFVNGGSVSVWVKR

SEQ ID NO: 31428 - protein, 483 aa, Bacillus sp.
HHNGTNGTLMQYFEWYLPNDGNHWNRLNSDASNLKSKGITAVWIPPAWKGASQNDVGYGAYDLYDLGEFNQKGTVRTKYGTRSQLQAAVTSLKNNGIQVYGDVVMNHKGGADATEMVKAVEVNPNNRNQEVTGEYTIEAWTRFDFPGRANTHSSFKWRWYHFDGVDWDQSRRLNNRIYKFRTKAWDWEVDTEFGNYDYLLYADIDMDHPEVVNELRNWGVWYTNTLGLDGFRIDAVKHIKYSFTRDWINHVRSAIGKNMFAVAEFWKNDLGAIENYLQKTNWNHSVFDVPLHFNLYYASKSGGNYDMRNIFNGTVVQRHPSHAVTFVDNHDSQPEESLESFVREWFKPLAYALTLTREQGYPSVFYGDYYGIPTHGVPAMRSKIDPILEARQKYAYGPQHDYIDHPDVIGWTREGDSSAAKSGLAALITDGPGGSKRMYAGLKNAGETWYDITGNKSDTVKIGSDGWGEFHVNDGSVSIYVQK

SEQ ID NO: 31429 - protein, 485 aa, Bacillus sp.
HHDGTNGTIMQYFEWNVPNDGQHWNRLHNNAQNLKNAGITAIWIPPAWKGTSQNDVGYGAYDLYDLGEFNQKGTVRTKYGTKAELERAIRSLKANGIQVYGDVVMNHKGGADFTERVQAVEVNPQNRNQEVSGTYQIEAWTGFNFPGRGNQHSSFKWRWYHFDGTDWDQSRQLANRIYKFRGDGKAWDWEVDTENGNYDYLMYADVDMDHPEVINELNRWGVWYANTLNLDGFRLDAVKHIKFSFMRDWLGHVRGQTGKPLFAVAEYWKNDLGALENYLSKTNWTMSAFDVPLHYNLYQASNSSGNYDMRNLLNGTLVQRHPSHAVTFVDNHDTQPGEALESFVQGWFKPLAYATILTREQGYPQVFYGDYYGIPSDGVPSYRQQIDPLLKARQQYAYGRQHDYFDHWDVIGWTREGNASHPNSGLATIMSDGPGGSKWMYVGRQKAGEVWHDMTGNRSGTVTINQDGWGHFFVNKGSVSVWVKR

SEQ ID NO: 31430 - protein, 485 aa, Bacillus sp.
HHDGTNGTIMQYFEWNVPNDGQHWNRLHNNAQNLKNAGITAIWIPPAWKGTSQNDVGYGAYDLYDLGEFNQKGTVRTKYGTKAELERAIRSLKANGIQVYGDVVMNHKGGADFTERVQAVEVNPQNRNQEVSGTYQIEAWTGFNFPGRGNQHSSFKWRWYHFDGTDWDQSRQLANRIYKFRGDGKAWDWEVDTENGGYDYLMYADVDMDHPEVINELNRWGVWYANTLNLDGFRLDAVKHIKFSFMRDWLGHVRGQTGKNLFAVAEYWKNDLGALENYLSKTNWTMSAFDVPLHYNLYQASNSSGNYDMRNLLNGTLVQRHPSHAVTFVDNHDTQPGEALESFVQGWFKPLAYATILTREQGYPQVFYGDYYGIPSDGVPSYRQQIDPLLKARQQYAYGRQHDYFDHWDVIGWTREGNASHPNSGLATIMSDGPGGSKWMYVGRQKAGEVWHDMTGNRSGTVTINQDGWGHFFVNGGSVSVWVKR

SEQ ID NO: 31431 - protein, 485 aa, Bacillus sp.
HHDGTNGTIMQYFEWNVPNDGQHWNRLHNNAQNLKNAGITAIWIPPAWKGTSQNDVGYGAYDLYDLGEFNQKGTVRTKYGTKAELERAIRSLKANGIQVYGDVVMNHKGGADFTERVQAVEVNPQNRNQEVSGTYQIEAWTGFNFPGRGNQHSSFKWRWYHFDGTDWDQSRQLANRIYKFRGDGKAWDWEVDTENGNYDYLMYADVDMDHPEVINELNRWGVWYANTLNLDGFRLDAVKHIKFSFMRDWYGHVRGQTGKNLFAVAEYWKNDLGALENYLSKTNWTMSAFDVPLHYNLYQASNSSGNYDMRNLLNGTLVQRHPSHAVTFVDNHDTQPGEALESFVQGWFKPLAYATILTREQGYPQVFYGDYYGIPSDGVPSYRQQIDPLLKARQQYAYGRQHDYFDHWDVIGWTREGNASHPNSGLATIMSDGPGGSKWMYVGRQKAGEVWHDMTGNRSGTVTINQDGWGHFFVNGGSVSVWVKR

SEQ ID NO: 31432 - protein, 485 aa, Bacillus sp.
HHDGTNGTIMQYFEWNVPNDGQHWNRLHNNAQNLKNAGITAIWIPPAWKGTSQNDVGYGAYDLYDLGEFNQKGTVRTKYGTKAELERAIRSLKANGIQVYGDVVMNHKGGADFTERVQAVEVNPQNRNQEVSGTYQIEAWTGFNFPGRGNQHSSFKWAWYHFDGTDWDQSRQLANRIYKFRGDGKAWDWEVDTENGNYDYLMYADVDMDHPEVINELNRWGVWYANTLNLDGFRLDAVKHIKFSFMRDWLGHVRGQTGKNLFAVAEYWKNDLGALENYLSKTNWTMSAFDVPLHYNLYQASNSSGNYDMRNLLNGTLVQRHPSHAVTFVDNHDTQPGEALESFVQGWFKPLAYATILTREQGYPQVFYGDYYGIPSDGVPSYRQQIDPLLKARQQYAYGRQHDYFDHWDVIGWTREGNASHPNSGLATIMSDGPGGSKWMYVGRQKAGEVWHDMTGNRSGTVTINQDGWGHFFVNGGSVSVWVKR

SEQ ID NO: 31433 - protein, 485 aa, Bacillus sp.
HHDGTNGTIMQYFEWNVPNDGQHWNRLHNNAQNLKNAGITAIWIPPAWKGTSQNDVGYGAYDLYDLGEFNQKGTVRTKYGTKAELERAIRSLKANGIQVYGDVVMNHKGGADFTERVQAVEVNPQNRNQEVSGTYQIEAWTGFNFPGRGNQHSSFKWRWYHFDGTDWDQSRQLANRIYKFRGDGKAWDWEVDTENGNYDYLMYADVDMDHPEVINELNRWGVWYANTLNLDGFRLDAVKHIKFSFMRDWLGHVRGQTGANLFAVAEYWKNDLGALENYLSKTNWTMSAFDVPLHYNLYQASNSSGNYDMRNLLNGTLVQRHPSHAVTFVDNHDTQPGEALESFVQGWFKPLAYATILTREQGYPQVFYGDYYGIPSDGVPSYRQQIDPLLKARQQYAYGRQHDYFDHWDVIGWTREGNASHPNSGLATIMSDGPGGSKWMYVGRQKAGEVWHDMTGNRSGTVTINQDGWGHFFVNGGSVSVWVKR

SEQ ID NO: 31434 - protein, 485 aa, Bacillus sp.
HHDGTNGTIMQYFEWNVPNDGQHWNRLHNNAQNLKNAGITAIWIPPAWKGTSQNDVGYGAYDLYDLGEFNQKGTVRTKYGTKAELERAIRSLKANGIQVYGDVVMNHKGGADFTERVQAVEVNPQNRNQEVSGTYQIEAWTGFNFPGRGNQHSSFKWRWYHFDGTDWDQSRQLANRIYKFRGDGKAWDWEVDTENGNYDYLMYADVDMDHPEVINELNRWGVWYANTLNLDGFRLDAVKHIKFSGMRDWLGHVRGQTGKNLFAVAEYWKNDLGALENYLSKTNWTMSAFDVPLHYNLYQASNSSGNYDMRNLLNGTLVQRHPSHAVTFVDNHDTQPGEALESFVQGWFKPLAYATILTREQGYPQVFYGDYYGIPSDGVPSYRQQIDPLLKARQQYAYGRQHDYFDHWDVIGWTREGNASHPNSGLATIMSDGPGGSKWMYVGRQKAGEVWHDMTGNRSGTVTINQDGWGHFFVNGGSVSVWVKR

SEQ ID NO: 31435 - protein, 485 aa, Bacillus sp.
HHDGTNGTIMQYFEWNVPNDGQHWNRLHNNAQNLKNAGITAIWIPPAWKGTSQNDVGYGAYDLYDLGEFNQKGTVRTKYGTKAELERAIRSLKAEGIQVYGDVVMNHKGGADFTERVQAVEVNPQNRNQEVSGTYQIEAWTGFNFPGRGNQHSSFKWRWYHFDGTDWDQSRQLANRIYKFRGDGKAWDWEVDTENGNYDYLMYADVDMDHPEVINELNRWGVWYANTLNLDGFRLDAVKHIKFSFMRDWLGHVRGQTGKNLFAVAEYWKNDLGALENYLSKTNWTMSAFDVPLHYNLYQASNSSGNYDMRNLLNGTLVQRHPSHAVTFVDNHDTQPGEALESFVQGWFKPLAYATILTREQGYPQVFYGDYYGIPSDGVPSYRQQIDPLLKARQQYAYGRQHDYFDHWDVIGWTREGNASHPNSGLATIMSDGPGGSKWMYVGRQKAGEVWHDMTGNRSGTVTINQDGWGHFFVNGGSVSVWVKR

SEQ ID NO: 31436 - protein, 485 aa, Bacillus sp.
HHDGTNGTIMQYFEWNVPNDGQHWNRLHNNAQNLKNAGITAIWIPPAWKGTSQNDVGYGAYDLYDLGEFNQKGTVRTKYGTKAELERAIRSLKANGIQVYGDVVMNHKGGADFTCRVQAVEVNPQNRNQEVSGTYQIEAWTGFNFPGRGNQHSSFKWRWYHFDGTDWDQSRQLANRIYKFRGDGKAWDWEVDTENGNYDYLMYADVDMDHPEVINELNRWGVWYANTLNLDGFRLDAVKHIKFSFMRDWLGHVRGQTGKNLFAVAEYWKNDLGALENYLSKTNWTMSAFDVPLHYNLYQASNSSGNYDMRNLLNGTLVQRHPSHAVTFVDNHDTQPGEALESFVQGWFKPLAYATILTREQGYPQVFYGDYYGIPSDGVPSYRQQIDPLLKARQQYAYGRQHDYFDHWDVIGWTREGNASHPNSGLATIMSDGPGGSKWMYVGRQKAGEVWHDMTGNRSGTVTINQDGWGHFFVNGGSVSVWVKR

SEQ ID NO: 31437 - protein, 485 aa, Bacillus sp.
HHDGTNGTIMQYFEWNVPNDGQHWNRLHNNAQNLKNAGITAIWIPPAWKGTSQNDVGYGAYDLYDLGEFNQKGTVRTKYGTKAELERAIRSLKANGIQVYGDVVMNHKGGADFTERVQAVEVNPQNRNQEVSGTYQIEAWTGFNFPGRGNQHSSFKWRWYHFDGTDWDQSRQLANRIYKFRGDGKAWDWEVDTENGNYDYLMYADVDMDHPEVINELNRWGVWYANTLNLDGFRLDAVKHIWFSFMRDWLGHVRGQTGKNLFAVAEYWKNDLGALENYLSKTNWTMSAFDVPLHYNLYQASNSSGNYDMRNLLNGTLVQRHPSHAVTFVDNHDTQPGEALESFVQGWFKPLAYATILTREQGYPQVFYGDYYGIPSDGVPSYRQQIDPLLKARQQYAYGRQHDYFDHWDVIGWTREGNASHPNSGLATIMSDGPGGSKWMYVGRQKAGEVWHDMTGNRSGTVTINQDGWGHFFVNGGSVSVWVKR

SEQ ID NO: 31438 - protein, 485 aa, Bacillus sp.
HHDGTNGTIMQYFEWNVPNDGQHWNRLHNNAQNLKVAGITAIWIPPAWKGTSQNDVGYGAYDLYDLGEFNQKGTVRTKYGTKAELERAIRSLKANGIQVYGDVVMNHKGGADFTERVQAVEVNPQNRNQEVSGTYQIEAWTGFNFPGRGNQHSSFKWRWYHFDGTDWDQSRQLANRIYKFRGDGKAWDWEVDTENGNYDYLMYADVDMDHPEVINELNRWGVWYANTLNLDGFRLDAVKHIKFSFMRDWLGHVRGQTGKNLFAVAEYWKNDLGALENYLSKTNWTMSAFDVPLHYNLYQASNSSGNYDMRNLLNGTLVQRHPSHAVTFVDNHDTQPGEALESFVQGWFKPLAYATILTREQGYPQVFYGDYYGIPSDGVPSYRQQIDPLLKARQQYAYGRQHDYFDHWDVIGWTREGNASHPNSGLATIMSDGPGGSKWMYVGRQKAGEVWHDMTGNRSGTVTINQDGWGHFFVNGGSVSVWVKR

SEQ ID NO: 31439 - protein, 485 aa, Bacillus sp.
HHDGTNGTIMQYFEWNVPNDGQHWNRLHNNAQNLKNAGITAIWIPPAWKGTSQNDVGYGAYDLYDLGEFNQKGTVRTKYGTKAELERAIRSLKANGIQVYGDVVMNHKGGADFTERVQAVEVNPQNRNQEVSGTYQIEAWTGFNFPGRGNQHSSFKWRWYHFDGTDWDQSRQLANRIYKFRGDGKAWDWEVDTENGNYDYLMYADVDMDHPEVINELNRWGVWYANTLNLDGFRLDAVKHIKFSFMRDWLGHVRGQTGKNLFAVAEYWKNDLGALENYLSKTNWTMSAFDVPLHYNLYQASNSSGNYDMRNLLNGTLVQRHPSHAVTFVDNHDTQPGEALESFVQGWFKPLAYATILTREQGYPQVFSGDYYGIPSDGVPSYRQQIDPLLKARQQYAYGRQHDYFDHWDVIGWTREGNASHPNSGLATIMSDGPGGSKWMYVGRQKAGEVWHDMTGNRSGTVTINQDGWGHFFVNGGSVSVWVKR

SEQ ID NO: 31440 - protein, 485 aa, Bacillus sp.
HHDGTNGTIMQYFEWNVPNDGQHWNRLHNNAQNLKNAGITAIWIPPAWKGTSQNDVGYGAYDLYDLGEFNQKGTVRTKYGTKAELERAIRSLKANGIQVYGDVVMNHKGGADFTERVQAVEVNPQNRNQEVSGTYQIEAWTGFNFPGRGNQHSSFKWRWQHFDGTDWDQSRQLANRIYKFRGDGKAWDWEVDTENGNYDYLMYADVDMDHPEVINELNRWGVWYANTLNLDGFRLDAVKHIKFSFMRDWLGHVRGQTGKNLFAVAEYWKNDLGALENYLSKTNWTMSAFDVPLHYNLYQASNSSGNYDMRNLLNGTLVQRHPSHAVTFVDNHDTQPGEALESFVQGWFKPLAYATILTREQGYPQVFYGDYYGIPSDGVPSYRQQIDPLLKARQQYAYGRQHDYFDHWDVIGWTREGNASHPNSGLATIMSDGPGGSKWMYVGRQKAGEVWHDMTGNRSGTVTINQDGWGHFFVNGGSVSVWVKR

SEQ ID NO: 31441 - protein, 485 aa, Bacillus sp.
HHDGTNGTIMQYFEWNVPNDGQHWNRLHNNAQNLKNAGITAIWIPPACKGTSQNDVGYGAYDLYDLGEFNQKGTVRTKYGTKAELERAIRSLKANGIQVYGDVVMNHKGGADFTERVQAVEVNPQNRNQEVSGTYQIEAWTGFNFPGRGNQHSSFKWRWYHFDGTDWDQSRQLANRIYKFRGDGKAWDWEVDTENGNYDYLMYADVDMDHPEVINELNRWGVWYANTLNLDGFRLDAVKHIKFSFMRDWLGHVRGQTGKNLFAVAEYWKNDLGALENYLSKTNWTMSAFDVPLHYNLYQASNSSGNYDMRNLLNGTLVQRHPSHAVTFVDNHDTQPGEALESFVQGWFKPLAYATILTREQGYPQVFYGDYYGIPSDGVPSYRQQIDPLLKARQQYAYGRQHDYFDHWDVIGWTREGNASHPNSGLATIMSDGPGGSKWMYVGRQKAGEVWHDMTGNRSGTVTINQDGWGHFFVNGGSVSVWVKR

SEQ ID NO: 31442 - protein, 485 aa, Bacillus sp.
HHDGTNGTIMQYFEWNVPNDGQHWNRLHNNAQNLKNAGITAIWIPPAWKGTSQNDVGYGAYDLYDLGEFNQKGTVRTKYGTKAELERAIRSLKANGIQVYGDVVMNHKGGADFTERVQAVEVNPQNRNQEVSGTYQIEAWTGFNFPGRGNQHSSFKWRWYHFDGTDWDQSRQLANRIYKFRGDGKAWDWEVDTSNGNYDYLMYADVDMDHPEVINELNRWGVWYANTLNLDGFRLDAVKHIKFSFMRDWLGHVRGQTGKNLFAVAEYWKNDLGALENYLSKTNWTMSAFDVPLHYNLYQASNSSGNYDMRNLLNGTLVQRHPSHAVTFVDNHDTQPGEALESFVQGWFKPLAYATILTREQGYPQVFYGDYYGIPSDGVPSYRQQIDPLLKARQQYAYGRQHDYFDHWDVIGWTREGNASHPNSGLATIMSDGPGGSKWMYVGRQKAGEVWHDMTGNRSGTVTINQDGWGHFFVNGGSVSVWVKR

SEQ ID NO: 31443 - protein, 485 aa, Bacillus sp.
HHDGTNGTIMQYFEWNVPNDGQHWNRLHNNAQNLKNAGITAIWIPPAWKGTSQNDVGYGAYDLYDLGEFNQKGTVRTKYGTKAELERAIRSLKANGIQVYGDVVMNHKGGADFTERVQAVEVNPQNRNQEVSGTYQIEAWTGFNFPGRGNQHSSFKWRWYHFDGTDWDQSRQLANRIYKFRGDGKAWDWEVDTENGNYDYLMYADVDMDHPEVINELNRWGVWYANTLNLDGFRLDAVKHIKFSFMRDWLGHVRGQTGKNLFAVAEYWRNDLGALENYLSKTNWTMSAFDVPLHYNLYQASNSSGNYDMRNLLNGTLVQRHPSHAVTFVDNHDTQPGEALESFVQGWFKPLAYATILTREQGYPQVFYGDYYGIPSDGVPSYRQQIDPLLKARQQYAYGRQHDYFDHWDVIGWTREGNASHPNSGLATIMSDGPGGSKWMYVGRQKAGEVWHDMTGNRSGTVTINQDGWGHFFVNGGSVSVWVKR

SEQ ID NO: 31444 - protein, 485 aa, Bacillus sp.
HHDGTNGTIMQYFEWNVPNDGQHWNRLHNNAQNLKNAGITAIWIPPAWKGTSQNDVGYGAYDLYDLGEFNQKGTVRTKYGTKAELERAIRSLKANGIQVYGDVVMNHKGGADFTERVQAVEVNPQNRNQEVSGTYQIEAWTGFNFPGRGNQHSSFKWRWYHFDGTDWDQSRQLANRIYKFRGDGKAWDWEVDTENGNYDYLMYADVDMDHPEVINELNRWGVWYANTLNLDGFRLDAVKHIKFSFMRDWLGHVRGQTGKNLFAVAEYWKNDLGALENYLSKTNWTMSAFDVPLHYNLYQASNSSGNYDMRNLLNGTLVQRHPSHAVTFVDNHDTQPGEALESFVQGWFKPLAYATILTREQGYPQVFYGDYYGIPSDGVPSYRQQIDPLLKARQQYAYGRQHDYFDHWDVIGWTREGNASHPNSGLATIMSDGPGGSKWMYVGRQKAGEVWHDMTGNRSGTVTIRQDGWGHFFVNGGSVSVWVKR

SEQ ID NO: 31445 - protein, 485 aa, Bacillus sp.
HHDGTNGTIMQYFEWNVPNDGQHWNRLHNNAQNLKNAGITAIWIPPAWKGTSQNDVGYGAYDLYDLGEFNQKGTVRTKYGTKAELERAIRSLKANGIQVYGDVVMNHKGGADFTERVQAVEVNPQNRNQEVSGTYQSEAWTGFNFPGRGNQHSSFKWRWYHFDGTDWDQSRQLANRIYKFRGDGKAWDWEVDTENGNYDYLMYADVDMDHPEVINELNRWGVWYANTLNLDGFRLDAVKHIKFSFMRDWLGHVRGQTGKNLFAVAEYWKNDLGALENYLSKTNWTMSAFDVPLHYNLYQASNSSGNYDMRNLLNGTLVQRHPSHAVTFVDNHDTQPGEALESFVQGWFKPLAYATILTREQGYPQVFYGDYYGIPSDGVPSYRQQIDPLLKARQQYAYGRQHDYFDHWDVIGWTREGNASHPNSGLATIMSDGPGGSKWMYVGRQKAGEVWHDMTGNRSGTVTINQDGWGHFFVNGGSVSVWVKR

SEQ ID NO: 31446 - protein, 485 aa, Bacillus sp.
HHDGTNGTIMQYFEWNVPNDGQHWNRLHNNAQNLKNAGITAIWIPPAWKGTSQNDVGYGAYDLYDLGEFNQKGTVRTKYGTKAELERAIRSLKANGIQVYGDVVMNHKGGADFTERVQAVEVNPQNRNQEVSGTYQIEAWTGFNFPGRGNQHSSFKWRWYHFDGTDWDQSRQLANRIYKFRGDGKAWDWEVDTENGNYDYLMYADVDMDHPEVINELNRWGVWYANTLNLDGFRLDAVKHIKFSFMRDWLGHVRGQTGKNLFAVAEYWKNDLGALENYLSKTNWTMSAFDVPLHYNLYQASNSSGNYDMRNLLNGTLVQRHPSHAVTFVDNHDTQPGEALESFSQGWFKPLAYATILTREQGYPQVFYGDYYGIPSDGVPSYRQQIDPLLKARQQYAYGRQHDYFDHWDVIGWTREGNASHPNSGLATIMSDGPGGSKWMYVGRQKAGEVWHDMTGNRSGTVTINQDGWGHFFVNGGSVSVWVKR

SEQ ID NO: 31447 - protein, 485 aa, Bacillus sp.
HHDGTNGTIMQYFEWNVPNDGQHWNRLHNNAQNLKNAGITAIWIPPAWKGTSQNDVGYGAYDLYDLGEFNQKGTVRTKYGTKAELERAIRSLKANGIQVYGDVVMNHKGGADFTERVQAVEVNPQNRNQEVSGTYQIEAWTGFNFPGRGNQHSSFKWRWYHFDGTDWDQSRQLANRIYKFRGDGKAWDWEVDTENGNYDYLMYADVDMDHPEVINELNRWGVWYANTLNLDGFRLDAVKHISFSFMRDWLGHVRGQTGKNLFAVAEYWKNDLGALENYLSKTNWTMSAFDVPLHYNLYQASNSSGNYDMRNLLNGTLVQRHPSHAVTFVDNHDTQPGEALESFVQGWFKPLAYATILTREQGYPQVFYGDYYGIPSDGVPSYRQQIDPLLKARQQYAYGRQHDYFDHWDVIGWTREGNASHPNSGLATIMSDGPGGSKWMYVGRQKAGEVWHDMTGNRSGTVTINQDGWGHFFVNGGSVSVWVKR

SEQ ID NO: 31448 - protein, 485 aa, Bacillus sp.
HHDGTNGTIMQYFEWNVPNDGQHWNRLHNNAQNLKNAGITAIWIPPAWKGTSQNDVGYGAYDLYDLGEFNQKGTVRTKYGTKAELERAIRSLKANGIQVYGDVVMNHKGGADFTERVQAVEVNPQNRNQEVSGTYQIEAWTGFNFPGRGNQHSSFKWRWYHFDGTDWDQSRQLANRIYKFRGDGGAWDWEVDTENGNYDYLMYADVDMDHPEVINELNRWGVWYANTLNLDGFRLDAVKHIKFSFMRDWLGHVRGQTGKNLFAVAEYWKNDLGALENYLSKTNWTMSAFDVPLHYNLYQASNSSGNYDMRNLLNGTLVQRHPSHAVTFVDNHDTQPGEALESFVQGWFKPLAYATILTREQGYPQVFYGDYYGIPSDGVPSYRQQIDPLLKARQQYAYGRQHDYFDHWDVIGWTREGNASHPNSGLATIMSDGPGGSKWMYVGRQKAGEVWHDMTGNRSGTVTINQDGWGHFFVNGGSVSVWVKR

SEQ ID NO: 31449 - protein, 485 aa, Bacillus sp.
HHDGTNGTIMQYFEWNVPNDGQHWNRLHNNAQNLKNAGITAIWIPPAWKGTSQNDVGYGAYDLYDLGEFNQKGTVRTKYGTKAELERAIRSLKANGIQVYGDVVMNHKGGADFTERVQAVEVNPQNRNQEVSGTYQIEAWTGFNFPGRGNQHSSFKWRWYHFDGTDWDQSRSLANRIYKFRGDGKAWDWEVDTENGNYDYLMYADVDMDHPEVINELNRWGVWYANTLNLDGFRLDAVKHIKFSFMRDWLGHVRGQTGKNLFAVAEYWKNDLGALENYLSKTNWTMSAFDVPLHYNLYQASNSSGNYDMRNLLNGTLVQRHPSHAVTFVDNHDTQPGEALESFVQGWFKPLAYATILTREQGYPQVFYGDYYGIPSDGVPSYRQQIDPLLKARQQYAYGRQHDYFDHWDVIGWTREGNASHPNSGLATIMSDGPGGSKWMYVGRQKAGEVWHDMTGNRSGTVTINQDGWGHFFVNGGSVSVWVKR

SEQ ID NO: 31450 - protein, 485 aa, Bacillus sp.
HHDGTNGTIMQYFEWNVPNDGQHWNRLHNNAQNLKNAGITAIWIPPAWKGTSQNDVGYGAYDLYDLGEFNQKGTVRTKYGTKAELERAIRSLKANGIQVYGDVVMNHKGGADFTERVQAVEVNPQNRNQEVSGTYQIEAWTGFNFPGRGNQHSSFKWRWYHFDGTDFDQSRQLANRIYKFRGDGKAWDWEVDTENGNYDYLMYADVDMDHPEVINELNRWGVWYANTLNLDGFRLDAVKHIKFSFMRDWLGHVRGQTGKNLFAVAEYWKNDLGALENYLSKTNWTMSAFDVPLHYNLYQASNSSGNYDMRNLLNGTLVQRHPSHAVTFVDNHDTQPGEALESFVQGWFKPLAYATILTREQGYPQVFYGDYYGIPSDGVPSYRQQIDPLLKARQQYAYGRQHDYFDHWDVIGWTREGNASHPNSGLATIMSDGPGGSKWMYVGRQKAGEVWHDMTGNRSGTVTINQDGWGHFFVNGGSVSVWVKR

SEQ ID NO: 31451 - protein, 485 aa, Bacillus sp.
HHDGTNGTIMQYFEWNVPNDGQHWNRLHNNAQNLKNAGITAIWIPPAWKGTSQNDVGYGAYDLYDLGEFNQKGTVRTKYGTKAELERAIRSLKANGIQVYGDVVMNHKGGADFTERVQAVEVNPQNRNQEVSGTYQIEAWTGFNFPGRGNQHSSFKWRWYHFDGTDWDFSRQLANRIYKFRGDGKAWDWEVDTENGNYDYLMYADVDMDHPEVINELNRWGVWYANTLNLDGFRLDAVKHIKFSFMRDWLGHVRGQTGKNLFAVAEYWKNDLGALENYLSKTNWTMSAFDVPLHYNLYQASNSSGNYDMRNLLNGTLVQRHPSHAVTFVDNHDTQPGEALESFVQGWFKPLAYATILTREQGYPQVFYGDYYGIPSDGVPSYRQQIDPLLKARQQYAYGRQHDYFDHWDVIGWTREGNASHPNSGLATIMSDGPGGSKWMYVGRQKAGEVWHDMTGNRSGTVTINQDGWGHFFVNGGSVSVWVKR

SEQ ID NO: 31452 - protein, 485 aa, Bacillus sp.
HHDGTNGTIMQYFEWNVPNDGQHWNRLHNNAQNLKNAGITNIWIPPAWKGTSQNDVGYGAYDLYDLGEFNQKGTVRTKYGTKAELERAIRSLKANGIQVYGDVVMNHKGGADFTERVQAVEVNPQNRNQEVSGTYQIEAWTGFNFPGRGNQHSSFKWRWYHFDGTDWDQSRQLANRIYKFRGDGKAWDWEVDTENGNYDYLMYADVDMDHPEVINELNRWGVWYANTLNLDGFRLDAVKHIKFSFMRDWLGHVRGQTGKNLFAVAEYWKNDLGALENYLSKTNWTMSAFDVPLHYNLYQASNSSGNYDMRNLLNGTLVQRHPSHAVTFVDNHDTQPGEALESFVQGWFKPLAYATILTREQGYPQVFYGDYYGIPSDGVPSYRQQIDPLLKARQQYAYGRQHDYFDHWDVIGWTREGNASHPNSGLATIMSDGPGGSKWMYVGRQKAGEVWHDMTGNRSGTVTINQDGWGHFFVNGGSVSVWVKR

SEQ ID NO: 31453 - protein, 485 aa, Bacillus sp.
HHDGTNGTIMQYFEWNVPNDGQHWNRLHNNAQNLKNAGITAIWIPPAWKGTSQNDVGYGAYDLYDLGEFNQKGTVRTKYGTKAELERAIRSLKANGIQVYGDVVMNHKGGADFTERVQAVEVNPQNRNLEVSGTYQIEAWTGFNFPGRGNQHSSFKWRWYHFDGTDWDQSRQLANRIYKFRGDGKAWDWEVDTENGNYDYLMYADVDMDHPEVINELNRWGVWYANTLNLDGFRLDAVKHIKFSFMRDWLGHVRGQTGKNLFAVAEYWKNDLGALENYLSKTNWTMSAFDVPLHYNLYQASNSSGNYDMRNLLNGTLVQRHPSHAVTFVDNHDTQPGEALESFVQGWFKPLAYATILTREQGYPQVFYGDYYGIPSDGVPSYRQQIDPLLKARQQYAYGRQHDYFDHWDVIGWTREGNASHPNSGLATIMSDGPGGSKWMYVGRQKAGEVWHDMTGNRSGTVTINQDGWGHFFVNGGSVSVWVKR

SEQ ID NO: 31454 - protein, 483 aa, Bacillus sp. (in: firmicutes)
HHDGTNGTIMQYFEWNVPNDGQHWNRLHNNAQNLKNAGITAIWIPPAWKGTSQNDVGYGAYDLYDLGEFNQKGTVRTKYGTKAELERAIRSLKANGIQVYGDVVMNHKGGADFTERVQAVEVNPQNRNQEVSGTYQIEAWTGFNFPGRGNQHSSFKWRWYHFDGTDWDESRQLANRIYKFRGKAWDWEVDTENGNYDYLMYADVDMDHPEVINELNRWGVWYANTLNLDGFRLDAVKHIKFSFMRDWLGHVRGQTGKNLFAVAEYWKNDLGALENYLSKTNWTMSAFDVPLHYNLYQASNSSGNYDMRNLLNGTLVQRHPSHAVTFVDNHDTQPGEALESFVQGWFKPLAYATILTREQGYPQVFYGDYYGIPSDGVPSYRQQIDPLLKARQQYAYGRQHDYFDHWDVIGWTREGNASHPNSGLATIMSDGPGGSKWMYVGRQKAGEVWHDMTGNRSGTVTINQDGWGHFFVNGGSVSVWVKR

SEQ ID NO: 31455 - protein, 485 aa, Bacillus sp.
HHDGTNGTIMQYFEWNVPNDGQHWNRLHNNAQNLKNAGITAIWIPPAWKGTSQNDVGYGAYDLYDLGEFNQKGTVRTKYGTKAELERAIRSLKANGIQVYGDVVMNHKGGADFTERVQAVEVNPQNRNQEVSGTYQIEAWTGFNFPGRGNQHSSFKWRWYHFDGTDWDQSRQLANRIYKFRGDGKAWDWEVDTENGNYDYLMYADVDMDHPEVINELNRWGVWYANTLNLDGFRLDAVKHIKFSFMRDWLGHVRGQTGKNLFAVAEYWKNDLGALENYLSKTNWTMSAFDVPLHYNLYQASNSSGNYDMRNLLNGTLVQRHPSHAVTFVDNHDTQPGEALESFVQGWFKPLAYATILTREQGYPQVFYGDYYGIPSDGVPSYRQQIDPLLKARQQYAYGRQHDYFDHWDVIGWTREGNASHPNSGLATIMSDGPGGSKWMYVGRQKAGEVWADMTGNRSGTVTINQDGWGHFFVNGGSVSVWVKR

SEQ ID NO: 31456 - protein, 485 aa, Bacillus sp.
HHDGTNGTIMQYFEWNVPNDGQHWNRLHNNAQNLKNAGITAIWIPPAWKGTSQNDVGYGAYDLYDLGEFNQKGTVRTKYGTKAELERAIRSLKANGIQVYGDVVMNHKGGADFTERVQAVEVNPQNRNQEVSGTYQIEAWTGFNFPGRGNQHSSFKWRWYHFDGTDWDQSRQLANRIYKFRGDGKAWDWEVDTENGNYDYLMYADVDMDHPEVINELNRWGVWYANTLNLDGFRLDAVKHIKFSFMRDWLGHVRGQTGKNLFAVAEYWKNDLGALENYLSKTVWTMSAFDVPLHYNLYQASNSSGNYDMRNLLNGTLVQRHPSHAVTFVDNHDTQPGEALESFVQGWFKPLAYATILTREQGYPQVFYGDYYGIPSDGVPSYRQQIDPLLKARQQYAYGRQHDYFDHWDVIGWTREGNASHPNSGLATIMSDGPGGSKWMYVGRQKAGEVWHDMTGNRSGTVTINQDGWGHFFVNGGSVSVWVKR

SEQ ID NO: 31457 - protein, 485 aa, Bacillus sp.
HHDGTNGTIMQYFEWNVPNDGQHWNRLHNNAQNLKNAGITAIWIPPAWKGTSQNDVGYGAYDLYDLGEFNQKGTVRTKYGTKAELERAIRSLKANGIQVYGDVVMNHKGGADFTERVQAVEVNPQNRNQEVSGTYQIEAWTGFNFPGRGNQHSSFKWRGYHFDGTDWDQSRQLANRIYKFRGDGKAWDWEVDTENGNYDYLMYADVDMDHPEVINELNRWGVWYANTLNLDGFRLDAVKHIKFSFMRDWLGHVRGQTGKNLFAVAEYWKNDLGALENYLSKTNWTMSAFDVPLHYNLYQASNSSGNYDMRNLLNGTLVQRHPSHAVTFVDNHDTQPGEALESFVQGWFKPLAYATILTREQGYPQVFYGDYYGIPSDGVPSYRQQIDPLLKARQQYAYGRQHDYFDHWDVIGWTREGNASHPNSGLATIMSDGPGGSKWMYVGRQKAGEVWHDMTGNRSGTVTINQDGWGHFFVNGGSVSVWVKR

SEQ ID NO: 31458 - protein, 485 aa, Bacillus sp.
HHDGTNGTIMQYFEWNVPNDGQHWNRLHNNAQNLKNAGITAIWIPPAWKGTSQNDVGYGAYDLYDLGEFNQKGTVRTKYGTKAELERAIRSLKANGIQVYGDVVMNHKGGADFTERVQAVEVNPQNRNQEVSGTYQIEAWTGFNFPGRGNQHSSFKWRWYHFDGTDWDQSRQLANRIYKFRGDGKAWDWEVDTENGNYDYLMYADVDMDHPEVINELNRWGVWYANTLNLDGFRLDAVKHIKFSFMRDWLGHVRGQTGKNLFAVAEYWKNDLGALENYLSKTNWTMSAFDVPLHYNLYQASNSSGNFDMRNLLNGTLVQRHPSHAVTFVDNHDTQPGEALESFVQGWFKPLAYATILTREQGYPQVFYGDYYGIPSDGVPSYRQQIDPLLKARQQYAYGRQHDYFDHWDVIGWTREGNASHPNSGLATIMSDGPGGSKWMYVGRQKAGEVWHDMTGNRSGTVTINQDGWGHFFVNGGSVSVWVKR

SEQ ID NO: 31459 - protein, 485 aa, Bacillus sp.
HHDGTNGTIMQYFEWNVPNDGQHWNRLHNNAQNLKNAGITAIWIPPAWKGTSQNDVGYGAYDLYDLGEFNQKGTVRTKYGTKAELERAIRSLKANGIQVYGDVVMNHKGGADFTERVQAVEVNPQNRNQEVSGTYQAEAWTGFNFPGRGNQHSSFKWRWYHFDGTDWDQSRQLANRIYKFRGDGKAWDWEVDTENGNYDYLMYADVDMDHPEVINELNRWGVWYANTLNLDGFRLDAVKHIKFSFMRDWLGHVRGQTGKNLFAVAEYWKNDLGALENYLSKTNWTMSAFDVPLHYNLYQASNSSGNYDMRNLLNGTLVQRHPSHAVTFVDNHDTQPGEALESFVQGWFKPLAYATILTREQGYPQVFYGDYYGIPSDGVPSYRQQIDPLLKARQQYAYGRQHDYFDHWDVIGWTREGNASHPNSGLATIMSDGPGGSKWMYVGRQKAGEVWHDMTGNRSGTVTINQDGWGHFFVNGGSVSVWVKR

SEQ ID NO: 31460 - protein, 485 aa, Bacillus sp.
HHDGTNGTIMQYFEWNVPNDGQHWNRLHNNAQNLKNAGITAIWIPPAWKGTSQNDVGYGAYDLYDLGEFNQKGTVRTKYGTKAELERAIRSLKANGIQVYGDVVMNHKGGADFTERVQAVEVNPQNRNQEVSGTYQIEAWTGFNFPGRGNQHSSFKWRWYHFDGTDWDQSRQLANRIYKFRGDGKAWDWEVDTENGNYDYLMYADVDMDHPEVINELNRWGVWYANTLNLDGFRLDAVKHIKFSFMRDWLGHVRGQTGKNLFAVAEYWKNDLGALENYLSKTNWTMSAFDVPLHYNLYQASNSSGNYDMRNLLNGTLVQRHPSHAVTFVDNHDTQPGEALESFVQGWFKPLAYATILTREQGYPQVFYGDYYGIPSDGVPSYRQQIDPLLKARNQYAYGRQHDYFDHWDVIGWTREGNASHPNSGLATIMSDGPGGSKWMYVGRQKAGEVWHDMTGNRSGTVTINQDGWGHFFVNGGSVSVWVKR

SEQ ID NO: 31461 - protein, 485 aa, Bacillus sp.
HHDGTNGTIMQYFEWNVPNDGQHWNRLHNNAQNLKNAGITAIWIPPAWKGTSQNDVGYGAYDLYDLGEFNQKGTVRTKYGTKAELERAIRSLKANGIQVYGDVVMNHKGGADFTERVQAVEVNPQNRNQEVSGTYQIEAWTGFNFPGRGNQHSSFKWRWYHFDGTDWDQSRQLANRIYKFRGDGKAWDWEVSTENGNYDYLMYADVDMDHPEVINELNRWGVWYANTLNLDGFRLDAVKHIKFSFMRDWLGHVRGQTGKNLFAVAEYWKNDLGALENYLSKTNWTMSAFDVPLHYNLYQASNSSGNYDMRNLLNGTLVQRHPSHAVTFVDNHDTQPGEALESFVQGWFKPLAYATILTREQGYPQVFYGDYYGIPSDGVPSYRQQIDPLLKARQQYAYGRQHDYFDHWDVIGWTREGNASHPNSGLATIMSDGPGGSKWMYVGRQKAGEVWHDMTGNRSGTVTINQDGWGHFFVNGGSVSVWVKR

SEQ ID NO: 31462 - protein, 485 aa, Bacillus sp.
HHDGTNGTIMQYFEWNVPNDGQHWNRLHNNAQNLKNAGITAIWIPPAWKGTSQNDVGYGAYDLYDLGEFNQKGTVRTKYGTKAELERAIRSLKANGIQVYGDVVMNHKGGADFTERVQAVEVNPQNRNQEVSGTYQIEAWTGFNFPGRGNQHSSFKWRWYHFDGTDWDQSRQLANRIYKFRGDGKAWDWEVDTENGNYDYLMYADVDMDHPEVINELNRWGVWYANTLNLDGFRLDAVKHIKFSFMRDWLGHVRGQTGKNLFAVAEYWKNDLGALENYLSKTNWTMSAFDVPLHYNLYQASNSSGNYDMRNLLNGTLVQRHPSHAVTFVDNHDTQPGEALESFVQGWFKPLAYATILTREQGYPQVFYGDYYGITSDGVPSYRQQIDPLLKARQQYAYGRQHDYFDHWDVIGWTREGNASHPNSGLATIMSDGPGGSKWMYVGRQKAGEVWHDMTGNRSGTVTINQDGWGHFFVNGGSVSVWVKR

SEQ ID NO: 31463 - protein, 485 aa, Bacillus sp.
HHDGTNGTIMQYFEWNVPNDGQHWNRLHNNAQNLKNAGITAIWIPPAWKGTSQNDVGYGAYDLYDLGEFNQKGTVRTKYGTKAELERAIRSLKANGIQVYGDVVMNHKGGADFTERVQAVEVNPQNRNQEVSGTYQIEAWTGFNFPGRGNQHSSFKWRWYHFDGTDWDQSRQLANRIYKFRGDGKAWDWEVDTENGNYDYLMYADVDMDHPEVINELNRWGVWYANTLNLDGFRLDAVKHIKFSFMRDWLGHVRGQTGKNLFAVAEYWKNDLGALENYLSKTNVTMSAFDVPLHYNLYQASNSSGNYDMRNLLNGTLVQRHPSHAVTFVDNHDTQPGEALESFVQGWFKPLAYATILTREQGYPQVFYGDYYGIPSDGVPSYRQQIDPLLKARQQYAYGRQHDYFDHWDVIGWTREGNASHPNSGLATIMSDGPGGSKWMYVGRQKAGEVWHDMTGNRSGTVTINQDGWGHFFVNGGSVSVWVKR

SEQ ID NO: 31464 - protein, 485 aa, Bacillus sp.
HHDQTNGTIMQYFEWNVPNDGQHWNRLHNNAQNLKNAGITAIWIPPAWKGTSQNDVGYGAYDLYDLGEFNQKGTVRTKYGTKAELERAIRSLKANGIQVYGDVVMNHKGGADFTERVQAVEVNPQNRNQEVSGTYQIEAWTGFNFPGRGNQHSSFKWRWYHFDGTDWDQSRQLANRIYKFRGDGKAWDWEVDTENGNYDYLMYADVDMDHPEVINELNRWGVWYANTLNLDGFRLDAVKHIKFSFMRDWLGHVRGQTGKNLFAVAEYWKNDLGALENYLSKTNWTMSAFDVPLHYNLYQASNSSGNYDMRNLLNGTLVQRHPSHAVTFVDNHDTQPGEALESFVQGWFKPLAYATILTREQGYPQVFYGDYYGIPSDGVPSYRQQIDPLLKARQQYAYGRQHDYFDHWDVIGWTREGNASHPNSGLATIMSDGPGGSKWMYVGRQKAGEVWHDMTGNRSGTVTINQDGWGHFFVNGGSVSVWVKR

SEQ ID NO: 31465 - protein, 483 aa, Bacillus sp. (in: firmicutes)
HHDGTNGTIMQYFEWNVPNDGQHWNRLHNNAQNLKNAGITAIWIPPAWKGTSQNDVGYGAYDLYDLGEFNQKGTVRTKYGTKAELERAIRSLKANGIQVYGDVVMNHKGGADFTERVQAVEVNPQNRNQEVSGTYQIEAWTGFNFPGRGNQHSSFKWRWYHFDGTDWDQSRQLANRIYKFRGKAWDWEVDTEFGNYDYLMYADVDMDHPEVINELNRWGVWYANTLNLDGFRLDAVKHIKFSFMRDWLGHVRGQTGKNLFAVAEYWKNDLGALENYLSKTNWTMSAFDVPLHYNLYQASNSSGNYDMRNLLNGTLVQRHPSHAVTFVDNHDTQPGEALESFVQGWFKPLAYATILTREQGYPKVFYGDYYGIPSDGVPSYRQQIDPLLKARQQYAYGRQHDYFDHWDVIGWTREGNASHPNSGLATIMSDGPGGSKWMYVGRQKAGEVWHDMTGNRSGTVTINQDGWGHFFVNGGSVSVWVKR

SEQ ID NO: 31466 - protein, 485 aa, Bacillus sp.
HHDGTNGTIMQYFEWNVPNDGQHWNRLHNNAQNLKNAGITAIWIPPAWKGTSQNDVGYGAYDLYDLGEFNQKGTVRTKYGTKAELERAIRSLKANGIQVYGDVVMNHKGGADFTERVQAVEVNPQNRNQEVSGTYQVEAWTGFNFPGRGNQHSSFKWRWYHFDGTDWDQSRQLANRIYKFRGDGKAWDWEVDTENGNYDYLMYADVDMDHPEVINELNRWGVWYANTLNLDGFRLDAVKHIKFSFMRDWLGHVRGQTGKNLFAVAEYWKNDLGALENYLSKTNWTMSAFDVPLHYNLYQASNSSGNYDMRNLLNGTLVQRHPSHAVTFVDNHDTQPGEALESFVQGWFKPLAYATILTREQGYPQVFYGDYYGIPSDGVPSYRQQIDPLLKARQQYAYGRQHDYFDHWDVIGWTREGNASHPNSGLATIMSDGPGGSKWMYVGRQKAGEVWHDMTGNRSGTVTINQDGWGHFFVNGGSVSVWVKR

SEQ ID NO: 31467 - protein, 485 aa, Bacillus sp.
HHDGTNGTIMQYFEWNVPNDGQHWNRLHNNAQNLKNAGITAIWIPPAWKGTSQNDVGYGAYDLYDLGEFNQKGTVRTKYGTKAELERAIRSLKANGIQVYGDVVMNHKGGADFTERVQAVEVNPQNRNQEVSGTYQIEAWTGFNFPGRGNQHSSFKWRWYHFDGTDWDQSRQLANRIYKFKGDGKAWDWEVDTENGNYDYLMYADVDMDHPEVINELNRWGVWYANTLNLDGFRLDAVKHIKFSFMRDWLGHVRGQTGKNLFAVAEYWKNDLGALENYLSKTNWTMSAFDVPLHYNLYQASNSSGNYDMRNLLNGTLVQRHPSHAVTFVDNHDTQPGEALESFVQGWFKPLAYATILTREQGYPQVFYGDYYGIPSDGVPSYRQQIDPLLKARQQYAYGRQHDYFDHWDVIGWTREGNASHPNSGLATIMSDGPGGSKWMYVGRQKAGEVWHDMTGNRSGTVTINQDGWGHFFVNGGSVSVWVKR

SEQ ID NO: 31468 - protein, 485 aa, Bacillus sp.
HHDGTNGTIMQYFEWNVPNDGQHWNRLHNNAQNLKNAGITAIWIPPAWKPTSQNDVGYGAYDLYDLGEFNQKGTVRTKYGTKAELERAIRSLKANGIQVYGDVVMNHKGGADFTERVQAVEVNPQNRNQEVSGTYQIEAWTGFNFPGRGNQHSSFKWRWYHFDGTDWDQSRQLANRIYKFRGDGKAWDWEVDTENGNYDYLMYADVDMDHPEVINELNRWGVWYANTLNLDGFRLDAVKHIKFSFMRDWLGHVRGQTGKNLFAVAEYWKNDLGALENYLSKTNWTMSAFDVPLHYNLYQASNSSGNYDMRNLLNGTLVQRHPSHAVTFVDNHDTQPGEALESFVQGWFKPLAYATILTREQGYPQVFYGDYYGIPSDGVPSYRQQIDPLLKARQQYAYGRQHDYFDHWDVIGWTREGNASHPNSGLATIMSDGPGGSKWMYVGRQKAGEVWHDMTGNRSGTVTINQDGWGHFFVNGGSVSVWVKR

SEQ ID NO: 31469 - protein, 485 aa, Bacillus sp.
HHDGENGTIMQYFEWNVPNDGQHWNRLHNNAQNLKNAGITAIWIPPAWKGTSQNDVGYGAYDLYDLGEFNQKGTVRTKYGTKAELERAIRSLKANGIQVYGDVVMNHKGGADFTERVQAVEVNPQNRNQEVSGTYQIEAWTGFNFPGRGNQHSSFKWRWYHFDGTDWDQSRQLANRIYKFRGDGKAWDWEVDTENGNYDYLMYADVDMDHPEVINELNRWGVWYANTLNLDGFRLDAVKHIKFSFMRDWLGHVRGQTGKNLFAVAEYWKNDLGALENYLSKTNWTMSAFDVPLHYNLYQASNSSGNYDMRNLLNGTLVQRHPSHAVTFVDNHDTQPGEALESFVQGWFKPLAYATILTREQGYPQVFYGDYYGIPSDGVPSYRQQIDPLLKARQQYAYGRQHDYFDHWDVIGWTREGNASHPNSGLATIMSDGPGGSKWMYVGRQKAGEVWHDMTGNRSGTVTINQDGWGHFFVNGGSVSVWVKR

SEQ ID NO: 31470 - protein, 485 aa, Bacillus sp.
HHDGTNGTIMQYFEWNVPNDGQHWNRLHNNAQNLKNAGITAIWIPPAWKGTSQNDVGYGAYDLYDLGEFNQKGTVRTKYGTKAELERAIRSLKANGIQVYGDVVMNHKGGADFTERVQAVEVNPQNRNQEVSGTYQIEAWTGFNFPGRGNQHSSFKWRWYHFDGTDWDQSRQLANEIYKFRGDGKAWDWEVDTENGNYDYLMYADVDMDHPEVINELNRWGVWYANTLNLDGFRLDAVKHIKFSFMRDWLGHVRGQTGKNLFAVAEYWKNDLGALENYLSKTNWTMSAFDVPLHYNLYQASNSSGNYDMRNLLNGTLVQRHPSHAVTFVDNHDTQPGEALESFVQGWFKPLAYATILTREQGYPQVFYGDYYGIPSDGVPSYRQQIDPLLKARQQYAYGRQHDYFDHWDVIGWTREGNASHPNSGLATIMSDGPGGSKWMYVGRQKAGEVWHDMTGNRSGTVTINQDGWGHFFVNGGSVSVWVKR

SEQ ID NO: 31471 - protein, 485 aa, Bacillus sp.
HHDGTNGTIMQYFEWNVPNDGQHWNRLHNNAQNLKNAGITAIWIPPAWKGTSQNDVGYGAYDLYDLGEFNQKGTVRTKYGTKAELERAIRSLKANGIQVYGDVVMNHKGGADFTERVQAVEVNPQNRNQEVSGTYQIEAWTGFNFPGRGNQHSSFKWRWYHFDGTDWDQSRQLANRIYKFRGDGKAWDWEVDTENGNYDYLMYADVDMDHPEVINELNRWGVWYANTLNLDGFRLDAVKHIKFSFMRDWLGHVRGQTGQNLFAVAEYWKNDLGALENYLSKTNWTMSAFDVPLHYNLYQASNSSGNYDMRNLLNGTLVQRHPSHAVTFVDNHDTQPGEALESFVQGWFKPLAYATILTREQGYPQVFYGDYYGIPSDGVPSYRQQIDPLLKARQQYAYGRQHDYFDHWDVIGWTREGNASHPNSGLATIMSDGPGGSKWMYVGRQKAGEVWHDMTGNRSGTVTINQDGWGHFFVNGGSVSVWVKR

SEQ ID NO: 31472 - protein, 485 aa, Bacillus sp.
HHDGTNGTIMQYFEWNVPNDGQHWNRLHNNAQNLKNAGITAIWIPPAWKGTSQNDVGYGAYDLYDLGEFNQKGTVRTKYGTKAELERAIRSLKANGIQVYGDVVMNHKGGADFTERVQAVEVNPQNRNQEVSGTYQIEAWTGFNFPGRGNQHSSFKWRWYHFDGTDWDQSRQLANRIYKFEGDGKAWDWEVDTENGNYDYLMYADVDMDHPEVINELNRWGVWYANTLNLDGFRLDAVKHIKFSFMRDWLGHVRGQTGKNLFAVAEYWKNDLGALENYLSKTNWTMSAFDVPLHYNLYQASNSSGNYDMRNLLNGTLVQRHPSHAVTFVDNHDTQPGEALESFVQGWFKPLAYATILTREQGYPQVFYGDYYGIPSDGVPSYRQQIDPLLKARQQYAYGRQHDYFDHWDVIGWTREGNASHPNSGLATIMSDGPGGSKWMYVGRQKAGEVWHDMTGNRSGTVTINQDGWGHFFVNGGSVSVWVKR

SEQ ID NO: 31473 - protein, 485 aa, Bacillus sp.
HHDGTNGTIMQYFEWNVPNDGQHWNRLHNNAQNLKNAGITAIWIPPAWKGTSQNDVGYGAYDLYDLGEFNQKGTVRTKYGTKAELERAIRSLKANGIQVYGDVVMNHKGGADFTERVQAVEVNPQNRNQEVSGTYQIEAWTGFNFPGRGNQHSSFKWRWYHFDGTDWDQSRQLANRIYKFRGDGKAWDWEVDTENGNYDYLMYADVDMDHPFVINELNRWGVWYANTLNLDGFRLDAVKHIKFSFMRDWLGHVRGQTGKNLFAVAEYWKNDLGALENYLSKTNWTMSAFDVPLHYNLYQASNSSGNYDMRNLLNGTLVQRHPSHAVTFVDNHDTQPGEALESFVQGWFKPLAYATILTREQGYPQVFYGDYYGIPSDGVPSYRQQIDPLLKARQQYAYGRQHDYFDHWDVIGWTREGNASHPNSGLATIMSDGPGGSKWMYVGRQKAGEVWHDMTGNRSGTVTINQDGWGHFFVNGGSVSVWVKR

SEQ ID NO: 31474 - protein, 485 aa, Bacillus sp.
HHDGTNGTIMQYFEWNVPNDGQHWNRLHNNAQNLKNAGITAIWIPPAWKGTSQNDVGYGAYDLYDLGEFNQKGTVRTKYGTKAELERAIRSLKANGIQVYGDVVMNHKGGADFTERVQAVEVNPQNRNQEVSGTYQIEAWTGFNFPGRGNQHSSFKWRWYHFDGTDWDQSRQLANRIYKFRGDGKAWDWEVDTENGNYDYLMYADVDMDHPEVINELNRWGVWYANTLNLDGFRLDAVKHIKFSFMRDWLGHVRGQTPKNLFAVAEYWKNDLGALENYLSKTNWTMSAFDVPLHYNLYQASNSSGNYDMRNLLNGTLVQRHPSHAVTFVDNHDTQPGEALESFVQGWFKPLAYATILTREQGYPQVFYGDYYGIPSDGVPSYRQQIDPLLKARQQYAYGRQHDYFDHWDVIGWTREGNASHPNSGLATIMSDGPGGSKWMYVGRQKAGEVWHDMTGNRSGTVTINQDGWGHFFVNGGSVSVWVKR

SEQ ID NO: 31475 - protein, 485 aa, Bacillus sp.
HHDGTNGTIMQYFEWNVPNDGQHWNRLHNNAQNLKNAGITAIWIPPAWKGTSQNDVGYGAYDLYDLGEFNQKGTVRTKYGTKAELERAIRSLKANGIQVYGDVVMNHKGGADFTERVQAVEVNPQNRNQEVSGTYQIEAWTGFNFPGRGNQHSSFKWRWYHFDGTDWDQSRQLANRIYKFRGDGKAWDWEVDTENGNYDYLMYADVDMDHPEVINELNRWGVWYANTLNLDGFRLDAVKHIKFSFMRDWLGHVRGQTGKNLFAVAEYWKNDLGALENYLSKTNWTMSAFDVPLHYNLYQASNSSGNYDMRNLLNGTLVQRHPSHAVTFVDNHDTQPGEALESFVQGWFKPLAYATILTREQGYPQVFMGDYYGIPSDGVPSYRQQIDPLLKARQQYAYGRQHDYFDHWDVIGWTREGNASHPNSGLATIMSDGPGGSKWMYVGRQKAGEVWHDMTGNRSGTVTINQDGWGHFFVNGGSVSVWVKR

SEQ ID NO: 31476 - protein, 485 aa, Bacillus sp.
HHDGTNGTIMQYFEWNVPNDGQHWNRLHNNAQNLKNAGITAIWIPPAWKGTSQNDVGYGAYDLYDLGEFNQKGTVRTKYGTKAELERAIRSLKANGIQVYGDVVMNHKGGADFTERVQAVEVNPQNRNQEVSGTYQIEAWTGFNFPGRGNQHSSFKWRWYHFDGTDWDQSRQLANRIYKFRGDGKAWDWEVDTENGNYDYLMYADVDMDHPEVINELNRWGVWYANTLNLDGFRLDAVKHIKFSFMRDWLGHVRGQTGKNLFAVAEYWKNDLGALENYLSKTNWTMSAFDVPLHYNLYQASNSSGNYDMRNLLNGTLVQRHPSHAVTFVDNHDTQPGEALESFVQGWFKPLAYATILTREQGYPQVFYGDYYGIPSDGVPSYRQQIDPLLKARQQYAYGRQHDYFDHWDVIGWTREGNASHPNSGLATIMSDGPGGSKWMYVGRQKAGEVWTDMTGNRSGTVTINQDGWGHFFVNGGSVSVWVKR

SEQ ID NO: 31477 - protein, 485 aa, Bacillus sp.
HHDGTNGTIMQYFEWNVPNDGQHWNRLHNNAQNLKNAGITAIWIPPAWKGTSQNDVGYGAYDLYDLGEFNQKGTVSTKYGTKAELERAIRSLKANGIQVYGDVVMNHKGGADFTERVQAVEVNPQNRNQEVSGTYQIEAWTGFNFPGRGNQHSSFKWRWYHFDGTDWDQSRQLANRIYKFRGDGKAWDWEVDTENGNYDYLMYADVDMDHPEVINELNRWGVWYANTLNLDGFRLDAVKHIKFSFMRDWLGHVRGQTGKNLFAVAEYWKNDLGALENYLSKTNWTMSAFDVPLHYNLYQASNSSGNYDMRNLLNGTLVQRHPSHAVTFVDNHDTQPGEALESFVQGWFKPLAYATILTREQGYPQVFYGDYYGIPSDGVPSYRQQIDPLLKARQQYAYGRQHDYFDHWDVIGWTREGNASHPNSGLATIMSDGPGGSKWMYVGRQKAGEVWHDMTGNRSGTVTINQDGWGHFFVNGGSVSVWVKR

SEQ ID NO: 31478 - protein, 485 aa, Bacillus sp.
HHDGTNGTIMQYFEWNVPNDGQHWNRLHNNAQNLKNAGITAIWIPPAWKGTSQNDVGYGAYDLYDLGEFNQKGTVRTKYGTKAELERAIRSLKANGIQVYGDVVMNHKGGADFTERVQAVEVNPQNRNQEVSGTYQIEAWTGFNFPGRGNQHSSFKWRWYHFDGTDWDQSRQLANRIYKFRGDGKAWDWEVDTENGNYDYLMYADVDMDHPEVINELNRWGVWYANTLNLDGFRLDAVKHIKFSFMRDWLGFVRGQTGKNLFAVAEYWKNDLGALENYLSKTNWTMSAFDVPLHYNLYQASNSSGNYDMRNLLNGTLVQRHPSHAVTFVDNHDTQPGEALESFVQGWFKPLAYATILTREQGYPQVFYGDYYGIPSDGVPSYRQQIDPLLKARQQYAYGRQHDYFDHWDVIGWTREGNASHPNSGLATIMSDGPGGSKWMYVGRQKAGEVWHDMTGNRSGTVTINQDGWGHFFVNGGSVSVWVKR

SEQ ID NO: 31479 - protein, 485 aa, Bacillus sp.
HHDGTNGTIMQYFEWNVPNDGQHWNRLHNNAQNLKNAGITAIWIPPAWKGTSQNDVGYGAYDLYDLGEFNQKGTVRTKYGTKAELERAIRSLKANGIQVYGDVVMNHKGGADFTERVQAVEVNPQNRNQEVSGTYQIEAWTGFNFPGRGNQHSSFKWRWYHFDGTDWDQSRQLANRIWKFRGDGKAWDWEVDTENGNYDYLMYADVDMDHPEVINELNRWGVWYANTLNLDGFRLDAVKHIKFSFMRDWLGHVRGQTGKNLFAVAEYWKNDLGALENYLSKTNWTMSAFDVPLHYNLYQASNSSGNYDMRNLLNGTLVQRHPSHAVTFVDNHDTQPGEALESFVQGWFKPLAYATILTREQGYPQVFYGDYYGIPSDGVPSYRQQIDPLLKARQQYAYGRQHDYFDHWDVIGWTREGNASHPNSGLATIMSDGPGGSKWMYVGRQKAGEVWHDMTGNRSGTVTINQDGWGHFFVNGGSVSVWVKR

SEQ ID NO: 31480 - protein, 485 aa, Bacillus sp.
HHDGTNGTIMQYFEWNVPNDGQHWNRLHNNAQNLKNAGITAIWIPPAWKGTSQNDVGYGAYDLYDLGEFNQKGTVRTKYGTKAELERAIRSLKANGIQVYGDVVMNHKGGADFTERVQAVEVNPQNRNQEVSGTYQIEAWTGFNFPGRGNQHSSFKWRWYHFDGTDWDQSRQLANRIYKFRGDGKAWDWEVDTENGNYDYLMYADVDMDHPEVINELNRWGVWYANTLNLDGFRLDAVKHIKFSFMRDWLGHVRGQTGKNLFAVAEYWKNDLGALENYLSKTNWTMSAFDVPLHYNLYQASNSSGNYDMRNLLNGTLVQRHPSHAVTFVDNHDTQPGEALESFVQGWFKPLAYATILTREQGYPQVFYGDYYGIPSDGVPSYRQQIDPLLKARQQYAYGRQHDYFDHWDVIGWTREGNASHPNSGLATIMSDGPGGSKWMYVGRQKAGEVWHDMTGNRSGTVTVNQDGWGHFFVNGGSVSVWVKR

SEQ ID NO: 31481 - protein, 485 aa, Bacillus sp.
HHDGTNGTIMQYFEWNVPNDGQHWNRLHNNAQNLKNAGITAIWIPPAWKGTSQNDVGYGAYDLYDLGEFNQKGTVRTKYGTKAELERAIRSLKANGIQVYGDVVMNHKGGADFTERVQAVEVNPQNRNQEVSGTYQIEAWTGFNFPGRGNQHSSFKWRWYHFDGTDWDQSRQLANRIYKFRGDGKAWDWEVDTENGNYDYLMYADVDMDHPEVINELNRWGVWYANTLNLDGFRLDAVKHIKFSFMRDWLGHVRGQTGKNLFAVAEYWKNDLGALENYLSKTNWTMSAFDVPLHYNLYQASNSSGNYDMRNLLNGTLVQRHPSHAVTFVDNHDTQPGEALESFVQGWFKPLAYATILTRCQGYPQVFYGDYYGIPSDGVPSYRQQIDPLLKARQQYAYGRQHDYFDHWDVIGWTREGNASHPNSGLATIMSDGPGGSKWMYVGRQKAGEVWHDMTGNRSGTVTINQDGWGHFFVNGGSVSVWVKR

SEQ ID NO: 31482 - protein, 485 aa, Bacillus sp.
HHDGTNGTIMQYFEWNVPNDGQHWNRLHNNAQNLKNAGITAIWIPPAWKGTSQNDVGYGAYDLYDLGEFNQKGTVRTKYGTKAELERAIRSLKANGIQVYGDVVMNHKGGADFTERVQAVEVNPQNRNQEVSGTYQIEAWTGFNFPGRGNQHSSFKWRWYHFDGTDWDQSRQLANRIYKFRGDGKAWDWEVDTENGNYDYLMYADVDMDHPEVINELNRWGVWYANTLNLDGFRLDAVKHIKFSFMRDWLGVVRGQTGKNLFAVAEYWKNDLGALENYLSKTNWTMSAFDVPLHYNLYQASNSSGNYDMRNLLNGTLVQRHPSHAVTFVDNHDTQPGEALESFVQGWFKPLAYATILTREQGYPQVFYGDYYGIPSDGVPSYRQQIDPLLKARQQYAYGRQHDYFDHWDVIGWTREGNASHPNSGLATIMSDGPGGSKWMYVGRQKAGEVWHDMTGNRSGTVTINQDGWGHFFVNGGSVSVWVKR

SEQ ID NO: 31483 - protein, 485 aa, Bacillus sp.
HHDGTNGTIMQYFEWNVPNDGQHWNRLHNNAQNLKNAGITAIWIPPAWKGTSQNDVGYGAYDLYDLGEFNQKGTVRTKYGTKAELERAIRSLKANGIQVYGDVVMNHKGGADFTERVQAVEVNPQNRNQEVSGTYQIEAWTGFNFPGRGNQHSSFKWRWYHFDGTDWDQSRQLANRIYKFRGDGKAWDWEVDTENGNYDYLMYADVDMDHPEVINELNRWGVWYANTLNLDGFRLDAVKHIKFSFMRDWLGHVRGQTGKNLFAVAEYWKNDLGALENYLSKTNTTMSAFDVPLHYNLYQASNSSGNYDMRNLLNGTLVQRHPSHAVTFVDNHDTQPGEALESFVQGWFKPLAYATILTREQGYPQVFYGDYYGIPSDGVPSYRQQIDPLLKARQQYAYGRQHDYFDHWDVIGWTREGNASHPNSGLATIMSDGPGGSKWMYVGRQKAGEVWHDMTGNRSGTVTINQDGWGHFFVNGGSVSVWVKR

SEQ ID NO: 31484 - protein, 485 aa, Bacillus sp.
HHDGTNGTIMQYFEWNVPNDGQHWNRLHNNAQNLKNAGITAIWIPPAWKGTSQNDVGYGAYDLYDLGEFNQKGTVRTKYGTKAELERAIRSLKANGIQVYGDVVMNHKGGADFTERVQAVEVNPQNRNQEVSGTYQIEAWTGFNFPGRGNQHSSFKWRWYHFDGTDWDQSRQLANRIYKFRGDGKAWDWEVDTENGNYDYLMYADVDMDHPEVINELNRWGVWYANTLNLDGFRLDAVKHIKFSFMRDWLGHVRGQTGKNLFAVAEYWKNDLGALENYLSKTNWTMSAFDVPLHYNLYQASNSSGNYDMRNLLNGTLVQRHPSHAVTFVDNHDTQPGEALESFVQGWFKPLAYATILTREQGYPQVFYGDYYGIPSDGVPSYRQQIDPLLKARQQYAYGRQHDYFDHWDVIGWTRCGNASHPNSGLATIMSDGPGGSKWMYVGRQKAGEVWHDMTGNRSGTVTINQDGWGHFFVNGGSVSVWVKR

SEQ ID NO: 31485 - protein, 485 aa, Bacillus sp.
HHDGTNGTIMQYFEWNVPNDGQHWNRLHNNAQNLKNAGITAIWIAPAWKGTSQNDVGYGAYDLYDLGEFNQKGTVRTKYGTKAELERAIRSLKANGIQVYGDVVMNHKGGADFTERVQAVEVNPQNRNQEVSGTYQIEAWTGFNFPGRGNQHSSFKWRWYHFDGTDWDQSRQLANRIYKFRGDGKAWDWEVDTENGNYDYLMYADVDMDHPEVINELNRWGVWYANTLNLDGFRLDAVKHIKFSFMRDWLGHVRGQTGKNLFAVAEYWKNDLGALENYLSKTNWTMSAFDVPLHYNLYQASNSSGNYDMRNLLNGTLVQRHPSHAVTFVDNHDTQPGEALESFVQGWFKPLAYATILTREQGYPQVFYGDYYGIPSDGVPSYRQQIDPLLKARQQYAYGRQHDYFDHWDVIGWTREGNASHPNSGLATIMSDGPGGSKWMYVGRQKAGEVWHDMTGNRSGTVTINQDGWGHFFVNGGSVSVWVKR

SEQ ID NO: 31486 - protein, 485 aa, Bacillus sp.
HHDGTNGTIMQYFEWNVPNDGQHWNRLHNNAQNLKNAGITAIWIPPAWKGTSQNDVGYGAYDLYDLGEFNQKGTVRTKYGTKAELERAIRSLKANGIQVYGDVVMNHKGGADFTERVQAVEVNPQNRNQEVSGTYQIEAWTGFNFPPRGNQHSSFKWRWYHFDGTDWDQSRQLANRIYKFRGDGKAWDWEVDTENGNYDYLMYADVDMDHPEVINELNRWGVWYANTLNLDGFRLDAVKHIKFSFMRDWLGHVRGQTGKNLFAVAEYWKNDLGALENYLSKTNWTMSAFDVPLHYNLYQASNSSGNYDMRNLLNGTLVQRHPSHAVTFVDNHDTQPGEALESFVQGWFKPLAYATILTREQGYPQVFYGDYYGIPSDGVPSYRQQIDPLLKARQQYAYGRQHDYFDHWDVIGWTREGNASHPNSGLATIMSDGPGGSKWMYVGRQKAGEVWHDMTGNRSGTVTINQDGWGHFFVNGGSVSVWVKR

SEQ ID NO: 31487 - protein, 485 aa, Bacillus sp.
HHDGTNGTIMQYFEWNVPNDGQHWNRLHNNAQNLKNAGITAIWIPPAWKGTSQNDVGYGAYDLYDLGEFNQKGTVRTKYGTKAELERAIRSLKANGIQVYGDVVMNHKGGADFTERVQAVEVNPQNRNQEVSGTYQIEAWTGFNFPGRGNQHSSFKWRWYHFDGTDWDQSRQLANRSYKFRGDGKAWDWEVDTENGNYDYLMYADVDMDHPEVINELNRWGVWYANTLNLDGFRLDAVKHIKFSFMRDWLGHVRGQTGKNLFAVAEYWKNDLGALENYLSKTNWTMSAFDVPLHYNLYQASNSSGNYDMRNLLNGTLVQRHPSHAVTFVDNHDTQPGEALESFVQGWFKPLAYATILTREQGYPQVFYGDYYGIPSDGVPSYRQQIDPLLKARQQYAYGRQHDYFDHWDVIGWTREGNASHPNSGLATIMSDGPGGSKWMYVGRQKAGEVWHDMTGNRSGTVTINQDGWGHFFVNGGSVSVWVKR

SEQ ID NO: 31488 - protein, 485 aa, Bacillus sp.
HHDGTNGTIMQYFEWNVPNDGQHWNRLHNNAQNLKNAGITAIWIPPAWKGTSQNDVGYGAYDLYDLGEFNQKGTVRTKYGTKAELERAIRSLKANGIQVYGDVVMNHKGGADFTERVQAVEVNPQNRNQEVSGTYQIEAWTGFNFPGRGNQHSSFKWRWYHFDGTDWDQSRQLANRIYKFRGDGKAWDWEVDTENGNYDYLMYADVDMDHPEVINELNRWGVWYANTLNLDGFRLDAVKHIKFSFMRDWLGHVRGQTGKNLFAVAEYWKNDLGALENYLSKTNWTMSAFDVPLHYNLYQASNSSGNYDMRNLLNGTLVQRHPSHAVTFVDNHDTQPGEALPSFVQGWFKPLAYATILTREQGYPQVFYGDYYGIPSDGVPSYRQQIDPLLKARQQYAYGRQHDYFDHWDVIGWTREGNASHPNSGLATIMSDGPGGSKWMYVGRQKAGEVWHDMTGNRSGTVTINQDGWGHFFVNGGSVSVWVKR

SEQ ID NO: 31489 - protein, 485 aa, Bacillus sp.
HHDGTNGTIMQYFEWNVPNDGQHWNRLHNNAQNLKNAGITAIWIPPAWKGTSQNDVGYGAYDLYDLGEFNQKGTVRTKYGTKAELERAIRSLKANGIQVYGDVVMNHKGGADFTERVQAVEVNPQNRNQEVSGTYQIEAWTGFNFPGRGNQHSSFKWRWYHFDGTDWDQSRQLANRIYKFRGDGKAWDWEVDTENGNYDYLMYADVDMDHPEVINELNRWGVWYANTLNLDGFRLDAVKHIKFSFMRDWLGHVRGQTGKNLFAVAEYWKNDLGALENYLSKTNWTMSAFDVPLHYNLYQASNSSGNYDMRNLLNGTLVQRHPSHAVTFVDNHDTQPGEALDSFVQGWFKPLAYATILTREQGYPQVFYGDYYGIPSDGVPSYRQQIDPLLKARQQYAYGRQHDYFDHWDVIGWTREGNASHPNSGLATIMSDGPGGSKWMYVGRQKAGEVWHDMTGNRSGTVTINQDGWGHFFVNGGSVSVWVKR

SEQ ID NO: 31490 - protein, 483 aa, Bacillus sp. (in: firmicutes)
HHDGTNGTIMQYFEWNVPNDGQHWNRLHNNAQNLKNAGITAIWIPPAWKGTSQNDVGYGAYDLYDLGEFNQKGTVRTKYGTKAELERAIRSLKANGIQVYGDVVMNHKGGADFTERVQAVEVNPQNHNQEVSGTYQIEAWTGFNFPGRGNQHSSFKWRWYHFDGTDWDQSRQLANRIYKFRGKAWDWEVDTENGNYDYLMYADVDMDHPEVINELNRWGVWYANTLNLDGFRLDAVKHIKFSFIRDWLGHVRGQTGKNLFAVAEYWKNDLGALENYLSKTNWTMSAFDVPLHYNLYQASNSSGNYDMRNLLNGTLVQRHPSHAVTFVDNHDTQPGEALESFVQGWFKPLAYATILTREQGYPCVFYGDYYGIPSDGVPSYRQQIDPLLKARQQYAYGRQHDYFDHWDVIGWTREGNASHPNSGLATIMSDGPGGSKWMYVGRQKAGEVWHDMTGNRSGTVTINQDGWGHFFVNGGSVSAWVKR

SEQ ID NO: 31491 - protein, 485 aa, Bacillus sp.
HHDGTNGTIMQAFEWNVPNDGQHWNRLHNNAQNLKNAGITAIWIPPAWKGTSQNDVGYGAYDLYDLGEFNQKGTVRTKYGTKAELERAIRSLKANGIQVYGDVVMNHKGGADFTERVQAVEVNPQNRNQEVSGTYQIEAWTGFNFPGRGNQHSSFKWRWYHFDGTDWDQSRQLANRIYKFRGDGKAWDWEVDTENGNYDYLMYADVDMDHPEVINELNRWGVWYANTLNLDGFRLDAVKHIKFSFMRDWLGHVRGQTGKNLFAVAEYWKNDLGALENYLSKTNWTMSAFDVPLHYNLYQASNSSGNYDMRNLLNGTLVQRHPSHAVTFVDNHDTQPGEALESFVQGWFKPLAYATILTREQGYPQVFYGDYYGIPSDGVPSYRQQIDPLLKARQQYAYGRQHDYFDHWDVIGWTREGNASHPNSGLATIMSDGPGGSKWMYVGRQKAGEVWHDMTGNRSGTVTINQDGWGHFFVNGGSVSVWVKR

SEQ ID NO: 31492 - protein, 485 aa, Bacillus sp.
HHDGTNGTIMQYFEWNVPNDGQHWNRLHNNAQNLKNAGITAIWIPPAWKGTSQNDVGYGAYDLYDLGEFNQKGTVRTKYGTKAELERAIRSLKANGIQVYGDVVMNHKGGADFTERVQAVEVNPQNRNQEVSGTYQIEAWTGFNFPGRGNQHSSFKWRWYHFDGTDWDQSRQLANRIYKFRGDGKAWDWEVDTENGNYDYLMYADVDMDHPEVINELNIWGVWYANTLNLDGFRLDAVKHIKFSFMRDWLGHVRGQTGKNLFAVAEYWKNDLGALENYLSKTNWTMSAFDVPLHYNLYQASNSSGNYDMRNLLNGTLVQRHPSHAVTFVDNHDTQPGEALESFVQGWFKPLAYATILTREQGYPQVFYGDYYGIPSDGVPSYRQQIDPLLKARQQYAYGRQHDYFDHWDVIGWTREGNASHPNSGLATIMSDGPGGSKWMYVGRQKAGEVWHDMTGNRSGTVTINQDGWGHFFVNGGSVSVWVKR

SEQ ID NO: 31493 - protein, 485 aa, Bacillus sp.
HHDGTNGTIMQYFEWNVPNDGQHWNRLHNNAQNLKNAGITAIWIPPAWKGTSQNDVGYGAYDLYDLGEFNQKGTVRTKYGTKAELERAIRSLKANGIQVYGDVVMNHKGGADFTERVQAVEVNPQNRNQEVSGTYQIEAWTGFNFPGRGNQHSSFKWRWYHFDGTDWDQSRQLANRIYKFRGDGKAWDWEVDTENGNYDYLMYADVDMDHPEVINELNRWGVWYANTLNLDGFRLDAVKHIKFSFMRDWLGHVRGQTGKNLFAVAEYWKNDLGALENYLSKTNWTMSAFDVPLHYNLYQASNSSGNYDMRNLLNGTLVQRHPSHAVTFVDNHDTQPGEALESFVQGWFKPLAYATILTREQGYPQVFYGDYYGIPSDGVPSYRQQIDPLLKIRQQYAYGRQHDYFDHWDVIGWTREGNASHPNSGLATIMSDGPGGSKWMYVGRQKAGEVWHDMTGNRSGTVTINQDGWGHFFVNGGSVSVWVKR

SEQ ID NO: 31494 - protein, 485 aa, Bacillus sp.
HHDGTNGTIMQYFEWNVPNDGQHWNRLHNNAQNLKNAGITAIWIPPAWKGTSQNDVGYGAYDLYDLGEFNQKGTVRTKYGTKAELERAIRSLKANGIQVYGDVVMNHKGGADFTERVQAVEVNPQNRNQEVSGTYQIEMWTGFNFPGRGNQHSSFKWRWYHFDGTDWDQSRQLANRIYKFRGDGKAWDWEVDTENGNYDYLMYADVDMDHPEVINELNRWGVWYANTLNLDGFRLDAVKHIKFSFMRDWLGHVRGQTGKNLFAVAEYWKNDLGALENYLSKTNWTMSAFDVPLHYNLYQASNSSGNYDMRNLLNGTLVQRHPSHAVTFVDNHDTQPGEALESFVQGWFKPLAYATILTREQGYPQVFYGDYYGIPSDGVPSYRQQIDPLLKARQQYAYGRQHDYFDHWDVIGWTREGNASHPNSGLATIMSDGPGGSKWMYVGRQKAGEVWHDMTGNRSGTVTINQDGWGHFFVNGGSVSVWVKR

SEQ ID NO: 31495 - protein, 485 aa, Bacillus sp.
HHDGTNGTIMQYFEWNVPNDGQHWNRLHNNAQNLKNAGITAIWIPPAWKGTSQNDVGYGAYDLYDLGEFNQKGTVRTKYGTKAELERAIRSLKANGIQVYGDVVMNHKGGADFTERVQAVEVNPQNRNQEVSGTYQIEAWTGFNFPGRGNQHSSFKWRWYHFDGTDWDQSRQLANRIYKFRGDGKAWDWEVDTENGNYDYLMYADVDMDHPEVINELNRWGVWYANTLNLDGFRLDAVKHIKFSFMRDWLGHVRGQTGKNLFAVAEYWKNDLGALENYLSKTNWTMSAFDVPLHYNLYQASNSSGNYDMRNLLNGTLVQRHPSHAVTFVDNHDTQPGEALESFVQGWFKPLAYATILTREQGYPQVFYGDYYGIPSDGVPSYRQQIDPLLKARLQYAYGRQHDYFDHWDVIGWTREGNASHPNSGLATIMSDGPGGSKWMYVGRQKAGEVWHDMTGNRSGTVTINQDGWGHFFVNGGSVSVWVKR

SEQ ID NO: 31496 - protein, 485 aa, Bacillus sp.
HHDGTNGTIMQYFEWNVPNDGQHWNRLHNNAQNLKNAGITAIWIPPAWKGTSQNDVGYGAYDLYDLGEFNQKGTVRTKYGTKAELERAIRSLKANGIQVYGDVVMNHKGGADFTERVQAVEVNPQNRNQEVSGTYQIEAWTGFNFPCRGNQHSSFKWRWYHFDGTDWDQSRQLANRIYKFRGDGKAWDWEVDTENGNYDYLMYADVDMDHPEVINELNRWGVWYANTLNLDGFRLDAVKHIKFSFMRDWLGHVRGQTGKNLFAVAEYWKNDLGALENYLSKTNWTMSAFDVPLHYNLYQASNSSGNYDMRNLLNGTLVQRHPSHAVTFVDNHDTQPGEALESFVQGWFKPLAYATILTREQGYPQVFYGDYYGIPSDGVPSYRQQIDPLLKARQQYAYGRQHDYFDHWDVIGWTREGNASHPNSGLATIMSDGPGGSKWMYVGRQKAGEVWHDMTGNRSGTVTINQDGWGHFFVNGGSVSVWVKR

SEQ ID NO: 31497 - protein, 485 aa, Bacillus sp.
HHDGTNGTIMQYFEWNVPNDGQHWNRLHNNAQNLKNAGITAIWIPPAWKGTSQNDVGYGAYDLYDLGEFNQKGTVRTKYGTKAELERAIRSLKANGIQVYGDVVMNHKGGADFTERVQAVEVNPQNRNQEVSGTYQIEAWTGFNFPGRGNQHSSFKWRWYHFDGTDWDQSRQLANRIYKFRGDGKAWDWEVDTENGNYDYLMYADVDMDHPEVINELNRWGVWYANTLNLDGFRLDAVKHIKFSFMRDWLGHVRGQTGKNLFAVAEYWKNDLGALENSLSKTNWTMSAFDVPLHYNLYQASNSSGNYDMRNLLNGTLVQRHPSHAVTFVDNHDTQPGEALESFVQGWFKPLAYATILTREQGYPQVFYGDYYGIPSDGVPSYRQQIDPLLKARQQYAYGRQHDYFDHWDVIGWTREGNASHPNSGLATIMSDGPGGSKWMYVGRQKAGEVWHDMTGNRSGTVTINQDGWGHFFVNGGSVSVWVKR

SEQ ID NO: 31498 - protein, 485 aa, Bacillus sp.
HHDGTNGTIMQYFEWNVPNDGQHWNRLHNNAQNLKNAGITAIWIPPAWKGTSQNDVGYGAYDLYDLGEFNQKGTVRTKYGTKAELERAIRSLKANGIQVYGDVVMNHKGGADFTERVQAVEVNPQNRNQEVSGTYQIEAWTGFNFPGRGNQHSSFKWRWYHFDGTDWDQSRQLANRIYKFRGDGKAWDWEVDTENGNYDYLMYADVDMDHPEVINELNRWGVWYANTLNLDGFRLDAVKHIKFSFMRDWLGHVRGQTGKNLFAVAEYWKNDLGALENYLSKTNWTMSAFDVPLHYNLYQASNSSGNYDMRNLLNGTLVQRHPSHAVTFVDNHDTQPGEALESFVQGWFKPLAYATILTREQGYPQVFYGDYYGIPSDGVASYRQQIDPLLKARQQYAYGRQHDYFDHWDVIGWTREGNASHPNSGLATIMSDGPGGSKWMYVGRQKAGEVWHDMTGNRSGTVTINQDGWGHFFVNGGSVSVWVKR

SEQ ID NO: 31499 - protein, 485 aa, Bacillus sp.
HHDGTNGTIMQYFEWNVPNDGQHWNRLHNNAQNLKNAGITAIWIPPAWKGTSQNDVGYGAYDLYDLGEFNQKGTVRTKYGTKAELERAIRSLKANGIQVYGDVVMNHKGGADFTERVQAVEVNPQNRNQEVSGTYQIEAWTGFNFPGRGNQHSSFKWRNYHFDGTDWDQSRQLANRIYKFRGDGKAWDWEVDTENGNYDYLMYADVDMDHPEVINELNRWGVWYANTLNLDGFRLDAVKHIKFSFMRDWLGHVRGQTGKNLFAVAEYWKNDLGALENYLSKTNWTMSAFDVPLHYNLYQASNSSGNYDMRNLLNGTLVQRHPSHAVTFVDNHDTQPGEALESFVQGWFKPLAYATILTREQGYPQVFYGDYYGIPSDGVPSYRQQIDPLLKARQQYAYGRQHDYFDHWDVIGWTREGNASHPNSGLATIMSDGPGGSKWMYVGRQKAGEVWHDMTGNRSGTVTINQDGWGHFFVNGGSVSVWVKR

SEQ ID NO: 31500 - protein, 485 aa, Bacillus sp.
HHDGTNGTIMQYFEWNVPNDGQHWNRLHNNAQNLKNAGITAIWIPPAWKGTSQNDVGYGAYDLYDLGEFNQKGTVRTKYGTKAELERAIRSLKANGIQVYGDVVMNHKGGADFTERVQAVEVNPQNRNQEVSGTYQIEAWTGFNFPGRGNQHSSFKWRWYHFDGTDWDQSRQLANRIYKFRGDGKAWDWEVDTENGNYDYLMYADVDMDHPEVINELNRWGVWYANTLNLDGFRLDAVKHIKFSFMRDWLGHVRGQTGKNLFAVAEYWKNDLGALENYLSKTNWTMSAFDVPLHYNLYQASNSSGNYDMRNLLNGTLVQRHPSHAVTFVDNHDTQPGEALESFVQGWFKPLAYATILTREQGYPQVFYGDYYGIPSDGVPSYRQQIDPLLKARQQYAYGRQHDYVDHWDVIGWTREGNASHPNSGLATIMSDGPGGSKWMYVGRQKAGEVWHDMTGNRSGTVTINQDGWGHFFVNGGSVSVWVKR

SEQ ID NO: 31501 - protein, 485 aa, Bacillus sp.
HHDGTNGTIMQYFEWNVPNDGQHWNRLHNNAQNLKNAGITAIWIPPAWKGTSQNDVGYGAYDLYDLGEWNQKGTVRTKYGTKAELERAIRSLKANGIQVYGDVVMNHKGGADFTERVQAVEVNPQNRNQEVSGTYQIEAWTGFNFPGRGNQHSSFKWRWYHFDGTDWDQSRQLANRIYKFRGDGKAWDWEVDTENGNYDYLMYADVDMDHPEVINELNRWGVWYANTLNLDGFRLDAVKHIKFSFMRDWLGHVRGQTGKNLFAVAEYWKNDLGALENYLSKTNWTMSAFDVPLHYNLYQASNSSGNYDMRNLLNGTLVQRHPSHAVTFVDNHDTQPGEALESFVQGWFKPLAYATILTREQGYPQVFYGDYYGIPSDGVPSYRQQIDPLLKARQQYAYGRQHDYFDHWDVIGWTREGNASHPNSGLATIMSDGPGGSKWMYVGRQKAGEVWHDMTGNRSGTVTINQDGWGHFFVNGGSVSVWVKR

SEQ ID NO: 31502 - protein, 483 aa, Bacillus sp. (in: firmicutes)
HHDGTNGTIMQYFEWNVPNDGQHWNRLHNNAQNLKNAGITAIWIPPAWKGTSQNDVGYGAYDLYDLGEFNQKGTVRTKYGTKAELERAIRSLKANGIQVYGDVVMNHKGGADFTENVQAVEVNPQNRNQEVAGTYDIEAWTGFNFPGRGNQHSSFKWRWYHFDGTDWDQSRQLANRIYKFKGKAWDWEVDTEFGNYDYLMYADVDMDHPEVINELNRWGVWYANTLNLDGFRLDAVKHIKFSFMRDWLGHVRGQTGKNLFAVAEYWKNDLGALENYLSKTNWTMSAFDVPLHYNLYQASNSSGNYDMRNLLNGTLVQRHPSHAVTFVDNHDTQPGEALESFVQGWFKPLAYATILTREQGYPSVFYGDYYGIPSDGVPSYRQQIDPLLKARQQYAYGRQHDYFDHWDVIGWTREGNASHPNSGLATIMSDGPGGSKWMYVGRQKAGEVWHDMTGNRSGTVTINQDGWGHFFVNGGSVSVWVKR

SEQ ID NO: 31503 - protein, 485 aa, Bacillus sp.
HHDGTNGTIMQYFEWNVPNDGQHWNRLHNNAQNLKNAGITAIWIPPAWKGTSQNDVGYGAYDLYDLGEFNQKGTVRTKYGTKAELERAIRSLKANGIQVYGDVVMNHKGGADFTERVQAVEVNPQNRNQEVSGTYQIEAWTGFNFPGRGNQHSSFKWRWYHFDGTDWDQSRQLANWIYKFRGDGKAWDWEVDTENGNYDYLMYADVDMDHPEVINELNRWGVWYANTLNLDGFRLDAVKHIKFSFMRDWLGHVRGQTGKNLFAVAEYWKNDLGALENYLSKTNWTMSAFDVPLHYNLYQASNSSGNYDMRNLLNGTLVQRHPSHAVTFVDNHDTQPGEALESFVQGWFKPLAYATILTREQGYPQVFYGDYYGIPSDGVPSYRQQIDPLLKARQQYAYGRQHDYFDHWDVIGWTREGNASHPNSGLATIMSDGPGGSKWMYVGRQKAGEVWHDMTGNRSGTVTINQDGWGHFFVNGGSVSVWVKR

SEQ ID NO: 31504 - protein, 485 aa, Bacillus sp.
HHDGTNGTIMQYFEWNVPNDGQHWNRLHNNAQNLKNAGITAIWIPPAWKGTSQNDVGYGAYDLYDLGEFNQKGTVRAKYGTKAELERAIRSLKANGIQVYGDVVMNHKGGADFTERVQAVEVNPQNRNQEVSGTYQIEAWTGFNFPGRGNQHSSFKWRWYHFDGTDWDQSRQLANRIYKFRGDGKAWDWEVDTENGNYDYLMYADVDMDHPEVINELNRWGVWYANTLNLDGFRLDAVKHIKFSFMRDWLGHVRGQTGKNLFAVAEYWKNDLGALENYLSKTNWTMSAFDVPLHYNLYQASNSSGNYDMRNLLNGTLVQRHPSHAVTFVDNHDTQPGEALESFVQGWFKPLAYATILTREQGYPQVFYGDYYGIPSDGVPSYRQQIDPLLKARQQYAYGRQHDYFDHWDVIGWTREGNASHPNSGLATIMSDGPGGSKWMYVGRQKAGEVWHDMTGNRSGTVTINQDGWGHFFVNGGSVSVWVKR

SEQ ID NO: 31505 - protein, 485 aa, Bacillus sp.
HHDGTNGTIMQYFEWNVPNDGQHWNRLHNNAQNLKNAGITAIWIPPAWKGTSQNDVGYGAYDLYDLGEFNQKGTVRTKYGTKAELERAIRSLKANGIQVYGDVVMNHKGGADFTERVQAVEVNPQNRNQEVSGTYQIEAWTGFNFPGRGNQHSSFKWRWYHFDGTDWDQSRQLANRIYKFRGDGKAWDWEVDTENGNYDYLMYADVDMDHPEVINELNRWGVWYANTLNLDGFRLDAVKHIGFSFMRDWLGHVRGQTGKNLFAVAEYWKNDLGALENYLSKTNWTMSAFDVPLHYNLYQASNSSGNYDMRNLLNGTLVQRHPSHAVTFVDNHDTQPGEALESFVQGWFKPLAYATILTREQGYPQVFYGDYYGIPSDGVPSYRQQIDPLLKARQQYAYGRQHDYFDHWDVIGWTREGNASHPNSGLATIMSDGPGGSKWMYVGRQKAGEVWHDMTGNRSGTVTINQDGWGHFFVNGGSVSVWVKR

SEQ ID NO: 31506 - protein, 485 aa, Bacillus sp.
HHDGTNGTIMQYFEWNVPNDGQHWNRLHNNAQNLKNAGITAIWIPPAWKGTSQNDVGYGAYDLYDLGEFNQKGTVRTKYGTKAELERAIRSLKANGIQVYGDVVMNHKGGADFTERVQAVEVNPQNRNQEVSGTYQIEAWTGFNFPGRGNQHSSFKWRWYHFDGTDWDQSRQLANRIYKFRGDGKAWDWEVDTENGNYDYLMYADVDMDHPEVINELNRWGVWYANTFNLDGFRLDAVKHIKFSFMRDWLGHVRGQTGKNLFAVAEYWKNDLGALENYLSKTNWTMSAFDVPLHYNLYQASNSSGNYDMRNLLNGTLVQRHPSHAVTFVDNHDTQPGEALESFVQGWFKPLAYATILTREQGYPQVFYGDYYGIPSDGVPSYRQQIDPLLKARQQYAYGRQHDYFDHWDVIGWTREGNASHPNSGLATIMSDGPGGSKWMYVGRQKAGEVWHDMTGNRSGTVTINQDGWGHFFVNGGSVSVWVKR

SEQ ID NO: 31507 - protein, 485 aa, Bacillus sp.
HHDGTNGTIMQYFEWNVPNDGQHWNRLHNNAQNLKNAGITAIWIPPAWKGPSQNDVGYGAYDLYDLGEFNQKGTVRTKYGTKAELERAIRSLKANGIQVYGDVVMNHKGGADFTERVQAVEVNPQNRNQEVSGTYQIEAWTGFNFPGRGNQHSSFKWRWYHFDGTDWDQSRQLANRIYKFRGDGKAWDWEVDTENGNYDYLMYADVDMDHPEVINELNRWGVWYANTLNLDGFRLDAVKHIKFSFMRDWLGHVRGQTGKNLFAVAEYWKNDLGALENYLSKTNWTMSAFDVPLHYNLYQASNSSGNYDMRNLLNGTLVQRHPSHAVTFVDNHDTQPGEALESFVQGWFKPLAYATILTREQGYPQVFYGDYYGIPSDGVPSYRQQIDPLLKARQQYAYGRQHDYFDHWDVIGWTREGNASHPNSGLATIMSDGPGGSKWMYVGRQKAGEVWHDMTGNRSGTVTINQDGWGHFFVNGGSVSVWVKR

SEQ ID NO: 31508 - protein, 485 aa, Bacillus sp.
HHDGTNGTIMQYFEWNVPNDGQHWNRLHNNAQNLKNAGITAIWIPPAWKGTSQNDVGYGAYDLYDLGEFNQKGTVRTKYGTKAELERAIRSLKANGIQVYGDVVMNHKGGADFTERVQAVEVNPQNRNQEVSGTYQIEAWTGFNFPGRGNQHSSFKWRWYHFDGTDWDQSRQLANRIYKFRGDGKAWDWEVDTENGNYDYLMYADVDMDHPEVINELNRWGVWYANTLNLDGFRLDAVKHIKFSFMRDWLGHVRGQTGKNLFAVAEYWKNDLGALENYLSKTNWTMSAFDVPLHYNLYQASNSSGNYDMRNLLNGTLVQRHPSHAVTFVDNHDTQPGEALESFVQGWFKPLAYATILTREQGYPQVFYGDYYGIPSDGVPSYRQQIDPLLKARQQYAYGRQHDYFDHWDVIGWTREGNASHPNSGLATIMSDGPGGSKWMYVGRQKASEVWHDMTGNRSGTVTINQDGWGHFFVNGGSVSVWVKR

SEQ ID NO: 31509 - protein, 485 aa, Bacillus sp.
HHDGTNGTIMQYFEWNVPNDGQHWNRLHNNAQNLKNAGITAIWIPPAWKGTSQNDVGYGAYDLYDLGEFNQKGTVRTKYGTKAELERAIRSLKANGIQVYGDVVMNHKGGADFTERVQAVEVNPQNRNQEVSGTYQIEAWTGFNFPGRGNQHSSFKWRWYHFDGTDWDQSRQLANRIYKFRGDGKAWDWEVDTENGNYDYLMYADVDMDHPEVINELNRWGVWYANTLNLDGFRLDAVKHIKFSFMRDWLGHVRGQTGKNLFAVAEYWKNDLGALENYLSKTNWTMSAFDVPLHYNLYQASNSSGNYDMRNLLNITLVQRHPSHAVTFVDNHDTQPGEALESFVQGWFKPLAYATILTREQGYPQVFYGDYYGIPSDGVPSYRQQIDPLLKARQQYAYGRQHDYFDHWDVIGWTREGNASHPNSGLATIMSDGPGGSKWMYVGRQKAGEVWHDMTGNRSGTVTINQDGWGHFFVNGGSVSVWVKR

SEQ ID NO: 31510 - protein, 485 aa, Bacillus sp.
HHDGTNGTIMQYFEWNVPNDGQHWNRLHNNAQNLKNAGITAIWIPPAWKGTSQNDVGYGAYDLYDLGEFNQKGTVRTKYGTKAELERAIRSLKANGIQVYGDVVMNHKGGADFTERVQAVEVNPQNRNQEVSGTYQIEAWTGFNFPGRGNQHSSFKWRWYHFDGTDWDQSRQLANRIYKFRGDGKAWDWEVDTENGNYDYLMYADVDMDHPEVINELNRWGVWYANTLNLDGFRLDAVKHIKFSFMRDWLGHVRGQTGKNLFAVAEYWKNDLGALENYLSKTNWTMSAFDVPLHYNLYQASNSSGNYDMRNLLNGTLVQRHPSHAVTFVDNHDTQPGEALMSFVQGWFKPLAYATILTREQGYPQVFYGDYYGIPSDGVPSYRQQIDPLLKARQQYAYGRQHDYFDHWDVIGWTREGNASHPNSGLATIMSDGPGGSKWMYVGRQKAGEVWHDMTGNRSGTVTINQDGWGHFFVNGGSVSVWVKR

SEQ ID NO: 31511 - protein, 485 aa, Bacillus sp.
HHDGTNGTIMQYFEWNVPNDGQHWNRLHNNAQNLKNAGITAIWIPPAWKGTSQNDVGYGAYDLYDLGEFNQKGTVRTKYGTKAELERAIRSLKANGIQVYGDVVMNHKGGADFTERVQAVEVNPQNRNQEVSGTYQIEAWTGFNFPGRGNQHSSFKWRWYHFDGTDWDQSRQLANRIYKFRGDGKAWDWEVDTENGNYDYLMYADVDMDHPEVINELNRWGVWYANTLNLDGFRLDAVKHIKFSFMRDWLGHVRGQTGKNLFAVAEYWKNDLGALENYLSKTNWTMSAFDVPLHYNLYQASNSSGNYDMRNLLNGTLVQRHPSHAVTFVDNHDTQPVEALESFVQGWFKPLAYATILTREQGYPQVFYGDYYGIPSDGVPSYRQQIDPLLKARQQYAYGRQHDYFDHWDVIGWTREGNASHPNSGLATIMSDGPGGSKWMYVGRQKAGEVWHDMTGNRSGTVTINQDGWGHFFVNGGSVSVWVKR

SEQ ID NO: 31512 - protein, 483 aa, Bacillus sp. (in: firmicutes)
HHDGTNGTIMQYFEWNVPNDGQHWNRLHNNAQNLKNAGITAIWIPPAWKGTSQNDVGYGAYDLYDLGEFNQKGTVRTKYGTKAELERAIRSLKANGIQVYGDVVMNHKGGADFTERVQAVEVNPQNRNQEVSGTYQIEAWTGFNFPGRGNQHSSFKWRWYHFDGTDWDQSRQLANRIYKFRGKAWDWEVDTENGNYDYLMYADVDMDHPEVINELNRWGVWYANTLNLDGFRLDAVKHIKFSFMRDWLGHVRGQTGKNLFAIAEFWKNDLGALENYLSKTNWTMSAFDVPLHYNLYQASNSSGNYDMRNLLNGTLVQRHPSHAVTLVDNHDTQPGEALESFVQGWFKPLAYATILTREQGYPKVFYGDYYGIPSDGVPSYRQQIDPLLKARQQYAYGRQHDYFDHWDVIGWTREGNASHPNSGLATIMSDGPGGSKWMYVGRQKAGEVWHDMTGNRSGTVTINQDGWGHFFVNGGSVSVWVKR

SEQ ID NO: 31513 - protein, 485 aa, Bacillus sp.
HHDGTNGTIMQYFEWNVPNDGQHWNRLHNNAQNLKNAGITAIWIPPAWKGTSQNDVGYGAYDLYDLGEFNQKGTVRTKYGTKAELERAIRSLKANGIQVYGDVVMNHKGGADFTERVQAVEVNPQNRNQEVSGTYQIEAWTGLNFPGRGNQHSSFKWRWYHFDGTDWDQSRQLANRIYKFRGDGKAWDWEVDTENGNYDYLMYADVDMDHPEVINELNRWGVWYANTLNLDGFRLDAVKHIKFSFMRDWLGHVRGQTGKNLFAVAEYWKNDLGALENYLSKTNWTMSAFDVPLHYNLYQASNSSGNYDMRNLLNGTLVQRHPSHAVTFVDNHDTQPGEALESFVQGWFKPLAYATILTREQGYPQVFYGDYYGIPSDGVPSYRQQIDPLLKARQQYAYGRQHDYFDHWDVIGWTREGNASHPNSGLATIMSDGPGGSKWMYVGRQKAGEVWHDMTGNRSGTVTINQDGWGHFFVNGGSVSVWVKR

SEQ ID NO: 31514 - protein, 485 aa, Bacillus sp.
HHDGTNGTIMQYFEWNVPNDGQHWNRLHNNAQNLKNAGITAIWIPPAWKGTSQNDVGYGAYDLYDLGEFNQKGTVRTKYGTKAELERAIRSLKANGIQVYGDVVMNHKGGADFTERVQAVEVNPQNRNQEVSGTYQIEAWTGFNFPGRGNQHSSFKWRWYHFDGTDWDQSRQLANRIYKFRGDGKAWDWEVDTENGNYDYLMYADVDMDHPEVINELNRWGVWYANTLNLDGFRLDAVKHIKFSFMRDWLGHVRGQTGKNLFAVAEYWKNDLGALENYLSKTNWTMSAFDVPLHYNLYQASNSSGNYDMRNLLFGTLVQRHPSHAVTFVDNHDTQPGEALESFVQGWFKPLAYATILTREQGYPQVFYGDYYGIPSDGVPSYRQQIDPLLKARQQYAYGRQHDYFDHWDVIGWTREGNASHPNSGLATIMSDGPGGSKWMYVGRQKAGEVWHDMTGNRSGTVTINQDGWGHFFVNGGSVSVWVKR

SEQ ID NO: 31515 - protein, 485 aa, Bacillus sp.
HHDGTNGTIMQYYEWNVPNDGQHWNRLHNNAQNLKNAGITAIWIPPAWKGTSQNDVGYGAYDLYDLGEFNQKGTVRTKYGTKAELERAIRSLKANGIQVYGDVVMNHKGGADFTERVQAVEVNPQNRNQEVSGTYQIEAWTGFNFPGRGNQHSSFKWRWYHFDGTDWDQSRQLANRIYKFRGDGKAWDWEVDTENGNYDYLMYADVDMDHPEVINELNRWGVWYANTLNLDGFRLDAVKHIKFSFMRDWLGHVRGQTGKNLFAVAEYWKNDLGALENYLSKTNWTMSAFDVPLHYNLYQASNSSGNYDMRNLLNGTLVQRHPSHAVTFVDNHDTQPGEALESFVQGWFKPLAYATILTREQGYPQVFYGDYYGIPSDGVPSYRQQIDPLLKARQQYAYGRQHDYFDHWDVIGWTREGNASHPNSGLATIMSDGPGGSKWMYVGRQKAGEVWHDMTGNRSGTVTINQDGWGHFFVNGGSVSVWVKR

SEQ ID NO: 31516 - protein, 485 aa, Bacillus sp.
HHDGTNGTIMQYFEWNVPNDGQHWNRLHNNAQNLKNAGITAIWIPPAWKGTSQNDVGYGAYDLYDLGEFNQKGTVRTKYGTKAELERAIRSLKANGIQVYGDVVMNHKGGADFTERVQAVEVNPQNRNQEVSGTYQIEAWTGFNFPGRGNQHSSFKWRWYHFDGTDWDQSRQLANRIYKFRGDGKAWDWEVDTENGNYDYLMYADVDMDHPEVINELNRWGVWYANTLSLDGFRLDAVKHIKFSFMRDWLGHVRGQTGKNLFAVAEYWKNDLGALENYLSKTNWTMSAFDVPLHYNLYQASNSSGNYDMRNLLNGTLVQRHPSHAVTFVDNHDTQPGEALESFVQGWFKPLAYATILTREQGYPQVFYGDYYGIPSDGVPSYRQQIDPLLKARQQYAYGRQHDYFDHWDVIGWTREGNASHPNSGLATIMSDGPGGSKWMYVGRQKAGEVWHDMTGNRSGTVTINQDGWGHFFVNGGSVSVWVKR

SEQ ID NO: 31517 - protein, 485 aa, Bacillus sp.
HHDGTNGTIMQYFEWNVPNDGQHWNRLHNNAQNLKNAGITAIWIPPAWKGTSQNDVGYGAYDLYDLGEFNQKGTVRTKYGTKAELERAIRSLKANGIQVYGDVVMNHKGGADFTERVQAVEVNPQNRNQEVSGTYQIEAWTGFNFPGRGNQHSSFKWRWYHFDGTDWDQSRQLANRIYKFRGDGKAWDWEVDTENGNYDYLMYADVDMDHPEVINELNRWGVWYANTLNLDGFRLDAVKHIKFSFMRDWLGHVRGQTGKNLFAVAEYWKNDLGALENYLSKTNWTMSAFDVPLHYNLYQASNSSGNYDMRNLLNGTLVQRHPSHAVTFVDNHDTQPGEALESFVQGWFKPLAYATILTREQGYPQVFYGDYYGIPSDGVPSYRQQIDPLLKARQQYAYGRQHDYFDHWDVIGWTLEGNASHPNSGLATIMSDGPGGSKWMYVGRQKAGEVWHDMTGNRSGTVTINQDGWGHFFVNGGSVSVWVKR

SEQ ID NO: 31518 - protein, 485 aa, Bacillus sp.
HHDGTNGTIMQYFEWNVPNDGQHWNRLHNNAQNLKNAGITAIWIPPAWKGTSQNDVGYGAYDLCDLGEFNQKGTVRTKYGTKAELERAIRSLKANGIQVYGDVVMNHKGGADFTERVQAVEVNPQNRNQEVSGTYQIEAWTGFNFPGRGNQHSSFKWRWYHFDGTDWDQSRQLANRIYKFRGDGKAWDWEVDTENGNYDYLMYADVDMDHPEVINELNRWGVWYANTLNLDGFRLDAVKHIKFSFMRDWLGHVRGQTGKNLFAVAEYWKNDLGALENYLSKTNWTMSAFDVPLHYNLYQASNSSGNYDMRNLLNGTLVQRHPSHAVTFVDNHDTQPGEALESFVQGWFKPLAYATILTREQGYPQVFYGDYYGIPSDGVPSYRQQIDPLLKARQQYAYGRQHDYFDHWDVIGWTREGNASHPNSGLATIMSDGPGGSKWMYVGRQKAGEVWHDMTGNRSGTVTINQDGWGHFFVNGGSVSVWVKR

SEQ ID NO: 31519 - protein, 485 aa, Bacillus sp.
HHDGTNGTIMQYFEWNVPNDGQHWNRLHNNAQNLKNAGITAIWIPPAWKGTSQNDVGYGAYDLYDLGEFNQKGTVRTKYGTKAELERAIRSLKANGIQVYGDVVMNHKGGADFTERVQAVEVNPQNRNQEVSGTYQIEAWTGFNFPGRGNQHSSFKWRWYHFDGTDWDQSRQLANRIYKFSGDGKAWDWEVDTENGNYDYLMYADVDMDHPEVINELNRWGVWYANTLNLDGFRLDAVKHIKFSFMRDWLGHVRGQTGKNLFAVAEYWKNDLGALENYLSKTNWTMSAFDVPLHYNLYQASNSSGNYDMRNLLNGTLVQRHPSHAVTFVDNHDTQPGEALESFVQGWFKPLAYATILTREQGYPQVFYGDYYGIPSDGVPSYRQQIDPLLKARQQYAYGRQHDYFDHWDVIGWTREGNASHPNSGLATIMSDGPGGSKWMYVGRQKAGEVWHDMTGNRSGTVTINQDGWGHFFVNGGSVSVWVKR

SEQ ID NO: 31520 - protein, 485 aa, Bacillus sp.
HHDGTNGTIMQYFEWNVPNDGQHWNRLHNNAQNLKNAGITAIWIPPAWKGTSQNDVGYGAYDLYDLGEFNQKGTVRTKYGTKAELERAIRSLKANGIQVYGDVVMNHKGGADFTERVQAVEVNPQNRNQEVSGTYQIEAWTGFNFPGRGNQHSSFKWRWYHFDGTDWDQSRQLANRIYKFRGDGKAWDWEVDTENGNYDYLMYADVDMDHPEVINELNRWGVWYANTLNLDGFRLDAVKHIKFSFMRDWLGHVRGQTGKNLFAVAEYWKNDLGALENYLSKTNWTMSAFDVPLHYNLYQASNSSGNYDMRNLLNGTLVQRHPSHAVTFVDNHDTQPGEALESFLQGWFKPLAYATILTREQGYPQVFYGDYYGIPSDGVPSYRQQIDPLLKARQQYAYGRQHDYFDHWDVIGWTREGNASHPNSGLATIMSDGPGGSKWMYVGRQKAGEVWHDMTGNRSGTVTINQDGWGHFFVNGGSVSVWVKR

SEQ ID NO: 31521 - protein, 483 aa, Bacillus sp. (in: firmicutes)
HHDGTNGTIMQYFEWNVPNDGQHWNRLHNNAQNLKNAGITAIWIPPAWKGTSQNDVGYGAYDLYDLGEFNQKGTVRTKYGTKAELERAIRSLKANGIQVYGDVVMNHKGGADFTERVQAVEVNPQNRNQEVSGTYQIEAWTGFNFPGRGNQHSSFKWRWYHFDGTDWDQSRQLANRIYKFRGKAWDWEVDTENGNYDYLMYADVDMDHPEVINELNRWGVWYANTLNLDGFRLDAVKHIKFSFMRDWLGHVRGQTGKNLFAIGEFWKNDLGALENYLSKTNWTMSAFDVPLHYNLYQASNSSGNYDMRNLLNGTLVQRHPSHAVTLVDNHDTQPGEALESFVQGWFKPLAYATILTREQGYPSVFYGDYYGIPSDGVPSYRQQIDPLLKARQKYAYGRQHDYFDHWDVIGWTREGNASHPNSGLATIMSDGPGGSKWMYVGRQKAGEVWHDMTGNRSGTVTINQDGWGHFFVNGGSVSVWVKR

SEQ ID NO: 31522 - protein, 485 aa, Bacillus sp.
HHDGTNGTIMQYFEWNVPNDGQHWNRLHNNAQNLKNAGITAIWIPPAWKGTSQNDVGYGAYDLYDLGEFNQKGTVRTKYGTKAELERAIRSLKANGIQVYGDVVMNHKGGADFTERVQAVEVNPQNRNQEVSGTYQIEAWTGFNFPGRGNQHSSFKWRWYHFDGTDWDQSRQLANRIYKFRGDGKAWDWEVDTENGNYDYLMYHDVDMDHPEVINELNRWGVWYANTLNLDGFRLDAVKHIKFSFMRDWLGHVRGQTGKNLFAVAEYWKNDLGALENYLSKTNWTMSAFDVPLHYNLYQASNSSGNYDMRNLLNGTLVQRHPSHAVTFVDNHDTQPGEALESFVQGWFKPLAYATILTREQGYPQVFYGDYYGIPSDGVPSYRQQIDPLLKARQQYAYGRQHDYFDHWDVIGWTREGNASHPNSGLATIMSDGPGGSKWMYVGRQKAGEVWHDMTGNRSGTVTINQDGWGHFFVNGGSVSVWVKR

SEQ ID NO: 31523 - protein, 485 aa, Bacillus sp.
HHDGTNGTIMQYFEWNVPNDGQHWNRLHNNAQNLKNAGITAIWIPPAWKGTSQNDVGYGAYDLYDLGEFNQKGTVRTKYGTKAELERAIRSLKANGIQVYGDVVMNHKGGADFTERVQAVEVNPQNRNQEVSGTYQIEAWTGFNFPGRGNQHSSFKWRWYHFDGTDWDQSRQLANRIYKFRGDGKAWDWEVDTENGNYDYLMYADVDMDHPEVINELNDWGVWYANTLNLDGFRLDAVKHIKFSFMRDWLGHVRGQTGKNLFAVAEYWKNDLGALENYLSKTNWTMSAFDVPLHYNLYQASNSSGNYDMRNLLNGTLVQRHPSHAVTFVDNHDTQPGEALESFVQGWFKPLAYATILTREQGYPQVFYGDYYGIPSDGVPSYRQQIDPLLKARQQYAYGRQHDYFDHWDVIGWTREGNASHPNSGLATIMSDGPGGSKWMYVGRQKAGEVWHDMTGNRSGTVTINQDGWGHFFVNGGSVSVWVKR

SEQ ID NO: 31524 - protein, 483 aa, Bacillus sp. (in: firmicutes)
HHDGTNGTIMQYFEWNVPNDGQHWNRLHNNAQNLKNAGITAIWIPPAWKGTSQNDVGYGAYDLYDLGEFNQKGTVRTKYGTKAELERAIRSLKANGIQVYGDVVMNHKGGADFTERVQAVEVNPQNRNQEVSGTYQIEAWTGFNFPGRGNQHSSFKWRWYHFDGTDWDQSRQLANRIYKFRGKAWDWEVDTENGNYDYLMYADVDMDHPEVINELNRWGVWYANTLNLDGFRLDAVKHIKFSFMRDWLGHVRGQTGKNLFAIGEFWKNDLGALENYLSKTNWTMSAFDVPLHYNLYQASNSSGNYDMRNLLNGTLVQRHPSHAVTLVDNHDTQPGEALESFVQGWFKPLAYATILTREQGYPSVFYGDYYGIPSDGVPSYRQQIDPLLKARQQYAYGRQHDYFDHWDVIGWTREGNASHPNSGLATIMSDGPGGSKWMYVGRQKAGEVWHDMTGNRSGTVTINQDGWGHFFVNGGSVSVWVKR

SEQ ID NO: 31525 - protein, 485 aa, Bacillus sp.
HHDGTNGTIMQYFEWNVPNDGQHWNRLHNNAQNLKNAGITAIWIPPAWKGTSQNDVGYGAYDLYDLGEFNQKGTVRTKYGTKAELERAIRSLKANGIQVYGDVVMNHKGGADFTERVQAVEVNPQNFNQEVSGTYQIEAWTGFNFPGRGNQHSSFKWRWYHFDGTDWDQSRQLANRIYKFRGDGKAWDWEVDTENGNYDYLMYADVDMDHPEVINELNRWGVWYANTLNLDGFRLDAVKHIKFSFMRDWLGHVRGQTGKNLFAVAEYWKNDLGALENYLSKTNWTMSAFDVPLHYNLYQASNSSGNYDMRNLLNGTLVQRHPSHAVTFVDNHDTQPGEALESFVQGWFKPLAYATILTREQGYPQVFYGDYYGIPSDGVPSYRQQIDPLLKARQQYAYGRQHDYFDHWDVIGWTREGNASHPNSGLATIMSDGPGGSKWMYVGRQKAGEVWHDMTGNRSGTVTINQDGWGHFFVNGGSVSVWVKR

SEQ ID NO: 31526 - protein, 483 aa, Bacillus sp. (in: firmicutes)
HHDGTNGTIMQYFEWNVPNDGQHWNRLHNNAQNLKNAGITAIWIPPAYKGTSQNDVGYGAYDLYDLGEFNQKGTVRTKYGTKAELERAIRSLKANGIQVYGDVVMNHKGGADFTERVQAVEVNPQNRNQEVSGTYQIEAWTGFNFPGRGNQHSSFKWRWYHFDGTDWDQSRQLANRIYKFRGKAWDWEVDTENGNYDYLMYADVDMDHPEVINELNRWGVWYANTLNLDGFRLDAVKHIKFSFMRDWLGHVRGQTGKNLFAVAEYWKNDLGALENYLSKTNWTMSAFDVPLHYNLYQASNSSGNYDMRNLLNGTLVQRHPSHAVTFVDNHDTQPGEALESFVQGWFKPLAYATILTREQGYPQVFYGDYYGIPSDGVPSYRQQIDPLLKARQQYAYGRQHDYFDHWDVIGWTREGNASHPNSGLATIMSDGPGGSKWMYVGRQKAGEVWHDMTGNRSGTVTINQDGWGHFFVNGGSVSVWVKR

SEQ ID NO: 31527 - protein, 485 aa, Bacillus sp.
HHDGTNGTIMQYFEWNVPNDGQHWNRLHNNAQNLKNAGITAIWIPPAWKGTSQNDVGYGAYDLYDLGEFNQKGTVRTKYGTKAELERAIRSLKANGIQVYGDVVMNHKGGADFTERVQAVEVNPQNRNQEVSGTYQIEAWTGFNFPGRGNQHSSFKWEWYHFDGTDWDQSRQLANRIYKFRGDGKAWDWEVDTENGNYDYLMYADVDMDHPEVINELNRWGVWYANTLNLDGFRLDAVKHIKFSFMRDWLGHVRGQTGKNLFAVAEYWKNDLGALENYLSKTNWTMSAFDVPLHYNLYQASNSSGNYDMRNLLNGTLVQRHPSHAVTFVDNHDTQPGEALESFVQGWFKPLAYATILTREQGYPQVFYGDYYGIPSDGVPSYRQQIDPLLKARQQYAYGRQHDYFDHWDVIGWTREGNASHPNSGLATIMSDGPGGSKWMYVGRQKAGEVWHDMTGNRSGTVTINQDGWGHFFVNGGSVSVWVKR

SEQ ID NO: 31528 - protein, 485 aa, Bacillus sp.
HHDGTNGTIMQYFEWNVPNDGQHWNRLHNNAQNLKNAGITAIWIPPAWKGTSQNDVGYGAYDLYDLGEFNQKGTVRTKYGTKAELERAIRSLKANGIQVYGDVVMNHKGGADFTERVQAVEVNPQNRNQEVSGTYQIEAWTGFNFPGRGNQHSSFKWRWYHFDGTDWDQSRQLANRIYKFRGDGKAWDWEVDTENGNYDYLMYADVDMDHPEVINELNRWGVWYANTLNLDGFRLDAVKHIKFSFMRDWLGHVRGQTGKNLFAVAEYWKNDLGALENYLSKTNWTMSAFDVPLHSNLYQASNSSGNYDMRNLLNGTLVQRHPSHAVTFVDNHDTQPGEALESFVQGWFKPLAYATILTREQGYPQVFYGDYYGIPSDGVPSYRQQIDPLLKARQQYAYGRQHDYFDHWDVIGWTREGNASHPNSGLATIMSDGPGGSKWMYVGRQKAGEVWHDMTGNRSGTVTINQDGWGHFFVNGGSVSVWVKR

SEQ ID NO: 31529 - protein, 485 aa, Bacillus sp.
HHDGTNGTIMQYFEWNVPNDGQHWNRLHNNAQNLKNAGITAIWIPPAWKGTSQNDVGYGAYDLYDLGEFNQKGTVRTKYGTKAELERAIRSLKANGIQVYGDVVMNHKGGADFTERVQAVEVNPQNRNQEVSGTMQIEAWTGFNFPGRGNQHSSFKWRWYHFDGTDWDQSRQLANRIYKFRGDGKAWDWEVDTENGNYDYLMYADVDMDHPEVINELNRWGVWYANTLNLDGFRLDAVKHIKFSFMRDWLGHVRGQTGKNLFAVAEYWKNDLGALENYLSKTNWTMSAFDVPLHYNLYQASNSSGNYDMRNLLNGTLVQRHPSHAVTFVDNHDTQPGEALESFVQGWFKPLAYATILTREQGYPQVFYGDYYGIPSDGVPSYRQQIDPLLKARQQYAYGRQHDYFDHWDVIGWTREGNASHPNSGLATIMSDGPGGSKWMYVGRQKAGEVWHDMTGNRSGTVTINQDGWGHFFVNGGSVSVWVKR

SEQ ID NO: 31530 - protein, 485 aa, Bacillus sp.
HHDGTNGTIMQYFEWNVPNDGQHWNRLHNNAQNLKNAGITAIWIPPAWKGTSQNDVGYGAYDLYDLGEFNQKGTVRTKYGTKAELERAIRSLKANGIQVYGDVVMNHKGGADFTERVQAVEVNPQNRNQEVSGTYQIEAWTGFNFPGRGNQHSSFKWRWYHFDGTDWDQSRQLANRIYKFRGDGKAWDWEVDTENGNYDYLMYADVDMDHPEVINELNRWGVWYANTLNLDGFRLDAVKHIKFSFMRDWLGHVRGQTGKNLFAVAEYWKNDLGALENYLSKTNWTMSAFDVPLHYNLYQASNSSGNYDMRNLLNGTLVQRHPSHAVTFVDNHDTQPGEALESFVQGWFKPLAYATILTREQGYPQVFYGDYYGIPSDGVPSYRQQIDPLLKARQQYAYGRQHDYGDHWDVIGWTREGNASHPNSGLATIMSDGPGGSKWMYVGRQKAGEVWHDMTGNRSGTVTINQDGWGHFFVNGGSVSVWVKR

SEQ ID NO: 31531 - protein, 485 aa, Bacillus sp.
HHDGTNGTIMQYFEWNVPNDGQHWNRLHNNAQNLKNAGITAIWIPPAWKGTSQNDVGYGAYDLYDLGEFNQKGTVRTKYGTKAELERAIRSLKANGIQVYGDVVMNHKGGADFTERVQAVEVNPQNRNQEVSGTYQIEAWTGFNFPGRGNQHSSFKWRWYHFDGTDWDQSRQLANRIYKFRGDGKAWDWEVDTENGNYDYLMYADVDMDHPEVINELNRWGVWYANTLNLDGPRLDAVKHIKFSFMRDWLGHVRGQTGKNLFAVAEYWKNDLGALENYLSKTNWTMSAFDVPLHYNLYQASNSSGNYDMRNLLNGTLVQRHPSHAVTFVDNHDTQPGEALESFVQGWFKPLAYATILTREQGYPQVFYGDYYGIPSDGVPSYRQQIDPLLKARQQYAYGRQHDYFDHWDVIGWTREGNASHPNSGLATIMSDGPGGSKWMYVGRQKAGEVWHDMTGNRSGTVTINQDGWGHFFVNGGSVSVWVKR

SEQ ID NO: 31532 - protein, 485 aa, Bacillus sp.
HHDGTNGTIMQYFEWNVPNDGQHWNRLHNNAQNLKNAGITAIWIPPAWKGTSQNDVGYGAYDLYDLGEFNQKGTVRTKYGTKAELERAIRSLKANGIQVYGDVVMNHKGGADFTERVQAVEVNPQNRNQEVSGTYQIEAWTGFNFPGRGNQHSSFKWRWYHFDGTDWDQSRQLANRIYKFRGDGKAWDWEVDTENGNYDYLMYADVDMDHPEVINELNRWGVWYANTLNLDGFRLDAVKHIKFSFMRDWLGHVRGQTGKNLFAVAEYWKNDLGALENYLSKTNWTMSAFDVPLHYNLYQASNSSGNYDMRNLLNGTLVQRHPSHAVTFVDNHDTQPGEALESFVQGWFKPLAYATILTREQGYPQVFYGDYYGIPSDGVPSYRQQIDPLLKARQQYAYGRQHDYFDHWDVIGWTREGNASHPNSGLATIMSDGPGGSKWMYVGRQKAGEVWHDMTGNRSGTVTINQDGWGHFFVNGQSVSVWVKR

SEQ ID NO: 31533 - protein, 485 aa, Bacillus sp.
HHDGTNGTIMQYFEWNVPNDGQHWNRLHNNAQNLKNAGITAIWIPPAWKGTSQNDVGYEAYDLYDLGEFNQKGTVRTKYGTKAELERAIRSLKANGIQVYGDVVMNHKGGADFTERVQAVEVNPQNRNQEVSGTYQIEAWTGFNFPGRGNQHSSFKWRWYHFDGTDWDQSRQLANRIYKFRGDGKAWDWEVDTENGNYDYLMYADVDMDHPEVINELNRWGVWYANTLNLDGFRLDAVKHIKFSFMRDWLGHVRGQTGKNLFAVAEYWKNDLGALENYLSKTNWTMSAFDVPLHYNLYQASNSSGNYDMRNLLNGTLVQRHPSHAVTFVDNHDTQPGEALESFVQGWFKPLAYATILTREQGYPQVFYGDYYGIPSDGVPSYRQQIDPLLKARQQYAYGRQHDYFDHWDVIGWTREGNASHPNSGLATIMSDGPGGSKWMYVGRQKAGEVWHDMTGNRSGTVTINQDGWGHFFVNGGSVSVWVKR

SEQ ID NO: 31534 - protein, 485 aa, Bacillus sp.
HHDGTNGTIMQYFEWNVPNDGQHWNRLHNNAQNLKNAGITAIWIPPAWKGTSQNDVGYGAYDLYDLGEFNQKGTVRTKYGTKAELERAIRSLKANGIQVYGDVVMNHKGGADFTERVQAVEVNPQNRNQEVSGTYQIEAWTGFNFPGRGNQHSSFKWRWYHFDGTDWDQSRQLANRIYKFRGDGKAWDWEVDTENGNYDYLMYARVDMDHPEVINELNRWGVWYANTLNLDGFRLDAVKHIKFSFMRDWLGHVRGQTGKNLFAVAEYWKNDLGALENYLSKTNWTMSAFDVPLHYNLYQASNSSGNYDMRNLLNGTLVQRHPSHAVTFVDNHDTQPGEALESFVQGWFKPLAYATILTREQGYPQVFYGDYYGIPSDGVPSYRQQIDPLLKARQQYAYGRQHDYFDHWDVIGWTREGNASHPNSGLATIMSDGPGGSKWMYVGRQKAGEVWHDMTGNRSGTVTINQDGWGHFFVNGGSVSVWVKR

SEQ ID NO: 31535 - protein, 485 aa, Bacillus sp.
HHDGTNGTIMQYFEWNVPNDGQHWNRLHNNAQNLKNAGITAIWIPPAWKGTSQNDVGYGAYDLYDLGEFNQKGTVRTKYGTKAELERAIRSLKANGIQVYGDVVMNHKGGADFTERVQAVEVNPQNRNQEVSRTYQIEAWTGFNFPGRGNQHSSFKWRWYHFDGTDWDQSRQLANRIYKFRGDGKAWDWEVDTENGNYDYLMYADVDMDHPEVINELNRWGVWYANTLNLDGFRLDAVKHIKFSFMRDWLGHVRGQTGKNLFAVAEYWKNDLGALENYLSKTNWTMSAFDVPLHYNLYQASNSSGNYDMRNLLNGTLVQRHPSHAVTFVDNHDTQPGEALESFVQGWFKPLAYATILTREQGYPQVFYGDYYGIPSDGVPSYRQQIDPLLKARQQYAYGRQHDYFDHWDVIGWTREGNASHPNSGLATIMSDGPGGSKWMYVGRQKAGEVWHDMTGNRSGTVTINQDGWGHFFVNGGSVSVWVKR

SEQ ID NO: 31536 - protein, 485 aa, Bacillus sp.
HHDGTNGTIMQYFEWNVPNDGQHWNRLHNNAQNLKNAGITAIWIPPAWKGTSQNDVGYGAYDLYDLGEFNQKGTVRTKYGTKAELERAIRSLKANGIQVYGDVVMNHKGGADFTERVQAVEVNPQNRNQEVSGTYQIEAWTGFNFPGRGNQHSSFKWRWYHFDGTDWDQSRQLANRIYKFRGDGKAWDWEVDTENGNYDYLMYADVDMDHPEVINELNRWGVWYANTLNLDGFRLDAVKHIKFSFMRDWLGHVRGQTGKNLLAVAEYWKNDLGALENYLSKTNWTMSAFDVPLHYNLYQASNSSGNYDMRNLLNGTLVQRHPSHAVTFVDNHDTQPGEALESFVQGWFKPLAYATILTREQGYPQVFYGDYYGIPSDGVPSYRQQIDPLLKARQQYAYGRQHDYFDHWDVIGWTREGNASHPNSGLATIMSDGPGGSKWMYVGRQKAGEVWHDMTGNRSGTVTINQDGWGHFFVNGGSVSVWVKR

SEQ ID NO: 31537 - protein, 483 aa, Bacillus sp. (in: firmicutes)
HHDGTNGTIMQYFEWNVPNDGQHWNRLHNNAQNLKNAGITAIWIPPAWKGTSQNDVGYGAYDLYDLGEFNQKGTVRTKYGTKAELERAIRSLKANGIQVYGDVVMNHKGGADFTERVQAVEVNPQNRNQEVSGTYQIEAWTGFNFPGRGNQHSSFKWRWYHFDGTDWDQSHQLANRIYKFRGKAWDWEVDTENGNYDYLMYADVDMDHPEVINELNRWGVWYANTLNLDGFRLDAVKHIKFSFMRDWLGHVRGQTGKNLFAVAEYWKNDLGALENYLSKTNWTMSAFDVPLHYNLYQASHSSGNYDMRNLLNGTLVQRHPSHAVTFVDNHDTQPGEALESFVQGWFKPLAYATILTREQGYPSVFYGDYYGIPSDGVPSYRQQIDPLLKARQQYAYGRQHDYFDHWDVIGWTREGNASHPNSGLATIMSDGPGGSKWMYVGRQKAGEVWHDMTGNRSGTVTINQDGWGHFFVNGGSVSVWVKR

SEQ ID NO: 31538 - protein, 485 aa, Bacillus sp.
HHDGTNGTIMQYFEWNVPNDGQHWNRLHNNAQNLKNAGITAIWIPPAWKGTSQNDVGYGAYDLYDLGVFNQKGTVRTKYGTKAELERAIRSLKANGIQVYGDVVMNHKGGADFTERVQAVEVNPQNRNQEVSGTYQIEAWTGFNFPGRGNQHSSFKWRWYHFDGTDWDQSRQLANRIYKFRGDGKAWDWEVDTENGNYDYLMYADVDMDHPEVINELNRWGVWYANTLNLDGFRLDAVKHIKFSFMRDWLGHVRGQTGKNLFAVAEYWKNDLGALENYLSKTNWTMSAFDVPLHYNLYQASNSSGNYDMRNLLNGTLVQRHPSHAVTFVDNHDTQPGEALESFVQGWFKPLAYATILTREQGYPQVFYGDYYGIPSDGVPSYRQQIDPLLKARQQYAYGRQHDYFDHWDVIGWTREGNASHPNSGLATIMSDGPGGSKWMYVGRQKAGEVWHDMTGNRSGTVTINQDGWGHFFVNGGSVSVWVKR

SEQ ID NO: 31539 - protein, 485 aa, Bacillus sp.
HHDGTNGTIMQYFEWNVPNDGQHWNRLHNNAQNLKNAGITAIWIPPAWKGTSQNDVGYGAYDLYDLGEFNQKGTVRTKYGTKAELERAIRSLKANGIQVYGDVVMNHKGGADFTERVQAVEVNPQNRNQEVSGTYQIEAWTGFNFPGRGNQHGSFKWRWYHFDGTDWDQSRQLANRIYKFRGDGKAWDWEVDTENGNYDYLMYADVDMDHPEVINELNRWGVWYANTLNLDGFRLDAVKHIKFSFMRDWLGHVRGQTGKNLFAVAEYWKNDLGALENYLSKTNWTMSAFDVPLHYNLYQASNSSGNYDMRNLLNGTLVQRHPSHAVTFVDNHDTQPGEALESFVQGWFKPLAYATILTREQGYPQVFYGDYYGIPSDGVPSYRQQIDPLLKARQQYAYGRQHDYFDHWDVIGWTREGNASHPNSGLATIMSDGPGGSKWMYVGRQKAGEVWHDMTGNRSGTVTINQDGWGHFFVNGGSVSVWVKR

SEQ ID NO: 31540 - protein, 485 aa, Bacillus sp.
HHDGTNGTIMQYFEWNVPNDGQHWNRLHNNAQNLKNAGITAIWIPPAWKGTSQNDVGYGAYDLYDLGEFNQKGTVRTKYGTKAELERAIRSLKANGIQVYGDVVMNHKGGADFTERVQAVEVNPQNRNQEVSGTYQIEAWTGFNFPGRGNQHSSFKWRWYHFDGTDWDQSRQLANRIYKFRGDGKAWDWEVDTENGNYDYLMYADSDMDHPEVINELNRWGVWYANTLNLDGFRLDAVKHIKFSFMRDWLGHVRGQTGKNLFAVAEYWKNDLGALENYLSKTNWTMSAFDVPLHYNLYQASNSSGNYDMRNLLNGTLVQRHPSHAVTFVDNHDTQPGEALESFVQGWFKPLAYATILTREQGYPQVFYGDYYGIPSDGVPSYRQQIDPLLKARQQYAYGRQHDYFDHWDVIGWTREGNASHPNSGLATIMSDGPGGSKWMYVGRQKAGEVWHDMTGNRSGTVTINQDGWGHFFVNGGSVSVWVKR

SEQ ID NO: 31541 - protein, 485 aa, Bacillus sp.
HHDGTNGTIMQYFEWNVPNDGQHWNRLHNNAQNLKNAGITAIWIPPAWKGTSQNDVGYGAYDLYDLGEFNQKGTVRTKYGTKAELERAIRSLKANGIQVYGDVVMNHKGGADFTERVQAVEVNPQNRNQEVSGTYQIEAWTGFNFPGRGNQHSSFKWRWYHFDGTDWDQSRQLANRIYKFRGDGKAWDWEVDTENGNYDYLMYADVDMDHPEVINELNRWGVWYANTLNLDGFRLDAVKHIKFSFMRDWLGHVRGQTGKNLFAVAEYWKNDLGALENYLSKTNWTMSAFDVPLHYNLYQASNSSGNYDMRNLLNGTLVQRHPSHAVTFVDNHDTQPGEALESFVQGWFKPLAYATILTREQGYPQVFYGDYYGIPSDGVPSYRQQIDPLLKARQQYAYGRQHDYFDHWDVIGWTREGNASHPNSGLATIMSDGPGGSKWMYVGRQKAGEVWHDMTGNRSGTVTINQDGWGHFFVNGKSVSVWVKR

SEQ ID NO: 31542 - protein, 485 aa, Bacillus sp.
HHDGTNGTIMQYFEWNVPNDGQHWNRLHNNAQNLKNAGITAIWIPPAWKGTSQNDVGYGAYDLYDLGEFNQKGTVRTKYGTKAELERAIRSLKANGIQVYGDVVMNHKGGADFTERVQAVEVNPQNRNQEVSGTYQIEAWTGFNFPGRGNQHSSFKWRWYHFDGTDWDQSRQLANRIYKFRGDGKAWDWEVDTENGNYDYLMYADVDMDHPEVINELNRWGVWYANTLNLDGFRLDAVKHIKFSFMRDWLGHVRGQTGKNLFAVAEYWKNDLGALENYLSKTNWTMSAFDVPLHYNLYQASNSSGNYDMRNLLNGTLVQRHPSHAVTFVDCHDTQPGEALESFVQGWFKPLAYATILTREQGYPQVFYGDYYGIPSDGVPSYRQQIDPLLKARQQYAYGRQHDYFDHWDVIGWTREGNASHPNSGLATIMSDGPGGSKWMYVGRQKAGEVWHDMTGNRSGTVTINQDGWGHFFVNGGSVSVWVKR

SEQ ID NO: 31543 - protein, 485 aa, Bacillus sp.
HHDGTNGTIMQYFEWNVPNDGQHWNRLHNNAQNLKNAGITAIWIPPAWKGTSQNDVGYGAYDLYDLGEFNQKGTVRTKYGTKAELERAIRSLKANGIQVYGDVVMNHKGGADFTERVQAVEVNPQNRNQEVSGTYQIEAWTGFNFPGRGNQHSSFKWRWYHFDGTDWDQSRQLANRIYKFRGDGKAWDWEVDTENGNYDYLMYADVDMDHPEVINELNRWGVWYANTLNLDGFRLDAVKHIKFSFMRDWLGHVRGQTGKNLFAVAEYWKNDLGALENYLSKTNWTMSAFDVPLHYNLYQASNSSGNYDMRNLLNGTLVQRHPSHAVTFVDNHDTQPGEALESFVQGWFKPLAYATILTREQGYPQVFYGDYYGIPSDGVPSYRQQIDPLLKARQQYAYGRQHDYFDHWDVIGWTREGNASHPNSGLATIMSDGPGGSKWMYVGRQKAGEVWHDMTGNRSGTVMINQDGWGHFFVNGGSVSVWVKR

SEQ ID NO: 31544 - protein, 485 aa, Bacillus sp.
HHDGTNGTIMQYFEWNVPNDGQHWNRLHNNAQNLKNAGITAIWIPPAWKGTSQNDVGYGAYDLYDLGEFNQKGTVRTKYGTKAELERAIRSLKANGIQVYGDVVMNHKGGADFTERVQAVEVNPQNRNQEVSGTYQIEAWTGFNFPGRGNQHSSFKWRWYHFDGTDWDQSRQLANRIYKFRGDGKAWDWEVDTENGNYDYLMYADVDMDHPEVINELNRWGVWYANTLNLDGFRLDAVKHIKFSFMRDWLGHVRGQTGKNLFAVAEYWKNDLGALENYLSKTNWTMSAFDVPLHYNLYQASNSSGNYDMRNLLNGTLVQRHPSHAVTFVDNHDTQPGEALESFVQGWFKPLAYATILTREQGYPQVFYGDYYQIPSDGVPSYRQQIDPLLKARQQYAYGRQHDYFDHWDVIGWTREGNASHPNSGLATIMSDGPGGSKWMYVGRQKAGEVWHDMTGNRSGTVTINQDGWGHFFVNGGSVSVWVKR

SEQ ID NO: 31545 - protein, 485 aa, Bacillus sp.
HHDGTNGTIMQYFEWNVPNDGQHWNRLHNNAQNLKNAGITAIWIPPAWKGTSQNDVGYGAYDLYDLGEFNQKGTVRTKYGTKAELERAIRSLKANGIQVYGDVVMNHKGGADFTERVQAVEVNPQNRNQEVSGTYQIEAWTGFNFPGRGNQHSSFKWRWYHFDGTDWDQSRQLANRIYKFRGDGKAWDWEVDTENGNYDYLMYADVDMDHPEVINELNRWGVWYANTLNLDGFRLDAVKHIKFSFMRDWLGHVRGQTGKNLFAVAEYWKNDLGALENYLSKTNWTMSAFDVPLHYNLYQASNSSGNYDMRNLLNGTLVQRHPSHAVTFVDNHDTQPGEALESFVQGWFKPLAYATILTREQGYPQIFYGDYYGIPSDGVPSYRQQIDPLLKARQQYAYGRQHDYFDHWDVIGWTREGNASHPNSGLATIMSDGPGGSKWMYVGRQKAGEVWHDMTGNRSGTVTINQDGWGHFFVNGGSVSVWVKR

SEQ ID NO: 31546 - protein, 485 aa, Bacillus sp.
HHDGTNGTIMQYFEWNVPNDGQHWNRLHNNAQNLKNAGITAIWIPPAWKGTSQNDVGYGAYDLYDLGEFNQKGTVRTKYGTKAELERAIRSLKANGIQVYGDVVMNHKGGADFTERVQAVEVNPQNRNQEVSGTYQIEAWTGFNFPGRGNQHSSFKWRWYHFDGTDWDQSRQLANRIYKFRGDGKAWDWEVDTENGNYDYLMYADVDMDHPEVINELNRWGVWYANTLNLDGFRLDAVKHIKFSFMRDWLGHVRGQTGKNLFAVAEYWKNDLGALENYLSKTNWTMSAFDVPLHYNLYQASNSSGNYDMRNLLNGTLVQRHPSHAVTFVDNHDTQPGEALESFVQGWFKPLAYATILTREQGYPQVFYGDYYGIPSDGVPSYRQQIDPLLKARQQYAYGRQHDYFDHWDVIGWTREGNASHPNSGLATIMSDGPGGSKWMYVGRQKTGEVWHDMTGNRSGTVTINQDGWGHFFVNGGSVSVWVKR

SEQ ID NO: 31547 - protein, 485 aa, Bacillus sp.
HHDGTNGTIMQYFEWNVPNDGQHWNRLHNNAQNLKNAGITAIWIPPAWKGTSQNDVGYGAYDLYDLGEFNQKGTVRTKYGTKAELERAIRSLKANGIQVYGDVVMNHKGGADFTERVQAVEVNPQNRNQEVSGTYQIEAWTGFNFPGRGNQHSSFKWRWYHFDGTDWDQSRQLANRIYKFRGDGKAWDWEVDTENGNYDYLMYADVDMDHPEVINELNRWGVWYANTLNLDGFRLDAVKHIKFSFMRDWLGHVRGQTGKNLFAVAEYWKNDLGALENYLSKTNWTMSAFDVPLHYNLYQASNSSGNYDMRNLLNGTLVQRHPSHAVTFVDNHDTQPGEALESFVQGWFKPLAYATILTREQGYPQVFYGDYYGIPSDGVPSYRQQIDPLCKARQQYAYGRQHDYFDHWDVIGWTREGNASHPNSGLATIMSDGPGGSKWMYVGRQKAGEVWHDMTGNRSGTVTINQDGWGHFFVNGGSVSVWVKR

SEQ ID NO: 31548 - protein, 485 aa, Bacillus sp.
HHDGTNGTIMMYFEWNVPNDGQHWNRLHNNAQNLKNAGITAIWIPPAWKGTSQNDVGYGAYDLYDLGEFNQKGTVRTKYGTKAELERAIRSLKANGIQVYGDVVMNHKGGADFTERVQAVEVNPQNRNQEVSGTYQIEAWTGFNFPGRGNQHSSFKWRWYHFDGTDWDQSRQLANRIYKFRGDGKAWDWEVDTENGNYDYLMYADVDMDHPEVINELNRWGVWYANTLNLDGFRLDAVKHIKFSFMRDWLGHVRGQTGKNLFAVAEYWKNDLGALENYLSKTNWTMSAFDVPLHYNLYQASNSSGNYDMRNLLNGTLVQRHPSHAVTFVDNHDTQPGEALESFVQGWFKPLAYATILTREQGYPQVFYGDYYGIPSDGVPSYRQQIDPLLKARQQYAYGRQHDYFDHWDVIGWTREGNASHPNSGLATIMSDGPGGSKWMYVGRQKAGEVWHDMTGNRSGTVTINQDGWGHFFVNGGSVSVWVKR

SEQ ID NO: 31549 - protein, 485 aa, Bacillus sp.
HHDGTNGTIMQYFEWNVPNDGQHWNRLHNNAQNLKNAGITAIWIPPAWKGTSQNDVGYGAYDLYDLGEFNQKGTVRTKYGTKAELERAIRSLKANGIQVYGDVVMNHKGGADFTERVQAVEVNPQNRNQEVSGTYQIEAWTGFNFPGRGNQHSSFKWRWYHFDGTDWDQSRQLANRIYKFRGDGKAWDWEVDTENGNYDYLMYADVDMDHPEVINELNRWGVWYANTLNLDGFRLDAVKHIKFSFMRDWLGHVRGQTGKNLFAVAEYWKNDLGALENYLSKTNWTMSAFDVPLHYNLYQASNSSGNYDMRNLLNGTLVQRHPSHAVTFVDNHDTQPGEALESFVQGWFKPLAYATILTREQGYPQVFYGDYYGIPSDGVPSYRQQIDPLLKARQQYAYGRQHDYFDHWDVIGWTREGNASHPNSGLATIMSDGPGGSKTMYVGRQKAGEVWHDMTGNRSGTVTINQDGWGHFFVNGGSVSVWVKR

SEQ ID NO: 31550 - protein, 485 aa, Bacillus sp.
HHDGTNGTIMQYFEWNVPNDGQHWNRLHNNAQNLKNAGITAIWIPPAWKGTSQNDVGYGAYDLYDLGEFNQKGTVRTKYGTKAELERAIRSLKANGIQVYGDVVMNHKGGADFTERVQAVEVNPQNRNQEVSGTYQIEAWTGFNFPGRGNQHSSFKWRWYHFDGTDWDQSRQLANRIYKFRGDGKAWDWEVDTENGNYDYLMYADVDMDHPEVINELNRWGVWYANTLNLDGFRLDAVKHIKFSFMRDWLGHVRGQTGKNLFAVAEYWKNDLGALENYLSKTNWTMSAFDVPLHYNLYQASNSSGNYDMRNLLNGTLVQRHPSHAVTFVDNHDTQPGEALESFVQGWFKPLAYATILTREQGYPQVFYGDYSGIPSDGVPSYRQQIDPLLKARQQYAYGRQHDYFDHWDVIGWTREGNASHPNSGLATIMSDGPGGSKWMYVGRQKAGEVWHDMTGNRSGTVTINQDGWGHFFVNGGSVSVWVKR

SEQ ID NO: 31551 - protein, 485 aa, Bacillus sp.
HHDGTNGTIMQYFEWNVPNDGQHWNRLHNNAQNLKNAGITAIWIPPAWKGTSQNDVGYGAYDLYDLGEFNQKGTVRTKYGTKAELERAIRSLKANGIQVYGDVVMNHKGGADFTERVQAVEVNPQNRNQEVSGTYQIEAWTGFNFPGRGNQHSSFKWRWYHFDGTDWDQSRQLANRIYKFRGDGKAWDWEVDTENGNYDYLMYADVDMDHPEVINELNRWGVWYANTLNLDGFRLDAVKHIKFSFMRDWLGHVRGQTGKNLFAVAEYWKNDLGALENYLSKTNWTMSAFDVPLHYNLVQASNSSGNYDMRNLLNGTLVQRHPSHAVTFVDNHDTQPGEALESFVQGWFKPLAYATILTREQGYPQVFYGDYYGIPSDGVPSYRQQIDPLLKARQQYAYGRQHDYFDHWDVIGWTREGNASHPNSGLATIMSDGPGGSKWMYVGRQKAGEVWHDMTGNRSGTVTINQDGWGHFFVNGGSVSVWVKR

SEQ ID NO: 31552 - protein, 485 aa, Bacillus sp.
HHDGTNGTIMQYFEWNVPNDGQHWNRLHNNAQNLKNAGITAIWIPPAWKGTSQNDVGYGAYDLYDLGEFNQKGTVRTKYGTKAELERAIRSLKANGIQVYGDVVMNHKGGADFTERVQAVEVNPQNRNQEVSGTYQIEAWTGFNFPGRGNQHSSFKWRWYHFDGTDWDQSRQLANRIYKFRGDGKAWDWEVDTENGNYDYLMYADVDMDHPEVINELNRWGVWYANTLNLDGFRLDAVKHIKFSFMRDWLGHVRGQTGKNLFAVAEYWKMDLGALENYLSKTNWTMSAFDVPLHYNLYQASNSSGNYDMRNLLNGTLVQRHPSHAVTFVDNHDTQPGEALESFVQGWFKPLAYATILTREQGYPQVFYGDYYGIPSDGVPSYRQQIDPLLKARQQYAYGRQHDYFDHWDVIGWTREGNASHPNSGLATIMSDGPGGSKWMYVGRQKAGEVWHDMTGNRSGTVTINQDGWGHFFVNGGSVSVWVKR

SEQ ID NO: 31553 - protein, 485 aa, Bacillus sp.
HHDGTNGTIMQYFEWNVPNDGQHWNRLHNNAQNLKNAGITAIWIPPAWKGTSQNDVGYGAYDLYDLGEFNQKGTVRTKYGTKAELERAIRSLKANGIQVYGDVVMNHKGGADFTERVQAVEVNPQNRNQEVSGTYQIEAWTGFNFPGRGNQHSSFKWRWYHFDGTDWDQSRQLANRIYKFRGDGKAWDWEVDTENGNYDYLMYADVDMDHPEVINELNLWGVWYANTLNLDGFRLDAVKHIKFSFMRDWLGHVRGQTGKNLFAVAEYWKNDLGALENYLSKTNWTMSAFDVPLHYNLYQASNSSGNYDMRNLLNGTLVQRHPSHAVTFVDNHDTQPGEALESFVQGWFKPLAYATILTREQGYPQVFYGDYYGIPSDGVPSYRQQIDPLLKARQQYAYGRQHDYFDHWDVIGWTREGNASHPNSGLATIMSDGPGGSKWMYVGRQKAGEVWHDMTGNRSGTVTINQDGWGHFFVNGGSVSVWVKR

SEQ ID NO: 31554 - protein, 485 aa, Bacillus sp.
HHDGTNGTIMQYFEWNVPNDGQHWNRLHNNAQNLKNAGITAIWIPPAWKGTSQNDVGYGAYDLYDLGEFNQKGTVRTKYGTKAELERAIRSLKANGIQVYGDVVMNHKGGADFTERVQAVEVNPQNRNQEVSGTYQIEAWTGFNFPGRGNQHSSFKWRWYHFDGTDWDQSRQLANRIYKFDGDGKAWDWEVDTENGNYDYLMYADVDMDHPEVINELNRWGVWYANTLNLDGFRLDAVKHIKFSFMRDWLGHVRGQTGKNLFAVAEYWKNDLGALENYLSKTNWTMSAFDVPLHYNLYQASNSSGNYDMRNLLNGTLVQRHPSHAVTFVDNHDTQPGEALESFVQGWFKPLAYATILTREQGYPQVFYGDYYGIPSDGVPSYRQQIDPLLKARQQYAYGRQHDYFDHWDVIGWTREGNASHPNSGLATIMSDGPGGSKWMYVGRQKAGEVWHDMTGNRSGTVTINQDGWGHFFVNGGSVSVWVKR

SEQ ID NO: 31555 - protein, 485 aa, Bacillus sp.
HHDGTNGTIMQYFEWNVPNDGQHWNRLHNNAQNLKNAGITAIWIPPAWKGTSQNDVGYGAYDLYDLGEFNQKGTVRTKYGTKAELERAIRSLKANGIQVYGDSVMNHKGGADFTERVQAVEVNPQNRNQEVSGTYQIEAWTGFNFPGRGNQHSSFKWRWYHFDGTDWDQSRQLANRIYKFRGDGKAWDWEVDTENGNYDYLMYADVDMDHPEVINELNRWGVWYANTLNLDGFRLDAVKHIKFSFMRDWLGHVRGQTGKNLFAVAEYWKNDLGALENYLSKTNWTMSAFDVPLHYNLYQASNSSGNYDMRNLLNGTLVQRHPSHAVTFVDNHDTQPGEALESFVQGWFKPLAYATILTREQGYPQVFYGDYYGIPSDGVPSYRQQIDPLLKARQQYAYGRQHDYFDHWDVIGWTREGNASHPNSGLATIMSDGPGGSKWMYVGRQKAGEVWHDMTGNRSGTVTINQDGWGHFFVNGGSVSVWVKR

SEQ ID NO: 31556 - protein, 485 aa, Bacillus sp.
HHDGTNGTIMQYFEWNVPNDGQHWNRLHNNAQNLKNAGITAIWIPPAWKGTSQNDVGYGAYDLYDLGEFNQKGTVRTKYGTKAELERAIRSLKANGIQVYGDVVMNHKGGADFTERVQAVEVNPQNRNQEVSGTYQIEAWTGFNFPGRGNQHSSFKWRWYHFDGTDWDQSRQLANRIYKFRGDGKAWDWEVDTENGNYDYLMYADVDMDHPEVINELNRWGVWYANTLNLEGFRLDAVKHIKFSFMRDWLGHVRGQTGKNLFAVAEYWKNDLGALENYLSKTNWTMSAFDVPLHYNLYQASNSSGNYDMRNLLNGTLVQRHPSHAVTFVDNHDTQPGEALESFVQGWFKPLAYATILTREQGYPQVFYGDYYGIPSDGVPSYRQQIDPLLKARQQYAYGRQHDYFDHWDVIGWTREGNASHPNSGLATIMSDGPGGSKWMYVGRQKAGEVWHDMTGNRSGTVTINQDGWGHFFVNGGSVSVWVKR

SEQ ID NO: 31557 - protein, 485 aa, Bacillus sp.
HHDGTNGTIMQYFEWNVPNDGQHWNRLHNNAQNLKNAGITAIWIPPAWKGTSQNDVGYGAYDLYDLGEFNQKGTVRTKYGTKAELERAIRSLKANGIQVYGDVVMNHKGGADFTERVQAVEVNPQNRNQEVSGTYQIEAWTGFNFPGRGNQHSSFKWRWYHFDGTDWDQSRQLANRIYKFRGDGKAWDWEVDTENGNYDYLMYADVDMDHPEVINELNRWGVWYANTLNLDGFRLDAVKHIKFSFMRDWLGHVRGQTGKNLFAVAEYWKNDLGALENYGSKTNWTMSAFDVPLHYNLYQASNSSGNYDMRNLLNGTLVQRHPSHAVTFVDNHDTQPGEALESFVQGWFKPLAYATILTREQGYPQVFYGDYYGIPSDGVPSYRQQIDPLLKARQQYAYGRQHDYFDHWDVIGWTREGNASHPNSGLATIMSDGPGGSKWMYVGRQKAGEVWHDMTGNRSGTVTINQDGWGHFFVNGGSVSVWVKR

SEQ ID NO: 31558 - protein, 485 aa, Bacillus sp.
HHDGTNGTIMQYFEWNVPNDGQHWNRLHNNAQNLKNAGITAIWIPPAWKGTSQNDVGYGAYDLYDLGEFNQKGTVRTKYGTKAELERAIRSLKANGIQVYGDVVMNHKGGADFTERVQAVEVNPQNRNQEVSGTYQIEAWTGFNFPGRGNQHSSFKWRWYHFDGTDWDQSRQLANRIYKFRGDGKAWMWEVDTENGNYDYLMYADVDMDHPEVINELNRWGVWYANTLNLDGFRLDAVKHIKFSFMRDWLGHVRGQTGKNLFAVAEYWKNDLGALENYLSKTNWTMSAFDVPLHYNLYQASNSSGNYDMRNLLNGTLVQRHPSHAVTFVDNHDTQPGEALESFVQGWFKPLAYATILTREQGYPQVFYGDYYGIPSDGVPSYRQQIDPLLKARQQYAYGRQHDYFDHWDVIGWTREGNASHPNSGLATIMSDGPGGSKWMYVGRQKAGEVWHDMTGNRSGTVTINQDGWGHFFVNGGSVSVWVKR

SEQ ID NO: 31559 - protein, 485 aa, Bacillus sp.
HHDGFNGTIMQYFEWNVPNDGQHWNRLHNNAQNLKNAGITAIWIPPAWKGTSQNDVGYGAYDLYDLGEFNQKGTVRTKYGTKAELERAIRSLKANGIQVYGDVVMNHKGGADFTERVQAVEVNPQNRNQEVSGTYQIEAWTGFNFPGRGNQHSSFKWRWYHFDGTDWDQSRQLANRIYKFRGDGKAWDWEVDTENGNYDYLMYADVDMDHPEVINELNRWGVWYANTLNLDGFRLDAVKHIKFSFMRDWLGHVRGQTGKNLFAVAEYWKNDLGALENYLSKTNWTMSAFDVPLHYNLYQASNSSGNYDMRNLLNGTLVQRHPSHAVTFVDNHDTQPGEALESFVQGWFKPLAYATILTREQGYPQVFYGDYYGIPSDGVPSYRQQIDPLLKARQQYAYGRQHDYFDHWDVIGWTREGNASHPNSGLATIMSDGPGGSKWMYVGRQKAGEVWHDMTGNRSGTVTINQDGWGHFFVNGGSVSVWVKR

SEQ ID NO: 31560 - protein, 485 aa, Bacillus sp.
HHDGTNGTIMQYFEWNVPNDGQHWNRLHNNAQNLKNAGITAIWIPPAWKGTSQNDVGYGAYDLYDLGEFNQKGTVRTKYGTKAELERAIRSLKANGIQVYGDVVMNHKGGADFTERVQAVEVNPQNRNQEVSGTYQIEAWTGFNFPGRGNQHSSFKWRWYHFDGTDWDQSRQLANRIYKFRGDGKAWDWEVDTENGNYDYLMYADVDMDHPEVINELNRWGVWYANTLNLDGFRLDAVKHIKFSFMRDWLGHVRGQTGKNLFAVAEYWKNDLGALENYLSKTNWTMSAFDVPLHYNLYQASNSSGNYDMRNLLNGTLVQRHPSHAVTFVDIHDTQPGEALESFVQGWFKPLAYATILTREQGYPQVFYGDYYGIPSDGVPSYRQQIDPLLKARQQYAYGRQHDYFDHWDVIGWTREGNASHPNSGLATIMSDGPGGSKWMYVGRQKAGEVWHDMTGNRSGTVTINQDGWGHFFVNGGSVSVWVKR

SEQ ID NO: 31561 - protein, 485 aa, Bacillus sp.
HHDGTNGTIMQYFEWNVPNDGQHWNRLHNNAQNLKNAGITAIWIPPAWKGTSQNDVGYGAYDLYDLGEFNQKGTVRTKYGTKAELERAIRSLKANGIQVYGDVVMNHKGGADFTERVQAVEVNRQNRNQEVSGTYQIEAWTGFNFPGRGNQHSSFKWRWYHFDGTDWDQSRQLANRIYKFRGDGKAWDWEVDTENGNYDYLMYADVDMDHPEVINELNRWGVWYANTLNLDGFRLDAVKHIKFSFMRDWLGHVRGQTGKNLFAVAEYWKNDLGALENYLSKTNWTMSAFDVPLHYNLYQASNSSGNYDMRNLLNGTLVQRHPSHAVTFVDNHDTQPGEALESFVQGWFKPLAYATILTREQGYPQVFYGDYYGIPSDGVPSYRQQIDPLLKARQQYAYGRQHDYFDHWDVIGWTREGNASHPNSGLATIMSDGPGGSKWMYVGRQKAGEVWHDMTGNRSGTVTINQDGWGHFFVNGGSVSVWVKR

SEQ ID NO: 31562 - protein, 485 aa, Bacillus sp.
HHDGTNGTIMQYFEWNVPNDGQHWNRLHNNAQNLKNAGITAIWIPPAWKGTSQNDVGYGAYDLYDLGEFNQKGTVRTKYGTKAELERAIRSLKANGIQVYGDVVMNHKGGADFTERVQAVEVNPQNRNQEVSGTYQIEAWTGFNFPGRGNQHSSFKWRWYHFDGTDWDQSRQLANRIYKFRGDGKAWDWEVDTENGNYDYLMYADVDMDHPEVINELNRWGVWYANTLNLDGFRLDAVKHIKFSFMRDWLGHVRGQTGKNLFAVAEYWKNDLGALENYLSKTNWTMSAFDVPLHYNLYQASNSSGNYDMRNLLNGTLVQRGPSHAVTFVDNHDTQPGEALESFVQGWFKPLAYATILTREQGYPQVFYGDYYGIPSDGVPSYRQQIDPLLKARQQYAYGRQHDYFDHWDVIGWTREGNASHPNSGLATIMSDGPGGSKWMYVGRQKAGEVWHDMTGNRSGTVTINQDGWGHFFVNGGSVSVWVKR

SEQ ID NO: 31563 - protein, 485 aa, Bacillus sp.
HHDGTNGTIMQYFEWNVPNDGQHWNRLHNNAQNLKNAGITAIWIPPAWKGTSQNDVGYGAYDLYDLGEFNQKGTVGTKYGTKAELERAIRSLKANGIQVYGDVVMNHKGGADFTERVQAVEVNPQNRNQEVSGTYQIEAWTGFNFPGRGNQHSSFKWRWYHFDGTDWDQSRQLANRIYKFRGDGKAWDWEVDTENGNYDYLMYADVDMDHPEVINELNRWGVWYANTLNLDGFRLDAVKHIKFSFMRDWLGHVRGQTGKNLFAVAEYWKNDLGALENYLSKTNWTMSAFDVPLHYNLYQASNSSGNYDMRNLLNGTLVQRHPSHAVTFVDNHDTQPGEALESFVQGWFKPLAYATILTREQGYPQVFYGDYYGIPSDGVPSYRQQIDPLLKARQQYAYGRQHDYFDHWDVIGWTREGNASHPNSGLATIMSDGPGGSKWMYVGRQKAGEVWHDMTGNRSGTVTINQDGWGHFFVNGGSVSVWVKR

SEQ ID NO: 31564 - protein, 485 aa, Bacillus sp.
HHDGTNGTIMQYFEWNVPNDGQHWNRLHNNAQNLKNAGITAIWIPPAWKGTSQNDVGYGAYDLYDLGEFNQKGTVRTKYGTKAELERAIRSLKANGIQVYGDVVMNHKGGADFTERVQAVEVNPQNRNQEVSGTYQIEAWTGFNFPGRGNQHSSFKWRWYHFDGTDWDQSRQLANRIYKFRGDGKAWDWEVDTENGNYDYLMYADVDMDHPEVINELNRWGVWYANTLNLDGFRLDAVKHIKFSFMRDWLGHVRGQTGKNLFAVAEYWKNDLGALENYLSKTNWTMVAFDVPLHYNLYQASNSSGNYDMRNLLNGTLVQRHPSHAVTFVDNHDTQPGEALESFVQGWFKPLAYATILTREQGYPQVFYGDYYGIPSDGVPSYRQQIDPLLKARQQYAYGRQHDYFDHWDVIGWTREGNASHPNSGLATIMSDGPGGSKWMYVGRQKAGEVWHDMTGNRSGTVTINQDGWGHFFVNGGSVSVWVKR

SEQ ID NO: 31565 - protein, 485 aa, Bacillus sp.
HHDGTNGTIMQYFEWNVPNDGQHWNRLHNNAQNLKNAGITAIWIPPAWKGTSQNDVGYGAYDLYDLGEFNQKGTVRTKYGTKAELERAIRSLKANGIQVYGDVVMNHKGGADFTERVQAVEVNPQNRNQEVSGTYQIEAWTGFNFPGRGNQHSSFKWTWYHFDGTDWDQSRQLANRIYKFRGDGKAWDWEVDTENGNYDYLMYADVDMDHPEVINELNRWGVWYANTLNLDGFRLDAVKHIKFSFMRDWLGHVRGQTGKNLFAVAEYWKNDLGALENYLSKTNWTMSAFDVPLHYNLYQASNSSGNYDMRNLLNGTLVQRHPSHAVTFVDNHDTQPGEALESFVQGWFKPLAYATILTREQGYPQVFYGDYYGIPSDGVPSYRQQIDPLLKARQQYAYGRQHDYFDHWDVIGWTREGNASHPNSGLATIMSDGPGGSKWMYVGRQKAGEVWHDMTGNRSGTVTINQDGWGHFFVNGGSVSVWVKR

SEQ ID NO: 31566 - protein, 485 aa, Bacillus sp.
HHDGTNGTIMQYFEWNVPNDGQHWNRLHNNAQNLKNAGITAIWIPPAWKGTSQNDVGYGAYDLYDLGEFNQKGTVRTKYGTKAELERAIRSLKANGIQVYGDVVMNHKGGADFTERVQAVEVNPQNRNQEVSGTYQIEAWTGFNFPGRGNQHSSFKWRWYHFDGTDWDQSRQLANRIYKFRGDGKAWDWEVDTENGNYDYLMYDDVDMDHPEVINELNRWGVWYANTLNLDGFRLDAVKHIKFSFMRDWLGHVRGQTGKNLFAVAEYWKNDLGALENYLSKTNWTMSAFDVPLHYNLYQASNSSGNYDMRNLLNGTLVQRHPSHAVTFVDNHDTQPGEALESFVQGWFKPLAYATILTREQGYPQVFYGDYYGIPSDGVPSYRQQIDPLLKARQQYAYGRQHDYFDHWDVIGWTREGNASHPNSGLATIMSDGPGGSKWMYVGRQKAGEVWHDMTGNRSGTVTINQDGWGHFFVNGGSVSVWVKR

SEQ ID NO: 31567 - protein, 485 aa, Bacillus sp.
HHDGTNGTIMQYFEWNVPNDGQHWNRLHNNAQNLKNAGITAIWIPPAWKGTSQNDVGYGAYDLYDLGEFAQKGTVRTKYGTKAELERAIRSLKANGIQVYGDVVMNHKGGADFTERVQAVEVNPQNRNQEVSGTYQIEAWTGFNFPGRGNQHSSFKWRWYHFDGTDWDQSRQLANRIYKFRGDGKAWDWEVDTENGNYDYLMYADVDMDHPEVINELNRWGVWYANTLNLDGFRLDAVKHIKFSFMRDWLGHVRGQTGKNLFAVAEYWKNDLGALENYLSKTNWTMSAFDVPLHYNLYQASNSSGNYDMRNLLNGTLVQRHPSHAVTFVDNHDTQPGEALESFVQGWFKPLAYATILTREQGYPQVFYGDYYGIPSDGVPSYRQQIDPLLKARQQYAYGRQHDYFDHWDVIGWTREGNASHPNSGLATIMSDGPGGSKWMYVGRQKAGEVWHDMTGNRSGTVTINQDGWGHFFVNGGSVSVWVKR

SEQ ID NO: 31568 - protein, 485 aa, Bacillus sp.
HHDGTNGTIMQYFEWNVPNDGQHWNRLHNNAQNLKNAGITAIWIPPAWKGTSQNDVGYGAYDLYDLGEFNQKGTVRTAYGTKAELERAIRSLKANGIQVYGDVVMNHKGGADFTERVQAVEVNPQNRNQEVSGTYQIEAWTGFNFPGRGNQHSSFKWRWYHFDGTDWDQSRQLANRIYKFRGDGKAWDWEVDTENGNYDYLMYADVDMDHPEVINELNRWGVWYANTLNLDGFRLDAVKHIKFSFMRDWLGHVRGQTGKNLFAVAEYWKNDLGALENYLSKTNWTMSAFDVPLHYNLYQASNSSGNYDMRNLLNGTLVQRHPSHAVTFVDNHDTQPGEALESFVQGWFKPLAYATILTREQGYPQVFYGDYYGIPSDGVPSYRQQIDPLLKARQQYAYGRQHDYFDHWDVIGWTREGNASHPNSGLATIMSDGPGGSKWMYVGRQKAGEVWHDMTGNRSGTVTINQDGWGHFFVNGGSVSVWVKR

SEQ ID NO: 31569 - protein, 485 aa, Bacillus sp.
HHDGTNGTIMQYFEWNVPNDGQHWNRLHNNAQNLKNAGITAIWIPPAWKGTSQNDVGYGAYDLYDLGEFNQKGTVRTKYGTKAELERAIRSLKANGIQVYGDVVMNHKGGADFTERVQAVEVNPQNRNQEVSGTKQIEAWTGFNFPGRGNQHSSFKWRWYHFDGTDWDQSRQLANRIYKFRGDGKAWDWEVDTENGNYDYLMYADVDMDHPEVINELNRWGVWYANTLNLDGFRLDAVKHIKFSFMRDWLGHVRGQTGKNLFAVAEYWKNDLGALENYLSKTNWTMSAFDVPLHYNLYQASNSSGNYDMRNLLNGTLVQRHPSHAVTFVDNHDTQPGEALESFVQGWFKPLAYATILTREQGYPQVFYGDYYGIPSDGVPSYRQQIDPLLKARQQYAYGRQHDYFDHWDVIGWTREGNASHPNSGLATIMSDGPGGSKWMYVGRQKAGEVWHDMTGNRSGTVTINQDGWGHFFVNGGSVSVWVKR

SEQ ID NO: 31570 - protein, 485 aa, Bacillus sp.
HHDGTNGTIMQYFEWNVPNDGQHWNRLHNNAQNLKNAGITAIWIPPAWKGTSQNDVGYGAYDLYDLGEFNQKGTVRTKYGTKAELERAIRSLKANGIQVYGDVVMNHKGGADFTERVQAVEVNPQNRNQEVSGTYQIEAWTGFNFPGRGNQHSSFKWRWYHFDGTDWDQSRQLANRIYKFRGDGKAWDWEVDTENGNYDYLMYADVDMDHPEVINELNRWGVWYANTLNLDGFRLDAVKHIKFSFMRDWLGHVRGQTGKNLFAVAEYWKNDLGALENYLSKTNWTMSAFDVPLHYNLYQASNSSGNYDMRNLLNGTLLQRHPSHAVTFVDNHDTQPGEALESFVQGWFKPLAYATILTREQGYPQVFYGDYYGIPSDGVPSYRQQIDPLLKARQQYAYGRQHDYFDHWDVIGWTREGNASHPNSGLATIMSDGPGGSKWMYVGRQKAGEVWHDMTGNRSGTVTINQDGWGHFFVNGGSVSVWVKR

SEQ ID NO: 31571 - protein, 485 aa, Bacillus sp.
HHDGTNGTIMQYFEWNVPNDGQHWNRLHNNAQNLKNAGITAIWIPPAWKGTSQNDVGYGAYDLYDLGEFNQKGTVRTKYGTKAELERAIRSLKANGIQVYGDVVMNHKGGADFTERLQAVEVNPQNRNQEVSGTYQIEAWTGFNFPGRGNQHSSFKWRWYHFDGTDWDQSRQLANRIYKFRGDGKAWDWEVDTENGNYDYLMYADVDMDHPEVINELNRWGVWYANTLNLDGFRLDAVKHIKFSFMRDWLGHVRGQTGKNLFAVAEYWKNDLGALENYLSKTNWTMSAFDVPLHYNLYQASNSSGNYDMRNLLNGTLVQRHPSHAVTFVDNHDTQPGEALESFVQGWFKPLAYATILTREQGYPQVFYGDYYGIPSDGVPSYRQQIDPLLKARQQYAYGRQHDYFDHWDVIGWTREGNASHPNSGLATIMSDGPGGSKWMYVGRQKAGEVWHDMTGNRSGTVTINQDGWGHFFVNGGSVSVWVKR

SEQ ID NO: 31572 - protein, 485 aa, Bacillus sp.
HHDGTNGTIMQYFEWNVPNDGQHWNRLHNNAQNLKNAGITAIWIPPAWKGTSQNDVGYGAYDLYDLGEFNQKGTVRTKYGTKAELERAIRSLKANGIQVYGDVVMNHKGGADFTERVQAVEVNPQNRNQEVSGTYQIEAWTGFNFPGRGNQHSSFKWRWYHFDGTDWDQSRQLANRIYKFRGDGKAWDWEVDTENGNYDYLMYADVDMDHPEVINELNRWGVWYANTLNLDGFRLDAVKHIKFSFMRDWLGHVRGQTGKNLFAVAEYWKNDLGALENYLSKTNWTMSAFDVPLHYNLYQASNSSGNYDMRNLLNGTLVIRHPSHAVTFVDNHDTQPGEALESFVQGWFKPLAYATILTREQGYPQVFYGDYYGIPSDGVPSYRQQIDPLLKARQQYAYGRQHDYFDHWDVIGWTREGNASHPNSGLATIMSDGPGGSKWMYVGRQKAGEVWHDMTGNRSGTVTINQDGWGHFFVNGGSVSVWVKR

SEQ ID NO: 31573 - protein, 485 aa, Bacillus sp.
HHDGTNGTIMQYFEWNVPNDGQHWNRLHNNAQNLKNAGITAIWIPPAWKGTSQNDVGYGAYDLYDLGEFNQKGTVRTKYGTKAELERAIRSLKANGIQVYGDVVMNHKGGADFTERVQAVEVNPQNRNQEVSGTYQIEAWTGFNFPGRGNQHSSFKWRWYHFDGTDWDQSRQLANRIYKFRGDGKAWDWEVDTENGNYDYLMYADVDMDHPEVINXLNRWGVWYANTLNLDGFRLDAVKHIKFSFMRDWLGHVRGQTGKNLFAVAEYWKNDLGALENYLSKTNWTMSAFDVPLHYNLYQASNSSGNYDMRNLLNGTLVQRHPSHAVTFVDNHDTQPGEALESFVQGWFKPLAYATILTREQGYPQVFYGDYYGIPSDGVPSYRQQIDPLLKARQQYAYGRQHDYFDHWDVIGWTREGNASHPNSGLATIMSDGPGGSKWMYVGRQKAGEVWHDMTGNRSGTVTINQDGWGHFFVNGGSVSVWVKR

SEQ ID NO: 31574 - protein, 485 aa, Bacillus sp.
HHDGTNGTIMQYFEWNVPNDGQHWNRLHNNAQNLKNAGITAIWIPPTWKGTSQNDVGYGAYDLYDLGEFNQKGTVRTKYGTKAELERAIRSLKANGIQVYGDVVMNHKGGADFTERVQAVEVNPQNRNQEVSGTYQIEAWTGFNFPGRGNQHSSFKWRWYHFDGTDWDQSRQLANRIYKFRGDGKAWDWEVDTENGNYDYLMYADVDMDHPEVINELNRWGVWYANTLNLDGFRLDAVKHIKFSFMRDWLGHVRGQTGKNLFAVAEYWKNDLGALENYLSKTNWTMSAFDVPLHYNLYQASNSSGNYDMRNLLNGTLVQRHPSHAVTFVDNHDTQPGEALESFVQGWFKPLAYATILTREQGYPQVFYGDYYGIPSDGVPSYRQQIDPLLKARQQYAYGRQHDYFDHWDVIGWTREGNASHPNSGLATIMSDGPGGSKWMYVGRQKAGEVWHDMTGNRSGTVTINQDGWGHFFVNGGSVSVWVKR

SEQ ID NO: 31575 - protein, 483 aa, Bacillus sp.
HHDGTNGTIMQYFEWNVPNDGQHWNRLHNNAQNLKNAGITAIWIPPAWKGTSQNDVGYGAYDLYDLGEFNQKGTVRTKYGTKAELERAIRSLKANGIQVYGDVVMNHKGGADFTERVQAVEVNPQNRNQEVSGTYQIEAWTGFNFPGRGNQHSSFKWRWYHFDGTDWDQSRQLANRIYKFRGKAWDWEVDTENGNYDYLMYADVDMDHPXVINELNRWGVWYANTLNLDGFRLDAVKHIKFSFMRDWLGHVRGQTGKNLFAVAEYWKNDLGALENYLSKTNWTMSAFDVPLHYNLYQASNSSGNYDMRNLLNGTLVQRHPSHAVTFVDNHDTQPGEALESFVQGWFKPLAYATILTREQGYPQVFYGDYYGIPSDGVPSYRQQIDPLLKARQQYAYGRQHDYFDHWDVIGWTREGNASHPNSGLATIMSDGPGGSKWMYVGRQKAGEVWHDMTGNRSGTVTINQDGWGHFFVNGGSVSVWVKR

SEQ ID NO: 31576 - protein, 485 aa, Bacillus sp.
HHDGTNGTIMQYFEWNVPNDGQHWNRLHNNAQNLKNAGITAIWIPPAWKGTSQNDVGYGAYDLYDLGEFNQYGTVRTKYGTKAELERAIRSLKANGIQVYGDVVMNHKGGADFTERVQAVEVNPQNRNQEVSGTYQIEAWTGFNFPGRGNQHSSFKWRWYHFDGTDWDQSRQLANRIYKFRGDGKAWDWEVDTENGNYDYLMYADVDMDHPEVINELNRWGVWYANTLNLDGFRLDAVKHIKFSFMRDWLGHVRGQTGKNLFAVAEYWKNDLGALENYLSKTNWTMSAFDVPLHYNLYQASNSSGNYDMRNLLNGTLVQRHPSHAVTFVDNHDTQPGEALESFVQGWFKPLAYATILTREQGYPQVFYGDYYGIPSDGVPSYRQQIDPLLKARQQYAYGRQHDYFDHWDVIGWTREGNASHPNSGLATIMSDGPGGSKWMYVGRQKAGEVWHDMTGNRSGTVTINQDGWGHFFVNGGSVSVWVKR

SEQ ID NO: 31577 - protein, 485 aa, Bacillus sp.
HHNGTNGTMMQYFEWYLPNDGNHWNRLNSDASNLKSKGIKAVWIPPAWKGASQNDVGYGAYDLYDLGEFNQRGTVRTKYGTRSQLQAAVTSLKNNGIQVYGDVVMNHKGGADATEMVPAVEVNPNNRNQEVTGEYTIEAWTRFDFPGRGNTHSSFKWRWYHFDGVDFDQSRRLNNRIYKFRGHSKAWDWEVDTEFGNYDYLMYADYDYDHPETTNEMRNWGVWYTNTLGLDGFRIDAVKHIKYSFTRDWINHVRSATGKNMFAVAEFWKNDLGAIENYLQKTNWNHSVFDVPLHYNLYNASKSGGNYDMRNIFNGTVVQAHPSQAVTFVDNHDSQPEEALESFVEEWFKPLAYALTLTREQGYPSVFYGDYYGIPTHGVPAMRSKIDPILEARQKYAYGPQHDYLDHPDVIGWTREGDSSHPKSGLATLITDGPGGSKRMYAGLKNAGETWYDITGNRSDTVKIGSDGWGEFHVNDGSVSIYVQK

SEQ ID NO: 31578 - protein, 485 aa, Bacillus sp.
HHDGTNGTIMQYFEWNVPNDGQHWNRLHNNAQNLKNAGITAIWIPPAWKGTFQNDVGYGAYDLYDLGEFNQKGTVRTKYGTKAELERAIRSLKANGIQVYGDVVMNHKGGADFTERVQAVEVNPQNRNQEVSGTYQIEAWTGFNFPGRGNQHSSFKWRWYHFDGTDWDQSRQLANRIYKFRGDGKAWDWEVDTENGNYDYLMYADVDMDHPEVINELNRWGVWYANTLNLDGFRLDAVKHIKFSFMRDWLGHVRGQTGKNLFAVAEYWKNDLGALENYLSKTNWTMSAFDVPLHYNLYQASNSSGNYDMRNLLNGTLVQRHPSHAVTFVDNHDTQPGEALESFVQGWFKPLAYATILTREQGYPQVFYGDYYGIPSDGVPSYRQQIDPLLKARQQYAYGRQHDYFDHWDVIGWTREGNASHPNSGLATIMSDGPGGSKWMYVGRQKAGEVWHDMTGNRSGTVTINQDGWGHFFVNGGSVSVWVKR

SEQ ID NO: 31579 - protein, 485 aa, Bacillus sp.
HHDGTNGTIMQYFEWNVPNDGQHWNRLHNNAQNLKNAGITAIWIPPAWKGTSQNDVGYGAYDLYDLGEFNQKGTVRTKYGTKAELERAIRSLKANGIQVYGDVVMNHKGGADFTERVQAVEVNPQNRNQEVSGTYQIEAWTGFNFPGRGNQHSSFKWRWYHFDGTDWDQSRQLANRIYKFRGDGKAWDCEVDTENGNYDYLMYADVDMDHPEVINELNRWGVWYANTLNLDGFRLDAVKHIKFSFMRDWLGHVRGQTGKNLFAVAEYWKNDLGALENYLSKTNWTMSAFDVPLHYNLYQASNSSGNYDMRNLLNGTLVQRHPSHAVTFVDNHDTQPGEALESFVQGWFKPLAYATILTREQGYPQVFYGDYYGIPSDGVPSYRQQIDPLLKARQQYAYGRQHDYFDHWDVIGWTREGNASHPNSGLATIMSDGPGGSKWMYVGRQKAGEVWHDMTGNRSGTVTINQDGWGHFFVNGGSVSVWVKR

SEQ ID NO: 31580 - protein, 485 aa, Bacillus sp.
HHDGTNGTIMQYFEWNVPNDGQHWNRLHNNAQNLKNAGITAIWIPPAWKGTSQNDVGYGAYDLYDLGEFNQKGTVRTKYGTKAELERAIRSLKANGIQVYGDVVMNHKGGADFTERVQAVEVNPQNRNQEVSGTYQIEAWTGFNFPGRGNQHSSFKWRWYHFDGTDWDQSRQLANRIYKFRGDGKAWDWEVDTENGNYDYLMYADVDMDHPEVINELNRWGVWYANTLNLDGFRLDAVKHIKFSFMRDWLGHVRGQTGKNLFAVAEYWKNDLGALENYLSKTNWTMSAFDVPLHYNLYQASNSSGNYDMRNLLNGTLVQRHPSHAVTFVDNHDTQPGEALESFVQGWFKPLAYATILTREQGYPQVFYGDYYGIPSDGVPSYRQQIDPLLKARQQYAYGRQHDYFDHWDVIGWTREGNASHPNSGLATIMSDGPGGSKNMYVGRQKAGEVWHDMTGNRSGTVTINQDGWGHFFVNGGSVSVWVKR

SEQ ID NO: 31581 - protein, 485 aa, Bacillus sp.
HHDGTNGTIMQYFEWNVPNDGQHWNRLHNNAQNLKNAGITAIWIPPAWKGTSQNDVGYGAYDLYDLGEFNQKGTVRTKYGTKAELERAIRSLKANGIQVYGDVVMNHKGGADFTERVQAVEVNPQNRNQEVSGTYQIEAWTGFNFPGRGNQHSSFKWRWYHFDGTDWDQSRQLANRIYKFRGDGKAWDWEVDTENGNYDYLMYADVDMDQPEVINELNRWGVWYANTLNLDGFRLDAVKHIKFSFMRDWLGHVRGQTGKNLFAVAEYWKNDLGALENYLSKTNWTMSAFDVPLHYNLYQASNSSGNYDMRNLLNGTLVQRHPSHAVTFVDNHDTQPGEALESFVQGWFKPLAYATILTREQGYPQVFYGDYYGIPSDGVPSYRQQIDPLLKARQQYAYGRQHDYFDHWDVIGWTREGNASHPNSGLATIMSDGPGGSKWMYVGRQKAGEVWHDMTGNRSGTVTINQDGWGHFFVNGGSVSVWVKR

SEQ ID NO: 31582 - protein, 485 aa, Bacillus sp.
HHDGTNGTIMQYFEWNVPNDGQHWNRLHNNAQNLKNAGITAIWIPPAWKGTSQNDVGYGAYDLYDLGEFNQKGTVRTKYGTKAELERAIRSLKANGIQVYGDVVMNHKGGADFTERVQAVEVNPQNRNQEVSGTYQIEAWTGFNFPGRGNQHSSTKWRWYHFDGTDWDQSRQLANRIYKFRGDGKAWDWEVDTENGNYDYLMYADVDMDHPEVINELNRWGVWYANTLNLDGFRLDAVKHIKFSFMRDWLGHVRGQTGKNLFAVAEYWKNDLGALENYLSKTNWTMSAFDVPLHYNLYQASNSSGNYDMRNLLNGTLVQRHPSHAVTFVDNHDTQPGEALESFVQGWFKPLAYATILTREQGYPQVFYGDYYGIPSDGVPSYRQQIDPLLKARQQYAYGRQHDYFDHWDVIGWTREGNASHPNSGLATIMSDGPGGSKWMYVGRQKAGEVWHDMTGNRSGTVTINQDGWGHFFVNGGSVSVWVKR

SEQ ID NO: 31583 - protein, 485 aa, Bacillus sp.
HHDGTNGTIMQYFEWNVPNDGQHWNRLHNNAQNLKNAGITAIWIPPAWKGTSQNDVGYGAYDLYDLGEFNQKGTVRTKYGTKAELERAIRSLKANGIQVYGDVVMNHKGGADFTERVQAVEVNPQNRNQEVSGTYQIEAWTGFNFPGRGNQHSSFKWRWYHFDGTDWDQSRQLANRIYKFRGDGKAWDWEVDTENGNYDYLMYADVDMDHPEVINELNRWGVWYANTLNLDGFRLDAVKHIKFSFMRDWLGHVRGQTGKNLFAVAEYWKNDLGALENYLSKTNWTMSAFDVPLHYNLYQASNSSGNYDMRNLLNGTLVQRHPSHAVTFVDNHDTQPGEALESFVQGWFKPLAYATILTREQGYPQVSYGDYYGIPSDGVPSYRQQIDPLLKARQQYAYGRQHDYFDHWDVIGWTREGNASHPNSGLATIMSDGPGGSKWMYVGRQKAGEVWHDMTGNRSGTVTINQDGWGHFFVNGGSVSVWVKR

SEQ ID NO: 31584 - protein, 485 aa, Bacillus sp.
HHDGTNGTIMQYFEWNVPNDGQHWNRLHNNAQNLKNAGITAIWIPPAWKGTSQNDVGYGAYDLYDLGEFNQKGTVRTKYGTKAELERAIRSLKANGIQVYGDVVMNHKGGADFTERVQAVEVNPQNRNQEVSGTYQIEAWTGFNFPGRGNQHSSFKWRWYHFDGTDWDQSRQLANRIYKFRGDGKAWDWEVDTENGNYDYLMYADVDMDHPEVINELNRWGVWYANTLNLDGFRLDAVKHIKFSFMRDWLGHVRGQTGKNLFAVAEYWKNDLGALENYLSKTNWTMSAFDVPLHYNLYQASNSSGNYDMRNLLNGTLVQRHPSHAVTFVDNHDTQPGEALESFVQGWFKPLAYATILTREQGYPQVFYGDYYGIPSDGVPSYRQQIDPLLKARQQYAYGRQHDYFDDWDVIGWTREGNASHPNSGLATIMSDGPGGSKWMYVGRQKAGEVWHDMTGNRSGTVTINQDGWGHFFVNGGSVSVWVKR

SEQ ID NO: 31585 - protein, 485 aa, Bacillus sp.
HHDGTNGTIMQYFEWNVPNDGQHWNRLHNNAQNLKNAGITAIWIPPAWKGTSQNDVGYGAYDLYDLGEFNQKGTVRTKYGTKAELERAIRSLKANGIQVYGDVVMNHKGGADFTERVQAVEVNPQNRNQEVSGTYQIEAWTGFNFPGRGNQHSSFKWRWYHFDGTDWDQSRQLAIRIYKFRGDGKAWDWEVDTENGNYDYLMYADVDMDHPEVINELNRWGVWYANTLNLDGFRLDAVKHIKFSFMRDWLGHVRGQTGKNLFAVAEYWKNDLGALENYLSKTNWTMSAFDVPLHYNLYQASNSSGNYDMRNLLNGTLVQRHPSHAVTFVDNHDTQPGEALESFVQGWFKPLAYATILTREQGYPQVFYGDYYGIPSDGVPSYRQQIDPLLKARQQYAYGRQHDYFDHWDVIGWTREGNASHPNSGLATIMSDGPGGSKWMYVGRQKAGEVWHDMTGNRSGTVTINQDGWGHFFVNGGSVSVWVKR

SEQ ID NO: 31586 - protein, 485 aa, Bacillus sp.
HHDGTNGTIMQYFEWNVPNDGQHWNRLHNNAQNLKNAGITAIWIPPAWKGTSQNDVGYGAYDLYDLGEFNQKGTVRTKYGTKAELERAIRSLKANGIQVYGDVVMNHKGGADFTERVQAVEVNPQNRNQEVSGTYQIEAWTGFNFPGRGNQHSSFKWRWYHFDGTDWDQSRQLANRIYKFRGDGKAWDWEVDTENGNYDYLMYADVDMDHPEVINELNRWGVWYANTLNLDGFRLDAVKHIKFSFMRDWLGHVRGQTGKPLFAVAEYWKNDLGALENYLSKTNWTMSAFDVPLHYNLYQASNSSGNYDMRNLLNGTLVQRHPSHAVTFVDNHDTQPGEALESFVQGWFKPLAYATILTREQGYPQVFYGDYYGIPSDGVPSYRQQIDPLLKARQQYAYGRQHDYFDHWDVIGWTREGNASHPNSGLATIMSDGPGGSKWMYVGRQKAGEVWHDMTGNRSGTVTINQDGWGHFFVNGRSVSVWVKR

SEQ ID NO: 31587 - protein, 485 aa, Bacillus sp.
HHDGTNGTIMQYFEWNVPNDGQHWNRLHNNAQNLKNAGITAIWIPPAWKGTSQNDVGYGAYDLYDLGEFNQKGTVRTKYGTKAELERAIRSLKANGIQVYGDVVMNHKGGADFTERVQAVEVNPQNRNQEVSGTYQIEAWTGFNFPGRGNQHSSFKWRWYHFDGTDWDQSRQLANRIYKFRGDGKAWDWEVDTENGNYDYLMYAAVDMDHPEVINELNRWGVWYANTLNLDGFRLDAVKHIKFSFMRDWLGHVRGQTGKNLFAVAEYWKNDLGALENYLSKTNWTMSAFDVPLHYNLYQASNSSGNYDMRNLLNGTLVQRHPSHAVTFVDNHDTQPGEALESFVQGWFKPLAYATILTREQGYPQVFYGDYYGIPSDGVPSYRQQIDPLLKARQQYAYGRQHDYFDHWDVIGWTREGNASHPNSGLATIMSDGPGGSKWMYVGRQKAGEVWHDMTGNRSGTVTINQDGWGHFFVNGGSVSVWVKR

SEQ ID NO: 31588 - protein, 485 aa, Bacillus sp. (in: firmicutes)
HHDGTNGTIMQYFEWNVPNDGQHWNRLHNNAQNLKNAGITAIWIPPAWKGTSQNDVGYGAYDLYDLGEFNQKGTVRTKYGTKAELERAIRSLKANGIQVYGDVVMNHKGGADFTERVQAVEVNPQNRNQEVSGTYQIEAWTGFNFPGRGNQHSSFKWRWYHFDGTDWDQSRQLANRIYKFRGDGKAWDWEVDTENGNYDYLMYADVDMDHPEVINELNRWGVWYANTLNLDGFRLDAVKHIKFWFMRDWLGHVRGQTGKNLFAVAEYWKNDLGALENYLSKTNWTMSAFDVPLHYNLYQASNSSGNYDMRNLLNGTLVQRHPSHAVTFVDNHDTQPGEALESFVQGWFKPLAYATILTREQGYPQVFYGDYYGIPSDGVPSYRQQIDPLLKARQQYAYGRQHDYFDHWDVIGWTREGNASHPNSGLATIMSDGPGGSKWMYVGRQKAGEVWHDMTGNRSGTVTINQDGWGHFFVNGGSVSVWVKR

SEQ ID NO: 31589 - protein, 485 aa, Bacillus sp.
HHDGTNGTIMQYFEWNVPNDGQHWNRLHNNAQNLKNAGITAIWIPPAWKGTSQNDVGYGAYDLYDLGEFNQKGTVRTKYGTKAELERAIRSLKANGIQVYGDVVMNHKGGADFTERVQAVEVNPQNLNQEVSGTYQIEAWTGFNFPGRGNQHSSFKWRWYHFDGTDWDQSRQLANRIYKFRGDGKAWDWEVDTENGNYDYLMYADVDMDHPEVINELNRWGVWYANTLNLDGFRLDAVKHIKFSFMRDWLGHVRGQTGKNLFAVAEYWKNDLGALENYLSKTNWTMSAFDVPLHYNLYQASNSSGNYDMRNLLNGTLVQRHPSHAVTFVDNHDTQPGEALESFVQGWFKPLAYATILTREQGYPQVFYGDYYGIPSDGVPSYRQQIDPLLKARQQYAYGRQHDYFDHWDVIGWTREGNASHPNSGLATIMSDGPGGSKWMYVGRQKAGEVWHDMTGNRSGTVTINQDGWGHFFVNGGSVSVWVKR

SEQ ID NO: 31590 - protein, 485 aa, Bacillus sp.
HHDGTNGTIMQYFEWNVPNDGQHWNRLHNNSQNLKNAGITAIWIPPAWKGTSQNDVGYGAYDLYDLGEFNQKGTVRTKYGTKAELERAIRSLKANGIQVYGDVVMNHKGGADFTERVQAVEVNPQNRNQEVSGTYQIEAWTGFNFPGRGNQHSSFKWRWYHFDGTDWDQSRQLANRIYKFRGDGKAWDWEVDTENGNYDYLMYADVDMDHPEVINELNRWGVWYANTLNLDGFRLDAVKHIKFSFMRDWLGHVRGQTGKNLFAVAEYWKNDLGALENYLSKTNWTMSAFDVPLHYNLYQASNSSGNYDMRNLLNGTLVQRHPSHAVTFVDNHDTQPGEALESFVQGWFKPLAYATILTREQGYPQVFYGDYYGIPSDGVPSYRQQIDPLLKARQQYAYGRQHDYFDHWDVIGWTREGNASHPNSGLATIMSDGPGGSKWMYVGRQKAGEVWHDMTGNRSGTVTINQDGWGHFFVNGGSVSVWVKR

SEQ ID NO: 31591 - protein, 485 aa, Bacillus sp.
HHDGTNGTIMQYFEWNVPNDGQHWNRLHNNAQNLKNAGITAIWIPPAWKGTSQNDVGYGAYDLYDLGEFNQKGTVRTKYGTKAELERAIRSLKANGIQVYGDVVMNHKGGADFTERVQAVEVNPQNRNQEVNGTYQIEAWTGFNFPGRGNQHSSFKWRWYHFDGTDWDQSRQLANRIYKFRGDGKAWDWEVDTENGNYDYLMYADVDMDHPEVINELNRWGVWYANTLNLDGFRLDAVKHIKFSFMRDWLGHVRGQTGKNLFAVAEYWKNDLGALENYLSKTNWTMSAFDVPLHYNLYQASNSSGNYDMRNLLNGTLVQRHPSHAVTFVDNHDTQPGEALESFVQGWFKPLAYATILTREQGYPQVFYGDYYGIPSDGVPSYRQQIDPLLKARQQYAYGRQHDYFDHWDVIGWTREGNASHPNSGLATIMSDGPGGSKWMYVGRQKAGEVWHDMTGNRSGTVTINQDGWGHFFVNGGSVSVWVKR

SEQ ID NO: 31592 - protein, 485 aa, Bacillus sp.
HHDGTNGTIMQYFEWNVPNDGQHWNRLHNNAQNLKNAGITAIWIPPAWKGTSQNDVGYGAYDLYDLGEFNQKGTVRTKYGTKAELERAIRSLKANGIQVYGDVVMNHKGGADFTERVQAVEVNPQNRNQEVSGTYQIEAWTGFNFPGRGNQHSSFKWRWYHFDGTDWDQSRQLANRIYKFRGDGKAWDWEVDTENGNYDYLMYADVDMDHPEVINELNRWGVWYANTLNLDGFRLDAVKHIKFSFMRDWLGHVRGQTGKNLFAVAEYWKNDLGALENYLSKTNWTMSAFDVPLHYNLYQASNSSGNYDMRNLLNGTLVQRHPSHAVTFVDNHDTQPGEALESFVQGWFKPLAYATILTREQGYPQVFYGDYYGIPSDGVPSYRQQLDPLLKARQQYAYGRQHDYFDHWDVIGWTREGNASHPNSGLATIMSDGPGGSKWMYVGRQKAGEVWHDMTGNRSGTVTINQDGWGHFFVNGGSVSVWVKR

SEQ ID NO: 31593 - protein, 483 aa, Bacillus sp. (in: firmicutes)
HHDGTNGTIMQYFEWNVPNDGQHWNRLHNNAQNLKNAGITAIWIPPAWKGTSQNDVGYGAYDLYDLGEFNQKGTVRTKYGTKAELERAIRSLKANGIQVYGDVVMNHKGGADFTERVQAVEVNPQNRNQEVSGTYQIEAWTGFNFPGRGNQHSSFKWRWYHFDGTDWDQSRQLANRIYKFRGKAWDWEVDTEFGNYDYLMYADVDMDHPEVINELNRWGVWYANTLNLDGFRLDAVKHIKFSFMRDWLGHVRGQTGKNLFAVAEYWKNDLGALENYLSKTNWTMSAFDVPLHYNLYQASNSSGNYDMRNLLNGTLVQRHPSHAVTFVDNHDTQPGEALESFVQGWFKPLAYATILTREQGYPCVFYGDYYGIPSDGVPSYRQQIDPLLKARQQYAYGRQHDYFDHWDVIGWTREGNASHPNSGLATIMSDGPGGSKWMYVGRQKAGEVWHDMTGNRSGTVTINQDGWGHFFVNGGSVSVWVKR

SEQ ID NO: 31594 - protein, 485 aa, Bacillus sp.
HHDGTNGTIMQYFEWNVPNDGQHWNRLHNNAQNLKNAGITAIWIPPAWKGTSQNDVGYGAYDLYDLGEFNQKGTVRTKYGTKAELERAIRSLKANGIQVYGDVVMNHKGGADFTERVQAVEVNPQNRNQEVSGTYQIEAWTGFNFPGRGNQHSSFKWRWYHFDGTDWDQSRQLANRIYKFRGDGKAWDWEVDTENGNYDYLMYADVDMDHPEVINELNRWGVWYANTLNLDGFRLDAVKHIKFSFMRDWLGHWRGQTGKNLFAVAEYWKNDLGALENYLSKTNWTMSAFDVPLHYNLYQASNSSGNYDMRNLLNGTLVQRHPSHAVTFVDNHDTQPGEALESFVQGWFKPLAYATILTREQGYPQVFYGDYYGIPSDGVPSYRQQIDPLLKARQQYAYGRQHDYFDHWDVIGWTREGNASHPNSGLATIMSDGPGGSKWMYVGRQKAGEVWHDMTGNRSGTVTINQDGWGHFFVNGGSVSVWVKR

SEQ ID NO: 31595 - protein, 485 aa, Bacillus sp.
HHDGTNGTIMQYFEWNVPNDGQHWNRLHNNAQNLKNAGITAIWIPPAWKGTSQNDVGYGAYDLYDLGEFNQKGTVRTKYGTKAELERAIRSLKANGIQVYGDVVMNHKGGADFTERVQAVEVNPQNRNQEVSGTYQIEAWTGFNFPGRGNQHSSLKWRWYHFDGTDWDQSRQLANRIYKFRGDGKAWDWEVDTENGNYDYLMYADVDMDHPEVINELNRWGVWYANTLNLDGFRLDAVKHIKFSFMRDWLGHVRGQTGKNLFAVAEYWKNDLGALENYLSKTNWTMSAFDVPLHYNLYQASNSSGNYDMRNLLNGTLVQRHPSHAVTFVDNHDTQPGEALESFVQGWFKPLAYATILTREQGYPQVFYGDYYGIPSDGVPSYRQQIDPLLKARQQYAYGRQHDYFDHWDVIGWTREGNASHPNSGLATIMSDGPGGSKWMYVGRQKAGEVWHDMTGNRSGTVTINQDGWGHFFVNGGSVSVWVKR

SEQ ID NO: 31596 - protein, 485 aa, Bacillus sp.
HHDGTNGTIMQYFEWNVPNDGQHWNRLHNNAQNLKNAGITAIWIPPAWKGTSQNDVGYGAYDLYDLGEFNQKGTVRTKYGTKAELERAIRSLKANGIQVYGDVVMNHKGGADFTERVQAVEVNPQNRNQEVSGTYQIEAWTGFNFPGRGNQHSSFKWRWYHFDGTDWDQSRQLANRIYKFRGDGKAWDWEVDTENGNYDYLMYADVDMDHPEVINELNRWGVWYANTLNLDGFRLDAVKHIKFSFMRDWLGHVRGQTGKNLFAVAEYWKNDLGALENYLSKTNWTMSAFDVPLHYNLYQASNSSGNYDMRNLLNGTLVQRHPSHAVTFVDNHDTQPGEALESFVQGWFKPLAYATILTREQGYPQVFYGDYYGIPSDGVPSYRQQIDPLLKARQQYAYGRQHDYFDHWDVIGWTREGNASHPNSGLATIMSQGPGGSKWMYVGRQKAGEVWHDMTGNRSGTVTINQDGWGHFFVNGGSVSVWVKR

SEQ ID NO: 31597 - protein, 485 aa, Bacillus sp.
HHDGTNGTIMQYFEWNVPNDGQHWNRLHNNAQNLKNAGITAIWIPPAWKGTSQNDVGYGAYDLYDLGEFNQKGTVRTKYGTKAELERALRSLKANGIQVYGDVVMNHKGGADFTERVQAVEVNPQNRNQEVSGTYQIEAWTGFNFPGRGNQHSSFKWRWYHFDGTDWDQSRQLANRIYKFRGDGKAWDWEVDTENGNYDYLMYADVDMDHPEVINELNRWGVWYANTLNLDGFRLDAVKHIKFSFMRDWLGHVRGQTGKNLFAVAEYWKNDLGALENYLSKTNWTMSAFDVPLHYNLYQASNSSGNYDMRNLLNGTLVQRHPSHAVTFVDNHDTQPGEALESFVQGWFKPLAYATILTREQGYPQVFYGDYYGIPSDGVPSYRQQIDPLLKARQQYAYGRQHDYFDHWDVIGWTREGNASHPNSGLATIMSDGPGGSKWMYVGRQKAGEVWHDMTGNRSGTVTINQDGWGHFFVNGGSVSVWVKR

SEQ ID NO: 31598 - protein, 485 aa, Bacillus sp.
HHDGTNGTIMQYFEWNVPNDGQHWNRLHNNAQNLKNAGITAIWIPPAWKGTSQNDVGYGAYDLYDLGEFNQKGTVRTKYGTKAELERAIRSLKANGIQVYGDVVMNHKGGADFTERVQAVEVNPQNRNQEVSGTYQIEAWTGFNFPGRGNQHSSFKWRWYHFDGTDWDQSRQLANRIYKFRGDGKAWDWEVDTENGNYDYLMYADVDMDHPEVINELNRWGVWYANTLNLDGFRLDAVKHIKFSFMRDWLGHVRGQTGKNLFAVAEYWKNDLGALENYLSKTNWTMSAFDVPLHYNLYQASNSSGNYDMRNLLNGTLVARHPSHAVTFVDNHDTQPGEALESFVQGWFKPLAYATILTREQGYPQVFYGDYYGIPSDGVPSYRQQIDPLLKARQQYAYGRQHDYFDHWDVIGWTREGNASHPNSGLATIMSDGPGGSKWMYVGRQKAGEVWHDMTGNRSGTVTINQDGWGHFFVNGGSVSVWVKR

SEQ ID NO: 31599 - protein, 485 aa, Bacillus sp.
HHDGTNGTIMQYFEWNVPNDGQHWNRLHNNAQNLKNAGITAIWIPPAWKGTSQNDVGYGAYDIYDLGEFNQKGTVRTKYGTKAELERAIRSLKANGIQVYGDVVMNHKGGADFTERVQAVEVNPQNRNQEVSGTYQIEAWTGFNFPGRGNQHSSFKWRWYHFDGTDWDQSRQLANRIYKFRGDGKAWDWEVDTENGNYDYLMYADVDMDHPEVINELNRWGVWYANTLNLDGFRLDAVKHIKFSFMRDWLGHVRGQTGKNLFAVAEYWKNDLGALENYLSKTNWTMSAFDVPLHYNLYQASNSSGNYDMRNLLNGTLVQRHPSHAVTFVDNHDTQPGEALESFVQGWFKPLAYATILTREQGYPQVFYGDYYGIPSDGVPSYRQQIDPLLKARQQYAYGRQHDYFDHWDVIGWTREGNASHPNSGLATIMSDGPGGSKWMYVGRQKAGEVWHDMTGNRSGTVTINQDGWGHFFVNGGSVSVWVKR

SEQ ID NO: 31600 - protein, 485 aa, Bacillus sp.
HHDGTNGTIMQYFEWNVPNDGQHWNRLHNNAQNLKNAGITAIWIPPAWKGTSQNDVGYGAYDLYDLGEFNQKGTVRTKYGTKAELERAIRSLKANGIQVYGDVVMNHKGGADFTERVQAVEVNPQNRNQEVSGTYQIEAWTGFNFPGRGNQHSSFKWRWYHFDGTDWDQQRQLANRIYKFRGDGKAWDWEVDTENGNYDYLMYADVDMDHPEVINELNRWGVWYANTLNLDGFRLDAVKHIKFSFMRDWLGHVRGQTGKNLFAVAEYWKNDLGALENYLSKTNWTMSAFDVPLHYNLYQASNSSGNYDMRNLLNGTLVQRHPSHAVTFVDNHDTQPGEALESFVQGWFKPLAYATILTREQGYPQVFYGDYYGIPSDGVPSYRQQIDPLLKARQQYAYGRQHDYFDHWDVIGWTREGNASHPNSGLATIMSDGPGGSKWMYVGRQKAGEVWHDMTGNRSGTVTINQDGWGHFFVNGGSVSVWVKR

SEQ ID NO: 31601 - protein, 485 aa, Bacillus sp.
HHDGTNGTIMQYFEWNVPNDGQHWNRLHNNAQNLKNAGITAIWIPPAWKGTSQNDVGYGAYDLYDLGEFNQKGTVRTKYGTKAELERAIRSLKANGIQVYGDVVMNHKGGADFTERVQAVEVNPQNRNQEVSGTYQIEAWTGFNFPGRGNQHSSFKWRWYHFDGTDWDQSRQLANRIYKFRGDGKAWDWEVDTENGNYDYLMYADVDMDHPEVINELNRWGVWYANTLNLDGFRLDAVKHIKFSFMRDWLGHVRGQTGKNLFAVAEYWKNDLGALENYLSKTNWTMSAFDVPLHYNLYQASNSSGNYDMRNLLNGTLVQRHPSHAVTFVDNHDTQPGEALESFVQGWFKPLAYATILTREQGYPQVAYGDYYGIPSDGVPSYRQQIDPLLKARQQYAYGRQHDYFDHWDVIGWTREGNASHPNSGLATIMSDGPGGSKWMYVGRQKAGEVWHDMTGNRSGTVTINQDGWGHFFVNGGSVSVWVKR

SEQ ID NO: 31602 - protein, 485 aa, Bacillus sp.
HHDGTNGTIMQYFEWNVPNDGQHWNRLHNNAQNLKNAGITAIWIPPAWKGTSQNDVGYGAYDLYDLGEFNQKGTVRTKYGTKAELERAIRSLKANGIQVYGDVVMNHKGGADFTERVQAVEVNPQNRNQEVSGTYQIEAWTGFNFPGRGNQHSSFKWRWYHFDGTDWDQSRQLANRIYKFRGDGKAWDWEVDTENGNYDYLMIADVDMDHPEVINELNRWGVWYANTLNLDGFRLDAVKHIKFSFMRDWLGHVRGQTGKNLFAVAEYWKNDLGALENYLSKTNWTMSAFDVPLHYNLYQASNSSGNYDMRNLLNGTLVQRHPSHAVTFVDNHDTQPGEALESFVQGWFKPLAYATILTREQGYPQVFYGDYYGIPSDGVPSYRQQIDPLLKARQQYAYGRQHDYFDHWDVIGWTREGNASHPNSGLATIMSDGPGGSKWMYVGRQKAGEVWHDMTGNRSGTVTINQDGWGHFFVNGGSVSVWVKR

SEQ ID NO: 31603 - protein, 485 aa, Bacillus sp.
HHDGTNGTIMQYFEWNVPNDGQHWNRLHNNAQNLKNAGITAIWIPPAWKGTSQNDVGYGAYDLYDLGEFNQKGTVRTKYGTKAELERAIRSLKANGIQVYGDVVMNHKGGADFTERVQAVEVNPQNRNQEVSGTYQIEAWTGFNFPGRGNQHSSFKWRWYHFDGTDWDQSRQLANRIYKFRGDGKAWDWEVDTENGNYDYLMYADVDMDHPEVINELNRWGVWYANTLNLDGFRLDAVKHIKFSFMRDWLGHVRGQTGKNLFAVAEYWKNDLGALENYLSKTNWTMSAFDVPLHYNLYQASNSSGNYDMRNLLNGTLVQRHPSHAVTFVDNHDTQPGEALESFVQGWFKPLAYATILTREQGLPQVFYGDYYGIPSDGVPSYRQQIDPLLKARQQYAYGRQHDYFDHWDVIGWTREGNASHPNSGLATIMSDGPGGSKWMYVGRQKAGEVWHDMTGNRSGTVTINQDGWGHFFVNGGSVSVWVKR

SEQ ID NO: 31604 - protein, 485 aa, Bacillus sp.
HHDGTNGTIMQYFEWNVPNDGQHWNRLHNNAQNLKNAGITAIWIPPAWKGTSQNDVGYGAYDLYDLGEFNQKGTVRTKYGTKAELERAIRSLKANGIQVYGDVVMNHKGGADFTERVQAVEVNPQNRNQEVSGTYQIEAWTGFNFPGRGNQHSSFNWRWYHFDGTDWDQSRQLANRIYKFRGDGKAWDWEVDTENGNYDYLMYADVDMDHPEVINELNRWGVWYANTLNLDGFRLDAVKHIKFSFMRDWLGHVRGQTGKNLFAVAEYWKNDLGALENYLSKTNWTMSAFDVPLHYNLYQASNSSGNYDMRNLLNGTLVQRHPSHAVTFVDNHDTQPGEALESFVQGWFKPLAYATILTREQGYPQVFYGDYYGIPSDGVPSYRQQIDPLLKARQQYAYGRQHDYFDHWDVIGWTREGNASHPNSGLATIMSDGPGGSKWMYVGRQKAGEVWHDMTGNRSGTVTINQDGWGHFFVNGGSVSVWVKR

SEQ ID NO: 31605 - protein, 485 aa, Bacillus sp.
HHDGTNGTIMQYFEWNVPNDGQHWNRLHNNAQNLKNAGITAIWIPPAWKGTSQNDVGYGAYDLLDLGEFNQKGTVRTKYGTKAELERAIRSLKANGIQVYGDVVMNHKGGADFTERVQAVEVNPQNRNQEVSGTYQIEAWTGFNFPGRGNQHSSFKWRWYHFDGTDWDQSRQLANRIYKFRGDGKAWDWEVDTENGNYDYLMYADVDMDHPEVINELNRWGVWYANTLNLDGFRLDAVKHIKFSFMRDWLGHVRGQTGKNLFAVAEYWKNDLGALENYLSKTNWTMSAFDVPLHYNLYQASNSSGNYDMRNLLNGTLVQRHPSHAVTFVDNHDTQPGEALESFVQGWFKPLAYATILTREQGYPQVFYGDYYGIPSDGVPSYRQQIDPLLKARQQYAYGRQHDYFDHWDVIGWTREGNASHPNSGLATIMSDGPGGSKWMYVGRQKAGEVWHDMTGNRSGTVTINQDGWGHFFVNGGSVSVWVKR

SEQ ID NO: 31606 - protein, 485 aa, Bacillus sp.
HHDGTNGTIMQYFEWNVPNDGQHWNRLHNNAQNLKNAGITAIWIPPAWKGTSQNDVGYGAYDLYDLGEFNQKGTVRTKYGTKAELERAIRSLKANGIQVYGDVVMNHKGGADFTERVQAVEVNPQNRNQEVSGTYQIEAWTGFNFPGRGNQHSSFKWRWYHFDGTDWDQSRQLANRIYKFRGDGKAWDWEVDTENGNYDWLMYADVDMDHPEVINELNRWGVWYANTLNLDGFRLDAVKHIKFSFMRDWLGHVRGQTGKNLFAVAEYWKNDLGALENYLSKTNWTMSAFDVPLHYNLYQASNSSGNYDMRNLLNGTLVQRHPSHAVTFVDNHDTQPGEALESFVQGWFKPLAYATILTREQGYPQVFYGDYYGIPSDGVPSYRQQIDPLLKARQQYAYGRQHDYFDHWDVIGWTREGNASHPNSGLATIMSDGPGGSKWMYVGRQKAGEVWHDMTGNRSGTVTINQDGWGHFFVNGGSVSVWVKR

SEQ ID NO: 31607 - protein, 485 aa, Bacillus sp.
HHDGTNGTIMQYFEWNVPNDGQHWNRLHNNAQNLKNAGITAIWIPPAWKGTSQNDVGYGAYDLYDLGEFNQKGTVRTKYGTKAELERAIRSLKANGIQVYGDVVMNHKGGADFTERVQAVEVNPQNRNQEVSGTYQIEAWTGFNFPGRGNQHSSFKWRWYHFDGTDWDQSRQLANRIYKFRGDGKNWDWEVDTENGNYDYLMYADVDMDHPEVINELNRWGVWYANTLNLDGFRLDAVKHIKFSFMRDWLGHVRGQTGKNLFAVAEYWKNDLGALENYLSKTNWTMSAFDVPLHYNLYQASNSSGNYDMRNLLNGTLVQRHPSHAVTFVDNHDTQPGEALESFVQGWFKPLAYATILTREQGYPQVFYGDYYGIPSDGVPSYRQQIDPLLKARQQYAYGRQHDYFDHWDVIGWTREGNASHPNSGLATIMSDGPGGSKWMYVGRQKAGEVWHDMTGNRSGTVTINQDGWGHFFVNGGSVSVWVKR

SEQ ID NO: 31608 - protein, 485 aa, Bacillus sp.
HHDGTNGTIMQYFEWNVPNDGQHWNRLHNNAQNLKNAGITAIWIPPAWKGTSQNDVGYGFYDLYDLGEFNQKGTVRTKYGTKAELERAIRSLKANGIQVYGDVVMNHKGGADFTERVQAVEVNPQNRNQEVSGTYQIEAWTGFNFPGRGNQHSSFKWRWYHFDGTDWDQSRQLANRIYKFRGDGKAWDWEVDTENGNYDYLMYADVDMDHPEVINELNRWGVWYANTLNLDGFRLDAVKHIKFSFMRDWLGHVRGQTGKNLFAVAEYWKNDLGALENYLSKTNWTMSAFDVPLHYNLYQASNSSGNYDMRNLLNGTLVQRHPSHAVTFVDNHDTQPGEALESFVQGWFKPLAYATILTREQGYPQVFYGDYYGIPSDGVPSYRQQIDPLLKARQQYAYGRQHDYFDHWDVIGWTREGNASHPNSGLATIMSDGPGGSKWMYVGRQKAGEVWHDMTGNRSGTVTINQDGWGHFFVNGGSVSVWVKR

SEQ ID NO: 31609 - protein, 485 aa, Bacillus sp.
HHDGTNGTIMQYFEWNVPNDGQHWNRLHNNAQNLKNAGITAIWIPPAWKGTSQNDVGYGAYDLYDLGEFNQKGTVRTKYGTKAELERAIRSLKANGIWVYGDVVMNHKGGADFTERVQAVEVNPQNRNQEVSGTYQIEAWTGFNFPGRGNQHSSFKWRWYHFDGTDWDQSRQLANRIYKFRGDGKAWDWEVDTENGNYDYLMYADVDMDHPEVINELNRWGVWYANTLNLDGFRLDAVKHIKFSFMRDWLGHVRGQTGKNLFAVAEYWKNDLGALENYLSKTNWTMSAFDVPLHYNLYQASNSSGNYDMRNLLNGTLVQRHPSHAVTFVDNHDTQPGEALESFVQGWFKPLAYATILTREQGYPQVFYGDYYGIPSDGVPSYRQQIDPLLKARQQYAYGRQHDYFDHWDVIGWTREGNASHPNSGLATIMSDGPGGSKWMYVGRQKAGEVWHDMTGNRSGTVTINQDGWGHFFVNGGSVSVWVKR

SEQ ID NO: 31610 - protein, 485 aa, Bacillus sp.
HHDGTNGTIMQYFEWNVPNDGQHWNRLHNNAQNLKNAGITAIWIPPAWKGTSQNDVGYGAYDLYDLGEFNQKGTVRTKYGTKAELERAIRSLKANGIQVYGDVVMNHKGGADFTERVQAVEVNPQNRNQEVSGTYQIEAWTGFNFPGRGNQHSSFKWRWYHFDGTDWDLSRQLANRIYKFRGDGKAWDWEVDTENGNYDYLMYADVDMDHPEVINELNRWGVWYANTLNLDGFRLDAVKHIKFSFMRDWLGHVRGQTGKNLFAVAEYWKNDLGALENYLSKTNWTMSAFDVPLHYNLYQASNSSGNYDMRNLLNGTLVQRHPSHAVTFVDNHDTQPGEALESFVQGWFKPLAYATILTREQGYPQVFYGDYYGIPSDGVPSYRQQIDPLLKARQQYAYGRQHDYFDHWDVIGWTREGNASHPNSGLATIMSDGPGGSKWMYVGRQKAGEVWHDMTGNRSGTVTINQDGWGHFFVNGGSVSVWVKR

SEQ ID NO: 31611 - protein, 483 aa, Bacillus sp.
HHDGTNGTIMQYFEWNVPNDGQHWNRLHNNAQNLKNAGITAIWIPPAWKGTSQNDVGYGAYDLYDLGEFNQKGTVRTKYGTKAELERAIRSLKANGIQVYGDVVMNHKGGADFTERVQAVEVNPQNRNQEVSGTYQIEAWTGFNFPGRGNQHSSFKWRWYHFDGTDWDQSRQLANRIYKFRGKAWDWEVDTENGNYDYLMYADXDMDHPEVINELNRWGVWYANTLNLDGFRLDAVKHIKFSFMRDWLGHVRGQTGKNLFAVAEYWKNDLGALENYLSKTNWTMSAFDVPLHYNLYQASNSSGNYDMRNLLNGTLVQRHPSHAVTFVDNHDTQPGEALESFVQGWFKPLAYATILTREQGYPQVFYGDYYGIPSDGVPSYRQQIDPLLKARQQYAYGRQHDYFDHWDVIGWTREGNASHPNSGLATIMSDGPGGSKWMYVGRQKAGEVWHDMTGNRSGTVTINQDGWGHFFVNGGSVSVWVKR

SEQ ID NO: 31612 - protein, 485 aa, Bacillus sp.
HHDGTNGTIMQYFEWNVPNDGQHWNRLHNNAQNLKNAGITAIWIPPAWKGTSQNDVGYGAYDLYDLGEFNQKGTVRTKYGTKAELERAIRSLKANGIQVYGDVVMNHKGGADFTERVQAVEVNPQNRNQEVSGTYQIEAWTGFNFPGRGNQHSSFKWRWYHFDGTDWDQSRQLANRIYKFRGDGKAWDWEVDTENGNYDYLMYADVDMDHPEVINELNRWGVWYANTLNLDGFRLDAVKHIKFSFMRDWLGHVRGQTGKNLFAVAEYWKNDLGALENYLSKTNWTMSAFDVPLHYNLYQASNSSGNYDMRNLLNGTLVQRHPSHAVTFVDNHDTQPGEALESFVQGWFKPLAYATILTREQGYPQVFYGDYYGIPSDGVPSYRQQIDPLLKARQQYAYGRQHDYFDHWDVIGWTREGNASHPNSGLATILSDGPGGSKWMYVGRQKAGEVWHDMTGNRSGTVTINQDGWGHFFVNGGSVSVWVKR

SEQ ID NO: 31613 - protein, 485 aa, Bacillus sp.
HHDGTNGTIMQYFEWNVPNDGQHWNRLHNNAQNLKNAGITAIWIPPAWKGTSQNDVGYGAYDLYDLGEFNQKGTVRTKYGTKAELERAIRSLKANGIQVYGDVVMNHKGGADFTERVQAVEVNPQNRNQEVSGTYQIEAWTGFNFPGRGNQHSSFKWRWYHFDGTDWDQSRQLANRIYKFRGDGKAWDWEVDTENGNYDYLMYADVDMDHPEVINELNRWGVWYANTLNLDGFRLDAVKHIKFSFMRDWLGHVRGQTGKNLFAVAEYWKNDLGALENYLSKTNWTMSAFDVPYHYNLYQASNSSGNYDMRNLLNGTLVQRHPSHAVTFVDNHDTQPGEALESFVQGWFKPLAYATILTREQGYPQVFYGDYYGIPSDGVPSYRQQIDPLLKARQQYAYGRQHDYFDHWDVIGWTREGNASHPNSGLATIMSDGPGGSKWMYVGRQKAGEVWHDMTGNRSGTVTINQDGWGHFFVNGGSVSVWVKR

SEQ ID NO: 31614 - protein, 485 aa, Bacillus sp.
HHDGTNGTIMQYFEWNVPNDGQHWNRLHNNAQNLKNAGITAIWIPPAWKGTSQNDVGYGAYDLYDLGEFNQKGTVRTKYGTKAELERAIRSLKANGIQVYGDVVMNHKGGADFTERVQAVEVNPQNRNQEVSGTYQIEAWTGFNFPGRGNQHSSFKWRWYHFDGTNWDQSRQLANRIYKFRGDGKAWDWEVDTENGNYDYLMYADVDMDHPEVINELNRWGVWYANTLNLDGFRLDAVKHIKFSFMRDWLGHVRGQTGKNLFAVAEYWKNDLGALENYLSKTNWTMSAFDVPLHYNLYQASNSSGNYDMRNLLNGTLVQRHPSHAVTFVDNHDTQPGEALESFVQGWFKPLAYATILTREQGYPQVFYGDYYGIPSDGVPSYRQQIDPLLKARQQYAYGRQHDYFDHWDVIGWTREGNASHPNSGLATIMSDGPGGSKWMYVGRQKAGEVWHDMTGNRSGTVTINQDGWGHFFVNGGSVSVWVKR

SEQ ID NO: 31615 - protein, 485 aa, Bacillus sp.
HHDGTNGTIMQYFEWNVPNDGQHWNRLHNNAQNLKNAGITAIWIPPAWKGTSQNDVGYGAYDLYDLGEFNQKGTVRTKYGTKAELERAIRSLKANGIQVYGDVVMNHKGGADFTERVQAVEVNPQNRNQEVSGTYQIEAWTGFNFPGRGNQHSSFKWRWYHFDGTDWDQSRQLANRIYKFRGDGKAWDWEVDTENGNYDYLMYADVDMDHPEVINELNRWGVWYANTLNLDGFRLDAVKHIKFSFMRDWLGHVRGQTGKNLFAVAEYWKNDLGALENYLSKTNWTMSAFDVPLHYNLYQASNSSGNYDMRNLLNGTLVQRHPSHAVTFVDNHDTQPGEALESFVQGWFKPLAYATILTREQGYPQVFYGDYYGIPSDGVPSYRQQIDPLLKARQQYAYGRQHDYFDHWDVIGWTREGNASHPNSGLATIMSDGPGGSKWMYVGRQKAGERWHDMTGNRSGTVTINQDGWGHFFVNGGSVSVWVKR

SEQ ID NO: 31616 - protein, 485 aa, Bacillus sp.
HHDGTNGTIMQYFEWNVPNDGQHWNRLHNNAQNLKNAGITAIWIPPAWKGTSQNDVGYGAYDLYDLGEFNQKGTVRTKYGTKAELERAIRSLKANGIQVYGDVVMNHKGGADFTERVQAVEVNPQNRNQEVSGTYQIEAWTGFNFPGRGNQHSSFKWRWYHFDGTDWDQSRQLANRIYKFRGDGKAWDWEVDTENGNYDYLMYADVDMDHPEVINELNRWGVWYANTLNLDGFRLDAVKHIKFSFMRDWLGHVRGQTGKNLFAVAEYWKNDLGALENYLSKTNWTMSAFDVPLHYNLYQASNSSGNYDMRNLLNGTLVQRHPSHAVTFVDNHDTQPGEALESFVQGWFKPLAYATILTREQGYPQVFYGDYYGIPSDGVPSYRQQIDPLLKARQQYAYGRQHDYFDHWDVIGWTREGNASHPNSGLATIMSDGPGGSKWMYVGRQKAGEVWHDMTGNRSGTVCINQDGWGHFFVNGGSVSVWVKR

SEQ ID NO: 31617 - protein, 485 aa, Bacillus sp.
HHDGTNGTIMQYFEWNVPYDGQHWNRLHNNAQNLKNAGITAIWIPPAWKGTSQNDVGYGAYDLYDLGEFNQKGTVRTKYGTKAELERAIRSLKANGIQVYGDVVMNHKGGADFTERVQAVEVNPQNRNQEVSGTYQIEAWTGFNFPGRGNQHSSFKWRWYHFDGTDWDQSRQLANRIYKFRGDGKAWDWEVDTENGNYDYLMYADVDMDHPEVINELNRWGVWYANTLNLDGFRLDAVKHIKFSFMRDWLGHVRGQTGKNLFAVAEYWKNDLGALENYLSKTNWTMSAFDVPLHYNLYQASNSSGNYDMRNLLNGTLVQRHPSHAVTFVDNHDTQPGEALESFVQGWFKPLAYATILTREQGYPQVFYGDYYGIPSDGVPSYRQQIDPLLKARQQYAYGRQHDYFDHWDVIGWTREGNASHPNSGLATIMSDGPGGSKWMYVGRQKAGEVWHDMTGNRSGTVTINQDGWGHFFVNGGSVSVWVKR

SEQ ID NO: 31618 - protein, 485 aa, Bacillus sp.
HHDGTNGTIMQYFEWNVPNDGQHWNRLHNNAQNLKNAGITAIWIPPAWKGTSQNDVGYGAYDLYDLGEFNQKGTVRTKYGTKAELERAIRSLKANGIQVYGDVVMNHKGGADFTERVQAVEVNPQNRNQEVSGTYQIEAWTGFNFPGRGNQHSSFKWRWYHFDGTDWDQSRQLANRIYKFRGDGKAWDWEVDTENGNYDYLMYADVDMDHPEVINELNRWGVWYANTLNLDGFRLDAVKHIKFSFMRDWLGHVRGQTGKNLFAVAEYWKNDLGALENYLSKTNWTMSAFDVPLHYNLYQASNSSGNYDMRNLLNGTLVQRHPSHAVTFVDNHDTQPGEALESFVQGWFKPLAYATILTREQGYPQVFYGDYYGIPSDGVPSYRQQIDPLLKARQQYAYGRQHDYFDHWDVIGWTREGNASHPNSGLATIMSDGPGGSKWMYVGRQKAGEVWHDMTGNRSGTVTINQDGTGHFFVNGGSVSVWVKR

SEQ ID NO: 31619 - protein, 485 aa, Bacillus sp.
HHDGTNGTIMQYFEWNVPNDGQHWNRLHNNAQNLKNAGITAIWIPPAWKGTSQNDVGYGAYDLYDLGEFNQKGTVRTKYGTKAELERAIRSLKANGIQVYGDVVMNHKGGADFTERVQAVEVNPQNRNQEVSGTYQIEAWTGFNFPGRGNQHSSFKWRWYHFDGTDWDQSRQLANRIYKFRGDGKAWDWEVDTENGNYDYLMYADVDMDHPEVINELNRWGVWYANTLNLDGFRLDAVKHIKFSFMRDWLGHVRGQTGKNLFAVAEYWKNDLGALENYLSKTNWTMPAFDVPLHYNLYQASNSSGNYDMRNLLNGTLVQRHPSHAVTFVDNHDTQPGEALESFVQGWFKPLAYATILTREQGYPQVFYGDYYGIPSDGVPSYRQQIDPLLKARQQYAYGRQHDYFDHWDVIGWTREGNASHPNSGLATIMSDGPGGSKWMYVGRQKAGEVWHDMTGNRSGTVTINQDGWGHFFVNGGSVSVWVKR

SEQ ID NO: 31620 - protein, 485 aa, Bacillus sp.
HHDGTNGTIMQYFEWNVPNDGQHWNRLHNNAQNLKNAGITAIWIPPAWKGTSQNDVGYGAYDLYDLGEFNQKGTVRTKYGTKAELERAIRSLKANGIQVYGDVVMNHKGGADFTERVQAVEVNPQNRNQEVSGTYQIEAWTGFNFPGRGNQHSSFKWRWYHFDGTDWDQSRQLANRIYKFRGDGKAWDWEVDTENGNYDYLMYADVDMDHPEVINELNRWAVWYANTLNLDGFRLDAVKHIKFSFMRDWLGHVRGQTGKNLFAVAEYWKNDLGALENYLSKTNWTMSAFDVPLHYNLYQASNSSGNYDMRNLLNGTLVQRHPSHAVTFVDNHDTQPGEALESFVQGWFKPLAYATILTREQGYPQVFYGDYYGIPSDGVPSYRQQIDPLLKARQQYAYGRQHDYFDHWDVIGWTREGNASHPNSGLATIMSDGPGGSKWMYVGRQKAGEVWHDMTGNRSGTVTINQDGWGHFFVNGGSVSVWVKR

SEQ ID NO: 31621 - protein, 485 aa, Bacillus sp.
HHDGTNGTIMQYFEWNVPNDGQHWNRLHNNAQNLKNAGITAIWIPPAWKGTSQNDVGYGAYDLYDLGEFNQKGTVRTKYGTKAELERAIRSLKANGIQVYGDVVMNHKGGADFTERVQAVEVNPQNRNQEVSGTYQIEAWTGFNFPGRGNQHSSFKWRWYHFDGTDWDQSRQLANRIYKFRGDGKAWDWEVDTENGNYDYLMYADVDMDHPEVINELNRWGVWYANTLNLDGFRLDAVKHIKFSFMRDWLGHVRGQTGKNLFAVAEYWKNDLGALENYLSKTNWTMSAFDVPLHYNLYQASNSSGNYDMRNLLNGTLVQRHPSHAVTFVDNHDTQPGEALESFVQGWFKPLAYATILTREQGYPQVFYGDYYGIPSDGVPSYRQQIDPLLKARQQYAYGRQHDYFDHWDVIGWTREGNASHPNSGLATIMSDGPGGSKWMYVGRQKAGEVWHDMTGNRSGTVTIGQDGWGHFFVNGGSVSVWVKR

SEQ ID NO: 31622 - protein, 485 aa, Bacillus sp.
HHDGTNGTIMQYFEWNVPNDGQHWNRLHNNAQNLKNAGITAIWIPPAWKGTSQNDVGYGAYDLYDLGEFNQKGTVRTKYGTKAELERAIRSLKANGIQVYGDVVMNHKGGADFTERVQAVEVNPQNRNQEVSGTYQIEAWTGFNFPGRGNQHSSFKWRWYHFDGTDWDQSRQLAGRIYKFRGDGKAWDWEVDTENGNYDYLMYADVDMDHPEVINELNRWGVWYANTLNLDGFRLDAVKHIKFSFMRDWLGHVRGQTGKNLFAVAEYWKNDLGALENYLSKTNWTMSAFDVPLHYNLYQASNSSGNYDMRNLLNGTLVQRHPSHAVTFVDNHDTQPGEALESFVQGWFKPLAYATILTREQGYPQVFYGDYYGIPSDGVPSYRQQIDPLLKARQQYAYGRQHDYFDHWDVIGWTREGNASHPNSGLATIMSDGPGGSKWMYVGRQKAGEVWHDMTGNRSGTVTINQDGWGHFFVNGGSVSVWVKR

SEQ ID NO: 31623 - protein, 485 aa, Bacillus sp.
HHDGTNGTIMQYFEWNVPNDGQHWNRLHNNAQNLKNAGITAIWIPPAWKGTSQNDVGYGAYDLYDLGEFNQKGTVRTKYGTKAELERAIRSLKANGIQVYGDVVMNHKGGADFTERVQAVEVNPQNRNQEVSGTYQIEAWTGFNFPGRGNQHSSFKWRWYHFDGTDWDQSRQLANRIYKFRGDGKAWDWEVDTENGNYDYLMYADVDMDHPEVINELNRWGVWYANTLNLDGFRLDAVKHIKFSFMRDWLGHVRGQTGKNLFAVAEYWKNDLGDLENYLSKTNWTMSAFDVPLHYNLYQASNSSGNYDMRNLLNGTLVQRHPSHAVTFVDNHDTQPGEALESFVQGWFKPLAYATILTREQGYPQVFYGDYYGIPSDGVPSYRQQIDPLLKARQQYAYGRQHDYFDHWDVIGWTREGNASHPNSGLATIMSDGPGGSKWMYVGRQKAGEVWHDMTGNRSGTVTINQDGWGHFFVNGGSVSVWVKR

SEQ ID NO: 31624 - protein, 485 aa, Bacillus sp.
HHDGTNGTIMQYFEWNVPNDGQHWNRLHNNAQNLKNAGITAIWIPPAWKGTSQNDVGYGAYDLYDLGEFNQKGTVRTKYGTKAELERAIRSLKANGIQVYGDVVMNHKGGADFTERVQAVEVNPQNRNQEVSGTYQIEAWTGFNFPGRGNQHSSFKWRWYHFDGTDWDQSRQLANRIYKFRGDGKAWDWEVDTENGNYDYLMYADVDMDHPEVINELNRWGVWYANTLNLDGFRLDAVKHIKFSFMRDWLGHVRGQTGKNLFAVAEYWKNDLGALENYLSKTNWTMSAFDVPLHYNLYQASNSSGNYDMRNLLNGTLVQRHPSHAVTFVDNHDTQPGEALESFVQGWFKPLAYATILTREQGYPQVFYGDYYGIPSDGVPSYRQQIDPLLKARQQYAYGRQHDYFDHWDVIGWTREGNASHPNSGLATITSDGPGGSKWMYVGRQKAGEVWHDMTGNRSGTVTINQDGWGHFFVNGGSVSVWVKR

SEQ ID NO: 31625 - protein, 485 aa, Bacillus sp.
HHDGTNGTIMQYFEWNVPNDGQHWNRLHNNAQNLKNAGITAIWIPPAWKGTSQNDVGYGAYDLYDLGEFNQKGTVRTKYGTKAELERAIRSLKANGIQVYGDVVMNHKGGADFTERVQAVEVNPQNRNQEVSGTYQIEAWTGFNFPGRGNQHSSFKWRWYHFDGTDWDQSRQLANRIYKFRGDGKAWDWEVDTENGNYDYLMYADVDMDHPEVINELNRWGVWYANTLNLDGFRLDAVKHIKFSFMRDWLGHVRGQTGKNLFAVAEYWKNDLGALENYLSKTNWTMSAFDVPLHYNLYQASNSSGNYDMRNLLNGTLVQRHPSHAVTFVDNHDTQPGEALESFVQGWFKPLAYATILTREQGYPQVFYGDYYGIPSDGVPSYRQQMDPLLKARQQYAYGRQHDYFDHWDVIGWTREGNASHPNSGLATIMSDGPGGSKWMYVGRQKAGEVWHDMTGNRSGTVTINQDGWGHFFVNGGSVSVWVKR

SEQ ID NO: 31626 - protein, 485 aa, Bacillus sp.
HHDGTNGTIMQYFEWNVPNDGQHWNRLHNNAQNLKNAGITAIWIPPAWKGTSQNDVGYGAYDLYDLGEFNQKGTVRTKYGTKAELERAIRSLKANGIQVYGDVVMNHKGGADFTERVQAVEVNPQNRNQEVSGTYQIEAWTGFNFPGRGNQHSSFKWRWYHFDGTDWDQSRQLANRIYKFRGDGKAWDWEVDTENGNYDYLMYADVDMDHPEVINELNRWGVWYANTLNLDGFRLDAVKHIKFSFMRDWLGHVRGQTGKNLFAVAEYWKNDLGALENYLSKTNWTMSAFDVPLHYNLYQASNSSGNYDMRNLLNGTLVQRHPSHAVTFVDNHDTQPGEALESFVQGWFKPLAYATILTREQGYPQVFYGDYYGIPSDGVPSYRQQIDPLLKARQQYCYGRQHDYFDHWDVIGWTREGNASHPNSGLATIMSDGPGGSKWMYVGRQKAGEVWHDMTGNRSGTVTINQDGWGHFFVNGGSVSVWVKR

SEQ ID NO: 31627 - protein, 485 aa, Bacillus sp.
HHDGTNGTIMQYFEWNVPNDGQHWNRLHNNAQNLKNAGITAIWIPPAWKGTSQNDVGYGAYDLYDLGEFNQKGTVRTKYGTKAELERAIRSLKANGIQVYGDVVMNHKGGADFTERVQAVEVNPQNRNQEVSGTYQIEAWTGFNFPGRGNQHSSFKWRWYHFDGTDWDQSRQLANRIYKFRGDGKAWDWEVDTENGNYDYLMYADVDMDHPEVINELNRWGVWYANTLNLDGFRLDAVKHIKFSFMRDWLGHVRGQTGKNLFAVAEYWKNDLGALENYLSKTNWTMSAFDVPLHYNLYQASNSSGNYDMRNLLNGTLVQRHPSHAVTFVDNHDTQPGEALESFVQGWFKPLAYATILTREQGYPQVFYGDYYGIPSDGVPSYRQQIDPLLKARQQYAYGRQHDYFDHWDVIGWTREGNASHPNSGLATIMSDGPGGSKWMYVGRQKAGEAWHDMTGNRSGTVTINQDGWGHFFVNGGSVSVWVKR

SEQ ID NO: 31628 - protein, 485 aa, Bacillus sp.
HHDGTNGTIMQYFEWNVPNDGQHWNRLHNNAQNLKNAGITAIWIPPAWKGTSQNDVGYGAYDLYDLGEFNQKGTVRTKYGTKAELERAIRSLKANGIQVYGDVVMNHKGGADFTERVQAVEVNPQNRNQEVSGTYQIEAWTGFNFPGRGNQHSSFKWRWYHFDGTDWDQSRQLANKIYKFRGDGKAWDWEVDTENGNYDYLMYADVDMDHPEVINELNRWGVWYANTLNLDGFRLDAVKHIKFSFMRDWLGHVRGQTGKNLFAVAEYWKNDLGALENYLSKTNWTMSAFDVPLHYNLYQASNSSGNYDMRNLLNGTLVQRHPSHAVTFVDNHDTQPGEALESFVQGWFKPLAYATILTREQGYPQVFYGDYYGIPSDGVPSYRQQIDPLLKARQQYAYGRQHDYFDHWDVIGWTREGNASHPNSGLATIMSDGPGGSKWMYVGRQKAGEVWHDMTGNRSGTVTINQDGWGHFFVNGGSVSVWVKR

SEQ ID NO: 31629 - protein, 485 aa, Bacillus sp.
HHDGTNGTIMQYFEWNVPNDGQHWNRLHNNAQNLKNAGITAIWIPPAWKGTSQNDVGYGAYDLYDLGEFNQKGTVRTKYGTKAELERAIRSLKANGIQVYGDVVMNHKGGADFTERVQAVEVNPQNRNQEVSGTYQIEAWTGFNFPGRGNQHSSFKWRWSHFDGTDWDQSRQLANRIYKFRGDGKAWDWEVDTENGNYDYLMYADVDMDHPEVINELNRWGVWYANTLNLDGFRLDAVKHIKFSFMRDWLGHVRGQTGKNLFAVAEYWKNDLGALENYLSKTNWTMSAFDVPLHYNLYQASNSKGNYDMRNLLNGTLVQRHPSHAVTFVDNHDTQPGEALESFVQGWFKPLAYATILTREQGYPQVFYGDYYGIPSDGVPSYRQQIDPLLKARQQYAYGRQHDYFDHWDVIGWTREGNASHPNSGLATIMSDGPGGSKWMYVGRQKAGEVWHDMTGNRSGTVTINQDGWGHFFVNGGSVSVWVKR

SEQ ID NO: 31630 - protein, 485 aa, Bacillus sp.
HHDGTNGTIMQYFEWNVPNDGQHWNRLHNNAQNLKNAGITAIWIPPAWKGTSQNDVGYGAYDLYDLGEFNQKGTVRTKYGTKAELERAIRSLKANGIQVYGDVVMNHKGGADFTERVQAVEVNPQNRNQEVSGTYQIEAWTGFNFPGRGNQHSSFKWRWYHFDGTDWDQSRQLANRIYKFRGDGKAWDWEVDTENGNYDYLMYADVDMDHPEVINELNRWGVWYANTLNLDGFRLDAVKHIKFSFMRDWLGHVRGQTGKNLFAVAEYWKNDLGALENYLSKTNWTMSAFDVPLHYNLYQASNSSGNYDMRNLLNGTLVQRHPSHAVTFVDNHDTQPGEALESFVQGWFGPLAYATILTREQGYPQVFYGDYYGIPSDGVPSYRQQIDPLLKARQQYAYGRQHDYFDHWDVIGWTREGNASHPNSGLATIMSDGPGGSKWMYVGRQKAGEVWHDMTGNRSGTVTINQDGWGHFFVNGGSVSVWVKR

SEQ ID NO: 31631 - protein, 485 aa, Bacillus sp.
HHDGTNGTIMQYFEWNVPNDGQHWNRLHNNAQNLKNAGITAIWIPPAWKGTSQNDVGYGAYDLYDLGEFNQKGTVRTKYGTKAELERAIRSLKANGIQVYGDVVMNHKGGADFTERVQAVEVNPQNRNQEVSGTYQIEAWTGFNFPGRGNQHSSFKWRWYHFDGTDWDQSRQLANRIYKFRGDGKAWDWEVDTENGNYDYLMYADVDMDHPEVINELNRWGVWYANTLNLDGFRLDAVKHIKFSFMRDWLGHVRGQTGKNLFAVAEYWKNDLGALENYLSKTNWTMSAFDVPLHYNLYQASNSSGNYDMRNLLNGTLVQRHPSHAVTFVDNHDTQPGEALESFVQGWFKPLAYATILTREQGYPQVFYGDYYGIPSDGVPSYRQQIDPLLKARQQYAYGRQHDYFDHWDVIGWTREGNASHPNSGLATIMSDGPGGSKWMYVGRQKAGEVWHDMTGNRSSTVTINQDGWGHFFVNGGSVSVWVKR

SEQ ID NO: 31632 - protein, 485 aa, Bacillus sp.
HHDGTNGTIMQYFEWNVPNDGQHWNRLHNNAQNLKNAGITAIWIPPAWKGTSQNDVGYGAYDLYDLGEFNQKGTVRTKYGTKAELERAIRSLKANGIQVYGDVVMNHKGGADFTERVQAVEVNPQNRNQEVSGTYQIEAWTGFNFPGRGNQHSSFKWRWYHFDGTDWDQSRQLANRIYKFRGDGKAWDWEVDTENGNYDYLMYADVDMDHPEVINELNRLGVWYANTLNLDGFRLDAVKHIKFSFMRDWLGHVRGQTGKNLFAVAEYWKNDLGALENYLSKTNWTMSAFDVPLHYNLYQASNSSGNYDMRNLLNGTLVQRHPSHAVTFVDNHDTQPGEALESFVQGWFKPLAYATILTREQGYPQVFYGDYYGIPSDGVPSYRQQIDPLLKARQQYAYGRQHDYFDHWDVIGWTREGNASHPNSGLATIMSDGPGGSKWMYVGRQKAGEVWHDMTGNRSGTVTINQDGWGHFFVNGGSVSVWVKR

SEQ ID NO: 31633 - protein, 485 aa, Bacillus sp.
HHDGTNGTIMQYFEWNVPNDGQHWNRLHNNAQNLKNAGITAIWIPPAWKGTSQNDVGYGAYDLYDLGEFNQKGTVRTKYGTKAELERAIRSLKAGGIQVYGDVVMNHKGGADFTERVQAVEVNPQNRNQEVSGTYQIEAWTGFNFPGRGNQHSSFKWRWYHFDGTDWDQSRQLANRIYKFRGDGKAWDWEVDTENGNYDYLMYADVDMDHPEVINELNRWGVWYANTLNLDGFRLDAVKHIKFSFMRDWLGHVRGQTGKNLFAVAEYWKNDLGALENYLSKTNWTMSAFDVPLHYNLYQASNSSGNYDMRNLLNGTLVQRHPSHAVTFVDNHDTQPGEALESFVQGWFKPLAYATILTREQGYPQVFYGDYYGIPSDGVPSYRQQIDPLLKARQQYAYGRQHDYFDHWDVIGWTREGNASHPNSGLATIMSDGPGGSKWMYVGRQKAGEVWHDMTGNRSGTVTINQDGWGHFFVNGGSVSVWVKR

SEQ ID NO: 31634 - protein, 485 aa, Bacillus sp.
HHDGTNGTIMQYFEWNVPNDGQHWNRLHNNAQNLKNAGITAIWIPPAWKGTSQNDVGYGAYDLYDLGEFNQKGTVRTKYGTKAELERAIRSLKANGIQVYGDVVMNHKGGADFTERVQAVEVNPQNRNQEVSGTYQIEAWTGFNFPGRYNQHSSFKWRWYHFDGTDWDQSRQLANRIYKFRGDGKAWDWEVDTENGNYDYLMYADVDMDHPEVINELNRWGVWYANTLNLDGFRLDAVKHIKFSFMRDWLGHVRGQTGKNLFAVAEYWKNDLGALENYLSKTNWTMSAFDVPLHYNLYQASNSSGNYDMRNLLNGTLVQRHPSHAVTFVDNHDTQPGEALESFVQGWFKPLAYATILTREQGYPQVFYGDYYGIPSDGVPSYRQQIDPLLKARQQYAYGRQHDYFDHWDVIGWTREGNASHPNSGLATIMSDGPGGSKWMYVGRQKAGEVWHDMTGNRSGTVTINQDGWGHFFVNGGSVSVWVKR

SEQ ID NO: 31635 - protein, 485 aa, Bacillus sp.
HHDGTNGTIMQYFEWNVPNDGQHWNRLHNNAQNLKNAGITAIWIPPAWKGTSQNDVGYGAYDLYDLGEFNQKGTVRTKYGTKAELERAIRSLKANGIQVYGDVVMNHKGGADFTERVQAVEVNPQNRNQEVSGTYQIEAWTGFNFPGRGNQHSSFKWRWYHFDGTDWDQSRQLANRIYKFRGDGKAWDWEVDTENGNYDYLMYADVDMDHPEVINELNRWGVWYANTLNLDGFRLDAVKHIKFSFMRDWLGHVRGQTGKNLFAVAEYWKNDLGALENYLSKTNWTMSAFDVPLHYNLYQASNSSGNYDMRNLLNGTLVQRHPSHAVTFVDNHDTQPGEALESFVQGWFKPLAYATILTREQGYPQVFYGDYYWIPSDGVPSYRQQIDPLLKARQQYAYGRQHDYFDHWDVIGWTREGNASHPNSGLATIMSDGPGGSKWMYVGRQKAGEVWHDMTGNRSGTVTINQDGWGHFFVNGGSVSVWVKR

SEQ ID NO: 31636 - protein, 485 aa, Bacillus sp.
HHDGTNGTIMQYFEWNVPNDGQHWNRLHNNAQNLKNAGITAIWIPPAWKGTSQNDVGYGAYDLYDLGEFNQKGTVRTKYGTKAELERAIRSLKANGIQVYGDVVMNHKGGADFTERVQAVEVNPQNRNQEVSGTYQIEAWTGFNFPGRGNQHSSFKWRWYHFDGTDWDQSRQLANRIYKFRGDGKAWDWEVDTENGNYDYLMYADVDMDHPEVINELNRWGVWYANTLNLDGFRLDAVKHIKFSFMRDWLGHVRGQTGKNLFAVAEYWKNDLGALENYLSKTNWTMSAFDVPLHYNLYQASNSSGNYDMRNLLNGTLVQRHPSHAVTFVDNHDTQPGEALESFVQGWFKPLAYATILTREQGYPQVFYGDYYGIPSDGVYSYRQQIDPLLKARQQYAYGRQHDYFDHWDVIGWTREGNASHPNSGLATIMSDGPGGSKWMYVGRQKAGEVWHDMTGNRSGTVTINQDGWGHFFVNGGSVSVWVKR

SEQ ID NO: 31637 - protein, 485 aa, Bacillus sp.
HHDGTNGTIMQYFEWNVPNDGQHWNRLHNNAQNLKNAGITAIWIPPAWKGTSQNDVGYGAYDLYDLGEFNQKGTVRTKYGTKAELERAIRSLKANGIQVYGDVVMNHKGGADFTERVQAVEVNPQNRNQEVPGTYQIEAWTGFNFPGRGNQHSSFKWRWYHFDGTDWDQSRQLANRIYKFRGDGKAWDWEVDTENGNYDYLMYADVDMDHPEVINELNRWGVWYANTLNLDGFRLDAVKHIKFSFMRDWLGHVRGQTGKNLFAVAEYWKNDLGALENYLSKTNWTMSAFDVPLHYNLYQASNSSGNYDMRNLLNGTLVQRHPSHAVTFVDNHDTQPGEALESFVQGWFKPLAYATILTREQGYPQVFYGDYYGIPSDGVPSYRQQIDPLLKARQQYAYGRQHDYFDHWDVIGWTREGNASHPNSGLATIMSDGPGGSKWMYVGRQKAGEVWHDMTGNRSGTVTINQDGWGHFFVNGGSVSVWVKR

SEQ ID NO: 31638 - protein, 485 aa, Bacillus sp.
HHDGTNGTIMQYFEWNVPNDGQHWNRLHNNAQNLKNAGITAIWIPPAWKGTSQNDVGYGAYDLYDLGEFNQKVTVRTKYGTKAELERAIRSLKANGIQVYGDVVMNHKGGADFTERVQAVEVNPQNRNQEVSGTYQIEAWTGFNFPGRGNQHSSFKWRWYHFDGTDWDQSRQLANRIYKFRGDGKAWDWEVDTENGNYDYLMYADVDMDHPEVINELNRWGVWYANTLNLDGFRLDAVKHIKFSFMRDWLGHVRGQTGKNLFAVAEYWKNDLGALENYLSKTNWTMSAFDVPLHYNLYQASNSSGNYDMRNLLNGTLVQRHPSHAVTFVDNHDTQPGEALESFVQGWFKPLAYATILTREQGYPQVFYGDYYGIPSDGVPSYRQQIDPLLKARQQYAYGRQHDYFDHWDVIGWTREGNASHPNSGLATIMSDGPGGSKWMYVGRQKAGEVWHDMTGNRSGTVTINQDGWGHFFVNGGSVSVWVKR

SEQ ID NO: 31639 - protein, 485 aa, Bacillus sp.
HHDGTNGTIMQYFEWNVPNDGQHWNRLHNNAQNLKNAGITAIWIPPAWKGTSQNDVGYGAYDLYDLGEFNQKGTVRTKYGTKAELERAIRSLKANGIQVYGDVVMNHKGGADFTERVQAVEVNPQNRNQEVSGTYQIEAWTGFNFPGRGNQHSSFKWRWYHFDGTDWDQSRQLANRIYKFRGDGKAWDWEVDTENGNYDYLMYADVDMDHPEVINELNRWGVWYANTLNLDGFRLDAVKHIKFSFMRDWLGHVRGQTGKNLFAVAEYWKNDLGALENYLSKTNWTMSAFDVPLHYNLYQASNSSGNYDMRNLLNGTLVQRHESHAVTFVDNHDTQPGEALESFVQGWFKPLAYATILTREQGYPQVFYGDYYGIPSDGVPSYRQQIDPLLKARQQYAYGRQHDYFDHWDVIGWTREGNASHPNSGLATIMSDGPGGSKWMYVGRQKAGEVWHDMTGNRSGTVTINQDGWGHFFVNGGSVSVWVKR

SEQ ID NO: 31640 - protein, 485 aa, Bacillus sp.
HHDGTNGTIMQYFEWNVPNDGQHWNRLHNNAQNLKNAGITAIWIPPAWKGTSQNDVGYGAYDLYDLGEFNQKGTVRTKYGTKAELERAIRSLKANGIQVYGDVVMNHKGGADFTERVQAVEVNPQNRNQEVSGTYQIEAWTGFNFPGRGNQHSSFKWRWYHFDGTDWDQSRQLANRIYKFRGDGKAWDWEVDTENGNYDYLMYADVDMDVPEVINELNRWGVWYANTLNLDGFRLDAVKHIKFSFMRDWLGHVRGQTGKNLFAVAEYWKNDLGALENYLSKTNWTMSAFDVPLHYNLYQASNSSGNYDMRNLLNGTLVQRHPSHAVTFVDNHDTQPGEALESFVQGWFKPLAYATILTREQGYPQVFYGDYYGIPSDGVPSYRQQIDPLLKARQQYAYGRQHDYFDHWDVIGWTREGNASHPNSGLATIMSDGPGGSKWMYVGRQKAGEVWHDMTGNRSGTVTINQDGWGHFFVNGGSVSVWVKR

SEQ ID NO: 31641 - protein, 485 aa, Bacillus sp.
HHDGTNGTIMQYFEWNVPNDGQHWNRLHNNAQNLKNAGITAIWIPPAWKGTSQNDVGYGAYDLYDLGEFNQKGTVRTKYGTKAELERAIRSLKANGIQVYGDVVMNHKGGADFTERVQAVEVNPQNRNQEVSGTYQIEAWTGFNFPGRGNQHSSFKWRWYHFDGTDWDQSRQLANRIYKFRGDGKAWDWEVDTENGNYDYLMYADVDMDHPEVINELNRWGVWYANTLNLDGFRLDAVKHIKFSFMRDWLGHVRGQTGKNLFAVAEYWKNDLGALENYLSKTNWTMSAFDVPLHYNLYQASNSSGNYDMRNLLNGTLVQRHPSHAVTFVDNHDTQPGEALESFVQGWFKPLAYATILTREQGYPQVFYGDYYGIPSDGVPSYRQQIDPLLKARQQYAYGRQHDYFDHWDVIGWTREGNASHPNSGLATAMSDGPGGSKWMYVGRQKAGEVWHDMTGNRSGTVTINQDGWGHFFVNGGSVSVWVKR

SEQ ID NO: 31642 - protein, 485 aa, Bacillus sp.
HHDGTNGTIMVYFEWNVPNDGQHWNRLHNNAQNLKNAGITAIWIPPAWKGTSQNDVGYGAYDLYDLGEFNQKGTVRTKYGTKAELERAIRSLKANGIQVYGDVVMNHKGGADFTERVQAVEVNPQNRNQEVSGTYQIEAWTGFNFPGRGNQHSSFKWRWYHFDGTDWDQSRQLANRIYKFRGDGKAWDWEVDTENGNYDYLMYADVDMDHPEVINELNRWGVWYANTLNLDGFRLDAVKHIKFSFMRDWLGHVRGQTGKNLFAVAEYWKNDLGALENYLSKTNWTMSAFDVPLHYNLYQASNSSGNYDMRNLLNGTLVQRHPSHAVTFVDNHDTQPGEALESFVQGWFKPLAYATILTREQGYPQVFYGDYYGIPSDGVPSYRQQIDPLLKARQQYAYGRQHDYFDHWDVIGWTREGNASHPNSGLATIMSDGPGGSKWMYVGRQKAGEVWHDMTGNRSGTVTINQDGWGHFFVNGGSVSVWVKR

SEQ ID NO: 31643 - protein, 485 aa, Bacillus sp.
HHDGTNGTIMQYFEWNVPNDGQHWNRLHNNAQNLKNAGITAIWIPPAWKGTSQNDVGYGAYDLYDLGEFNQKGTVRTKYGTKAELERAIRSLKANGIQVYGDVVMNHKGGADFTERVQWVEVNPQNRNQEVSGTYQIEAWTGFNFPGRGNQHSSFKWRWYHFDGTDWDQSRQLANRIYKFRGDGKAWDWEVDTENGNYDYLMYADVDMDHPEVINELNRWGVWYANTLNLDGFRLDAVKHIKFSFMRDWLGHVRGQTGKNLFAVAEYWKNDLGALENYLSKTNWTMSAFDVPLHYNLYQASNSSGNYDMRNLLNGTLVQRHPSHAVTFVDNHDTQPGEALESFVQGWFKPLAYATILTREQGYPQVFYGDYYGIPSDGVPSYRQQIDPLLKARQQYAYGRQHDYFDHWDVIGWTREGNASHPNSGLATIMSDGPGGSKWMYVGRQKAGEVWHDMTGNRSGTVTINQDGWGHFFVNGGSVSVWVKR

SEQ ID NO: 31644 - protein, 485 aa, Bacillus sp.
HHDGTNGTIMQYFEWNVPNDGQHWNRLHNNAQNLKNAGITAIWIPPAWKGTSQNDVGYGAYDLYDLGEFNQKGTVRTKYGTKAELERAIRSLKANGIQVYGDVVMNHKGGADFTERVQAVEVNPQNRNQEVSGTYQIEAWTGFNFPGRGNQHSSFKWRWYHFDGTDWDQSRQLANRIYKFRGDGKAWDWEVDTENGNYDYLMYADVDMDHPEVINELNRWGVWYANTLNLDGFRLDAVKHIKFSFMRDWLGHVRGQTGKNLFAVAEYWKNDLGALENYLSKTNWTMSAFDVGLHYNLYQASNSSGNYDMRNLLNGTLVQRHPSHAVTFVDNHDTQPGEALESFVQGWFKPLAYATILTREQGYPQVFYGDYYGIPSDGVPSYRQQIDPLLKARQQYAYGRQHDYFDHWDVIGWTREGNASHPNSGLATIMSDGPGGSKWMYVGRQKAGEVWHDMTGNRSGTVTINQDGWGHFFVNGGSVSVWVKR

SEQ ID NO: 31645 - protein, 485 aa, Bacillus sp.
HHDGTNGTIMQYFEWNVPNDGQHWNRLHNNAQNLKNAGITAIWIPPAWKGTSQNDVGYGAYDLYDLGEFNQKGTVRTKYGTKAELERAIRSLKANGIQVYGDVVMNHKGGADFTERVQAVEVNPQNRNQEVSGTYQIEAWTGFNFPGRGNQHSSFKWRWYHFDGTDWDQSRQLANRIYKFRGDGKAWDWEVDTENGNYDYLMYADVDMDHPEVINELNRWGVWYAMTLNLDGFRLDAVKHIKFSFMRDWLGHVRGQTGKNLFAVAEYWKNDLGALENYLSKTNWTMSAFDVPLHYNLYQASNSSGNYDMRNLLNGTLVQRHPSHAVTFVDNHDTQPGEALESFVQGWFKPLAYATILTREQGYPQVFYGDYYGIPSDGVPSYRQQIDPLLKARQQYAYGRQHDYFDHWDVIGWTREGNASHPNSGLATIMSDGPGGSKWMYVGRQKAGEVWHDMTGNRSGTVTINQDGWGHFFVNGGSVSVWVKR

SEQ ID NO: 31646 - protein, 485 aa, Bacillus sp.
HHDGTNGTIMQYFEWNVPNDGQHWNRLHNNAQNLKPAGITAIWIPPAWKGTSQNDVGYGAYDLYDLGEFNQKGTVRTKYGTKAELERAIRSLKANGIQVYGDVVMNHKGGADFTERVQAVEVNPQNRNQEVSGTYQIEAWTGFNFPGRGNQHSSFKWRWYHFDGTDWDQSRQLANRIYKFRGDGKAWDWEVDTENGNYDYLMYADVDMDHPEVINELNRWGVWYANTLNLDGFRLDAVKHIKFSFMRDWLGHVRGQTGKNLFAVAEYWKNDLGALENYLSKTNWTMSAFDVPLHYNLYQASNSSGNYDMRNLLNGTLVQRHPSHAVTFVDNHDTQPGEALESFVQGWFKPLAYATILTREQGYPQVFYGDYYGIPSDGVPSYRQQIDPLLKARQQYAYGRQHDYFDHWDVIGWTREGNASHPNSGLATIMSDGPGGSKWMYVGRQKAGEVWHDMTGNRSGTVTINQDGWGHFFVNGGSVSVWVKR

SEQ ID NO: 31647 - protein, 485 aa, Bacillus sp.
HHDGTNGTIMQYFEWNVPNDGQHWNRLHNNVQNLKNAGITAIWIPPAWKGTSQNDVGYGAYDLYDLGEFNQKGTVRTKYGTKAELERAIRSLKANGIQVYGDVVMNHKGGADFTERVQAVEVNPQNRNQEVSGTYQIEAWTGFNFPGRGNQHSSFKWRWYHFDGTDWDQSRQLANRIYKFRGDGKAWDWEVDTENGNYDYLMYADVDMDHPEVINELNRWGVWYANTLNLDGFRLDAVKHIKFSFMRDWLGHVRGQTGKNLFAVAEYWKNDLGALENYLSKTNWTMSAFDVPLHYNLYQASNSSGNYDMRNLLNGTLVQRHPSHAVTFVDNHDTQPGEALESFVQGWFKPLAYATILTREQGYPQVFYGDYYGIPSDGVPSYRQQIDPLLKARQQYAYGRQHDYFDHWDVIGWTREGNASHPNSGLATIMSDGPGGSKWMYVGRQKAGEVWHDMTGNRSGTVTINQDGWGHFFVNGGSVSVWVKR

SEQ ID NO: 31648 - protein, 485 aa, Bacillus sp.
HHDGTNGTIMQYFEWNVPNDGQHWNRLHNNAQNLKNAGITAIWIPPAWKGTSQNDVGYGAYDLYDLGEFNQKGTVRTKYGTKAELERAIRSLKANGIQVYGDVVMNHKGGADFTERVQAVDVNPQNRNQEVSGTYQIEAWTGFNFPGRGNQHSSFKWRWYHFDGTDWDQSRQLANRIYKFRGDGKAWDWEVDTENGNYDYLMYADVDMDHPEVINELNRWGVWYANTLNLDGFRLDAVKHIKFSFMRDWLGHVRGQTGKNLFAVAEYWKNDLGALENYLSKTNWTMSAFDVPLHYNLYQASNSSGNYDMRNLLNGTLVQRHPSHAVTFVDNHDTQPGEALESFVQGWFKPLAYATILTREQGYPQVFYGDYYGIPSDGVPSYRQQIDPLLKARQQYAYGRQHDYFDHWDVIGWTREGNASHPNSGLATIMSDGPGGSKWMYVGRQKAGEVWHDMTGNRSGTVTINQDGWGHFFVNGGSVSVWVKR

SEQ ID NO: 31649 - protein, 485 aa, Bacillus sp.
HHDGTNGTIMQYFEWNVPNDGQHWNRLHNNAQNLKNAGITAIWIPPAWKGTSQNDVGYGAYDLYDLGEFNQKGTVRTKYGTKAELERAIRSLKANGIQVYGDVVMNHKGGADFTERVQAVEVNPQNRNQEVSGTYQIEAWTGFNFPGRGNQHSSFKWRWYHFDGTDWDQSRQLANRIYKFRGDGKAWDWEVDTENGNYDYLMYADVDMDHPEVINELNRWGVWYANTLNLDGFRLDAVKHIKFSFMRDWLGHVRGQTGKNLFAVAEYWKNDLGALENYLSKTNWTMSAFDVPLHYNLYQASNSSGNYDMRNLLNGTLVQRHPSHAVTFVDNHDTQPGEALESFVQGWFKQLAYATILTREQGYPQVFYGDYYGIPSDGVPSYRQQIDPLLKARQQYAYGRQHDYFDHWDVIGWTREGNASHPNSGLATIMSDGPGGSKWMYVGRQKAGEVWHDMTGNRSGTVTINQDGWGHFFVNGGSVSVWVKR

SEQ ID NO: 31650 - protein, 485 aa, Bacillus sp.
HHDGTNGTIMQYFEWNVPNDGQHWNRLHNNAQNLKNAGITAIWIPPAWKGTSQNDVGYGAYDLYDLGEFNQKGTVRTKYGTKAELERAIRSLKANGIQVYGDVVMNHKGGADFTERVQAVEVNPQNRNQEVSGTYQIEAWTGFNFPGRGNQHSSFKWRWYHFDGTDWDQSRQLANRIYKFRGDGKAWDWEVDTENGNYDYLMYADVDMDHPEVINELNRWGVWYANTLNLDGFRLDAVKHIKFSFMYDWLGHVRGQTGKNLFAVAEYWKNDLGALENYLSKTNWTMSAFDVPLHYNLYQASNSSGNYDMRNLLNGTLVQRHPSHAVTFVDNHDTQPGEALESFVQGWFKPLAYATILTREQGYPQVFYGDYYGIPSDGVPSYRQQIDPLLKARQQYAYGRQHDYFDHWDVIGWTREGNASHPNSGLATIMSDGPGGSKWMYVGRQKAGEVWHDMTGNRSGTVTINQDGWGHFFVNGGSVSVWVKR

SEQ ID NO: 31651 - protein, 485 aa, Bacillus sp.
HHDGTNGTIMQYFEWNVPNDGQHWNRLHNNAQNLKNAGITAIWIPPAWKGTSQNDVGYGAYDLYDLGEFNQKGTVRTKYGTKAELERAIRSLKANGIQVYGDVVMNHKGGADFTERVQAVEVNPQNRPQEVSGTYQIEAWTGFNFPGRGNQHSSFKWRWYHFDGTDWDQSRQLANRIYKFRGDGKAWDWEVDTENGNYDYLMYADVDMDHPEVINELNRWGVWYANTLNLDGFRLDAVKHIKFSFMRDWLGHVRGQTGKNLFAVAEYWKNDLGALENYLSKTNWTMSAFDVPLHYNLYQASNSSGNYDMRNLLNGTLVQRHPSHAVTFVDNHDTQPGEALESFVQGWFKPLAYATILTREQGYPQVFYGDYYGIPSDGVPSYRQQIDPLLKARQQYAYGRQHDYFDHWDVIGWTREGNASHPNSGLATIMSDGPGGSKWMYVGRQKAGEVWHDMTGNRSGTVTINQDGWGHFFVNGGSVSVWVKR

SEQ ID NO: 31652 - protein, 485 aa, Bacillus sp.
HHDGTNGTIMQYFEWNVPNDGQHWNRLHNNAQNLKNAGITAIWIPPAWKGTSQNDVGYGAYDLYDLGEFNQKGTVRTKYGTKAELERAIRSLKANGIQVYGDVVMNHKGGADFTERVQAVEVNPQNRNQEVSGTYQIEAWTGFNFPGRGNQHSSFKWRWYHFDGTDWDQSRQLANRIYKFRGDGKAWDWEVDTENGNYDYLMYADVDMDHPEVINELNRWGVWYANTLNLDGFRLDAVKHIKFSFMRDWLGHVRGQTGKNLFAVAEYWKNDLGALENYLSKTNWTMSAFDVPLHYNLYQASNSSGNYDMRNLLNGTLVQRHPSHAVTFVDNHDTQPGEALESFVQGWFKPLAYATILTREQGYPQVFYGDYYGIPSDGVPSYRQQIDPLLKARQQYAKGRQHDYFDHWDVIGWTREGNASHPNSGLATIMSDGPGGSKWMYVGRQKAGEVWHDMTGNRSGTVTINQDGWGHFFVNGGSVSVWVKR

SEQ ID NO: 31653 - protein, 485 aa, Bacillus sp.
HHDGTNGTIMQYFEWNVPNDGQHWNRLHNNAQNLKNAGITAIWIPPAWKGTSQNDVGYGAYDLYDLGEFNQKGTVRTKYGTKAELERAIRSLKANGIQVYGDVVMNHKGGADFTERVQAVEVNPQNRNQEVSGTYQIEAWTGFNFPGRGNQHSSFKWRWYHFDGTDWDQSRQLANRIYKFRGDGKAWDWEVDTENGNYDYLMYADVDMDHPEVINELNRWGVWYANTLNLDGFRLDAVKHIKFSFMRDWLGHVRGQTGKNLFAVAEYWKNDLGALENYLSKTNWTMSAFDVPLHHNLYQASNSSGNYDMRNLLNGTLVQRHPSHAVTFVDNHDTQPGEALESFVQGWFKPLAYATILTREQGYPQVFYGDYYGIPSDGVPSYRQQIDPLLKARQQYAYGRQHDYFDHWDVIGWTREGNASHPNSGLATIMSDGPGGSKWMYVGRQKAGEVWHDMTGNRSGTVTINQDGWGHFFVNGGSVSVWVKR

SEQ ID NO: 31654 - protein, 485 aa, Bacillus sp.
HHDGTNGTIMQYFEWNVPNDGQHWNRLHNNAQNLKNAGITAIWIPPAWKGTSQNDVGYGAYDLYDLGEFNQKGTVRTKYGTKAELERAIRSLKANGIQVYGDVVMNHKGGADFTERVQAVEVNPQNRNQEVSGTYQIEAWTGFNFPGRGNQHSSFKWRWYHFDGTDWDQSRQLANRIYKFRGDGKAWDWEVDTENGNYDYLMYRDVDMDHPEVINELNRWGVWYANTLNLDGFRLDAVKHIKFSFMRDWLGHVRGQTGKNLFAVAEYWKNDLGALENYLSKTNWTMSAFDVPLHYNLYQASNSSGNYDMRNLLNGTLVQRHPSHAVTFVDNHDTQPGEALESFVQGWFKPLAYATILTREQGYPQVFYGDYYGIPSDGVPSYRQQIDPLLKARQQYAYGRQHDYFDHWDVIGWTREGNASHPNSGLATIMSDGPGGSKWMYVGRQKAGEVWHDMTGNRSGTVTINQDGWGHFFVNGGSVSVWVKR

SEQ ID NO: 31655 - protein, 485 aa, Bacillus sp.
HHDGTNGTIMQYFEWNVPNDGQHWNRLHNNAQNLKNAGITAIWIPPAWKGTSQNDVGYGAYDLYDLGEFNQKGTVRTKYGTKAELERAIRSLKANGIQVYGDVVMNHKGGADFTERVQAVEVNPQNRNQEVSGTYQIEAWTGFNHPGRGNQHSSFKWRWYHFDGTDWDQSRQLANRIYKFRGDGKAWDWEVDTENGNYDYLMYADVDMDHPEVINELNRWGVWYANTLNLDGFRLDAVKHIKFSFMRDWLGHVRGQTGKNLFAVAEYWKNDLGALENYLSKTNWTMSAFDVPLHYNLYQASNSSGNYDMRNLLNGTLVQRHPSHAVTFVDNHDTQPGEALESFVQGWFKPLAYATILTREQGYPQVFYGDYYGIPSDGVPSYRQQIDPLLKARQQYAYGRQHDYFDHWDVIGWTREGNASHPNSGLATIMSDGPGGSKWMYVGRQKAGEVWHDMTGNRSGTVTINQDGWGHFFVNGGSVSVWVKR

SEQ ID NO: 31656 - protein, 485 aa, Bacillus sp.
HHDGTNGTIMQYFEWNVPNDGQHWNRLHNNAQNLKNAGITAIWIPPAWKGTSQNDVGYGAYDLYDLGEFNQKGTVRTKYGTKAELERAIRSLKANGIQVYGDVVMNHKGGADFTERVQAVEVNPQNRNQEVSGTYQIEAWSGFNFPGRGNQHSSFKWRWYHFDGTDWDQSRQLANRIYKFRGDGKAWDWEVDTENGNYDYLMYADVDMDHPEVINELNRWGVWYANTLNLDGFRLDAVKHIKFSFMRDWLGHVRGQTGKNLFAVAEYWKNDLGALENYLSKTNWTMSAFDVPLHYNLYQASNSSGNYDMRNLLNGTLVQRHPSHAVTFVDNHDTQPGEALESFVQGWFKPLAYATILTREQGYPQVFYGDYYGIPSDGVPSYRQQIDPLLKARQQYAYGRQHDYFDHWDVIGWTREGNASHPNSGLATIMSDGPGGSKWMYVGRQKAGEVWHDMTGNRSGTVTINQDGWGHFFVNGGSVSVWVKR

SEQ ID NO: 31657 - protein, 485 aa, Bacillus sp.
HHDGTNGTIMQYFEWNVPNDGQHWNRLHNNAQNLKNAGITAIWIPPAWKGTSQNDVGYGTYDLYDLGEFNQKGTVRTKYGTKAELERAIRSLKANGIQVYGDVVMNHKGGADFTERVQAVEVNPQNRNQEVSGTYQIEAWTGFNFPGRGNQHSSFKWRWYHFDGTDWDQSRQLANRIYKFRGDGKAWDWEVDTENGNYDYLMYADVDMDHPEVINELNRWGVWYANTLNLDGFRLDAVKHIKFSFMRDWLGHVRGQTGKNLFAVAEYWKNDLGALENYLSKTNWTMSAFDVPLHYNLYQASNSSGNYDMRNLLNGTLVQRHPSHAVTFVDNHDTQPGEALESFVQGWFKPLAYATILTREQGYPQVFYGDYYGIPSDGVPSYRQQIDPLLKARQQYAYGRQHDYFDHWDVIGWTREGNASHPNSGLATIMSDGPGGSKWMYVGRQKAGEVWHDMTGNRSGTVTINQDGWGHFFVNGGSVSVWVKR

SEQ ID NO: 31658 - protein, 485 aa, Bacillus sp.
HHDGTNGTIMQYFEWNVPNDGQHWNRLHNNAQNLKNAGITAIWIPPAWKGTSQNDVGYGAYDLYDLGEFNQKGTVRTKYGTKAELERAIRSLKANGIQVYGDVVMNHKGGADFTERVQAVEVNPQNRNQEVSGTYQIEAWTGFNFPGRGNQHSSFKWRWYHFDGTDWDQSRQLANRIYKFRGDGKAWDWEVDTENGNYDYLMYADVDMDHPEMINELNRWGVWYANTLNLDGFRLDAVKHIKFSFMRDWLGHVRGQTGKNLFAVAEYWKNDLGALENYLSKTNWTMSAFDVPLHYNLYQASNSSGNYDMRNLLNGTLVQRHPSHAVTFVDNHDTQPGEALESFVQGWFKPLAYATILTREQGYPQVFYGDYYGIPSDGVPSYRQQIDPLLKARQQYAYGRQHDYFDHWDVIGWTREGNASHPNSGLATIMSDGPGGSKWMYVGRQKAGEVWHDMTGNRSGTVTINQDGWGHFFVNGGSVSVWVKR

SEQ ID NO: 31659 - protein, 485 aa, Bacillus sp.
HHDGTNGTIMQYFEWNVPNDGQHWNRLHNNAQNLKNAGITAIWIPPAWKGTSQNDVGYGAYDLYDLGEFNQKGTVRTKYGTKAELERAIRSLKANGIQVYGDVVMNHKGGADFTERVQAVEVNPQNRNQEVSGTYQIEAWTGFNFPGRGNQHSSFKWRWYHFDGTDWDQSRQLANRIYKFRGDGKAWDWEVDTENGNYDYLMYADVDMDHPEVINELNRWGVWYANTLNLDGFRLDAVKHIKFSFMRDWLGHVRGQTGKNLFAVAEYWKNDLGALENYLSKTNWTMSAFDVPLHYNLYQASNSSGNYDMRNLLDGTLVQRHPSHAVTFVDNHDTQPGEALESFVQGWFKPLAYATILTREQGYPQVFYGDYYGIPSDGVPSYRQQIDPLLKARQQYAYGRQHDYFDHWDVIGWTREGNASHPNSGLATIMSDGPGGSKWMYVGRQKAGEVWHDMTGNRSGTVTINQDGWGHFFVNGGSVSVWVKR

SEQ ID NO: 31660 - protein, 485 aa, Bacillus sp.
HHDGTNGTIMQYFEWNVPNDGQHWNRLHNNAQNLKNAGITAIWIPPAWKGTSQNDVGYGAYDLYDLGEFNQKGTVRTKYGTKAELERAIRSLKANGIQVYGDVVMNHKGGADFTERVQAVEVNPQNRNQEVSGTYQIEAYTGFNFPGRGNQHSSFKWRWYHFDGTDWDQSRQLANRIYKFRGDGKAWDWEVDTENGNYDYLMYADVDMDHPEVINELNRWGVWYANTLNLDGFRLDAVKHIKFSFMRDWLGHVRGQTGKPLFAVAEYWKNDLGALENYLSKTNWTMSAFDVPLHYNLYQASNSSGNYDMRNLLNGTLVQRHPSHAVTFVDNHDTQPGEALESFVQGWFKPLAYATILTREQGYPQVFYGDYYGIPSDGVPSYRQQIDPLLKARQQYAYGRQHDYFDHWDVIGWTREGNASHPNSGLATIMSDGPGGSKWMYVGRQKAGEVWHDMTGNRSGTVTINQDGWGHFFVNGGSVSVWVKR

SEQ ID NO: 31661 - protein, 485 aa, Bacillus sp.
HHDGTNGTIMQYFEWNVPNDGQHWNRLHNNAQNLKNAGITAIWIPPAWKGTSQNDVGYGAYDLYDLGEFNQKGTVRTKYGTKAELERAIRSLKANGIQVYGDVVMNHKGGADFTERVQAVEVNPQNRNQEVSGTYQIEAWTGFNFPGRGNQHSSFKWRWYHFDGTDWDQSRQLANRIYKFRGDGKAWDWEVDTENGNADYLMYADVDMDHPEVINELNRWGVWYANTLNLDGFRLDAVKHIKFSFMRDWLGHVRGQTGKNLFAVAEYWKNDLGALENYLSKTNWTMSAFDVPLHYNLYQASNSSGNYDMRNLLNGTLVQRHPSHAVTFVDNHDTQPGEALESFVQGWFKPLAYATILTREQGYPQVFYGDYYGIPSDGVPSYRQQIDPLLKARQQYAYGRQHDYFDHWDVIGWTREGNASHPNSGLATIMSDGPGGSKWMYVGRQKAGEVWHDMTGNRSGTVTINQDGWGHFFVNGGSVSVWVKR

SEQ ID NO: 31662 - protein, 485 aa, Bacillus sp.
HHDGTNGTIMQYFEWNVPNDGQHWNRLHNNAQNLKNAGITAIWIPPAWKGTSQNDVGYGAYDLYDLGEFNQKGTVRTKYGTKAELERAIRSLKANGIQVYGDVVMNHKGGADFTERVQAVEVNPQNRNQEVSGTYQIEAWTGFNFPGRGNQHSSFKWRTYHFDGTDWDQSRQLANRIYKFRGDGKAWDWEVDTENGNYDYLMYADVDMDHPEVINELNRWGVWYANTLNLDGFRLDAVKHIKFSFMRDWLGHVRGQTGKNLFAVAEYWKNDLGALENYLSKTNWTMSAFDVPLHYNLYQASNSSGNYDMRNLLNGTLVQRHPSHAVTFVDNHDTQPGEALESFVQGWFKPLAYATILTREQGYPQVFYGDYYGIPSDGVPSYRQQIDPLLKARQQYAYGRQHDYFDHWDVIGWTREGNASHPNSGLATIMSDGPGGSKWMYVGRQKAGEVWHDMTGNRSGTVTINQDGWGHFFVNGGSVSVWVKR

SEQ ID NO: 31663 - protein, 485 aa, Bacillus sp.
HHDGTNGTIMQYFEWNVPNDGQHWNRLHNNAQNLKNAGITAIWIPPAWKGTSQNDVGYGAYDLYDLGEFNQKGTVRTKYGTKAELERAIRSLKANGIQVYGDVVMNHKGGADFTERVQAVEVNPQNRNQEVSGTEQIEAWTGFNFPGRGNQHSSFKWRWYHFDGTDWDQSRQLANRIYKFRGDGKAWDWEVDTENGNYDYLMYADVDMDHPEVINELNRWGVWYANTLNLDGFRLDAVKHIKFSFMRDWLGHVRGQTGKNLFAVAEYWKNDLGALENYLSKTNWTMSAFDVPLHYNLYQASNSSGNYDMRNLLNGTLVQRHPSHAVTFVDNHDTQPGEALESFVQGWFKPLAYATILTREQGYPQVFYGDYYGIPSDGVPSYRQQIDPLLKARQQYAYGRQHDYFDHWDVIGWTREGNASHPNSGLATIMSDGPGGSKWMYVGRQKAGEVWHDMTGNRSGTVTINQDGWGHFFVNGGSVSVWVKR

SEQ ID NO: 31664 - protein, 485 aa, Bacillus sp.
HHDGTNGTIMQYFEWNVPNDGQHWNRLHNNAQNLKNAGITAIWIPPAWKGTSQNDVGYGAYDLYDLGEFNQKGTVRTKYGTKAELERAIRSLKANGIQVYGDVVMNHKGGADFTERVQAVEVNPQNRNQEVSGTYQIEAWTGFNFPGRGNQHSSFKWRWYHFDGTDWDQSRQLANRIYKFRGDGKAWDWEVDTENGNYDYLMYADIDMDHPEVINELNRWGVWYANTLNLDGFRLDAVKHIKFSFMRDWLGHVRGQTGKNLFAVAEYWKNDLGALENYLSKTNWTMSAFDVPLHYNLYQASNSSGNYDMRNLLNGTLVQRHPSHAVTFVDNHDTQPGEALESFVQGWFKPLAYATILTREQGYPQVFYGDYYGIPSDGVPSYRQQIDPLLKARQQYAYGRQHDYFDHWDVIGWTREGNASHPNSGLATIMSDGPGGSKWMYVGRQKAGEVWHDMTGNRSGTVTINQDGWGHFFVNGGSVSVWVKR

SEQ ID NO: 31665 - protein, 485 aa, Bacillus sp.
HHDGTNGTIMQYFEWNVPNDGQHWNRLHNNAQNLKNAGITAIWIPPAWKGTSQNDVGYGAYDLYDLGEFNQKGTVRTKYGTKAELERAIRSLKANGIQVYGDVVMNHKGGADFTERVQAVEVNPQNRNQEVSGTYQIEAWTGFNFPGRGNQHSSFKWRWYHFDGTDWDQSRQLANRIYKFRGDGKAWDWEVDTENGNYDYLMYADFDMDHPEVINELNRWGVWYANTLNLDGFRLDAVKHIKFSFMRDWLGHVRGQTGKNLFAVAEYWKNDLGALENYLSKTNWTMSAFDVPLHYNLYQASNSSGNYDMRNLLNGTLVQRHPSHAVTFVDNHDTQPGEALESFVQGWFKPLAYATILTREQGYPQVFYGDYYGIPSDGVPSYRQQIDPLLKARQQYAYGRQHDYFDHWDVIGWTREGNASHPNSGLATIMSDGPGGSKWMYVGRQKAGEVWHDMTGNRSGTVTINQDGWGHFFVNGGSVSVWVKR

SEQ ID NO: 31666 - protein, 485 aa, Bacillus sp.
HHDGTNGTIMQYFEWNVPNDGQHWNRLHNNAQNLKNAGITAIWIPPAWKGTSQNDVGYGAYDLYDLGEFNQKGTVRTKYGTKAELERAIRSLKANGIQVYGDVVMNHKGGADFTERVQAVEVNPQNRNQEVSGTYQIEAWTGFNFPGRGNQHSSFKWRWYHFDGTDWDQSRQLANRIYKFRGDGKVWDWEVDTENGNYDYLMYADVDMDHPEVINELNRWGVWYANTLNLDGFRLDAVKHIKFSFMRDWLGHVRGQTGKNLFAVAEYWKNDLGALENYLSKTNWTMSAFDVPLHYNLYQASNSSGNYDMRNLLNGTLVQRHPSHAVTFVDNHDTQPGEALESFVQGWFKPLAYATILTREQGYPQVFYGDYYGIPSDGVPSYRQQIDPLLKARQQYAYGRQHDYFDHWDVIGWTREGNASHPNSGLATIMSDGPGGSKWMYVGRQKAGEVWHDMTGNRSGTVTINQDGWGHFFVNGGSVSVWVKR

SEQ ID NO: 31667 - protein, 485 aa, Bacillus sp.
HHDGTNGTIMQYFEWNVPNDGQHWNRLHNNAQNLKNAGITAIWIPPAWKGTSQNDVGYGAYDLYDLGEFNQKGTVRTKYGTKAELERAIRSLKANGIQVYGDVVMNHKGGADFTERVQAVEVNPQNRNQEVSGTYQIEAWTGFNFPGRGNQHSSFKWRWYHFDGTDWDQSRQLANRIYKFRGDGKAWDWEVDTENGNYDYLMYADVDMDHPEVINELNRWGVWYANTLNLDGFRLDAVKHIKFSFMRDWLGHVRGQTGKNLFAVAEYWKNDLGALENYLSKTNWTMSAFDVPLHYNLYQASNSSGNYDMRNLLNGTLVQRHPSHATTFVDNHDTQPGEALESFVQGWFKPLAYATILTREQGYPQVFYGDYYGIPSDGVPSYRQQIDPLLKARQQYAYGRQHDYFDHWDVIGWTREGNASHPNSGLATIMSDGPGGSKWMYVGRQKAGEVWHDMTGNRSGTVTINQDGWGHFFVNGGSVSVWVKR

SEQ ID NO: 31668 - protein, 485 aa, Bacillus sp.
HHDGTNGTIMQYFEWNVPNDGQHWNRLHNNAQNLKNAGITAIWIPPAWKGTSQNDVGYGAYDLYDLGEFNQKGTVRTKYGTKAELERAIRSLKANGIQVYGDVVMNHKGGADFTERVQAVEVNPQNRNQEVSGTYQIEAWTGFNFPGRGNQHSSFKWRWYHFDGTDWDQSRQLANRIYKFRGDGKAWDWEVDTENGNYDYLMYADVDMDHPEVINELNRWGVWYANTLNLDGFRLDAVKHIKFSFMRDWLGHVRGQTGKNLFAVAEYWKNDLGALENYLSKTNWTMSAFDVPLHYFLYQASNSSGNYDMRNLLNGTLVQRHPSHAVTFVDNHDTQPGEALESFVQGWFKPLAYATILTREQGYPQVFYGDYYGIPSDGVPSYRQQIDPLLKARQQYAYGRQHDYFDHWDVIGWTREGNASHPNSGLATIMSDGPGGSKWMYVGRQKAGEVWHDMTGNRSGTVTINQDGWGHFFVNGGSVSVWVKR

SEQ ID NO: 31669 - protein, 485 aa, Bacillus sp.
HHDGTNGTIMQYFEWNVPNDGQHWNRLHNNAQNLKNAGITAIWIPPAWKGTSQNDVGYGAYDLYDLGEFNQKGTVRTKYGTKAELERAIRSLKANGIQVYGDVVMNHKGGADFTERVQAVEVNPQNRNQEVSGTYQIEAWTGFNFPGRGNQHSSFKWRWYHFDGTDWDQSRQLANRIYKFRGDGKAWDWEVDTENGNYDYLMYADVDMDHPEVINELNRWGVWYANTLNLDGFRLDAVKHIKFSFMRDWLGHVRGQTGKNLFAVAEYWKNDLGALENYLSKTNWTMSAFDVPLHYNLYQASNSSGNYDMRNLLNGTLVQRHPSHAVTFVDNHDTQPGEALESFVQGWFKPLAYATILTREQGYPQVFYGDYYGIPSDGVPSYRQQIDPLLKARQQYAYGRQHDYFDHWDVIGWTREGNASHPNSGLATIRSDGPGGSKWMYVGRQKAGEVWHDMTGNRSGTVTINQDGWGHFFVNGGSVSVWVKR

SEQ ID NO: 31670 - protein, 485 aa, Bacillus sp.
HHDGTNGTIMQYFEWNVPNDGQHWNRLHNNAQNLKNAGITAIWIPPAWKGTSQNDVGYGAYDLYDLGEFNQKGTVRTKYGTKAELERAIRSLKANGIQVYGDVVMNHKGGADFTERVQAVEVNPQNRNQEVSGTYQIEAWTGFNFPGRGNQHSSFKWRWYHFDGTDWDQSRQLANRIYKFRGDGKAWDWEVDTENGNYDYLMYADVDMDHPEVINELNRWGVWYANTLNLDGFRLDAVKHIKFSFMRDWLGHVRGQTGKNLFAVAEYWKNDLGALENYLSKTNWTMSAFDVPLHYNLYQASNSKGNYDMRNLLNGTLVQRHPSHAVTFVDNHDTQPGEALESFVQGWFKPLAYATILTREQGYPQVFYGDYYGIPSDGVPSYRQQIDPLLKARQQYAYGRQHDYFDHWDVIGWTREGNASHPNSGLATIMSDGPGGSKWMYVGRQKAGEVWHDMTGNRSGTVTINQDGWGHFFVNKGSVSVWVKR

SEQ ID NO: 31671 - protein, 485 aa, Bacillus sp.
HHDGTNGTIMQYFEWNVPNDGQHWNRLHNNAQNLKNAGITAIWIPPAWKGTSQNDVGYGAYDLYDLGEFNQKGTVRTKYGTKAELERAIRSLKANGIQVYGDVVMNHKGGADFTERVQAVEVNPQNRNQEVSGTYQIEAWTGFNFPGRGCQHSSFKWRWYHFDGTDWDQSRQLANRIYKFRGDGKAWDWEVDTENGNYDYLMYADVDMDHPEVINELNRWGVWYANTLNLDGFRLDAVKHIKFSFMRDWLGHVRGQTGKNLFAVAEYWKNDLGALENYLSKTNWTMSAFDVPLHYNLYQASNSSGNYDMRNLLNGTLVQRHPSHAVTFVDNHDTQPGEALESFVQGWFKPLAYATILTREQGYPQVFYGDYYGIPSDGVPSYRQQIDPLLKARQQYAYGRQHDYFDHWDVIGWTREGNASHPNSGLATIMSDGPGGSKWMYVGRQKAGEVWHDMTGNRSGTVTINQDGWGHFFVNGGSVSVWVKR

SEQ ID NO: 31672 - protein, 485 aa, Bacillus sp.
HHDGTNGTIMQYFEWNVPNDGQHWNRLHNNAQNLKNAGITAIWIPPAWKGTSQNDVGYGAYDLYDLGEFNQKGTVRTKYGTKAELERAIRSLKANGIQVYGDVVMNHKGGADFTERVQALEVNPQNRNQEVSGTYQIEAWTGFNFPGRGNQHSSFKWRWYHFDGTDWDQSRQLANRIYKFRGDGKAWDWEVDTENGNYDYLMYADVDMDHPEVINELNRWGVWYANTLNLDGFRLDAVKHIKFSFMRDWLGHVRGQTGKNLFAVAEYWKNDLGALENYLSKTNWTMSAFDVPLHYNLYQASNSSGNYDMRNLLNGTLVQRHPSHAVTFVDNHDTQPGEALESFVQGWFKPLAYATILTREQGYPQVFYGDYYGIPSDGVPSYRQQIDPLLKARQQYAYGRQHDYFDHWDVIGWTREGNASHPNSGLATIMSDGPGGSKWMYVGRQKAGEVWHDMTGNRSGTVTINQDGWGHFFVNGGSVSVWVKR

SEQ ID NO: 31673 - protein, 485 aa, Bacillus sp.
HHDGTNGTIMQYFEWNVPNDGQHWNRLHNNAQNLKNAGITAIWIPPAWKGTSQNDVGYGAYDLYDLGEFNQKGTVRTKYGTKAELERAIRSLKANGIQVYGDVVMNHKGGADFTERVQAVEVNPQNRNQEVSGTYQIEAWTGFNFPGRGNQHSSFDWRWYHFDGTDWDQSRQLANRIYKFRGDGKAWDWEVDTENGNYDYLMYADVDMDHPEVINELNRWGVWYANTLNLDGFRLDAVKHIKFSFMRDWLGHVRGQTGKNLFAVAEYWKNDLGALENYLSKTNWTMSAFDVPLHYNLYQASNSSGNYDMRNLLNGTLVQRHPSHAVTFVDNHDTQPGEALESFVQGWFKPLAYATILTREQGYPQVFYGDYYGIPSDGVPSYRQQIDPLLKARQQYAYGRQHDYFDHWDVIGWTREGNASHPNSGLATIMSDGPGGSKWMYVGRQKAGEVWHDMTGNRSGTVTINQDGWGHFFVNGGSVSVWVKR

SEQ ID NO: 31674 - protein, 485 aa, Bacillus sp.
HHDGTNGTIMQYFEWNVPNDGQHWNRLHNNAQNLKNAGITAIWIPPAWKGTSQNDVGYGAYDLYDMGEFNQKGTVRTKYGTKAELERAIRSLKANGIQVYGDVVMNHKGGADFTERVQAVEVNPQNRNQEVSGTYQIEAWTGFNFPGRGNQHSSFKWRWYHFDGTDWDQSRQLANRIYKFRGDGKAWDWEVDTENGNYDYLMYADVDMDHPEVINELNRWGVWYANTLNLDGFRLDAVKHIKFSFMRDWLGHVRGQTGKNLFAVAEYWKNDLGALENYLSKTNWTMSAFDVPLHYNLYQASNSSGNYDMRNLLNGTLVQRHPSHAVTFVDNHDTQPGEALESFVQGWFKPLAYATILTREQGYPQVFYGDYYGIPSDGVPSYRQQIDPLLKARQQYAYGRQHDYFDHWDVIGWTREGNASHPNSGLATIMSDGPGGSKWMYVGRQKAGEVWHDMTGNRSGTVTINQDGWGHFFVNGGSVSVWVKR

SEQ ID NO: 31675 - protein, 485 aa, Bacillus sp.
HHDGTNGTIMQYFEWNVPNDGQHWNRLHNNAQNLKNAGITAIWIPPAWKGTSQNDVGYGAYDLYDLGEFNQKGTVRTKYGTKAELERAIRSLKANGIQVYGDVVMNHKGGADFTERVQAVEVNPQNRNQEVSGTYQIEAWTGFNFPGRGNQHSSFKWRWYHFDGTDWDQSRQLANRIYKFRGDGKAWDWEVDTENGNYDYLMYADVDMDHPEVINELNRWGVWYANTLNLDGFRLDAVKHIKFSFMRDWLGHVRGQTFKNLFAVAEYWKNDLGALENYLSKTNWTMSAFDVPLHYNLYQASNSSGNYDMRNLLNGTLVQRHPSHAVTFVDNHDTQPGEALESFVQGWFKPLAYATILTREQGYPQVFYGDYYGIPSDGVPSYRQQIDPLLKARQQYAYGRQHDYFDHWDVIGWTREGNASHPNSGLATIMSDGPGGSKWMYVGRQKAGEVWHDMTGNRSGTVTINQDGWGHFFVNGGSVSVWVKR

SEQ ID NO: 31676 - protein, 485 aa, Bacillus sp.
HHDGTNGTIMQYFEWNVPNDGQHWNRLHNNAQNLKNAGITAIWIPPAWKGTSQNDVGYGAYDLYDLGEFNQKGTVRTKYGTKAELERAIRSLKANGIQVYGDVVMNHKGGADFTERVQAVEVNPQNRNQEVSGTYQIEAWTGFNFPGRGNQHSSFKWRWYHFRGTDWDQSRQLANRIYKFRGDGKAWDWEVDTENGNYDYLMYADVDMDHPEVINELNRWGVWYANTLNLDGFRLDAVKHIKFSFMRDWLGHVRGQTGKNLFAVAEYWKNDLGALENYLSKTNWTMSAFDVPLHYNLYQASNSSGNYDMRNLLNGTLVQRHPSHAVTFVDNHDTQPGEALESFVQGWFKPLAYATILTREQGYPQVFYGDYYGIPSDGVPSYRQQIDPLLKARQQYAYGRQHDYFDHWDVIGWTREGNASHPNSGLATIMSDGPGGSKWMYVGRQKAGEVWHDMTGNRSGTVTINQDGWGHFFVNGGSVSVWVKR

SEQ ID NO: 31677 - protein, 485 aa, Bacillus sp.
HHDGTNGTIMQYFEWNVPNDGQHWNRLHNNAQNLKNAGITAIWIPPAWKGTSQNDVGYGAYDLYDLGEFNQKGTVRTKYGTKAELERAIRSLKANGIQVYGDVVMNHKGGADFTERVQAVEVNPQNRNQEVSGTYQIEAWTGFNFPGRGNQHSSFKWRWYHFDGTDWDQSRQLANRIYKFRGDGKAWDWEVDTENGNYDYLMYADVDMDHPEVINELNRWGVWYANTLNLDGFRLDAVKHIKFSFMRDWLGHVRGQTGKNLFAVAEYWKNDLGALENYLSKTNWTMSAFDVPAHYNLYQASNSSGNYDMRNLLNGTLVQRHPSHAVTFVDNHDTQPGEALESFVQGWFKPLAYATILTREQGYPQVFYGDYYGIPSDGVPSYRQQIDPLLKARQQYAYGRQHDYFDHWDVIGWTREGNASHPNSGLATIMSDGPGGSKWMYVGRQKAGEVWHDMTGNRSGTVTINQDGWGHFFVNGGSVSVWVKR

SEQ ID NO: 31678 - protein, 485 aa, Bacillus sp.
HHDGTNGTIMQYFEWNVPNDGQHWNRLHNNAQNLKNAGITAIWIPPAWKGTSQNDVGYGAYDLYDLGEFNQKGTVRTKYGTKAELERAIRSLKANGIQVYGDVVMNHKGGADFTERVQAVEVNPQNRNQEVSGTYQIEAWTGFNFPGRGNQHSSFKWRWYHFDGTDWDQSRQLANRIYKFRGDGKAWDWEVDTENGNYDYLMYADVDMDHPEVINELNRWGVWYANTLNLDGFRLDAVKHIKFSFMRDWLGHVRGQTGKNLFAVAEYWKNDLRALENYLSKTNWTMSAFDVPLHYNLYQASNSSGNYDMRNLLNGTLVQRHPSHAVTFVDNHDTQPGEALESFVQGWFKPLAYATILTREQGYPQVFYGDYYGIPSDGVPSYRQQIDPLLKARQQYAYGRQHDYFDHWDVIGWTREGNASHPNSGLATIMSDGPGGSKWMYVGRQKAGEVWHDMTGNRSGTVTINQDGWGHFFVNGGSVSVWVKR

SEQ ID NO: 31679 - protein, 485 aa, Bacillus sp.
HHDGTNGTIMQYFEWNVPNDGQHWNRLHNNAQNLKNAGITAIWIPPAWKGTSQNDVGYGAYDLYDLGEFNQKGTVRTKYGTKAELERAIRSLKANGIQVYGDVVMNHKGGADFTERVQAVEVNPQNRNQEVSGTYQIEAWTGFNFPGRGNQHSSFKWRWYHFDGTDWDQSRQLANRIYKFRGDGKAWDWEVDTENGNYDYLMYADVDMDHPEVINELNRWGVWYANTLNLDGFRLDAVKHIKFSAMRDWLGHVRGQTGKNLFAVAEYWKNDLGALENYLSKTNWTMSAFDVPLHYNLYQASNSSGNYDMRNLLNGTLVQRHPSHAVTFVDNHDTQPGEALESFVQGWFKPLAYATILTREQGYPQVFYGDYYGIPSDGVPSYRQQIDPLLKARQQYAYGRQHDYFDHWDVIGWTREGNASHPNSGLATIMSDGPGGSKWMYVGRQKAGEVWHDMTGNRSGTVTINQDGWGHFFVNGGSVSVWVKR

SEQ ID NO: 31680 - protein, 485 aa, Bacillus sp.
HHDGTNGTIMQYFEWNVPNDGQHWNRLHNNAQNLKNAGITAIWIPPAWKGTSQNDVGYGAYDLYDLGEFNQKGTVRTKYGTKAELERAIRSLKANGIQVYGDVVMNHKGGADFTERVQAVEVNPQNRNQEVSGTYQIEAWTGFNFPGRGNQHSSFKWRWYHFDGTDWDQSRQLANRIYKFRGDGKAWDWEVDTENGNYDYLMYADVDMDHPEVINELNRWGVWYANMLNLDGFRLDAVKHIKFSFMRDWLGHVRGQTGKNLFAVAEYWKNDLGALENYLSKTNWTMSAFDVPLHYNLYQASNSSGNYDMRNLLNGTLVQRHPSHAVTFVDNHDTQPGEALESFVQGWFKPLAYATILTREQGYPQVFYGDYYGIPSDGVPSYRQQIDPLLKARQQYAYGRQHDYFDHWDVIGWTREGNASHPNSGLATIMSDGPGGSKWMYVGRQKAGEVWHDMTGNRSGTVTINQDGWGHFFVNGGSVSVWVKR

SEQ ID NO: 31681 - protein, 485 aa, Bacillus sp.
HHDGTNGTIMQYFEWNVPNDGQHWNRLHNNAQNLKNAGITAIWIPPAWKGTSQNDVGYGAYDLYDLGEFTQKGTVRTKYGTKAELERAIRSLKANGIQVYGDVVMNHKGGADFTERVQAVEVNPQNRNQEVSGTYQIEAWTGFNFPGRGNQHSSFKWRWYHFDGTDWDQSRQLANRIYKFRGDGKAWDWEVDTENGNYDYLMYADVDMDHPEVINELNRWGVWYANTLNLDGFRLDAVKHIKFSFMRDWLGHVRGQTGKNLFAVAEYWKNDLGALENYLSKTNWTMSAFDVPLHYNLYQASNSSGNYDMRNLLNGTLVQRHPSHAVTFVDNHDTQPGEALESFVQGWFKPLAYATILTREQGYPQVFYGDYYGIPSDGVPSYRQQIDPLLKARQQYAYGRQHDYFDHWDVIGWTREGNASHPNSGLATIMSDGPGGSKWMYVGRQKAGEVWHDMTGNRSGTVTINQDGWGHFFVNGGSVSVWVKR

SEQ ID NO: 31682 - protein, 485 aa, Bacillus sp.
HHDGTNGTIMQYFEWNVPNDGQHWNRLHNNAQNLKNAGITAIWIPPAWKGTSQNDVGYGAYDLYDLGEFNQKGTVRTKYGTKAELERAIRSLKANGIQVYGDVVMNHKGGADFTERVQAVEVNPQNRNQEVSGTYQIEAWTGFNFPGRGNQHSSFKWRWYHFDGTDWDQSRQLANRIYKFRGDGKAWDWEVDTENGNYDYLMYADVDMDHPEVINELNRWGVWYANTLNLDGFRLDAVKHIKFSFMRDWLGHVRGQTGSNLFAVAEYWKNDLGALENYLSKTNWTMSAFDVPLHYNLYQASNSSGNYDMRNLLNGTLVQRHPSHAVTFVDNHDTQPGEALESFVQGWFKPLAYATILTREQGYPQVFYGDYYGIPSDGVPSYRQQIDPLLKARQQYAYGRQHDYFDHWDVIGWTREGNASHPNSGLATIMSDGPGGSKWMYVGRQKAGEVWHDMTGNRSGTVTINQDGWGHFFVNGGSVSVWVKR

SEQ ID NO: 31683 - protein, 485 aa, Bacillus sp.
HHDGTNGTIMQYFEWNVPNDGQHWNRLHNNAQNLKNAGITAIWIPPAWKGTSQNDVGYGAYDLYDLGEFNQKGTVRTKYGTKAELERAIRSLKANGIQVYGDVVMNHKGGADFTERVQAVEVNPQNRNQEVSGTYQIEAWTGFNFPGRGNQHSSFKWRWYHFDGTDWDQSRQLANRIYKFRGDGKAWDWEVDTENGNYDYLMYADVDMDHPEVINELNTWGVWYANTLNLDGFRLDAVKHIKFSFMRDWLGHVRGQTGKNLFAVAEYWKNDLGALENYLSKTNWTMSAFDVPLHYNLYQASNSSGNYDMRNLLNGTLVQRHPSHAVTFVDNHDTQPGEALESFVQGWFKPLAYATILTREQGYPQVFYGDYYGIPSDGVPSYRQQIDPLLKARQQYAYGRQHDYFDHWDVIGWTREGNASHPNSGLATIMSDGPGGSKWMYVGRQKAGEVWHDMTGNRSGTVTINQDGWGHFFVNGGSVSVWVKR

SEQ ID NO: 31684 - protein, 485 aa, Bacillus sp.
HHDGTNGTIMQYFEWNVPNDGQHWNRLHNNAQNLKQAGITAIWIPPAWKGTSQNDVGYGAYDLYDLGEFNQKGTVRTKYGTKAELERAIRSLKANGIQVYGDVVMNHKGGADFTERVQAVEVNPQNRNQEVSGTYQIEAWTGFNFPGRGNQHSSFKWRWYHFDGTDWDQSRQLANRIYKFRGDGKAWDWEVDTENGNYDYLMYADVDMDHPEVINELNRWGVWYANTLNLDGFRLDAVKHIKFSFMRDWLGHVRGQTGKNLFAVAEYWKNDLGALENYLSKTNWTMSAFDVPLHYNLYQASNSSGNYDMRNLLNGTLVQRHPSHAVTFVDNHDTQPGEALESFVQGWFKPLAYATILTREQGYPQVFYGDYYGIPSDGVPSYRQQIDPLLKARQQYAYGRQHDYFDHWDVIGWTREGNASHPNSGLATIMSDGPGGSKWMYVGRQKAGEVWHDMTGNRSGTVTINQDGWGHFFVNGGSVSVWVKR

SEQ ID NO: 31685 - protein, 485 aa, Bacillus sp.
HHDGTNGTIMQYFEWNVPNDGQHWNRLHNNAQNLKNAGITAIWIPPAWKGTSQNDVGYGAYDLYDLGEFNQKGTVRTKYGTKAELERAIRSLKANGIQVYGDVVMNHKGGADFTERVQAVEVNPQNRNQEVSGTYQIEAWTGFNFPGRGNQHSSFWWRWYHFDGTDWDQSRQLANRIYKFRGDGKAWDWEVDTENGNYDYLMYADVDMDHPEVINELNRWGVWYANTLNLDGFRLDAVKHIKFSFMRDWLGHVRGQTGKNLFAVAEYWKNDLGALENYLSKTNWTMSAFDVPLHYNLYQASNSSGNYDMRNLLNGTLVQRHPSHAVTFVDNHDTQPGEALESFVQGWFKPLAYATILTREQGYPQVFYGDYYGIPSDGVPSYRQQIDPLLKARQQYAYGRQHDYFDHWDVIGWTREGNASHPNSGLATIMSDGPGGSKWMYVGRQKAGEVWHDMTGNRSGTVTINQDGWGHFFVNGGSVSVWVKR

SEQ ID NO: 31686 - protein, 485 aa, Bacillus sp.
HHDGTNGTIMQYFEWNVPNDGQHWNRLHNNAQNLKNAGITAIWIPPAWKGTSQNDVGYGAYDLMDLGEFNQKGTVRTKYGTKAELERAIRSLKANGIQVYGDVVMNHKGGADFTERVQAVEVNPQNRNQEVSGTYQIEAWTGFNFPGRGNQHSSFKWRWYHFDGTDWDQSRQLANRIYKFRGDGKAWDWEVDTENGNYDYLMYADVDMDHPEVINELNRWGVWYANTLNLDGFRLDAVKHIKFSFMRDWLGHVRGQTGKNLFAVAEYWKNDLGALENYLSKTNWTMSAFDVPLHYNLYQASNSSGNYDMRNLLNGTLVQRHPSHAVTFVDNHDTQPGEALESFVQGWFKPLAYATILTREQGYPQVFYGDYYGIPSDGVPSYRQQIDPLLKARQQYAYGRQHDYFDHWDVIGWTREGNASHPNSGLATIMSDGPGGSKWMYVGRQKAGEVWHDMTGNRSGTVTINQDGWGHFFVNGGSVSVWVKR

SEQ ID NO: 31687 - protein, 485 aa, Bacillus sp.
HHDGTNGTIMQYFEWNVPNDGQHWNRLHNNAQNLKNAGITAIWIPPAWKGTSQNDVGYGAYDLYDLGEFNQKGTVRTKYGTKAELERAIRSLKANGIQVYGDVVMNHKGGADFTERVQAVEVNPQNRNQEVSGTYQIEAWTGFNFPGRGNQHSSFKWRWYHFDGTDWDQSRQLANRIYKFRGDGKAWDWEVDTENGNYDYLMYADVDMDHPEVINELNRWGVWYANTLNLDGFRLDAVKHIKFSFMRDWLGHVRGQTGKNLFAVAEYWKNDLGALENYLSKTNWTMSAFDVPLQYNLYQASNSSGNYDMRNLLNGTLVQRHPSHAVTFVDNHDTQPGEALESFVQGWFKPLAYATILTREQGYPQVFYGDYYGIPSDGVPSYRQQIDPLLKARQQYAYGRQHDYFDHWDVIGWTREGNASHPNSGLATIMSDGPGGSKWMYVGRQKAGEVWHDMTGNRSGTVTINQDGWGHFFVNGGSVSVWVKR

SEQ ID NO: 31688 - protein, 485 aa, Bacillus sp.
HHDGTNGTIMQYFEWNVPNDGQHWNRLHNNAQNLKNAGITAIWIPPAWKGTSQNDVGYGAYDLYDLGEFNQKGTVRTKYGTKAELERAIRSLKANGIQVYGDVVMNHKGGADFTERVQAVEVNPQNRNQEVSGTYQIEAWTGFNFPGRGNQHSSFKWRSYHFDGTDWDQSRQLANRIYKFRGDGKAWDWEVDTENGNYDYLMYADVDMDHPEVINELNRWGVWYANTLNLDGFRLDAVKHIKFSFMRDWLGHVRGQTGKNLFAVAEYWKNDLGALENYLSKTNWTMSAFDVPLHYNLYQASNSSGNYDMRNLLNGTLVQRHPSHAVTFVDNHDTQPGEALESFVQGWFKPLAYATILTREQGYPQVFYGDYYGIPSDGVPSYRQQIDPLLKARQQYAYGRQHDYFDHWDVIGWTREGNASHPNSGLATIMSDGPGGSKWMYVGRQKAGEVWHDMTGNRSGTVTINQDGWGHFFVNGGSVSVWVKR

SEQ ID NO: 31689 - protein, 485 aa, Bacillus sp.
HHDGTNGTIMQYFEWNVPNDGQHWNRLHNNAQNLKNAGITAIWIPPAWKGTSQNDVGYGAYDLYDLGEFNQKGTVRTKYGTKAELERAIRSLKANGIQVYGDVVMNHKGGADFTERVQAVEVNPQNRNQEVSGTYQIEAWTGFNFPGRGNQHSSFKWRWYHFDGTDWDQARQLANRIYKFRGDGKAWDWEVDTENGNYDYLMYADVDMDHPEVINELNRWGVWYANTLNLDGFRLDAVKHIKFSFMRDWLGHVRGQTGKNLFAVAEYWKNDLGALENYLSKTNWTMSAFDVPLHYNLYQASNSSGNYDMRNLLNGTLVQRHPSHAVTFVDNHDTQPGEALESFVQGWFKPLAYATILTREQGYPQVFYGDYYGIPSDGVPSYRQQIDPLLKARQQYAYGRQHDYFDHWDVIGWTREGNASHPNSGLATIMSDGPGGSKWMYVGRQKAGEVWHDMTGNRSGTVTINQDGWGHFFVNGGSVSVWVKR

SEQ ID NO: 31690 - protein, 483 aa, Bacillus sp.
HHDGTNGTIMQYFEWNVPNDGQHWNRLHNNAQNLKNAGITAIWIPPAWKGTSQNDVGYGAYDLYDLGEFNQKGTVRTKYGTKAELERAIRSLKANGIQVYGDVVMNHKGGADFTERVQAVEVNPQNRNQEVSGTYQIEAWTGFNFPGRGNQHSSFKWRWYHFDGTDWDQSRQLANRIYKFRGKAWDWEVDTENGNYDYLMYADVDMDHPEVINELNRWGVWYANTLNLDGFRLDAVKHIKFSFMRDWLGHVRGQTGKNLFAVAEYWXNDLGALENYLSKTNWTMSAFDVPLHYNLYQASNSSGNYDMRNLLNGTLVQRHPSHAVTFVDNHDTQPGEALESFVQGWFKPLAYATILTREQGYPQVFYGDYYGIPSDGVPSYRQQIDPLLKARQQYAYGRQHDYFDHWDVIGWTREGNASHPNSGLATIMSDGPGGSKWMYVGRQKAGEVWHDMTGNRSGTVTINQDGWGHFFVNGGSVSVWVKR

SEQ ID NO: 31691 - protein, 485 aa, Bacillus sp.
HHDGTNGTIMQYFEWNVPNDGQHWNRLHNNAQNLKNAGITAIWIPPAWKGTSQNDVGYGAYDLYDLGEFNQKGTVRTKYGTKAELERAIRSLKANGIQVYGDVVMNHKGGADFTERVQAVEVNPQNRNQEVSGTYQIEAWTGFNFPGRGNQHSSFKWRWSHFDGTDWDQSRQLANRIYKFRGDGKAWDWEVDTENGNYDYLMYADVDMDHPEVINELNRWGVWYANTLNLDGFRLDAVKHIKFSFMRDWLGHVRGQTGKPLFAVAEYWKNDLGALENYLSKTNWTMSAFDVPLHYNLYQASNSSGNYDMRNLLNGTLVQRHPSHAVTFVDNHDTQPGEALESFVQGWFKPLAYATILTREQGYPQVFYGDYYGIPSDGVPSYRQQIDPLLKARQQYAYGRQHDYFDHWDVIGWTREGNASHPNSGLATIMSDGPGGSKWMYVGRQKAGEVWHDMTGNRSGTVTINQDGWGHFFVNGGSVSVWVKR

SEQ ID NO: 31692 - protein, 485 aa, Bacillus sp.
HHDGTNGTIMQYFEWNVPNDGQHWNRLHNNAQNLKNAGITAIWIPPAWKGTSQNDVGYGAYDLYDLGEFNQKGTVRTKYGTKAELERAIRSLKANGIQVYGDVVMNHKGGADFTERVQAVEVNPQNRNQEVSGTYQIEAWTGFNFPGRGNQHSSFKWRWYHFDGTDWDQSRQLANRIYKFRGDGKAWDWEVDTENGNYDYLMYADVDMDHPEVINELNRWGVWYANTLNLDGFRLDAVKHIKFSFMRDWLGHVRGQTGKNLFAVAEYWKNDLGALENYLSKTNWTMSAFDVPLHYNLYQASNSSGNYDMRNLLNGTLVQRHPSHAVTFVDNHDTQPGEALESFVQGWFKPLAYATILTREQGYPQVFYGDYYGIASDGVPSYRQQIDPLLKARQQYAYGRQHDYFDHWDVIGWTREGNASHPNSGLATIMSDGPGGSKWMYVGRQKAGEVWHDMTGNRSGTVTINQDGWGHFFVNGGSVSVWVKR

SEQ ID NO: 31693 - protein, 485 aa, Bacillus sp.
HHDGTNGTIMQYFEWNVPNDGQHWNRLHNNAQNLKNAGITAIWIPPAWKGTSQNDVGYGAYDLYDLGEFNQKGTVRTKYGTKAELERAIRSLKANGIQVYGDVVMNHKGGADFTERVQAVEVNPQNRNQEVSGTYQIEAWTGFNFPGRGNQHSSFKWRWYHFDGTDWDQSRQLANRIYKFRGDGKAWDWEVDTENGNYDYLMYADVDMDHPEVINELNRWGVWYANTLNLDGFRLDAVKHIKFSFMRDWLGHVRGQTGKNLFAVAEYVKNDLGALENYLSKTNWTMSAFDVPLHYNLYQASNSSGNYDMRNLLNGTLVQRHPSHAVTFVDNHDTQPGEALESFVQGWFKPLAYATILTREQGYPQVFYGDYYGIPSDGVPSYRQQIDPLLKARQQYAYGRQHDYFDHWDVIGWTREGNASHPNSGLATIMSDGPGGSKWMYVGRQKAGEVWHDMTGNRSGTVTINQDGWGHFFVNGGSVSVWVKR

SEQ ID NO: 31694 - protein, 485 aa, Bacillus sp.
HHDGTNGTIMQYFEWNVPNDGQHWNRLHNNAQNLKNAGITAIWIPPAWKGTSQNDVGYGAYDLYDLGEFNQKGTVRTKYGTKAELERAIRSLKANGIQVYGDVVMNHKGGADFTERVQAVEVNPQNRNQEVSGTYQIEAWTGFNFPGRGNQHSSFKWRWYHFDGTDWDQSRQLANRIYKFRGDGKAWDWEVDTENGNYDYLMYADVDMDHPEVINELNRWGVWYANTLNLDGFRLDAVKHIKFSFMRDWLGHVRGQTGKNLFAVAEYWKNDLGALENYLSKTNWTMSAFDVPLHYNLYQASNSSGNYDMRNLLNGTLVQRHPSHAVTFVDNHDTQPGEALESFVQGWFKPLAYATILTREQGYPQVFYGDYYGIVSDGVPSYRQQIDPLLKARQQYAYGRQHDYFDHWDVIGWTREGNASHPNSGLATIMSDGPGGSKWMYVGRQKAGEVWHDMTGNRSGTVTINQDGWGHFFVNGGSVSVWVKR

SEQ ID NO: 31695 - protein, 485 aa, Bacillus sp.
HHDGTNGTIMQYFEWNVPNDGQHWNRLHNNAQNLKNAGITAIWIPPAWKGTSQNDVGYGAYDLYDLGEFNQKGTVRTKYGTKAELERAIRSLKANGIQVYGDVVMNHKGGADFTERVQAVEVNPQNRNQEVSGTYQIEAWTGFNFPGRGNQHSSFKWRWYHFDGTDWDQSRQLANRIYKFRGDGKAWDWEVDTENGNYDYLMYADVDMDHPEVINELNRWGVWYANTLNLDGFRLDAVKHIKFSFMRDWLGHVRGQTGKNLFAVAEYWKNDLGALENYLSKTNWTMSAFDVPLHYNLYQASNSSGNYDMRNLLNGTLVQRHPSHAVTFVDNHDTQPGEALESFVQGWFKPLAYATILTREQGYPQVFYGDYYGIPSDGVPSYRQQIDPLLKARQQYAYGRQHDYFDHWDVIGWTREGNASHPNAGLATIMSDGPGGSKWMYVGRQKAGEVWHDMTGNRSGTVTINQDGWGHFFVNGGSVSVWVKR

SEQ ID NO: 31696 - protein, 485 aa, Bacillus sp.
HHDGTNGTIMQYFEWNVPNDGQHWNRLHNNAQNLKNAGITAIWIPPAWKGTSQNDVGYGAYDLYDLGEFNQKGTVRTKYGTKAELERAIRSLKANGIQVYGDVVMNHKGGADFTERVQAVEVNPQNRNQEVSGTYQIEAWTGFNFPGRGNQHSSFKWRWYHFDGTDWDQSRQLANRIYKFRGDGKAWDWEVDTENGNYDYLMYADVDMDHPEVINELNRWGVWYANTLNLDGFRLDAVKHIKFSFMRDWLGHVRGQTGKNLFAVAEYWKNDLGALENYLSKTNWTMSAFDVPLHYNLYQASNSSGNYDMRNLLNGTLVQRHPSHAVTFVDNHDTQPGEALKSFVQGWFKPLAYATILTREQGYPQVFYGDYYGIPSDGVPSYRQQIDPLLKARQQYAYGRQHDYFDHWDVIGWTREGNASHPNSGLATIMSDGPGGSKWMYVGRQKAGEVWHDMTGNRSGTVTINQDGWGHFFVNGGSVSVWVKR

SEQ ID NO: 31697 - protein, 485 aa, Bacillus sp.
HHDGTNGTIMQYFEWNVPNDGQHWNRLHNNAQNLKWAGITAIWIPPAWKGTSQNDVGYGAYDLYDLGEFNQKGTVRTKYGTKAELERAIRSLKANGIQVYGDVVMNHKGGADFTERVQAVEVNPQNRNQEVSGTYQIEAWTGFNFPGRGNQHSSFKWRWYHFDGTDWDQSRQLANRIYKFRGDGKAWDWEVDTENGNYDYLMYADVDMDHPEVINELNRWGVWYANTLNLDGFRLDAVKHIKFSFMRDWLGHVRGQTGKNLFAVAEYWKNDLGALENYLSKTNWTMSAFDVPLHYNLYQASNSSGNYDMRNLLNGTLVQRHPSHAVTFVDNHDTQPGEALESFVQGWFKPLAYATILTREQGYPQVFYGDYYGIPSDGVPSYRQQIDPLLKARQQYAYGRQHDYFDHWDVIGWTREGNASHPNSGLATIMSDGPGGSKWMYVGRQKAGEVWHDMTGNRSGTVTINQDGWGHFFVNGGSVSVWVKR

SEQ ID NO: 31698 - protein, 485 aa, Bacillus sp.
HHDGTNGTIMQYFEWNVPNDGQHWNRLHNNAQNLKNAGITAIWIPPAWKGTSQNDVGYGAYDLYDLGEFNQKGTVRTKYGTKAELERAIRSLKANGIQVYGDVVMNHKGGADFTERVQAVEVNPQNRNQEVSGTYQIEAWTGFNFPGRGNQHSSFKWRWYHFDGTDWDQSRQLANRIYKFRGDGKAWDWEVDTENGNYDYLMWADVDMDHPEVINELNRWGVWYANTLNLDGFRLDAVKHIKFSFMRDWLGHVRGQTGKNLFAVAEYWKNDLGALENYLSKTNWTMSAFDVPLHYNLYQASNSSGNYDMRNLLNGTLVQRHPSHAVTFVDNHDTQPGEALESFVQGWFKPLAYATILTREQGYPQVFYGDYYGIPSDGVPSYRQQIDPLLKARQQYAYGRQHDYFDHWDVIGWTREGNASHPNSGLATIMSDGPGGSKWMYVGRQKAGEVWHDMTGNRSGTVTINQDGWGHFFVNGGSVSVWVKR

SEQ ID NO: 31699 - protein, 485 aa, Bacillus sp.
HHDGTNGTIMQYFEWNVPNDGQHWNRLHNNAQNLKNAGITAIWIPPAWKGTSQNDVGYGAYDLYDLGEFNQKGTVRTKYGTKAELERAIRSLKANGIQVYGDVVMNHKGGADFTERVQAVEVNPQNRNQEVSGTYQIEAWTGFNFPGRGNQHSSFKWRWYHFDGTDWDQSRQLANRIYKFRGDGKAWDWEVDTENGNYDYLMYADVDMDHPEVINELNRWGVWYANTLNLDGFRLDAVKHIKFSFMRDWLGHVRGQTGKNLFAVAEYWKNDLGALENYLSKTNWTMSAFDVPLHYNLYQASNSSINYDMRNLLNGTLVQRHPSHAVTFVDNHDTQPGEALESFVQGWFKPLAYATILTREQGYPQVFYGDYYGIPSDGVPSYRQQIDPLLKARQQYAYGRQHDYFDHWDVIGWTREGNASHPNSGLATIMSDGPGGSKWMYVGRQKAGEVWHDMTGNRSGTVTINQDGWGHFFVNGGSVSVWVKR

SEQ ID NO: 31700 - protein, 485 aa, Bacillus sp.
HHDGTNGTIMQYFEWNVPNDGQHWNRLHNNAQNLKNAGITAIWIPPAWKGTSQNDVGYGAYDLYDLGEFNQKGTVRTKYGTKAELERAIRSLKANGIQVYGDVVMNHKGGADFTERVQAVEVNPQNRNQEVSGTYQIEAWTGFNFPGRGNQHSSFKWRWYHFDGTDWDQSRQLANRIYKFRGDGKAWDWEVDTENGNYDYLMYADVDMDHPEVINELNRWGVWYANTLNLDGFRLDAVKHIKFSFMRDWLGHVRGQTGKNLFAVAEYWKNDLGALENYLSKTNWTMSAFDVPLHYNLYQASNSSGNYDMRNLLNGTLVQRHPSHAVTFVDNHDTQPGEALESFVQGWFKPLAYATILTREQGYPQVFYGDYYGIPSDGVPSYRQQIDPLLKARQQYAYGRQHDYFDHWDVIGWTREGNASHPNSGLATIMSDGPGGSKWMYVGRQKAGEVWHDMTKNRSGTVTINQDGWGHFFVNGGSVSVWVKR

SEQ ID NO: 31701 - protein, 483 aa, Bacillus sp. (in: firmicutes)
HHDGTNGTIMQYFEWNVPNDGQHWNRLHNNAQNLKNAGITAIWIPPAWKGTSQNDVGYGSYDLYDLGEFNQKGTVRTKYGTKAELERAIRSLKANGIQVYGDVVMNHKGGADFTERVQAVEVNPQNRNQEVSGTYQIEAWTGFNFPGRGNQHSSFKWRWYHFDGTDWDQSYQLANRIYKFRGKAWDWEVDTENGNYDYLMYADVDMDHPEVINELNRWGVWYANTLNLDGFRLDAVKHIKFSFMRDWLGHVRGQTGKNLFAVAEYWKNDLGALENYLSKTNWTMSAFDVPLHYNLYQASNSSGNYDMRNLLNGTLVQRHPSHAVTFVDNHDTQPGEALESFVQGWFKPLAYATILTREQGYPSVFYGDYYGIPSDGVPSYRQQIDPLLKARQQYAYGRQHDYFDHWDVIGWTREGNASHPNSGLATIMSDGPGGSKWMYVGRQKAGEVWHDMTGNRSGTVTINQDGWGHFFVNGGSVSVWVKR

SEQ ID NO: 31702 - protein, 485 aa, Bacillus sp.
HHDGTNGTIMQYFEWNVPNDGQHWNRLHNNAQNLKNAGITAIWIPPAWKGTSQNDVGYGAYDLYDLGEFNQKGTVRTKYGTKAELERAIRSLKANGIQVYGDVVMNHKGGADFTERVQAVEVNPQNRNQEVSGTYQIEAWTGFNFPGRGNQHSSFKWRWYHFDGTDWDQSRQLANRIYKFRGDGKAWDWEVDTENGNYDYLMHADVDMDHPEVINELNRWGVWYANTLNLDGFRLDAVKHIKFSFMRDWLGHVRGQTGKNLFAVAEYWKNDLGALENYLSKTNWTMSAFDVPLHYNLYQASNSSGNYDMRNLLNGTLVQRHPSHAVTFVDNHDTQPGEALESFVQGWFKPLAYATILTREQGYPQVFYGDYYGIPSDGVPSYRQQIDPLLKARQQYAYGRQHDYFDHWDVIGWTREGNASHPNSGLATIMSDGPGGSKWMYVGRQKAGEVWHDMTGNRSGTVTINQDGWGHFFVNGGSVSVWVKR

SEQ ID NO: 31703 - protein, 485 aa, Bacillus sp.
HHDGTNGTIMQYFEWNVPNDGQHWNRLHNNAQNLKNAGITAIWIPPAWKGTSQNDVGYGAYDLYDLGEFNQKGTVRTTYGTKAELERAIRSLKANGIQVYGDVVMNHKGGADFTERVQAVEVNPQNRNQEVSGTYQIEAWTGFNFPGRGNQHSSFKWRWYHFDGTDWDQSRQLANRIYKFRGDGKAWDWEVDTENGNYDYLMYADVDMDHPEVINELNRWGVWYANTLNLDGFRLDAVKHIKFSFMRDWLGHVRGQTGKNLFAVAEYWKNDLGALENYLSKTNWTMSAFDVPLHYNLYQASNSSGNYDMRNLLNGTLVQRHPSHAVTFVDNHDTQPGEALESFVQGWFKPLAYATILTREQGYPQVFYGDYYGIPSDGVPSYRQQIDPLLKARQQYAYGRQHDYFDHWDVIGWTREGNASHPNSGLATIMSDGPGGSKWMYVGRQKAGEVWHDMTGNRSGTVTINQDGWGHFFVNGGSVSVWVKR

SEQ ID NO: 31704 - protein, 485 aa, Bacillus sp.
HHDGTNGTIMQYFEWNVPNDGQHWNRLHNNAQNLKNAGITAIWIPPAWKGTSQNDVGYGAYDLYDLGEFNQKGTVRTKYGTKAELERAIRSLKANGIQVYGDVVMNHKGGADFTERVQAVEVNPQNRNQEVSGTYQIEAWTGFNSPGRGNQHSSFKWRWYHFDGTDWDQSRQLANRIYKFRGDGKAWDWEVDTENGNYDYLMYADVDMDHPEVINELNRWGVWYANTLNLDGFRLDAVKHIKFSFMRDWLGHVRGQTGKNLFAVAEYWKNDLGALENYLSKTNWTMSAFDVPLHYNLYQASNSSGNYDMRNLLNGTLVQRHPSHAVTFVDNHDTQPGEALESFVQGWFKPLAYATILTREQGYPQVFYGDYYGIPSDGVPSYRQQIDPLLKARQQYAYGRQHDYFDHWDVIGWTREGNASHPNSGLATIMSDGPGGSKWMYVGRQKAGEVWHDMTGNRSGTVTINQDGWGHFFVNGGSVSVWVKR

SEQ ID NO: 31705 - protein, 485 aa, Bacillus sp.
HHDGTNGTIMQYFEWNVPNDGQHWTRLHNNAQNLKNAGITAIWIPPAWKGTSQNDVGYGAYDLYDLGEFNQKGTVRTKYGTKAELERAIRSLKANGIQVYGDVVMNHKGGADFTERVQAVEVNPQNRNQEVSGTYQIEAWTGFNFPGRGNQHSSFKWRWYHFDGTDWDQSRQLANRIYKFRGDGKAWDWEVDTENGNYDYLMYADVDMDHPEVINELNRWGVWYANTLNLDGFRLDAVKHIKFSFMRDWLGHVRGQTGKNLFAVAEYWKNDLGALENYLSKTNWTMSAFDVPLHYNLYQASNSSGNYDMRNLLNGTLVQRHPSHAVTFVDNHDTQPGEALESFVQGWFKPLAYATILTREQGYPQVFYGDYYGIPSDGVPSYRQQIDPLLKARQQYAYGRQHDYFDHWDVIGWTREGNASHPNSGLATIMSDGPGGSKWMYVGRQKAGEVWHDMTGNRSGTVTINQDGWGHFFVNGGSVSVWVKR

SEQ ID NO: 31706 - protein, 485 aa, Bacillus sp.
HHDGTNGTIMQYFEWNVPNDGQHWNRLHNNAQNLKNAGITAIWIPPAWKGTSQNDVGYGAYDLYDLGEFNQKGTVRTKYGTKAELERAIRSLKANGIQVWGDVVMNHKGGADFTERVQAVEVNPQNRNQEVSGTYQIEAWTGFNFPGRGNQHSSFKWRWYHFDGTDWDQSRQLANRIYKFRGDGKAWDWEVDTENGNYDYLMYADVDMDHPEVINELNRWGVWYANTLNLDGFRLDAVKHIKFSFMRDWLGHVRGQTGKNLFAVAEYWKNDLGALENYLSKTNWTMSAFDVPLHYNLYQASNSSGNYDMRNLLNGTLVQRHPSHAVTFVDNHDTQPGEALESFVQGWFKPLAYATILTREQGYPQVFYGDYYGIPSDGVPSYRQQIDPLLKARQQYAYGRQHDYFDHWDVIGWTREGNASHPNSGLATIMSDGPGGSKWMYVGRQKAGEVWHDMTGNRSGTVTINQDGWGHFFVNGGSVSVWVKR

SEQ ID NO: 31707 - protein, 485 aa, Bacillus sp.
HHDGTNGTIMQYFEWNVPNDGQHWNRLHNNAQNLKNAGITAIWIPPAWKGTSQNDVGYGAYDLYDLGEFNQKGTVRTKYGTKAELERAIRSLKALGIQVYGDVVMNHKGGADFTERVQAVEVNPQNRNQEVSGTYQIEAWTGFNFPGRGNQHSSFKWRWYHFDGTDWDQSRQLANRIYKFRGDGKAWDWEVDTENGNYDYLMYADVDMDHPEVINELNRWGVWYANTLNLDGFRLDAVKHIKFSFMRDWLGHVRGQTGKNLFAVAEYWKNDLGALENYLSKTNWTMSAFDVPLHYNLYQASNSSGNYDMRNLLNGTLVQRHPSHAVTFVDNHDTQPGEALESFVQGWFKPLAYATILTREQGYPQVFYGDYYGIPSDGVPSYRQQIDPLLKARQQYAYGRQHDYFDHWDVIGWTREGNASHPNSGLATIMSDGPGGSKWMYVGRQKAGEVWHDMTGNRSGTVTINQDGWGHFFVNGGSVSVWVKR

SEQ ID NO: 31708 - protein, 485 aa, Bacillus sp.
HHDGTNGTIMQYFEWNVPNDGQHWNRLHNNAQNLKNAGITAIWIPPAWKGTSQNDVGYGAYDLYDLGEFNQKGTVRTKYGTKAELERAIRSLKANGIQVYGDVVMNHKGGADFTERVQAVEVNPQNRNQEVSGTYQIEAWTGFNFPGRGNQHSSFKWRWYHFDGTDWDQSRQLANRIYEFRGDGKAWDWEVDTENGNYDYLMYADVDMDHPEVINELNRWGVWYANTLNLDGFRLDAVKHIKFSFMRDWLGHVRGQTGKNLFAVAEYWKNDLGALENYLSKTNWTMSAFDVPLHYNLYQASNSSGNYDMRNLLNGTLVQRHPSHAVTFVDNHDTQPGEALESFVQGWFKPLAYATILTREQGYPQVFYGDYYGIPSDGVPSYRQQIDPLLKARQQYAYGRQHDYFDHWDVIGWTREGNASHPNSGLATIMSDGPGGSKWMYVGRQKAGEVWHDMTGNRSGTVTINQDGWGHFFVNGGSVSVWVKR

SEQ ID NO: 31709 - protein, 485 aa, Bacillus sp.
HHDGTNGTIMQYFEWNVPNDGQHWNRLHNNAQNLKNAGITAIWIPPAWKGTSQNDVGYGAYDLYDLGEFNQKGTVRTKYGTKAELERAIRSLKANGIQVYGDVVMNHKGGADFTERVQAVEVNPQNRNQEVSGTYQIEAWTGFNFPGRGNQHSSFKWRWYHFDGTDWDQSRQLANRIYKFRGDGKAWDWEVDTENGNYDYLMYADVDMDHPEVINELNRWGVWYANTLNLDGFRLDAVKHIKFSFMRDWLGHVRGQTGKNLFAVAEYWKNDLGALENYLSKTNWTMSAFDVPLHYNLYQASNSSGNYDMRNLLNGTLVQRHPSHAVTFVDNHDTQPGEALESFVQGWFKPLAYATILTREQGAPQVFYGDYYGIPSDGVPSYRQQIDPLLKARQQYAYGRQHDYFDHWDVIGWTREGNASHPNSGLATIMSDGPGGSKWMYVGRQKAGEVWHDMTGNRSGTVTINQDGWGHFFVNGGSVSVWVKR

SEQ ID NO: 31710 - protein, 485 aa, Bacillus sp.
HHDGTNGTIMQYFEWNVPNDGQHWNRLHNNAQNLKNAGITAIWIPPAWKGTSQNDVGYGAYDLYDLGEFNQKGTVRTKYGTKAELERAIRSLKANGIQVYGDVVMNHKGGADFTERVQAVEVNPQNRNQEVSGTYQIEAWTGFNFPGRGNQHSSFKWRWYHFDGTDWDQSRQLANRIYKFRGDGKAWDWEVDTENGNYDYLMYADVDMDHPEVINELNRWGVWYANTLNLDGFRLDAVKHIKFSFMRDWLGHVRGQTGKNLFAVAEYWKNDLGALENYLSKTNWTMSAFDVPLHYNLYQASNSSGNYDMRNLLNGTLVQRSPSHAVTFVDNHDTQPGEALESFVQGWFKPLAYATILTREQGYPQVFYGDYYGIPSDGVPSYRQQIDPLLKARQQYAYGRQHDYFDHWDVIGWTREGNASHPNSGLATIMSDGPGGSKWMYVGRQKAGEVWHDMTGNRSGTVTINQDGWGHFFVNGGSVSVWVKR

SEQ ID NO: 31711 - protein, 485 aa, Bacillus sp.
HHDGTNGTIMQYFEWNVPNDGQHWNRLHNNAQNLKNAGITAIWIPPAWKGTSQNDVGYGAYDLYDLGEFNQKGTVRTKYGTKAELERAIRSLKANGIQVYGDVVMNHKGGADFTERVQAVEVNPQNRNQEVSGTYQIEAWTGFNFPGRGNQHSSFKWRWYHFDGTDWDQSRQLANRIYKFRGDGKAWDWEVDTENGNYDYLMYADVDMDHPEVINELNRWGVWYANTLNLDGFRLDAVKHIKFSFMRDWLGHVRGQTGKNLFAVAEYWKNDLGALENYLSKTNWTMSAFDVPLHYNLYQASNSSGNYDMRNLLNGTLVQRHPSHAVTFVDNHDTQPGEALESFVQGWFKPLAYATILTREQGYPQVFYGDYYGIPSDGVPSYRQQIDPLLKARQQYAYGRQHDYFDHWDVIGWTREGNASHPNSGLATIMSDGPGGSKHMYVGRQKAGEVWHDMTGNRSGTVTINQDGWGHFFVNGGSVSVWVKR

SEQ ID NO: 31712 - protein, 485 aa, Bacillus sp.
HHDGTNGTIMQYFEWNVPNDGQHWNRLHNNAQNLKNAGITAIWIPPAWKGTSQNDVGYGAYDLYDLGEFNQKGTVRTKYGTKAELERAIRSLKANGIQVYGDVVMNHKGGADFTERVQAVEVNPQNRNQEVSGTYQIEAWTGFNFPGRGNQHSSFKWRWYHFDGTDWDQSRQLANRIYKFRGDGKAWDWEVDTENGNYDYLMYADVDMDHPEVINELNRWGVWYANTLNLDGFRLDAVKHIKFSFMRDWLGHVRGQTGKNLFAVAEYWKNDLGALENYLSKTNWTMSAFDVPLHYNLYQASNSSGNYDMRNLLNGTLVQRHPSHAVTFVDNHDTQPGEALESFVQGWFKPLAYATILTREQGYPQVFYGDYYGIPSDGVPSYRQQIDPLLKARQQYAYGRQHDYCDHWDVIGWTREGNASHPNSGLATIMSDGPGGSKWMYVGRQKAGEVWHDMTGNRSGTVTINQDGWGHFFVNGGSVSVWVKR

SEQ ID NO: 31713 - protein, 485 aa, Bacillus sp.
HHDGTNGTIMQYFEWNVPNDGQHWNRLHNNAQNLKNAGITAIWIPPAWKGTSQNDVGYGAYDLYDLGEFNQKGTVRTKYGTKAELERAIRSLKANGIQVYGDVVMNHKGGADFTERVQAVEVNPQNRNQEVSGTYQIEAWTGFNFPGRGNQHSSFKWRWYHFDGTDWDQSRQLANRIYKFRGDGKAWDWEVDTENGNYDYLMYADVDMDHPEVINEPNRWGVWYANTLNLDGFRLDAVKHIKFSFMRDWLGHVRGQTGKNLFAVAEYWKNDLGALENYLSKTNWTMSAFDVPLHYNLYQASNSSGNYDMRNLLNGTLVQRHPSHAVTFVDNHDTQPGEALESFVQGWFKPLAYATILTREQGYPQVFYGDYYGIPSDGVPSYRQQIDPLLKARQQYAYGRQHDYFDHWDVIGWTREGNASHPNSGLATIMSDGPGGSKWMYVGRQKAGEVWHDMTGNRSGTVTINQDGWGHFFVNGGSVSVWVKR

SEQ ID NO: 31714 - protein, 485 aa, Bacillus sp.
HHDGTNGTIMQYFEWNVPNDGQHWNRLHNNAQNLKNAGITAIWIPPAWKGTSQNDVGYGAYDLYDLGEFNQKGTVRTKYGTKAELERAIRSLKANGIQVYGDVVMNHKGGADFTERVQAVEVNPQNRNQEVSGTYQIEAWTGFNFPGRGNQHSSFKWRWYHFDGTDWDQSRQLANRIYKFRGDGKAWDWEVDTENGNYDYLMYADVDMDHPEVINELNRWGVWYANTLNLDGFRLDAVKHIKFSFMRDWLGEVRGQTGKNLFAVAEYWKNDLGALENYLSKTNWTMSAFDVPLHYNLYQASNSSGNYDMRNLLNGTLVQRHPSHAVTFVDNHDTQPGEALESFVQGWFKPLAYATILTREQGYPQVFYGDYYGIPSDGVPSYRQQIDPLLKARQQYAYGRQHDYFDHWDVIGWTREGNASHPNSGLATIMSDGPGGSKWMYVGRQKAGEVWHDMTGNRSGTVTINQDGWGHFFVNGGSVSVWVKR

SEQ ID NO: 31715 - protein, 485 aa, Bacillus sp.
HHDGTNGTIMQYFEWNVPNDGQHWNRLHNNAQNLKNAGITAIWIPPAWKGTSQNDVGYGAYDLYDLGEFNQKGTVRTKYGTKAELERAIRSLKANGIQVYGDVVMNHKGGADFTERVQAVEVNPQNRNQEVSGTYQIEAWTGFNFPGRGNQHSSFKWRWYHFDGTDWDQSRQLANRIYKFRGDGKAWDWEVDTENGNYDYLMYADVDMDHPEVINELNRWGVWYANTLNLDGFRLDAVKHIKFSFMRDWLGHVRGQTGDNLFAVAEYWKNDLGALENYLSKTNWTMSAFDVPLHYNLYQASNSSGNYDMRNLLNGTLVQRHPSHAVTFVDNHDTQPGEALESFVQGWFKPLAYATILTREQGYPQVFYGDYYGIPSDGVPSYRQQIDPLLKARQQYAYGRQHDYFDHWDVIGWTREGNASHPNSGLATIMSDGPGGSKWMYVGRQKAGEVWHDMTGNRSGTVTINQDGWGHFFVNGGSVSVWVKR

SEQ ID NO: 31716 - protein, 485 aa, Bacillus sp.
HHDGTNGTIMQYFEWNVPNDGQHWNRLHNNAQNLKNAGITAIWIPPAWKGTSQNDVGYGAYDLYDLGEFNQKGTVRTKYGTKAELERAIRSLKANGIQVYGDVVMNHKGGADFTERVQAVEVNPQNRNQEVSGTYQIEAWTGFNFPGRGNQHSSFKWRWHHFDGTDWDQSRQLANRIYKFRGDGKAWDWEVDTENGNYDYLMYADVDMDHPEVINELNRWGVWYANTLNLDGFRLDAVKHIKFSFMRDWLGHVRGQTGKNLFAVAEYWKNDLGALENYLSKTNWTMSAFDVPLHYNLYQASNSSGNYDMRNLLNGTLVQRHPSHAVTFVDNHDTQPGEALESFVQGWFKPLAYATILTREQGYPQVFYGDYYGIPSDGVPSYRQQIDPLLKARQQYAYGRQHDYFDHWDVIGWTREGNASHPNSGLATIMSDGPGGSKWMYVGRQKAGEVWHDMTGNRSGTVTINQDGWGHFFVNGGSVSVWVKR

SEQ ID NO: 31717 - protein, 485 aa, Bacillus sp.
HHDGTNGTIMQYFEWNVPNDGQHWNRLHNNAQNLKNAGITAIWIPPAWKGTSQNDVGYGAYDLYDLGEFNQKGVVRTKYGTKAELERAIRSLKANGIQVYGDVVMNHKGGADFTERVQAVEVNPQNRNQEVSGTYQIEAWTGFNFPGRGNQHSSFKWRWYHFDGTDWDQSRQLANRIYKFRGDGKAWDWEVDTENGNYDYLMYADVDMDHPEVINELNRWGVWYANTLNLDGFRLDAVKHIKFSFMRDWLGHVRGQTGKNLFAVAEYWKNDLGALENYLSKTNWTMSAFDVPLHYNLYQASNSSGNYDMRNLLNGTLVQRHPSHAVTFVDNHDTQPGEALESFVQGWFKPLAYATILTREQGYPQVFYGDYYGIPSDGVPSYRQQIDPLLKARQQYAYGRQHDYFDHWDVIGWTREGNASHPNSGLATIMSDGPGGSKWMYVGRQKAGEVWHDMTGNRSGTVTINQDGWGHFFVNGGSVSVWVKR

SEQ ID NO: 31718 - protein, 485 aa, Bacillus sp.
HHDGTNGTIMQYFEWNVPNDGQHWNRLHNNAQNLKNAGITAIWIPPAWKGTSQNDVGYGAYDLYDLGEFNQKGTVRTKYGTKAELERAIRSLKANGIQVYGDVVMNHKGGADFTERVQAVEVNPQNRNQEVSGTYQIEAWTGFNFPGRGNQHSSFKWRWYHFDGTDWDQSRQLANRIYKFRGDGKAWDWEVDTENGNYDYLMYADVDMDHPEVINELNRWGVWYANTLNLDGFRLDAVKHIKFSFMRDWLGHVRGQTGKNLFAVAEYWKNDLGALENYLSKTNWTMSAFDVPLHYNLYQASNSSGNYDMRNLLNGTLVQRHPSHAVTFVDNHDTQPGEALESFVQGWSKPLAYATILTREQGYPQVFYGDYYGIPSDGVPSYRQQIDPLLKARQQYAYGRQHDYFDHWDVIGWTREGNASHPNSGLATIMSDGPGGSKWMYVGRQKAGEVWHDMTGNRSGTVTINQDGWGHFFVNGGSVSVWVKR

SEQ ID NO: 31719 - protein, 485 aa, Bacillus sp.
HHDGTNGTIMQYFEWNVPNDGQHWNRLHNNAQNLKNAGITAIWIPPAWKGTSQNDVGYGAYDLYDLGEFNQKGTVRTKYGTKAELERAIRSLKANGIQVYGDVVMNHKGGADFTERVQAVEVNPQNRNEEVSGTYQIEAWTGFNFPGRGNQHSSFKWRWYHFDGTDWDQSRQLANRIYKFRGDGKAWDWEVDTENGNYDYLMYADVDMDHPEVINELNRWGVWYANTLNLDGFRLDAVKHIKFSFMRDWLGHVRGQTGKNLFAVAEYWKNDLGALENYLSKTNWTMSAFDVPLHYNLYQASNSSGNYDMRNLLNGTLVQRHPSHAVTFVDNHDTQPGEALESFVQGWFKPLAYATILTREQGYPQVFYGDYYGIPSDGVPSYRQQIDPLLKARQQYAYGRQHDYFDHWDVIGWTREGNASHPNSGLATIMSDGPGGSKWMYVGRQKAGEVWHDMTGNRSGTVTINQDGWGHFFVNGGSVSVWVKR

SEQ ID NO: 31720 - protein, 485 aa, Bacillus sp.
HHDGTNGTIMQYFEWNVPNDGQHWNRLHNNAQNLKNAGITAIWIPPAWKGTSQNDVGYGAYDLYDLGEFNQKGTVRTKYGTKAELERAIRSLKANGIQVYGDVVMNHKGGADFTERVQAVEVNPQNRNQEVSGTYQIEAWTGFNFPGRGNQHSSFKWRWYHFDGTDWDQSRQLANRIYKFRGDGKAWDWEVDTENGNYDYLMYADVDMLHPEVINELNRWGVWYANTLNLDGFRLDAVKHIKFSFMRDWLGHVRGQTGKNLFAVAEYWKNDLGALENYLSKTNWTMSAFDVPLHYNLYQASNSSGNYDMRNLLNGTLVQRHPSHAVTFVDNHDTQPGEALESFVQGWFKPLAYATILTREQGYPQVFYGDYYGIPSDGVPSYRQQIDPLLKARQQYAYGRQHDYFDHWDVIGWTREGNASHPNSGLATIMSDGPGGSKWMYVGRQKAGEVWHDMTGNRSGTVTINQDGWGHFFVNGGSVSVWVKR

SEQ ID NO: 31721 - protein, 485 aa, Bacillus sp.
HHDGTNGTIMQYFEWNVPNDGQHWNRLHNNAQNLKNAGITAIWIPPAWKGTSQNDVGYGAYDLYDLGEFNQKGTVRTKYGTKAELERAIRSLKANGIQVYGDVVMNHKGGADFTERVQAVEVNPQNRNQEVSGTYQIEAWTGFNFPGRGNQHSSFKWRWYHFDGTDWDQSRQLANRIYKFRGDGKAWDWEVDTENGNYDYLMYADVDMDHPEVINELNRWGVWYANTLNLDGFRLDAVKHIKFSFMRDWLGHVRGQTGKNLFAVAEYWKNDLGALENYLSKTEWTMSAFDVPLHYNLYQASNSSGNYDMRNLLNGTLVQRHPSHAVTFVDNHDTQPGEALESFVQGWFKPLAYATILTREQGYPQVFYGDYYGIPSDGVPSYRQQIDPLLKARQQYAYGRQHDYFDHWDVIGWTREGNASHPNSGLATIMSDGPGGSKWMYVGRQKAGEVWHDMTGNRSGTVTINQDGWGHFFVNGGSVSVWVKR

SEQ ID NO: 31722 - protein, 485 aa, Bacillus sp.
HHDGTNGTIMQYFEWNVPNDGQHWNRLHNNAQNLKNAGITAIWIPPAWKGTSQNDVGYGAYDLYDLGCFNQKGTVRTKYGTKAELERAIRSLKANGIQVYGDVVMNHKGGADFTERVQAVEVNPQNRNQEVSGTYQIEAWTGFNFPGRGNQHSSFKWRWYHFDGTDWDQSRQLANRIYKFRGDGKAWDWEVDTENGNYDYLMYADVDMDHPEVINELNRWGVWYANTLNLDGFRLDAVKHIKFSFMRDWLGHVRGQTGKNLFAVAEYWKNDLGALENYLSKTNWTMSAFDVPLHYNLYQASNSSGNYDMRNLLNGTLVQRHPSHAVTFVDNHDTQPGEALESFVQGWFKPLAYATILTREQGYPQVFYGDYYGIPSDGVPSYRQQIDPLLKARQQYAYGRQHDYFDHWDVIGWTREGNASHPNSGLATIMSDGPGGSKWMYVGRQKAGEVWHDMTGNRSGTVTINQDGWGHFFVNGGSVSVWVKR

SEQ ID NO: 31723 - protein, 485 aa, Bacillus sp.
HHDGTNGTIMQYFEWNVPNDGQHWNRLHNNAQNLKNAGITAIWIPPAWKGTSQNDVGYGAYDLYDLGEFNQKGTVRTKYGTKAELERAIRSLKANGIQVYGDVVMNHKGGADFTERVQAVEVNPQNRNQEVSGTYQIEAWTGFNFPGRGNQHSSFKWRWYHFDGTDWDQSRQLANRIYKFRGDGKAWDWEVDTENGNYDYLMYADVDMDHPEVINELNRWGVWYANTLNLDGFRLDAVKHIKFSFMRDWLGHVRGQTGKNLFAVAEYWKNDLGALENYLSKTNCTMSAFDVPLHYNLYQASNSSGNYDMRNLLNGTLVQRHPSHAVTFVDNHDTQPGEALESFVQGWFKPLAYATILTREQGYPQVFYGDYYGIPSDGVPSYRQQIDPLLKARQQYAYGRQHDYFDHWDVIGWTREGNASHPNSGLATIMSDGPGGSKWMYVGRQKAGEVWHDMTGNRSGTVTINQDGWGHFFVNGGSVSVWVKR

SEQ ID NO: 31724 - protein, 485 aa, Bacillus sp.
HHDGTNGTIMQYFEWNVPNDGQHWNRLHNNAQNLKNAGITAIWIPPAWKGTSQNDVGYGAYDLYDLGEFNQKGTVRTKYGTKAELERAIRSLKANGIQVYGDVVMNHKGGADFTERVQAVEVNPQNRNQEVSGTYQIEAWCGFNFPGRGNQHSSFKWRWYHFDGTDWDQSRQLANRIYKFRGDGKAWDWEVDTENGNYDYLMYADVDMDHPEVINELNRWGVWYANTLNLDGFRLDAVKHIKFSFMRDWLGHVRGQTGKNLFAVAEYWKNDLGALENYLSKTNWTMSAFDVPLHYNLYQASNSSGNYDMRNLLNGTLVQRHPSHAVTFVDNHDTQPGEALESFVQGWFKPLAYATILTREQGYPQVFYGDYYGIPSDGVPSYRQQIDPLLKARQQYAYGRQHDYFDHWDVIGWTREGNASHPNSGLATIMSDGPGGSKWMYVGRQKAGEVWHDMTGNRSGTVTINQDGWGHFFVNGGSVSVWVKR

SEQ ID NO: 31725 - protein, 485 aa, Bacillus sp.
HHDGTNGTIMQYFEWNVPNDGQHWNRLHNNAQNLKNAGITAIWIPPAWKGTSQNDVGYGAYDLYDLGEFNQKGTVRTKYGTKAELERAIRSLKANGIQVYGDVVMNHKGGADFTERVQAVEVNPQNRNQEVSGTYQIEAWTGFNFPGRGNQHSSFKWRWYHFDGTDWDQSRQLANRIYKFRGDGKAWDWEVDTENGNYDYLMYADVDMDHPEVINELNRWGVWYANTLNLDGFRLDAVKHIKFSFMRDWLGHVRGQTGKNLFAVAEYWKNDLGALENYLSKTNWTMSAFDVPLHYNLYQASNSSGNYDMRNLLNGTLVQRHPSHAVTFVDNHDTQPGEALESFVQGWFKPLAYATILTREQGYPQVFYGDYYGIPSDGVPSYRQQIDPLLKARQQYAYGRQHDYFDHWDVIGWTREGNASHPNSGLATIMSDGPGGSKWMYVGRQKAGEVWHDMTGNRSGTVTINQDGMGHFFVNGGSVSVWVKR

SEQ ID NO: 31726 - protein, 485 aa, Bacillus sp.
HHDGTNGTIMQYFEWNVPNDGQHWNRLHNNAQNLKNAGITAIWIPPAWKGTSQNDVGYGAYDLYDLGEFNQKGTVRTKYGTKAELERAIRSLKANGIQVYGDVVMNHKGGADFTERVQAVEVNPQNRNQEVSGTYQIEAWTGFNFPGRGNQHSSFKWRWYHFDGTDWDQSRQLANRIYKFRGDGKAWDWEVDTENGNYDYLMYADVDMDHPEVINELNRWGVWYANTLNLDGFRLDAVKHIKFSFMRDWLGHVRGQTGKNLFAVAEYWKNDLGALENYLSKTNWTMSAFDVPLHYNLYQASNSSGNYDMRNLLNGTLVQRHPSHAVTFVDNHDTQPGEALESFVQGWFKPLAYATILTREQGYPQVFYGDYYGIPSDGVPSYRQQIDPLLKARQQYGYGRQHDYFDHWDVIGWTREGNASHPNSGLATIMSDGPGGSKWMYVGRQKAGEVWHDMTGNRSGTVTINQDGWGHFFVNGGSVSVWVKR

SEQ ID NO: 31727 - protein, 485 aa, Bacillus sp.
HHDGTNGTIMQYFEWNVPNDGQHWNRLHNNAQNLKNAGITAIWIPPAWKGTSQNDVGYGAYDLYDLGEFNQKGTVRTKYGTKAELERAIRSLKANGIQVYGDVVMNHKGGADFTERVQAVEVNPQNRNQEVSGTYQIEAWTGFNFPGRGNQHSSFKWRWYHYDGTDWDQSRQLANRIYKFRGDGKAWDWEVDTENGNYDYLMYADVDMDHPEVINELNRWGVWYANTLNLDGFRLDAVKHIKFSFMRDWLGHVRGQTGKNLFAVAEYWKNDLGALENYLSKTNWTMSAFDVPLHYNLYQASNSSGNYDMRNLLNGTLVQRHPSHAVTFVDNHDTQPGEALESFVQGWFKPLAYATILTREQGYPQVFYGDYYGIPSDGVPSYRQQIDPLLKARQQYAYGRQHDYFDHWDVIGWTREGNASHPNSGLATIMSDGPGGSKWMYVGRQKAGEVWHDMTGNRSGTVTINQDGWGHFFVNGGSVSVWVKR

SEQ ID NO: 31728 - protein, 485 aa, Bacillus sp.
HHDGTNGTIMQYFEWNVPNDGQHWNRLHNNAQNLKNAGITAIWIPPAWKGTSQNDVGYGAYDLYDLGEFNQKGTVRTKYGTKAELERAIRSLKANGIQVYGDVVMNHKGGADFTERVQAVEVNPQNRNQEVSGTYQIEAWTGFNFPGRGNQHSSFKWRWYHFDGTDWDQSRQLANRIYKFRGDGKAWDWEVDTENGNYDYLMYADVDMDHPEVINELNRWGVWYANTLNLDGFRLDAVKHIKFSFMRDWLGHVRGQTGKNLFAVAEYWKNDLGALENYLSKTNWTMSAFDVPLHYNLYQASNSSGNYDMRNLLNGTLVQRHPSHAVTFVDNHDTQPGEALETFVQGWFKPLAYATILTREQGYPQVFYGDYYGIPSDGVPSYRQQIDPLLKARQQYAYGRQHDYFDHWDVIGWTREGNASHPNSGLATIMSDGPGGSKWMYVGRQKAGEVWHDMTGNRSGTVTINQDGWGHFFVNGGSVSVWVKR

SEQ ID NO: 31729 - protein, 485 aa, Bacillus sp.
HHDGTNGTIMQYFEWNVPNDGQHWNRLHNNAQNLKNAGITAIWIPPAWKGTSQNDVGYGAYDLYDLGEFNQKGTVRTKYGTKAELERAIRSLKANGIQVYGDVVMNHKGGADFTERVQAVEVNPQNRNQEVSGTYQIEAWTGFNFPGRGNQHSSFKWRWYHFDGTDWDQSRQLANRIYKFRGDGKAWDWEVDTENGNYDYLMYADVDMDHPEVINELNRWGVWYANTLNLDGFRLDAVKHIKFSFMRDWLGHVRGQTGKNLFAVAEYWKNDLGALENYLSKTNWTMSAFDVPLHYNLYQASNSSGNYDMRNLLNGTLVQRHPSHAVTFVDNHDTQPGEALEAFVQGWFKPLAYATILTREQGYPQVFYGDYYGIPSDGVPSYRQQIDPLLKARQQYAYGRQHDYFDHWDVIGWTREGNASHPNSGLATIMSDGPGGSKWMYVGRQKAGEVWHDMTGNRSGTVTINQDGWGHFFVNGGSVSVWVKR

SEQ ID NO: 31730 - protein, 485 aa, Bacillus sp.
HHDGTNGTIMQYFEWNVPNDGQHWNRLHNNAQNLKNAGITAIWIPPAWKGTSQNDVGYGAYDLYDLGEFNQKGTVRTKYGTKAELERAIRSLKANGIQVYGDVVMNHKGGADFTERVQAVEINPQNRNQEVSGTYQIEAWTGFNFPGRGNQHSSFKWRWYHFDGTDWDQSRQLANRIYKFRGDGKAWDWEVDTENGNYDYLMYADVDMDHPEVINELNRWGVWYANTLNLDGFRLDAVKHIKFSFMRDWLGHVRGQTGKNLFAVAEYWKNDLGALENYLSKTNWTMSAFDVPLHYNLYQASNSSGNYDMRNLLNGTLVQRHPSHAVTFVDNHDTQPGEALESFVQGWFKPLAYATILTREQGYPQVFYGDYYGIPSDGVPSYRQQIDPLLKARQQYAYGRQHDYFDHWDVIGWTREGNASHPNSGLATIMSDGPGGSKWMYVGRQKAGEVWHDMTGNRSGTVTINQDGWGHFFVNGGSVSVWVKR

SEQ ID NO: 31731 - protein, 485 aa, Bacillus sp.
HHDGTNGTIMQYFEWNVPNDGQHWNRLHNNAQNLKNAGMTAIWIPPAWKGTSQNDVGYGAYDLYDLGEFNQKGTVRTKYGTKAELERAIRSLKANGIQVYGDVVMNHKGGADFTERVQAVEVNPQNRNQEVSGTYQIEAWTGFNFPGRGNQHSSFKWRWYHFDGTDWDQSRQLANRIYKFRGDGKAWDWEVDTENGNYDYLMYADVDMDHPEVINELNRWGVWYANTLNLDGFRLDAVKHIKFSFMRDWLGHVRGQTGKNLFAVAEYWKNDLGALENYLSKTNWTMSAFDVPLHYNLYQASNSSGNYDMRNLLNGTLVQRHPSHAVTFVDNHDTQPGEALESFVQGWFKPLAYATILTREQGYPQVFYGDYYGIPSDGVPSYRQQIDPLLKARQQYAYGRQHDYFDHWDVIGWTREGNASHPNSGLATIMSDGPGGSKWMYVGRQKAGEVWHDMTGNRSGTVTINQDGWGHFFVNGGSVSVWVKR

SEQ ID NO: 31732 - protein, 485 aa, Bacillus sp.
HHDGTNGTIMQYFEWNVPNDGQHWNRLHNNAQNLKNAGITAIWIPPAWKGTSQNDVGYGAYDHYDLGEFNQKGTVRTKYGTKAELERAIRSLKANGIQVYGDVVMNHKGGADFTERVQAVEVNPQNRNQEVSGTYQIEAWTGFNFPGRGNQHSSFKWRWYHFDGTDWDQSRQLANRIYKFRGDGKAWDWEVDTENGNYDYLMYADVDMDHPEVINELNRWGVWYANTLNLDGFRLDAVKHIKFSFMRDWLGHVRGQTGKNLFAVAEYWKNDLGALENYLSKTNWTMSAFDVPLHYNLYQASNSSGNYDMRNLLNGTLVQRHPSHAVTFVDNHDTQPGEALESFVQGWFKPLAYATILTREQGYPQVFYGDYYGIPSDGVPSYRQQIDPLLKARQQYAYGRQHDYFDHWDVIGWTREGNASHPNSGLATIMSDGPGGSKWMYVGRQKAGEVWHDMTGNRSGTVTINQDGWGHFFVNGGSVSVWVKR

SEQ ID NO: 31733 - protein, 485 aa, Bacillus sp.
HHDGTNGTIMQYFEWNVPNDGQHWNRLHNNAQNLKNAGITAIWIPPAWKGTSQNDVGYGAYDLYDLGEFNQKGTVRTKYGTKAELERAIRSLKANGIQVYGDVVMNHKGGADFTERVQAVEVNPQNRNQEVSGTYQIEAWTGFNFPGRGNQHSSFKWRWYHFDGTDWDQSRQLANRIYKFRGDGKAWDWEVDTENGNYDYLMYADVDMDHPEVINELNRWGVWYANTLNLDGFRLDAVKHIHFSFMRDWLGHVRGQTGKNLFAVAEYWKNDLGALENYLSKTNWTMSAFDVPLHYNLYQASNSSGNYDMRNLLNGTLVQRHPSHAVTFVDNHDTQPGEALESFVQGWFKPLAYATILTREQGYPQVFYGDYYGIPSDGVPSYRQQIDPLLKARQQYAYGRQHDYFDHWDVIGWTREGNASHPNSGLATIMSDGPGGSKWMYVGRQKAGEVWHDMTGNRSGTVTINQDGWGHFFVNGGSVSVWVKR

SEQ ID NO: 31734 - protein, 485 aa, Bacillus sp.
HHDGTNGTIMQYFEWNVPNDGQHWNRLHNNAQNLKNAGITAIWIPPAWKGTSQNDVGYGAYDLYDLGEFNQKGTVRTKYGTKAELERAIRSLKANGIQVYGDVVMNHKGGADFTERVQAVEVNPQNRNQEVSGTYQIEAWTGFNFPGRGNQHSSFKWRWYHFDGTDWDQSRQLANRIYKFRGDGKAWDWEVDTENGNYDYLMYADVDMDHPEVINELNRWGVWYANTLNLDGFRLDAVKHIKFSFMRDWLGHVRGQTGKNLFAVAEYWKNDLGALENYLSKTNWTMSAFDVPLHYNLYQASNSSGNYDMRNLLNGTLVQRHPSHAVTFVDNHDTQPGEALESFVQGWFKPLAYATILTREQGYPQVFYGDYYGIPSDGVPSYRQQIDPLLKARQQYAYGRQHQYFDHWDVIGWTREGNASHPNSGLATIMSDGPGGSKWMYVGRQKAGEVWHDMTGNRSGTVTINQDGWGHFFVNGGSVSVWVKR

SEQ ID NO: 31735 - protein, 485 aa, Bacillus sp.
HHDGTNGTIMQYFEWNVPNDGQHWNRLHNNAQNLKNAGITAIWIPPAWKGTSQNDVGYGAYDLYDLGEFNQKGTVRTKYGTKAELERAIRSLKANGIQVYGDVVMNHKGGADFTERVQAVEVNPQNRNQEVSGTYQIEAWTGFNFPGRGNQHSSFKWRWYHFDGTDWDQSRQLANRIYKFRGDGKAWDWEVDTENGNYDYLMYADVDMDHPEVINELNRWGVWYANTLNLDGFRLDAVKHIKFSFMRDWLGHVRGQTGKNLFAVAEYWKNDLGALENYLSKTNWTMSAFDVPLHYNLYQARNSSGNYDMRNLLNGTLVQRHPSHAVTFVDNHDTQPGEALESFVQGWFKPLAYATILTREQGYPQVFYGDYYGIPSDGVPSYRQQIDPLLKARQQYAYGRQHDYFDHWDVIGWTREGNASHPNSGLATIMSDGPGGSKWMYVGRQKAGEVWHDMTGNRSGTVTINQDGWGHFFVNGGSVSVWVKR

SEQ ID NO: 31736 - protein, 485 aa, Bacillus sp.
HHDGTNGTIMQYFEWNVPNDGQHWNRLHNNAQNLKNAGITAIWIPPAWKGTSQNDVGYGAYDLYDLGEFNQKGTVRTKYGTKAELERAIRSLKANGIQVYGDVVMNHKGGADFTERVQAVEVNPQNRNQEVSGTYQIEAWTGFNFPGRGNQHSSFKWRWYHFDGTDWDQSRQLANRIYKFRGDGKAWDWEVDTENGNYDYLMYADVDMDHPEVINELNRWGVWYANTLNLDGFRLDAVKHIKFSFMRDWLGHVRGQTGKNLFAVAEYWKNDLGALENYLSKTNWTMSAFDVPLHYNLYQASNSSGNYDMRNLLNGTLVQRHPSHAVTFVDNHDTQPGEALESFVQGWFKPLAYATILTREQGYPQCFYGDYYGIPSDGVPSYRQQIDPLLKARQQYAYGRQHDYFDHWDVIGWTREGNASHPNSGLATIMSDGPGGSKWMYVGRQKAGEVWHDMTGNRSGTVTINQDGWGHFFVNGGSVSVWVKR

SEQ ID NO: 31737 - protein, 485 aa, Bacillus sp.
HHDGTNGTIMQYFEWNVPNDGQHWNRLHNNAQFLKNAGITAIWIPPAWKGTSQNDVGYGAYDLYDLGEFNQKGTVRTKYGTKAELERAIRSLKANGIQVYGDVVMNHKGGADFTERVQAVEVNPQNRNQEVSGTYQIEAWTGFNFPGRGNQHSSFKWRWYHFDGTDWDQSRQLANRIYKFRGDGKAWDWEVDTENGNYDYLMYADVDMDHPEVINELNRWGVWYANTLNLDGFRLDAVKHIKFSFMRDWLGHVRGQTGKNLFAVAEYWKNDLGALENYLSKTNWTMSAFDVPLHYNLYQASNSSGNYDMRNLLNGTLVQRHPSHAVTFVDNHDTQPGEALESFVQGWFKPLAYATILTREQGYPQVFYGDYYGIPSDGVPSYRQQIDPLLKARQQYAYGRQHDYFDHWDVIGWTREGNASHPNSGLATIMSDGPGGSKWMYVGRQKAGEVWHDMTGNRSGTVTINQDGWGHFFVNGGSVSVWVKR

SEQ ID NO: 31738 - protein, 485 aa, Bacillus sp.
HHDGTNGTIMQYFEWNVPNDGQHWNRLHNNAQNLKNAGITAIWIPPAWKGTSQNDVGYGAYDLYDLGEFNQKGTVRTKYGTKAELERAIRSLKANGIQVYGDVVMNHKGGADFTERVQAVEVNPQNRNQEVSGTTQIEAWTGFNFPGRGNQHSSFKWRWYHFDGTDWDQSRQLANRIYKFRGDGKAWDWEVDTENGNYDYLMYADVDMDHPEVINELNRWGVWYANTLNLDGFRLDAVKHIKFSFMRDWLGHVRGQTGKNLFAVAEYWKNDLGALENYLSKTNWTMSAFDVPLHYNLYQASNSSGNYDMRNLLNGTLVQRHPSHAVTFVDNHDTQPGEALESFVQGWFKPLAYATILTREQGYPQVFYGDYYGIPSDGVPSYRQQIDPLLKARQQYAYGRQHDYFDHWDVIGWTREGNASHPNSGLATIMSDGPGGSKWMYVGRQKAGEVWHDMTGNRSGTVTINQDGWGHFFVNGGSVSVWVKR

SEQ ID NO: 31739 - protein, 485 aa, Bacillus sp.
HHDGTNGTIMQYFEWNVPNDGQHWNRLHNNAQNLKNAGITAIWIPPAWKGTSQNDVGYGAYDLYDLGEFNQKGTVRTKYGTKAELERAIRSLKANGIQVYGDVVMNHKGGADFTERVQAVEVNPQNRNQEVSGTYQIEAWTGFNFPGRGNQHSSFKWRWYHFDGTDWDQSRQLANRIYKFRGDGKAWDWEVDTENGNYDYLMYADVDMDHPEVINELNRWGVWYANTLNLDGFRLDAVKHIKFSFMRDWLGHVRGQTGCNLFAVAEYWKNDLGALENYLSKTNWTMSAFDVPLHYNLYQASNSSGNYDMRNLLNGTLVQRHPSHAVTFVDNHDTQPGEALESFVQGWFKPLAYATILTREQGYPQVFYGDYYGIPSDGVPSYRQQIDPLLKARQQYAYGRQHDYFDHWDVIGWTREGNASHPNSGLATIMSDGPGGSKWMYVGRQKAGEVWHDMTGNRSGTVTINQDGWGHFFVNGGSVSVWVKR

SEQ ID NO: 31740 - protein, 485 aa, Bacillus sp.
HHDGTNGTIMQYFEWNVPNDGQHWNRLHNNAQNLKNAGITAIWIPPAWKGTSQNDVGYGAYDLYDLGEFNQKGTVRTKYGTKAELERAIRSLKANGIQVYGDVVMNHKGGADFTERVQAVEVNPQNRNQEVSGTYQIEAWTGFNFPGRGNQHSSFKWRWYHFDGTDWDQSRQLANRIYKFRGDGKAWDWEVDTENGNYDYLMYADVDMDHPEVINELNRWGVWYANTLNLDGFRLDAVKHIKFSFMRDWLGHVRGQTGKNLFAVAEYWKNDLEALENYLSKTNWTMSAFDVPLHYNLYQASNSSGNYDMRNLLNGTLVQRHPSHAVTFVDNHDTQPGEALESFVQGWFKPLAYATILTREQGYPQVFYGDYYGIPSDGVPSYRQQIDPLLKARQQYAYGRQHDYFDHWDVIGWTREGNASHPNSGLATIMSDGPGGSKWMYVGRQKAGEVWHDMTGNRSGTVTINQDGWGHFFVNGGSVSVWVKR

SEQ ID NO: 31741 - protein, 485 aa, Bacillus sp.
HHDGTNGTIMQYFEWNVPNDGQHWNRLHNNAQNLKNAGITAIWIPPAWKGTMQNDVGYGAYDLYDLGEFNQKGTVRTKYGTKAELERAIRSLKANGIQVYGDVVMNHKGGADFTERVQAVEVNPQNRNQEVSGTYQIEAWTGFNFPGRGNQHSSFKWRWYHFDGTDWDQSRQLANRIYKFRGDGKAWDWEVDTENGNYDYLMYADVDMDHPEVINELNRWGVWYANTLNLDGFRLDAVKHIKFSFMRDWLGHVRGQTGKNLFAVAEYWKNDLGALENYLSKTNWTMSAFDVPLHYNLYQASNSSGNYDMRNLLNGTLVQRHPSHAVTFVDNHDTQPGEALESFVQGWFKPLAYATILTREQGYPQVFYGDYYGIPSDGVPSYRQQIDPLLKARQQYAYGRQHDYFDHWDVIGWTREGNASHPNSGLATIMSDGPGGSKWMYVGRQKAGEVWHDMTGNRSGTVTINQDGWGHFFVNGGSVSVWVKR

SEQ ID NO: 31742 - protein, 485 aa, Bacillus sp.
HHDGTNGTIMQYFEWNVPNDGQHWNRLHNNAQNLKNAGITAIWIPPAWKGTSQNDVGYGAYDLYDLGEFNQKGTVRTKYGTKAELERAIRSLKANGIQVYGDVVMNHKGGADFTERVQANEVNPQNRNQEVSGTYQIEAWTGFNFPGRGNQHSSFKWRWYHFDGTDWDQSRQLANRIYKFRGDGKAWDWEVDTENGNYDYLMYADVDMDHPEVINELNRWGVWYANTLNLDGFRLDAVKHIKFSFMRDWLGHVRGQTGKNLFAVAEYWKNDLGALENYLSKTNWTMSAFDVPLHYNLYQASNSSGNYDMRNLLNGTLVQRHPSHAVTFVDNHDTQPGEALESFVQGWFKPLAYATILTREQGYPQVFYGDYYGIPSDGVPSYRQQIDPLLKARQQYAYGRQHDYFDHWDVIGWTREGNASHPNSGLATIMSDGPGGSKWMYVGRQKAGEVWHDMTGNRSGTVTINQDGWGHFFVNGGSVSVWVKR

SEQ ID NO: 31743 - protein, 485 aa, Bacillus sp.
HHDGTNGTIMQYFEWNVPNDGQHWNRLHNNAQNLKNAGITAIWIPPAWKGTSQNDVGYGAYDLYDLGEFNQKGTVRTKYGTKAELERAIRSLKANGIQVYGDVVMNHKGGADFTERVQAVEVNPQNRNQEVSGTYQIEAWTGFNFPGRGNQHSSFKWRWYHFDGTDWDQSRQLANRIYKFRGDGKAWDWEVDTENGNYDYLMYADVDMDHPEVINELNRWGVWYANTLNLDGFRLDAVKHIKFSFMRDWLGHVRGQTGKNLFAVAEYWKNDLGALENYLSKTNWTMSAFDVPLSYNLYQASNSSGNYDMRNLLNGTLVQRHPSHAVTFVDNHDTQPGEALESFVQGWFKPLAYATILTREQGYPQVFYGDYYGIPSDGVPSYRQQIDPLLKARQQYAYGRQHDYFDHWDVIGWTREGNASHPNSGLATIMSDGPGGSKWMYVGRQKAGEVWHDMTGNRSGTVTINQDGWGHFFVNGGSVSVWVKR

SEQ ID NO: 31744 - protein, 485 aa, Bacillus sp.
HHDGTNGTIMQYFEWNVPNDGQHWNRLHNNAQNLKNAGITAIWIPPAWKGTSQNDVGYGAYDLYDLGEFNQKGTVRTKYGTKAELERAIRSLKANGIQVYGDVVMNHKGGADFTERVQAVEVNPQNRNQEVSGTYQIEAWTGFNFPGRGNQHSSFKWRWYHFDGTDWDQSRQLANRIYKFVGDGKAWDWEVDTENGNYDYLMYADVDMDHPEVINELNRWGVWYANTLNLDGFRLDAVKHIKFSFMRDWLGHVRGQTGKNLFAVAEYWKNDLGALENYLSKTNWTMSAFDVPLHYNLYQASNSSGNYDMRNLLNGTLVQRHPSHAVTFVDNHDTQPGEALESFVQGWFKPLAYATILTREQGYPQVFYGDYYGIPSDGVPSYRQQIDPLLKARQQYAYGRQHDYFDHWDVIGWTREGNASHPNSGLATIMSDGPGGSKWMYVGRQKAGEVWHDMTGNRSGTVTINQDGWGHFFVNGGSVSVWVKR

SEQ ID NO: 31745 - protein, 485 aa, Bacillus sp.
HHDGTNGTIMQYFEWNVPNDGQHWNFLHNNAQNLKNAGITAIWIPPAWKGTSQNDVGYGAYDLYDLGEFNQKGTVRTKYGTKAELERAIRSLKANGIQVYGDVVMNHKGGADFTERVQAVEVNPQNRNQEVSGTYQIEAWTGFNFPGRGNQHSSFKWRWYHFDGTDWDQSRQLANRIYKFRGDGKAWDWEVDTENGNYDYLMYADVDMDHPEVINELNRWGVWYANTLNLDGFRLDAVKHIKFSFMRDWLGHVRGQTGKNLFAVAEYWKNDLGALENYLSKTNWTMSAFDVPLHYNLYQASNSSGNYDMRNLLNGTLVQRHPSHAVTFVDNHDTQPGEALESFVQGWFKPLAYATILTREQGYPQVFYGDYYGIPSDGVPSYRQQIDPLLKARQQYAYGRQHDYFDHWDVIGWTREGNASHPNSGLATIMSDGPGGSKWMYVGRQKAGEVWHDMTGNRSGTVTINQDGWGHFFVNGGSVSVWVKR

SEQ ID NO: 31746 - protein, 485 aa, Bacillus sp.
HHDGTNGTIMQYFEWNVPNDGQHWNRLHNNAQNLKNAGITAIWIPPAWKGTSQNDVGYGAYDLYDLGEFNQKGTVRTKYGTKAELERAIRSLKANGIQVYGDVVMNHKGGADFTERVQAVEVNPQNRNQEVSGTYQIEAWTGFNFPGRGNQHSSFKWRWYHFDGTDWDQSRQLANRIYKFRGDGKAWDWEVDTENGNYDYLMYADVDMDHPEVINELNRWGVWYANTLNLDGFRLDAVKHIKFSFMRDWLGHVRGQTGKNLFAVAEYWKNDLGALENYLSKTNWTMSAFDVPLHYNLYQASNSSGNYDMRNLLNGTLVQRHPSHAVTFVDNHDTQPGEALESFVQGWFKPLAYATILTREQGYPQVFYGDYYGIPSDGVPSYRQQIDGLLKARQQYAYGRQHDYFDHWDVIGWTREGNASHPNSGLATIMSDGPGGSKWMYVGRQKAGEVWHDMTGNRSGTVTINQDGWGHFFVNGGSVSVWVKR

SEQ ID NO: 31747 - protein, 485 aa, Bacillus sp.
HHDGTNGTIMQYFEWNVPNDGQHWNRLHNNAQNLKNAGITAIWIPPAWKGTSQNDVGYGAYDLYDLGEFNQKGTVRTKYGTKAELERAIRSLKANGIQVYGDVVMNHKGGADFTERVQAVEVNPQNRNQEVSGTYQIEAWTGFNFPGRGNQHSSFKWRWYHFDGTDWDQGRQLANRIYKFRGDGKAWDWEVDTENGNYDYLMYADVDMDHPEVINELNRWGVWYANTLNLDGFRLDAVKHIKFSFMRDWLGHVRGQTGKNLFAVAEYWKNDLGALENYLSKTNWTMSAFDVPLHYNLYQASNSSGNYDMRNLLNGTLVQRHPSHAVTFVDNHDTQPGEALESFVQGWFKPLAYATILTREQGYPQVFYGDYYGIPSDGVPSYRQQIDPLLKARQQYAYGRQHDYFDHWDVIGWTREGNASHPNSGLATIMSDGPGGSKWMYVGRQKAGEVWHDMTGNRSGTVTINQDGWGHFFVNGGSVSVWVKR

SEQ ID NO: 31748 - protein, 485 aa, Bacillus sp.
HHDGTNGTIMQYFEWNVPNDGQHWNRLHNNAQNLKNAGITAIWIPPAWKGTSQNDVGYGAYDLYDLGEFNDKGTVRTKYGTKAELERAIRSLKANGIQVYGDVVMNHKGGADFTERVQAVEVNPQNRNQEVSGTYQIEAWTGFNFPGRGNQHSSFKWRWYHFDGTDWDQSRQLANRIYKFRGDGKAWDWEVDTENGNYDYLMYADVDMDHPEVINELNRWGVWYANTLNLDGFRLDAVKHIKFSFMRDWLGHVRGQTGKNLFAVAEYWKNDLGALENYLSKTNWTMSAFDVPLHYNLYQASNSSGNYDMRNLLNGTLVQRHPSHAVTFVDNHDTQPGEALESFVQGWFKPLAYATILTREQGYPQVFYGDYYGIPSDGVPSYRQQIDPLLKARQQYAYGRQHDYFDHWDVIGWTREGNASHPNSGLATIMSDGPGGSKWMYVGRQKAGEVWHDMTGNRSGTVTINQDGWGHFFVNGGSVSVWVKR

SEQ ID NO: 31749 - protein, 485 aa, Bacillus sp.
HHDGTNGTIMQYFEWNVPNDGQHWNRLHNNAQNLKNAGITAIWIPPAWKGTSQNDVGYGAYDLYDLGEFNQKGTVRTKYGTKAELERAIRSLKANGIQVYGDVVMNHKGGADFTERVQAVEVNPQNRNQEVSGTYQIEAWTGFNFPGRGNQHSSFKWRWYHFDGTDWDQSRQLANRIYKFRGDGKAWDWEVDTENGNYDYLMYADVDMDHPEVICELNRWGVWYANTLNLDGFRLDAVKHIKFSFMRDWLGHVRGQTGKNLFAVAEYWKNDLGALENYLSKTNWTMSAFDVPLHYNLYQASNSSGNYDMRNLLNGTLVQRHPSHAVTFVDNHDTQPGEALESFVQGWFKPLAYATILTREQGYPQVFYGDYYGIPSDGVPSYRQQIDPLLKARQQYAYGRQHDYFDHWDVIGWTREGNASHPNSGLATIMSDGPGGSKWMYVGRQKAGEVWHDMTGNRSGTVTINQDGWGHFFVNGGSVSVWVKR

SEQ ID NO: 31750 - protein, 485 aa, Bacillus sp.
HHDGTNGTIMQYFEWNVPNDGQHWNRLHNNAQNLKNAGITAIWIPPAWKGTSQNDVGYGAYDLYDLGEFNQKGTVRTKYGTKAELERAIRSLKANGIQVYGDVVMNHKGGADFTERVQAVEVNPQNRNQEVSGTYQIEAWTGFNFPGRGNQHSSFKWRWLHFDGTDWDQSRQLANRIYKFRGDGKAWDWEVDTENGNYDYLMYADVDMDHPEVINELNRWGVWYANTLNLDGFRLDAVKHIKFSFMRDWLGHVRGQTGKNLFAVAEYWKNDLGALENYLSKTNWTMSAFDVPLHYNLYQASNSSGNYDMRNLLNGTLVQRHPSHAVTFVDNHDTQPGEALESFVQGWFKPLAYATILTREQGYPQVFYGDYYGIPSDGVPSYRQQIDPLLKARQQYAYGRQHDYFDHWDVIGWTREGNASHPNSGLATIMSDGPGGSKWMYVGRQKAGEVWHDMTGNRSGTVTINQDGWGHFFVNGGSVSVWVKR

SEQ ID NO: 31751 - protein, 485 aa, Bacillus sp.
HHDGTNGTIMQYFEWNVPNDGQHWNRLHNNAQNLKNAGITAIWIPPAWKGTSQNDVGYGAYDLYDLGEFNQKGTVRTKYGTKAELERAIRSLKANGIQVYGDVVMNHKGGADFTERVQAVEVNPQNRNQEVSGTYQIEAWTGFNFPGRGNQHSSFKWRWYHFDGTDWDQSRQLANRIYKFRGDGKAWDWEVDTENGNYDYLMYADVDMDHPEVINELNRWGVWYANTLNLDGFRLDAVKHIKFSFMRDWLGHVRGQTGKNLFAVAEYWKNDLGALENYLSKTNWTMSAFDVPLHYNLYQASNSSGNYDMRNLLNGTLVQRHPSHAVTFVDNHDTQPGEALESFVQGWFKPLAYATILTREQGYPQVFYGDYYGIPSDGVVSYRQQIDPLLKARQQYAYGRQHDYFDHWDVIGWTREGNASHPNSGLATIMSDGPGGSKWMYVGRQKAGEVWHDMTGNRSGTVTINQDGWGHFFVNGGSVSVWVKR

SEQ ID NO: 31752 - protein, 485 aa, Bacillus sp.
HHDGTNGTIMQYFEWNVPNDGQHWNRLHNNAQNLKNAGITAIWIPPAWKGTSQNDVGYGAYDLYDLGEFNQKGTVRTKYGTKAELERAIRSLKANGIQVYGDVVMNHKGGADFTERVQAVEVNPQNRNQEVSGTYQIEAWTGFNFPGRGNQHSSFKWRWYHFDGTDWDQSRQLANRIYKFRGDGKAWDWEVDTENGNYDYLMYADVDMDHPEVINELNRWGVWYANTLNLDGFRLDAVKHIKFSFMRDWLGHVRGQTGKNLFAVAEYWKNDLGALENYLSKTNWTMSAFDVPLHYNLYQASNSSGNYDMRNLLNGTLVQRHPSHAVTFVDNHDTQPGEALESFVQGWCKPLAYATILTREQGYPQVFYGDYYGIPSDGVPSYRQQIDPLLKARQQYAYGRQHDYFDHWDVIGWTREGNASHPNSGLATIMSDGPGGSKWMYVGRQKAGEVWHDMTGNRSGTVTINQDGWGHFFVNGGSVSVWVKR

SEQ ID NO: 31753 - protein, 485 aa, Bacillus sp.
HHDGTNGTIMQYFEWNVPNDGQHWNRLHNNAQNLKNAGITAIWIPPAWKGTSQNDVGYGAYDLYDLGEFNQKGTVRTKYGTKAELERAIRSLKANGIQVYGDVVMNHKGGADFTERVQAVEVNPQNRNQEVSGTYQIEAWTGFNFPGRGNQHSSFKWRWYHFDGTDWDQSRQLANRIRKFRGDGKAWDWEVDTENGNYDYLMYADVDMDHPEVINELNRWGVWYANTLNLDGFRLDAVKHIKFSFMRDWLGHVRGQTGKNLFAVAEYWKNDLGALENYLSKTNWTMSAFDVPLHYNLYQASNSSGNYDMRNLLNGTLVQRHPSHAVTFVDNHDTQPGEALESFVQGWFKPLAYATILTREQGYPQVFYGDYYGIPSDGVPSYRQQIDPLLKARQQYAYGRQHDYFDHWDVIGWTREGNASHPNSGLATIMSDGPGGSKWMYVGRQKAGEVWHDMTGNRSGTVTINQDGWGHFFVNGGSVSVWVKR

SEQ ID NO: 31754 - protein, 485 aa, Bacillus sp.
HHDGTNGTIMQYFEWNVPNDGQHWNRLHNNAQNLKNAGITAIWIPPAWKGTSQNDVGYGAYDLYDLGEFNQKGTVRTKYGTKAELERAIRSLKANGIQVYGDVVMNHKGGADFTERVQAVEVNPQNRNQEVSGTYQIEAWTGFNFPGRGNQHSSFKWRWYHFDGTDWDQSRQLANRIYKFRGDGKAWDWEVDTENGNYDYLMYADVDMDHPEVINELNRWGVWYANTLNLDGFRLDAVKHIKFSFMRDWLGHVRGQTGKNLFAVAEYWKNDLGALENYLSKTNWTMSAFDVPLHYNLYQASNSSGNYDMRNLLNGTLVQRHPSHAVTFVDNHDTQPGEALESFVQGWFKPLAYATILTREQGYPQVFYGDYYGIPSDGVPSYRQQIDPLLKARQQYAYGRQSDYFDHWDVIGWTREGNASHPNSGLATIMSDGPGGSKWMYVGRQKAGEVWHDMTGNRSGTVTINQDGWGHFFVNGGSVSVWVKR

SEQ ID NO: 31755 - protein, 485 aa, Bacillus sp.
HHDGTNGTIMQYFEWNVPNDGQHWNRLHNNAQNLKNAGITAIWIPPAWKGTSQNDVGYGAYDLYDLGEFNQKGTVRTKYGTKAELERAIRSLKANGIQVYGDVVMNHKGGADFTERVQAVEVNPQNRNQEVSGTYQIEAWTGFNFPGRGNQHSSFKWRWYHFDGTDWDQSRQLAVRIYKFRGDGKAWDWEVDTENGNYDYLMYADVDMDHPEVINELNRWGVWYANTLNLDGFRLDAVKHIKFSFMRDWLGHVRGQTGKNLFAVAEYWKNDLGALENYLSKTNWTMSAFDVPLHYNLYQASNSSGNYDMRNLLNGTLVQRHPSHAVTFVDNHDTQPGEALESFVQGWFKPLAYATILTREQGYPQVFYGDYYGIPSDGVPSYRQQIDPLLKARQQYAYGRQHDYFDHWDVIGWTREGNASHPNSGLATIMSDGPGGSKWMYVGRQKAGEVWHDMTGNRSGTVTINQDGWGHFFVNGGSVSVWVKR

SEQ ID NO: 31756 - protein, 485 aa, Bacillus sp.
HHDGTNGTIMQYFEWNVPNDGQHWNRLHNNAQNLKNAGITAIWIPPAWKGTSQNDVGYGAYDLYDLGEFNQKGTVRTKYGTKAELERAIRSLKANGIQVYGDVVMNHKGGADFTERVQAVEVNPQNRNQEVSGTYQIEAWTGFNFPGRGNQHSSFKWRWYHFDGTDWDQSRQLANRIYKFRGDGKAWDWEVDTENGNYDYLMYADVDMDHPEVINELNRWGVWYANTLNLDGFRLDAVKHIKFSFMRDWLGHVRGQTGKNLFAVAEYWKNDLGALENYLSKTNWTMSAFDVPLHYNLYQASNSSGNYDMRNLLNGTLVQRHPSHAVTFVDNHDTQPGEALESFVQGWFKPLAYATILTREQGYPQVFYGDYYGIPSDGVPSYRQQIDPLLKARQQYAYGRQHDYFDHWDVIGWTREGNASHPNSGLSTIMSDGPGGSKWMYVGRQKAGEVWHDMTGNRSGTVTINQDGWGHFFVNGGSVSVWVKR

SEQ ID NO: 31757 - protein, 485 aa, Bacillus sp.
HHDGTNGTIMQYFEWNVPNDGQHWNRLHNNAQNLKNAGITAIWIPPAWKGTSQNDVGYGAYDLYDLGEFNQKGTVRTKYGTKAELERAIRSLKANGIQVYGDVVMNHKGGADFTERVQAVEVNPQNRNQEVSGTYQIEAWTGFNFPGRGNQHSSFKWRWYHFDGTDWDQSRQLANRIYKFRGDGKAWDWEVDTENGNYDYLMYADVDMDHPEVINELNRWGVWYANTLNLDGFRLDAVKHIKFSFMRDWLGHVRGQTGKNLFAVAEYWKNDLGALENYLSKTNWTMSAFDVPLHYNLYQASNSSGNYDMRNLLNGTLVQRHPSHAVTFVDNHDTQPGEALESFVQGWFKPMAYATILTREQGYPQVFYGDYYGIPSDGVPSYRQQIDPLLKARQQYAYGRQHDYFDHWDVIGWTREGNASHPNSGLATIMSDGPGGSKWMYVGRQKAGEVWHDMTGNRSGTVTINQDGWGHFFVNGGSVSVWVKR

SEQ ID NO: 31758 - protein, 485 aa, Bacillus sp.
HHDGTNGTIMQYFEWNVPNDGQHWNRLHNNAQNLKNAGITAIWIPPAWKGTSQNDVGYGAYDLYDLGEFNQKGTVRTKYGTKAELERAIRSLKANGIQVYGDVVMNHKGGADFTERVQAVEVNPQNRNQEVSGTYQIEAWTGFNFPGRGNQHSSFKWRWYHFDGTDWDQSRQLANRIYKFRGDGKAWDWEVDTENGNYDYLMYADVDMDHPEFINELNRWGVWYANTLNLDGFRLDAVKHIKFSFMRDWLGHVRGQTGKNLFAVAEYWKNDLGALENYLSKTNWTMSAFDVPLHYNLYQASNSSGNYDMRNLLNGTLVQRHPSHAVTFVDNHDTQPGEALESFVQGWFKPLAYATILTREQGYPQVFYGDYYGIPSDGVPSYRQQIDPLLKARQQYAYGRQHDYFDHWDVIGWTREGNASHPNSGLATIMSDGPGGSKWMYVGRQKAGEVWHDMTGNRSGTVTINQDGWGHFFVNGGSVSVWVKR

SEQ ID NO: 31759 - protein, 485 aa, Bacillus sp.
HHDGTNGTIMQYFEWNVPNDGQHWNRLHNNAQNLKNAGITDIWIPPAWKGTSQNDVGYGAYDLYDLGEFNQKGTVRTKYGTKAELERAIRSLKANGIQVYGDVVMNHKGGADFTERVQAVEVNPQNRNQEVSGTYQIEAWTGFNFPGRGNQHSSFKWRWYHFDGTDWDQSRQLANRIYKFRGDGKAWDWEVDTENGNYDYLMYADVDMDHPEVINELNRWGVWYANTLNLDGFRLDAVKHIKFSFMRDWLGHVRGQTGKNLFAVAEYWKNDLGALENYLSKTNWTMSAFDVPLHYNLYQASNSSGNYDMRNLLNGTLVQRHPSHAVTFVDNHDTQPGEALESFVQGWFKPLAYATILTREQGYPQVFYGDYYGIPSDGVPSYRQQIDPLLKARQQYAYGRQHDYFDHWDVIGWTREGNASHPNSGLATIMSDGPGGSKWMYVGRQKAGEVWHDMTGNRSGTVTINQDGWGHFFVNGGSVSVWVKR

SEQ ID NO: 31760 - protein, 485 aa, Bacillus sp.
HHDGTNNTIMQYFEWNVPNDGQHWNRLHNNAQNLKNAGITAIWIPPAWKGTSQNDVGYGAYDLYDLGEFNQKGTVRTKYGTKAELERAIRSLKANGIQVYGDVVMNHKGGADFTERVQAVEVNPQNRNQEVSGTYQIEAWTGFNFPGRGNQHSSFKWRWYHFDGTDWDQSRQLANRIYKFRGDGKAWDWEVDTENGNYDYLMYADVDMDHPEVINELNRWGVWYANTLNLDGFRLDAVKHIKFSFMRDWLGHVRGQTGKNLFAVAEYWKNDLGALENYLSKTNWTMSAFDVPLHYNLYQASNSSGNYDMRNLLNGTLVQRHPSHAVTFVDNHDTQPGEALESFVQGWFKPLAYATILTREQGYPQVFYGDYYGIPSDGVPSYRQQIDPLLKARQQYAYGRQHDYFDHWDVIGWTREGNASHPNSGLATIMSDGPGGSKWMYVGRQKAGEVWHDMTGNRSGTVTINQDGWGHFFVNGGSVSVWVKR

SEQ ID NO: 31761 - protein, 485 aa, Bacillus sp.
HHDGTNGTIMQYFEWNVPNDGQHWNRLHNNAQNLKNAGITAIWIPPAWKGTSQNDVGYGAYDLYDLGEFNQKGTVRTKYGTKAELERAIRSLKANGIQVYGDVVMNHKGGADFTERVQAVEVNPQNRNQEVSGTYQIEAWTGFNFPGRGNQHSSFKWRWYHFDGTDWDQSRQLANRIYKFRGDGKAWDWEVDTENGNYDYLMYADVDMDHPEVINELNRWGVWYANTLNLDGFRLDAVKHIKFSFMRDWLGHVRGQTGKNLFAVAEYWKNDLGALENYLSKTGWTMSAFDVPLHYNLYQASNSSGNYDMRNLLNGTLVQRHPSHAVTFVDNHDTQPGEALESFVQGWFKPLAYATILTREQGYPQVFYGDYYGIPSDGVPSYRQQIDPLLKARQQYAYGRQHDYFDHWDVIGWTREGNASHPNSGLATIMSDGPGGSKWMYVGRQKAGEVWHDMTGNRSGTVTINQDGWGHFFVNGGSVSVWVKR

SEQ ID NO: 31762 - protein, 485 aa, Bacillus sp.
HHDGTNGTIMQYFEWNVPNDGQHWNRLHNNAQNLKNAGITAIWIPPAWKGTSQNDVGYGAYDLYDLGEFNQKGTVRTKYGTKAELERAIRSLKANGIQVYGDVVMNHKGGADFTERVQAAEVNPQNRNQEVSGTYQIEAWTGFNFPGRGNQHSSFKWRWYHFDGTDWDQSRQLANRIYKFRGDGKAWDWEVDTENGNYDYLMYADVDMDHPEVINELNRWGVWYANTLNLDGFRLDAVKHIKFSFMRDWLGHVRGQTGKNLFAVAEYWKNDLGALENYLSKTNWTMSAFDVPLHYNLYQASNSSGNYDMRNLLNGTLVQRHPSHAVTFVDNHDTQPGEALESFVQGWFKPLAYATILTREQGYPQVFYGDYYGIPSDGVPSYRQQIDPLLKARQQYAYGRQHDYFDHWDVIGWTREGNASHPNSGLATIMSDGPGGSKWMYVGRQKAGEVWHDMTGNRSGTVTINQDGWGHFFVNGGSVSVWVKR

SEQ ID NO: 31763 - protein, 485 aa, Bacillus sp.
HHDGTNGTIMQYFEWNVPNDGQHWNRLHNNAQNLKNAGITAIWIPPAWKGTSQNDVGYGAYDLYDLGEFNQKGTVRTKYGTKAELERAIRSLKANGIQVYGDVVMNHKGGADFTERGQAVEVNPQNRNQEVSGTYQIEAWTGFNFPGRGNQHSSFKWRWYHFDGTDWDQSRQLANRIYKFRGDGKAWDWEVDTENGNYDYLMYADVDMDHPEVINELNRWGVWYANTLNLDGFRLDAVKHIKFSFMRDWLGHVRGQTGKNLFAVAEYWKNDLGALENYLSKTNWTMSAFDVPLHYNLYQASNSSGNYDMRNLLNGTLVQRHPSHAVTFVDNHDTQPGEALESFVQGWFKPLAYATILTREQGYPQVFYGDYYGIPSDGVPSYRQQIDPLLKARQQYAYGRQHDYFDHWDVIGWTREGNASHPNSGLATIMSDGPGGSKWMYVGRQKAGEVWHDMTGNRSGTVTINQDGWGHFFVNGGSVSVWVKR

SEQ ID NO: 31764 - protein, 485 aa, Bacillus sp.
HHDGTNGTIMQYFEWNVPNDGQHWNRLHNNAQNLKNAGITAIWIPPAWKGTSQNDVGYGAYDLYDLGEFNQKGTVRTKYGTKAELERAIRSLKANGIQVYGDVVMNHKGGADFTERVQAVEVNPQNRNQEVSGTYQIEAWTGFNFPGRGNQHSSFKWRWYHFDGTDWDQSRQLANRIYKFRGDGKAWDWEVDTENGNYDYLMYADVDMDHPEVINELNRWGVWYANTLNLDGFRLDAVKHIKFSFMRDWLGHVRGQTGKNLFAVAEYWKNDLGALENYLSKTNWTMSAFDVPLHYNLYQASNSSGNYDMRNLLNGTLVQRHPSHAVTFVDNHDTQPGEALESFVQGWFKPLAYATILTRDQGYPQVFYGDYYGIPSDGVPSYRQQIDPLLKARQQYAYGRQHDYFDHWDVIGWTREGNASHPNSGLATIMSDGPGGSKWMYVGRQKAGEVWHDMTGNRSGTVTINQDGWGHFFVNGGSVSVWVKR

SEQ ID NO: 31765 - protein, 485 aa, Bacillus sp.
HHDGTNGTIMQYFEWNVPNDGQHWNRLHNNAQNLKNAGITAIWIPPAWKGTSQNDVGYGAYDLYDLGEFNQKGTVRTKYGTKAELERAIRSLKANGIQVYGDVVMNHKGGADFTERVQAVEVNPQNRNQEVSGTYQIEAWTGFNFPGRGNQHSSFKWRWYHFDGTDWDQSRQLANRIYKFRGDGKAWDWEVDTENGNYDYLMYADVDMDHPEVINELNRWGVWYANTLNLDGFRLDAVKHIKFSFMRDWLGHVRGQTGKNLFAVAEYWKNDLGALENYLSKTNWTMSAFDVPLHYNLYQASNSSGNYDMRNLLNGTLVQRHPSHAVTFVDNHDTQPGEALESFVQGWFKPLAYATILTREQGYPQVFYGDYYGIPSDGVPSYRQQIDPLLKTRQQYAYGRQHDYFDHWDVIGWTREGNASHPNSGLATIMSDGPGGSKWMYVGRQKAGEVWHDMTGNRSGTVTINQDGWGHFFVNGGSVSVWVKR

SEQ ID NO: 31766 - protein, 485 aa, Bacillus sp.
HHDGTNGTIMQYFEWNVPNDGQHWNRLHNNAQNLKNAGITAIWIPPAWKGTSQNDVGYGAYDLYDLGEFNQKGTVRTKYGTKAELERAIRSLKANGIQVYGDVVMNHKGGADFTERVQAVEVNPQNRNQEVSGTYQIEAWTGFNFPGRGNQHSSFKWRWYHFDGTDWDQSRQLANRIYKFRGDGKAWDWEVDTENGNYDYLMYADVDMDHPEVINELNRWGVWYANTLNLDGFRLDAVKHIKFSFMRDWLGHVRGQTGKNLFAVAEYWKNDLGALENYLSKTNWTMSAFDVPLHYNLYQASNSSGNYDMRNLLNGTLVQRHPSHAVTFVDNHDTQPGEALESFVQGWFKSLAYATILTREQGYPQVFYGDYYGIPSDGVPSYRQQIDPLLKARQQYAYGRQHDYFDHWDVIGWTREGNASHPNSGLATIMSDGPGGSKWMYVGRQKAGEVWHDMTGNRSGTVTINQDGWGHFFVNGGSVSVWVKR

SEQ ID NO: 31767 - protein, 485 aa, Bacillus sp.
HHDGTNGTIMQYFEWNVPNDGQHWNRLHNNAQNLKNAGITAIWIPPAWKGTSQNDVGYGAYDLYDLGEFNQKGTVRTKYGTKAELERAIRSLKANGIQVYGDVVMNHKGGADFTERVQAVEVNPQNRNQEVSGTYQIEAWTGFNFPGRGNQHSSFKWRWYHFDGTDWDQSRQLANRIYKFRGDGKAWDWEVDTENGNYDYLMYADVDMDHPEVINELNRWGVWYANTLNLDGFRLDAVKHIKFSFMRDWLGHVRGQTGKNLFAVAEYWKNDLGALENYLSKTNWTMSAFDVPLHYNLYQASNSSGNYDMRNLLNGTLVQRHPSHAVTFVDNHDTQPGEALESFVQGWFKPLAYATILTREQGYPQVFYGDYYGIPSDGVPSYRQQIDPLLKARQQYAYGRQHDYFDHWDVIGWTREGNASHPNSGLATIMSDGPGGSKWMYVGRQKAGEVWHDMTGGRSGTVTINQDGWGHFFVNGGSVSVWVKR

SEQ ID NO: 31768 - protein, 485 aa, Bacillus sp.
HHDGTNGTIMQYFEWNVPNDGQHWNRLHNNAQNLKNAGITAIWIPPAWKGTSQNDVGYGAYDLYDLGEFNQKGTVRTKYGTKAELERAIRSLKANGIQVYGDVVMNHKGGADFTERVQAVEVNPQNRNQEVSGTYQIEAWTGFNFPGRGNQHSSFKWRWYHFDGTDWDQSRWLANRIYKFRGDGKAWDWEVDTENGNYDYLMYADVDMDHPEVINELNRWGVWYANTLNLDGFRLDAVKHIKFSFMRDWLGHVRGQTGKNLFAVAEYWKNDLGALENYLSKTNWTMSAFDVPLHYNLYQASNSSGNYDMRNLLNGTLVQRHPSHAVTFVDNHDTQPGEALESFVQGWFKPLAYATILTREQGYPQVFYGDYYGIPSDGVPSYRQQIDPLLKARQQYAYGRQHDYFDHWDVIGWTREGNASHPNSGLATIMSDGPGGSKWMYVGRQKAGEVWHDMTGNRSGTVTINQDGWGHFFVNGGSVSVWVKR

SEQ ID NO: 31769 - protein, 485 aa, Bacillus sp.
HHDGTNGTIMQYFEWNVPNDGQHWNDLHNNAQNLKNAGITAIWIPPAWKGTSQNDVGYGAYDLYDLGEFNQKGTVRTKYGTKAELERAIRSLKANGIQVYGDVVMNHKGGADFTERVQAVEVNPQNRNQEVSGTYQIEAWTGFNFPGRGNQHSSFKWRWYHFDGTDWDQSRQLANRIYKFRGDGKAWDWEVDTENGNYDYLMYADVDMDHPEVINELNRWGVWYANTLNLDGFRLDAVKHIKFSFMRDWLGHVRGQTGKNLFAVAEYWKNDLGALENYLSKTNWTMSAFDVPLHYNLYQASNSSGNYDMRNLLNGTLVQRHPSHAVTFVDNHDTQPGEALESFVQGWFKPLAYATILTREQGYPQVFYGDYYGIPSDGVPSYRQQIDPLLKARQQYAYGRQHDYFDHWDVIGWTREGNASHPNSGLATIMSDGPGGSKWMYVGRQKAGEVWHDMTGNRSGTVTINQDGWGHFFVNGGSVSVWVKR

SEQ ID NO: 31770 - protein, 483 aa, Bacillus sp. (in: firmicutes)
HHDGTNGTIMQYFEWNVPNDGQHWNRLHNNAQNLKNAGITAIWIPPAWKGTSQNDVGYGAYDLYDLGEFNQKGTVRTKYGTKAELERAIRSLKANGIQVYGDVVMNHKGGADFTERVQAVEVNPQNRNQEVSGTYQIEAWTGFNFPGRGNQHSSFKWRWYHFDGTDWDQSRQLANRIYKFRGKAWDWEVDTENGNYDYLMYADVDMDHPEVINELNRWGVWYANTLNLDGFRLDAVKHIKFSFLRDWLGHVRGQTGKNLFAVAEYWKNDLGAVENYLSKTNWTMSAFDVPLHYNLYQASNSSGNYDMRNLLNGTLVQRHPSHAVTFVDNHDTQPGEALESFVQGWFKPLAYATILTREQGYPSVFYGDYYGIPSDGVPSYRQQIDPLLKARQQYAYGRQHDYFHHWDVIGWTREGNASHPNSGLATIMSDGPGGSKWMYVGRQKAGEVWHDMTGNRSGTVTINQDGWGHFFVNGGSVSVWVKR

SEQ ID NO: 31771 - protein, 485 aa, Bacillus sp.
HHDGTNGTIMQYFEWNVPNDGQHWNRLHNNAQNLKNAGITAIWIPPAWKGTSQNDVGYGAYDLYDLGEFNQKGTVRTKYGTKAELERAIRSLKANGIQVYGDVVMNHKGGADFTERVQAVEVNPQNRNQEVSGTYQIEAWTGFNFPGRGNQHSSFKWRWYHFDGTDWDQSRQLANRIYKFRGDGKAWDWEVDTENGNYDYLMYADVDMDHPEVINELNRWGVWYANTLNLDGFRLDAVKHIKFSFMRDWLGHVRGQTGKNLFAVAEYWKNDLGALENYLSKTNWTMSAFDVPLHYNLYQASNSSGNYDMRNLLNGTLVQRHPSHAVTFVDNHDTQPGEALESFVQGWFKPLAYATILTREQGYPQVFYGDYYGIPSDGVPSYRQQIDPLLKARQQYANGRQHDYFDHWDVIGWTREGNASHPNSGLATIMSDGPGGSKWMYVGRQKAGEVWHDMTGNRSGTVTINQDGWGHFFVNGGSVSVWVKR

SEQ ID NO: 31772 - protein, 485 aa, Bacillus sp.
HHDGTNGTIMQYFEWNVPNDGQHWNRLHNNAQNLKNAGITAIWIPPAWKGTSQNDVGYGAYDLYDLGEFNQKGTVRTKYGTKAELERAIRSLKANGIQVYGDVVMNHKGGADFTERVQAVEVNPQNRNQEVSGTYQIEAWTGFNFPGRGNQHSSFKWRWYHFDGTDWDQSRQLANRIYKFRGDGKAWDWEVDTENGNYDYLMYADVDMDHPEVINELNRWGVWYANTLNLDGFRLDAVKHIKFSFMRDWLGHVRGQTGKNLFAVAEYWKNDLGALENYLSKTNWTMSAFDVPLHYNLYQASNSSGNYDMRNLLNGTLVQRHPSHAVTFVDNHDTQPGEALESFVQGWFKPLAYATILTREQGYPQVFYGDYYGIPSDGVPSYRQQIDPLLKARQQYAYGRQHDYFDHWDVIGWTREGNASHPNSGLATIMSDGPGGSKWMYVGRQKAGEVWHEMTGNRSGTVTINQDGWGHFFVNGGSVSVWVKR

SEQ ID NO: 31773 - protein, 485 aa, Bacillus sp.
HHDGTNGTIMQYFEWNVPNDGQHWNRLHNNAQNLKNAGITAIWIPPAWKGTSQNDVGYGAYDLYDLGEFNQKGTVRTKYGTKAELERAIRSLKANGIQVYGDVVMNHKGGADFTERVQAVEVNPQNRNQEVSGTYQIEAWTGFNFPGRGNQHSSFKWRWYHFDGTDWDQSRQLANRIYKFRGDGKAWDWEVDTENGNYDYLMYADVDLDHPEVINELNRWGVWYANTLNLDGFRLDAVKHIKFSFMRDWLGHVRGQTGKNLFAVAEYWKNDLGALENYLSKTNWTMSAFDVPLHYNLYQASNSSGNYDMRNLLNGTLVQRHPSHAVTFVDNHDTQPGEALESFVQGWFKPLAYATILTREQGYPQVFYGDYYGIPSDGVPSYRQQIDPLLKARQQYAYGRQHDYFDHWDVIGWTREGNASHPNSGLATIMSDGPGGSKWMYVGRQKAGEVWHDMTGNRSGTVTINQDGWGHFFVNGGSVSVWVKR

SEQ ID NO: 31774 - protein, 485 aa, Bacillus sp.
HHDGTNGTILQYFEWNVPNDGQHWNRLHNNAQNLKNAGITAIWIPPAWKGTSQNDVGYGAYDLYDLGEFNQKGTVRTKYGTKAELERAIRSLKANGIQVYGDVVMNHKGGADFTERVQAVEVNPQNRNQEVSGTYQIEAWTGFNFPGRGNQHSSFKWRWYHFDGTDWDQSRQLANRIYKFRGDGKAWDWEVDTENGNYDYLMYADVDMDHPEVINELNRWGVWYANTLNLDGFRLDAVKHIKFSFMRDWLGHVRGQTGKNLFAVAEYWKNDLGALENYLSKTNWTMSAFDVPLHYNLYQASNSSGNYDMRNLLNGTLVQRHPSHAVTFVDNHDTQPGEALESFVQGWFKPLAYATILTREQGYPQVFYGDYYGIPSDGVPSYRQQIDPLLKARQQYAYGRQHDYFDHWDVIGWTREGNASHPNSGLATIMSDGPGGSKWMYVGRQKAGEVWHDMTGNRSGTVTINQDGWGHFFVNGGSVSVWVKR

SEQ ID NO: 31775 - protein, 485 aa, Bacillus sp.
HHDGTNGTIMQYFEWNVPNDGQHWNRLHNNAQNLKNAGITAIWIPPAWKGTSQNDVGYGAYDLYDLGEFNQKGTVRTKYGTKAELERAIRSLKANGIQVYGDVVMNHKGGADFTERVQAVEVNPQNRNQEVSGTYQIEAWTGFNFPGRGNQHSSFKWRWYHFDGTDWDQSRQLANRIYKFRGDGKAWDWEVDTENGNYDYLMYADVDMDHPEVINELNRWGVWYANTLNLDGFRLDAVKHIKFSFMRDWLGHVRGQTIKNLFAVAEYWKNDLGALENYLSKTNWTMSAFDVPLHYNLYQASNSSGNYDMRNLLNGTLVQRHPSHAVTFVDNHDTQPGEALESFVQGWFKPLAYATILTREQGYPQVFYGDYYGIPSDGVPSYRQQIDPLLKARQQYAYGRQHDYFDHWDVIGWTREGNASHPNSGLATIMSDGPGGSKWMYVGRQKAGEVWHDMTGNRSGTVTINQDGWGHFFVNGGSVSVWVKR

SEQ ID NO: 31776 - protein, 485 aa, Bacillus sp.
HHDGTNGTIMQYFEWNVPNDGQHWNRLHNNAQNLKNAGITAIWIPPAWKGTSQNDVGYGAYDLYDLGEFNQKGTVRTKYGTKAELERAIRSLKANGIQVYGDVVMNHKGGADFTERVQAVEVNPQNRNQEVSGTYQIEAATGFNFPGRGNQHSSFKWRWYHFDGTDWDQSRQLANRIYKFRGDGKAWDWEVDTENGNYDYLMYADVDMDHPEVINELNRWGVWYANTLNLDGFRLDAVKHIKFSFMRDWLGHVRGQTGKNLFAVAEYWKNDLGALENYLSKTNWTMSAFDVPLHYNLYQASNSSGNYDMRNLLNGTLVQRHPSHAVTFVDNHDTQPGEALESFVQGWFKPLAYATILTREQGYPQVFYGDYYGIPSDGVPSYRQQIDPLLKARQQYAYGRQHDYFDHWDVIGWTREGNASHPNSGLATIMSDGPGGSKWMYVGRQKAGEVWHDMTGNRSGTVTINQDGWGHFFVNGGSVSVWVKR

SEQ ID NO: 31777 - protein, 485 aa, Bacillus sp.
HHDGTNGTIMQYFEWNVPNDGQHWNRLHNNAQNLKNAGITAIWIPPAWKGTSQNDVGYGAYDLYDLGEFNQKGTVRTKYGTKAELERAIRSLKANGIQVYGDVVMNHKGGADFTERVQAVEVNPQNRNQEVSGTYQIEAWTGFNFPGRGNQHSSFKWRWYHFDGTDWDQSRQLANRIYKFRGDGKAWDWEVDTENGNYDYLMYADVDMDHPEVINELNRWGVWYANTLNLDGFRLDAVKHIKFSDMRDWLGHVRGQTGKNLFAVAEYWKNDLGALENYLSKTNWTMSAFDVPLHYNLYQASNSSGNYDMRNLLNGTLVQRHPSHAVTFVDNHDTQPGEALESFVQGWFKPLAYATILTREQGYPQVFYGDYYGIPSDGVPSYRQQIDPLLKARQQYAYGRQHDYFDHWDVIGWTREGNASHPNSGLATIMSDGPGGSKWMYVGRQKAGEVWHDMTGNRSGTVTINQDGWGHFFVNGGSVSVWVKR

SEQ ID NO: 31778 - protein, 485 aa, Bacillus sp.
HHDGTNGTIMQYFEWNVPNDGQHWNRLHNNAQNLKNAGITAIWIPPAWKGTSQNDVGYGAYDLYDLGEFNQKGTVRTKYGTKAELERAIRSLKANGIQVYGDVVMNHKGGADFTERVQAVEVNPQNRNQEVSGTYQIEAWTGFNFPGRGNQHSSFKWRWYHFDGTDWDQSRQLANRIYKFRGDGKAWDWEVDTENGNYAYLMYADVDMDHPEVINELNRWGVWYANTLNLDGFRLDAVKHIKFSFMRDWLGHVRGQTGKNLFAVAEYWKNDLGALENYLSKTNWTMSAFDVPLHYNLYQASNSSGNYDMRNLLNGTLVQRHPSHAVTFVDNHDTQPGEALESFVQGWFKPLAYATILTREQGYPQVFYGDYYGIPSDGVPSYRQQIDPLLKARQQYAYGRQHDYFDHWDVIGWTREGNASHPNSGLATIMSDGPGGSKWMYVGRQKAGEVWHDMTGNRSGTVTINQDGWGHFFVNGGSVSVWVKR

SEQ ID NO: 31779 - protein, 485 aa, Bacillus sp.
HHDGTNGTIMQYFEWNVPNDGQHWNRLHNNAQNLKNAGITAIWIPPAWKGTSQNDVGYGAYDLYDLGEFNQKGTVRTKYGTKAELERAIRSLKANGIQVYGDVVMNHKGGADFTERVQAVEVNPQNRNQEVSGTYQIEAWTGFNFPGRGNQHSSFKWRWYHFDGTDWDQSRQLANRIYKFRGDGKAWDWEVDTENGNYDYLMYADVDMDHPEVINELNRWGVWYANTLNLDGFRLDAVKHIKFSFMRDWLGHVRGQTGKNLFAVAEYWKNDLGALENYLSKTNWTMSAFDVPLHYNLYQASNSSGNYDMRNLLNGTLVQRHPSHAVTFVDNHDTQPGEALESFVQGWFKPLAYATILTREQGYPQVFYGDYYGIPSDGVPSYRQQIDPLLKARQQYAYGRQHDYFDHWDVIGWTREGNASHPNSGLATIMSDGPGGSKWMYVGRQKAGEVLHDMTGNRSGTVTINQDGWGHFFVNGGSVSVWVKR

SEQ ID NO: 31780 - protein, 485 aa, Bacillus sp.
HHDGTNGTIMQYFEWNVPNDGQHWNRLHNNAQNLKNAGITAIWIPPAWKGTSQNDVGYGAYDLYDLGEFNQKGTVRTKYGTKAELERAIRSLKANGIQVYGDVVMNHKGGADFTERVQAVEVNPQNRNQEVSGTYQIEAWTGFNFPGRGNQHSSFKWRWYHFDGTDWDQSRQLANRIYKFRGDGKAWDWEVDTENGNYDYLMYADKDMDHPEVINELNRWGVWYANTLNLDGFRLDAVKHIKFSFMRDWLGHVRGQTGKNLFAVAEYWKNDLGALENYLSKTNWTMSAFDVPLHYNLYQASNSSGNYDMRNLLNGTLVQRHPSHAVTFVDNHDTQPGEALESFVQGWFKPLAYATILTREQGYPQVFYGDYYGIPSDGVPSYRQQIDPLLKARQQYAYGRQHDYFDHWDVIGWTREGNASHPNSGLATIMSDGPGGSKWMYVGRQKAGEVWHDMTGNRSGTVTINQDGWGHFFVNGGSVSVWVKR

SEQ ID NO: 31781 - protein, 485 aa, Bacillus sp.
HHDGTNGTIMQYFEWNVPNDGQHWNRLHNNAQNLKNAGITAIWIPPAWKGTSQNDVGYGAYDLYDLGEFNQKGTVRTKYGTKAELERAIRSLKANGIQVYGDVVMNHKGGADFTERVQAVEVNPQNRNQEVSGTYQIEAWTGFNFPGRGNQHSSFKWRWYHFDGTDWDQSRQLANRIYKFRGDGKAWDWEVDTENPNYDYLMYADVDMDHPEVINELNRWGVWYANTLNLDGFRLDAVKHIKFSFMRDWLGHVRGQTGKNLFAVAEYWKNDLGALENYLSKTNWTMSAFDVPLHYNLYQASNSSGNYDMRNLLNGTLVQRHPSHAVTFVDNHDTQPGEALESFVQGWFKPLAYATILTREQGYPQVFYGDYYGIPSDGVPSYRQQIDPLLKARQQYAYGRQHDYFDHWDVIGWTREGNASHPNSGLATIMSDGPGGSKWMYVGRQKAGEVWHDMTGNRSGTVTINQDGWGHFFVNGGSVSVWVKR

SEQ ID NO: 31782 - protein, 485 aa, Bacillus sp.
HHDGTNGTIMQYFEWNVPNDGQHWNRLHNNAQNLKNAGITAIWIPPAWKGTSQNDVGYGAYDLYDLGEFNQKGTVRTKYGTKAELERAIRSLKANGIQVYGDVVMNHKGGADFTERVQAVEVNPQNRNQEVSGTYQIEAWTGFNFPGRGNQHSSFKWRWYHFDGTDWDQSRQLANRIYKFRGDGKAWDWEVDTENGNYDYLMYADVDMDHPEVINELNRWGVWYANTLNLDGFRLDAVKHIKFSFMRDWLGHVRGQTGKNLFAVAEYWKGDLGALENYLSKTNWTMSAFDVPLHYNLYQASNSSGNYDMRNLLNGTLVQRHPSHAVTFVDNHDTQPGEALESFVQGWFKPLAYATILTREQGYPQVFYGDYYGIPSDGVPSYRQQIDPLLKARQQYAYGRQHDYFDHWDVIGWTREGNASHPNSGLATIMSDGPGGSKWMYVGRQKAGEVWHDMTGNRSGTVTINQDGWGHFFVNGGSVSVWVKR

SEQ ID NO: 31783 - protein, 485 aa, Bacillus sp.
HHDGTNGTIMQYFEWNVPNDGQHWNILHNNAQNLKNAGITAIWIPPAWKGTSQNDVGYGAYDLYDLGEFNQKGTVRTKYGTKAELERAIRSLKANGIQVYGDVVMNHKGGADFTERVQAVEVNPQNRNQEVSGTYQIEAWTGFNFPGRGNQHSSFKWRWYHFDGTDWDQSRQLANRIYKFRGDGKAWDWEVDTENGNYDYLMYADVDMDHPEVINELNRWGVWYANTLNLDGFRLDAVKHIKFSFMRDWLGHVRGQTGKNLFAVAEYWKNDLGALENYLSKTNWTMSAFDVPLHYNLYQASNSSGNYDMRNLLNGTLVQRHPSHAVTFVDNHDTQPGEALESFVQGWFKPLAYATILTREQGYPQVFYGDYYGIPSDGVPSYRQQIDPLLKARQQYAYGRQHDYFDHWDVIGWTREGNASHPNSGLATIMSDGPGGSKWMYVGRQKAGEVWHDMTGNRSGTVTINQDGWGHFFVNGGSVSVWVKR

SEQ ID NO: 31784 - protein, 485 aa, Bacillus sp.
HHDGTNGTIMQYFEWNVPNDGQHWNRLHNNAQNLKNAGITAIWIPPAWKGTSQNDVGYGAYDLYDLGEFNQKGTVRTKYGTKAELERAIRSLKANGIQVYGDVVMNHKGGADFTERVQAVEVNPQNRNQEVSGTYQIEAWTGFNFPGRGNQHSSFKWRWYHFDGTDWDQSRQLANRIYKFRGDGKAWDWEVDTENGNYDYLMYADVDMDHPEVINELNRWGVWYANTLNLDGFRLDAVKHIKFSFMRDWLGHVRGQTGKNLFAVAEYWKNDLGALENYLSKTNWTMSAFDVPLHYNLYQASNSSGNYDMRNLLNGTLVQRHPSHAVTFVDNHDTQPGEALESFVQGWFKPLAYATILTREQGYPQVLYGDYYGIPSDGVPSYRQQIDPLLKARQQYAYGRQHDYFDHWDVIGWTREGNASHPNSGLATIMSDGPGGSKWMYVGRQKAGEVWHDMTGNRSGTVTINQDGWGHFFVNGGSVSVWVKR

SEQ ID NO: 31785 - protein, 485 aa, Bacillus sp.
HHDGTNGTIMQYFEWNVPNDGQHWNRLHNNAQNLKNAGITAIWIPPAWKGTSQNDVGYGAYDLYDLGEFNQKGTVRTKYGTKAELERAIRSLKANGIQVYGDVVMNHKGGADFTERVQAVEVNPQNRNQEVSGTYQIEAWTGFNFPGRGNQHSSFKWRWYHFDGTDWDQSRQLANRIYKFRGDGKAWDWEVDTENGNYDYLMYADVDMDHPEVINELNRWGVWYANTLNLDGFRLDAVKHIKFSFMRDWLGHVRGQTGKNLFCVAEYWKNDLGALENYLSKTNWTMSAFDVPLHYNLYQASNSSGNYDMRNLLNGTLVQRHPSHAVTFVDNHDTQPGEALESFVQGWFKPLAYATILTREQGYPQVFYGDYYGIPSDGVPSYRQQIDPLLKARQQYAYGRQHDYFDHWDVIGWTREGNASHPNSGLATIMSDGPGGSKWMYVGRQKAGEVWHDMTGNRSGTVTINQDGWGHFFVNGGSVSVWVKR

SEQ ID NO: 31786 - protein, 485 aa, Bacillus sp.
HHDGTNGTIMQYFEWNVPNDGQHWNRLHNNAQNLKNAGITAIWIPPAWKGTSQNDVGYGAYDLYDLGEFNQKGTVRTKYGTKAELERAIRSLKANGIQVYGDVVMNHKGGADFTERVQAVEVNPQNRNQEVSGTYQIEAWTGFNFPGRGNQHSSFKWRWYHFDGTDWDQSRQLANRIYKFRGDGKAWDWEVDTENGNYDYLMYADVDMDHPEVINELNRWGVWYANTLNLDGFRLDAVKHIKFSFMRDWLGHVRGQTGKNLFAVAEYWKNDLGALENYLSKTNWTMSAFDVPLHYNLYQASNSSGNYDMRNLINGTLVQRHPSHAVTFVDNHDTQPGEALESFVQGWFKPLAYATILTREQGYPQVFYGDYYGIPSDGVPSYRQQIDPLLKARQQYAYGRQHDYFDHWDVIGWTREGNASHPNSGLATIMSDGPGGSKWMYVGRQKAGEVWHDMTGNRSGTVTINQDGWGHFFVNGGSVSVWVKR

SEQ ID NO: 31787 - protein, 483 aa, Bacillus sp. (in: firmicutes)
HHDGTNGTIMQYFEWNVPNDGQHWNRLHNNAQNLKNAGITAIWIPPAWKGTSQNDVGYGAYDLYDLGEFNQKGTVRTKYGTKAELERAIRSLKANGIQVYGDVVMNHKGGADFTERVQAVEVNPQNRNQEVSGTYQIEAWTGFNFPGRGNQHSSFKWRWYHFDGTDWDQSRQLANRIYKFRGKAWDWEVDTENGNYDYLMYADVDMDHPEVINELNRWGVWYANTLNLDGFRLDAVKHIKFSFMRDWLGHVRGQTGKNLFAVAEYWKNDLGALENYLSKTNWTMSAFDVPLHFNLYQASNSSGNYDMRNLLNGTLVQRHPSHAVTFVDNHDTQPGEALESFVQGWFKPLAYATILTREQGYPQVFYGDYYGIPSDGVPSYRQQIDPLLKARQQYAYGRQHDYFDHWDVIGWTREGNASHPNSGLATIMSDGPGGSKWMYVGRQKAGEVWHDMTGNRSGTVTINQDGWGHFFVNGGSVSVWVKR

SEQ ID NO: 31788 - protein, 485 aa, Bacillus sp.
HHDGTNGTIMQYFEWNVPNDGQHWNRLHNNAQNLKNAGITAIWIPPAWKGTSQNDVGYGAYDLYDLGEFNQKGTVRTKYGTKAELERAIRSLKANGIQVYGDVVMNHKGGADFTERVQAVEVNPQNRNQEVSGTYQIEAWTGFNFPGRGNQHSSFKWRWYHFDGTDWDQSRQLANRIYKFRGDGKAWDWEVDTENGNYDYLMYADVDMDHPEVINELNRWGVWYANTLNLDGFRLDAVKHIKFSFMRDWLGHVRGQTGKNLFAVAEYWKNDLGALENYLSKTNWTMSAFDVPLHYNLYQASNSSGNYDMRNLLNGTLVQRHPSHAVTFVDNHDTQPGEALESFVQGWFKPLAYATISTREQGYPQVFYGDYYGIPSDGVPSYRQQIDPLLKARQQYAYGRQHDYFDHWDVIGWTREGNASHPNSGLATIMSDGPGGSKWMYVGRQKAGEVWHDMTGNRSGTVTINQDGWGHFFVNGGSVSVWVKR

SEQ ID NO: 31789 - protein, 485 aa, Bacillus sp.
HHDGTNGTIMQYFEWNVPNDGQHWNRLHNNAQNLKNAGITAIWIPPAWKGTSQNDVGYGAYDLYDLGEFNQKGTVRTKYGTKAELERAIRSLKANGIQVYGDVVMNHKGGADFTERVQAVEVNPQNRNQEVSGTYQIEAWTGFNFPGRGNQHSSFKWRWYHFDGTDWDQSRQLANRIYKFRGDGKAWDWEVDTENGNYDYLMYADVDMDHPEVINELNRWGVWYANTLNLDGFRLDAVKHIKFSFMRDWLGHVRGQTGKNLFAVAEYWKNDLGALENYLSKTNWTMSAFDVPLHYNLYQASNSSGNYDMRNLLNGTLVQRHPSHAVTFVDNHDTQPGEALESFVQGWFKPLAYATILTREPGYPQVFYGDYYGIPSDGVPSYRQQIDPLLKARQQYAYGRQHDYFDHWDVIGWTREGNASHPNSGLATIMSDGPGGSKWMYVGRQKAGEVWHDMTGNRSGTVTINQDGWGHFFVNGGSVSVWVKR
